United States Patent Application Publication US 2011/0183924 A1 - sequence listing, part 200

SEQ ID NO: 472363 - DNA, 818 bp, Homo sapiens
cgtgctagttagcttgtgatacacatgctcacaaaggctggcgcttccttctccagcgaaaagcaaggcgatatatcacttcccgattcaaagcatccaactcatctacctttcatagcagtaactgatgatcatgaaatgtttgttgattgaatggctgaagtatagacagatgcagcttctgtccatgaaaggcatcctgcttgctccttgcactgtgtccagtgaaaactcttgtttctctgtgcagctgcaacacgtttcacatcacaaggagcacaaggcactggcttccatttccaccctgaagctcagcagccccatttgcgtcccatcagctgcctgctccggaatagaggagggaagggctgggcttcagagtttgcttttttttcttggttctgtgaatggaaaaggatcctgtgaagggatccagattgataccttggggtctggtcaccaacgaacacttccttgccgacacatagaagaaggagatgggggtcgcagactctgtacttccaggagaagcccccggaaggtcttagctggctcctgagggggcacatttgctgtgctcattgcactttacctggtgtcatgaagcataaagagcacaaacgtggacaccaagagtctacattaaagtcccactcctttatgtttgtaaatatgggatattgggaagttgctgcacctttttttgctcattttcttcactgaacagcagaaatagaaaaatttcttcttaatagggcttaagggagactcaaatacaacactgtatatgatgttcttttgcaaattgtaaagcaaag

SEQ ID NO: 472364 - DNA, 579 bp, Homo sapiens
tttgaagacctttctttgtaggctcaagggaagtactctcacttctgagctctaccccacagcaaacactcggaccagcagctagaccccgtatgcaatatacttgccactctgctgcaggtctgctggagtttgttggaggttcactccagaccctctttgcctggctatcaccagccaggctgcagaacagcaaagattgctgtctgttccttcctctggaagcttcgtcccagaggggcacctgccagatgccacctggagctctcctgtacgaggtgcctgtcaacccctgctgggatgtatctcccagtcaggatgcacggggagccagcaggcaggaatgtttaagtctgctgaagctgcacagctgccccttgccccaggtgctctgtcccacggagatgggagttttatctataggcccgactggggctgctgcctttctttcagagatgctccgcccagagaggaggaatctggaaaagcagtctggctacagcagctttgccaagctgcggtgtactctgcccagtctgaacttcctggcagctttgtttacactgtgaggggaaaacc

SEQ ID NO: 472365 - DNA, 751 bp, Homo sapiens
ccacttatatgaaatatccagaatgagtagaactagtcacagaaacaaacgttcattgagtgactctgcatcaaccgaatggagtgctggggttactgtattgtgtaactgccttaatttccccagggctaatggaaatgcaaggcacatagtaggtccacaatcagtgtttgtggctgaatggatcggaatctggtgggggagacacatcggatccgtcgtagtttctactgccaggaaacaagtatcccagactttgtggcttaaaacaacacccattccttatctcatggcttctgtgggtcagaagcctgggtacagctcagctggattttctgctcagggcaccaaaggcctcatgttggtagccatatggaaatacacaagcaaaactaaagacaaggagaccatttgggaagctattgcagtcaatggtattgactgtaactccagcttccgggatgtgaaagtttcccacctgcagccactgatctgcatttctggtcacatgggccacccctccccaaaagctgattggcccaggggcactgtcaaaagcactgtatatccttgaacctgctaaatcctcacaacaacttgtcagctgaagggtattatttcagggttgagagtggggtggagacagtgggggatccttacctctaactagggaaggactgaagtctacaaatgtgctttctgagccctcaatggaaatggattggaagctctggcctcgagaatgcagtcc

SEQ ID NO: 472366 - DNA, 776 bp, Homo sapiens
ccactaacaagcttttgcaagagggcaggatttgatggtggagcatgtggcaggaagacacaattcttcactctgtccgctctgctcagctaatggttactggctccacgcctaggtcctcaaaacactgggaccgcaagtgcaagaacgtacctgtccaggctctgaaacaattgtcatgtattcaagagatgaaactgtctagaagaaaagaaactgagcttcattcttcccctgccagtgaggaaccccgagggagtcctgcagaaagccaggcaaacggagccctgctggggggcacagactcagaggatggagctctggcactcagtgttgaaggtggggcctggtgggaggtgattggatcatggcggccgatgtcttatgaccgacttagtaccaaacccttggtgatgatgacggtcagtgaatttgcaaatatcctaaataatatgccacaaaaaagatgtcggattcctgtagctgtgagtgacaatgggtactaattatcccttactcagaaattaaatgagcagatttccccaacccccctcccacttggcaaaaggtctatatgatgtcctagaaaataataaagtgaatgaacccggtatgaaaggcagcgggcagcctcacactgggttctctgccgcttattaataccagcacattgcattaaattagagaagagccttttcacaggagtgctaagcattctgcctggctgccataaattgtactaactaccttgcatttctcctctcattttatctcat

SEQ ID NO: 472367 - DNA, 743 bp, Homo sapiens
aggactgaaaaggccatggagtcctcggggcgcccagccttttcgagctgccaaagacagtggatgtggtttgggagcaacactcttaagccactgggaccagatgaagagcagagtctggctggctgtgttctacggagcatctggattgtcaaaagcatccggcagcttgagggatgtgatggtggggaggagggtcgacatgtggtcttgttgatgggactgttgtgtccttcttcagaggagaaggtggtcaacaatatcttcctgtggcccgagagcctgccatgcgaagcgcaggtgctgaccaaggagacagaggtccccattagtaaagtgccagaatttcatctgagtattgtctgcctgcattgttcacaccaaggttcatgggcgggggatactcagcttagcaccttcaggatgggccccggacttgacgctagagccggagccttggtcctaggattggaagtgggcgcagtagattcaggcagtcatcgaaaacgcaaattaaaacaaccctgagatatcgttgctcgcctatcaggttggcaaaacccctaaagtacaccagctggctcagctggcaagcctgcaggaaaatagcgccctcacctgtggtcggtggaaatgcaaagtgacgtgacccctgtggggggagcaaaatcacatatgcatttaccctttgactcatcactgctacttctagggatgtaccttgaggataaaactgcacaaat

SEQ ID NO: 472368 - DNA, 673 bp, Homo sapiens
gagggtccgcggcttcattcttaaagctatttgtaaactgtcaaggcactgatgggagtgtcttatgctaatgagcagcgcgggaaaccagaggttgcctttggcgccacctgctggttcctgccagtgtctgtcttcatcctgttgggattaggaaataagtcccgctggtctcctacctcattaggagttgagtctgatgttgataaatttgaaattcctcattgtgtaggtgatacatcgaaagtgcatgagattagtaaaatagatgatgaaaacggacaacacaaagctaatcaaaattctttaacaaatgtttactatgtgaacaatttagattactcactaaaagaccagaaatacaatgtgtccaaaccagcagaaggaaacggaggaggagtaatgaaaatcttatcaaccctagtagaagacagaaaaggagagaaacaggaggaggaagcagggaagaagaacgaggagaagggggaggaaaaagaggaagaaaatgaagaggaataaaaaggctagtgaaccgaagcacaaaatatggttgtttcttggtatactctggaaattggtttcagaacctttgcatatgtcagagtccacgtgttcaagtcctgcagttggtcatggagaatgtgggtatgtgaaaagttggccctctgaatac

SEQ ID NO: 472369 - DNA, 766 bp, Homo sapiens
gggctcagaatgggggagtgcatgctgattggtccatgggaggacctggaaaaagcaccatttgattggctaaaagacattgaggaagttctcactctgactgtggactggcagctcggttttcaggctttaaattgtctttggtttgaagtgaaaacaattcaaatttggacccatggaacccaagatgcagttgaatatcagccaagagctcaagagaggctcctgggactcatgggcatgcagctcagtggccagacacattgtgaattgaccatggtagaaggcaatgtccaaatgctacaaacagagcctccatggattgttccttggaagcccgagaaggtctccatgaagccaagacataaatatgaggaagccggccatacacagggactgatcagtggtattatatatggaaaagaattctcacaagtccaaggaaaagaaaatatcactccggagtgtcaaccttttgccaagtttaaccacaagaagaaatttcgcagctgagatattaacttttcaaacaaaggatttatagtgtaaacatggaaacaggtttagctcttagtagtcactgcagggatattcctcaaagaaggacttatttaggtttgacctgttaatattttaatacatgatactagctatttacagaaatgtaatttggttgaatcttattttgttgctagagtttatagtatttctaagtgtggtgtcattagaaagcctctacaaaattttgaaaataaaagaaatgtat

SEQ ID NO: 472370 - DNA, 542 bp, Homo sapiens
gatactgaataaatgcattattatgttgcacaaggagattttattcttcaatagaaacttcattactgctttaaggaattcacagcagtcatcattacccttcttttacacaggaggactcagaaagctagagaagaaacagggagaaatccgggcatggacgcttagtgtgctagagggcaaaggcccacgtggctccgtcatccggggcttttcatatcttacgctgacccgcctgacttctctgatcctcagtttccacatatggatgctaagacaatacattcctccgaggcagatgtggagaattaatctgagaaataacaggatcatactaggggaaaaatcgcctttcctcgtaccctggtctcctcccctcaactgctggccaccccagagacaacttctgtctagtgctccgacatgctgatattgaaagaagaaaagggaaaagggccaggaaggattggttgaaaatttccctaatctgtggatagatgccaacaaccaggtagaagaaccacatagctctccaataaaat

SEQ ID NO: 472371 - DNA, 624 bp, Homo sapiens
gttttataggatttgggtccctgagagacatgggtgatatattacagcttgtaggtggtttggcaagacagatattactcccccttcgcaactctaatcaacttacgtattttaaagcagaggtaaagagcatagcaggtgccaagtcctctaaacaagaaggtatgtctttgaaggatgtctttgaagaattaagtgtgaagggagagcagagtaaaagggagacggacgtggatgaagctggaaaccatcattctcagcaaactaacacaggaacagaaaaccaaacactgcatgttctcactcataagtgggagttgaacaatgagaacgtatggacacagggaagggaacatcacgcattggggcctgttgagaagaagattgatggacataatgattcctatccatctggacaaaaaagggaaaaggctacatttaaaatgtctatagaggaactaaacatatagttctagaaaccagcatttgagcattcaaaagacatagcacaattctatacatgtccttcaaaatttttttaaaattcttttttccttttgtaaaatgtgatcttctaggaagcaggaactgtattttatctatgagtctggcatatatgaagac

SEQ ID NO: 472372 - DNA, 2584 bp, Homo sapiens
gtcattcctccttcttgttatcgtgtgaagaaggacgtgtttgcttccccttccaccatgattctgtggctaaagtgggccaaggtacagcttgggccatcacttcagagggtacaagtcccaagttttggcagctttcacattgtgttcagcccatgggtacacagaagtcaagaattgagggcaatgcagaatgggaaagtggggttgaagcccccacacagggtccctcctggggcactacctggtggagctgtgagaagagggccaccatcctccagaccccagaataatagatccaccaacagcttgcactgtgcatccagaaaagctgcagatactcaacaccagcccatgaagacagatgagagtggggctgtgccctgcaaagccacaggggcagagctgcccaaggccatggatcagcatgacccggatgtgagacatggagtcaaagtatatcattttggagctttaagatttgactgccccactggatttcagacttcctcagggccttgagtgagttctcatgagatctgatggttttacaacgggctttccccccttttgctgggcatttctccttcctgccatcatgtgaagaaggacatgtttgcttccctttctgccatgattgaaatgagctatggatgctgtatgcaatgatggagagagaacaaaatttggacttaggcaaacctgtggaaaaaaaatgatattttggcaaatactggctctatgtccttgcaaaccactaatacttcagcctgagtgccttatttctagaataatgatgataatccttatttatgcaggattgctgcaaggattggagatgaagtagtttacacacagtacatatttgcaaaggtattatttttgttattgtattttaggagctaaagcttattctatttaaccttttataattttattctatcatccatttgggactttcttttcattctgactttttcatagactcttattcctttaaaaaatagaatgactaaaagaaattataactataatattttgcactccagccagagttacaaatattattgtgacaaaaacagcaatgttaccactgatgatttttttaatgaaaaataaagacaaatgttgtaatatgccaagcatttagggaacttgagttgaacagttagattctgcatggtctagcaacctggaatgggaaggatggggcccttcagctgttcactgtaccttaaacttaagtcttatataatcagagaatttcagagaatgtgaatcatggaataacagatggtaataacttgacgacttagccttgtagagaaggaaaaaagtgatggcagctgatcagtgtgtatctagacttgcaatgcaaataagatacaagtaaaactgacaaacttgcatacactgctcttaatttatgccccagaaaagagatttttaatgaacaatcaaaaatccaatagagtgaactcttgattaactgcaaatgtagagcagaaaatatgtggataatgttctttaaaaataaacaacaataaaacttgctatatgaaattgaaaaacatactactctaagaaagcatatacactctcggatgctttcatactcagctttcagaattgaaacctgaagctgtcagattattagttgcttagactctctctctctatatgagaaaaatagtctaagattattactcacagatgtttgtttccatggtttttagtctaccaattcataggcttatgaacttttaatttatattttatctgtgaaatgaatcactgatttcagtgttggtcaccacaaattatcagtgactagaacagtgaaagccttaaaacactggtcagaaaacagggtcatgtttctcacctgtcattaagttgctgtgttgccctgagaaagttttttaatctttttggacttcacttttattattagtgaaatgaagacctcaaagtctctttttacagttcgaaggcttttggttttataacttttaaattattataagagaggtaacaatgcaagatactaataaggatctttaatatttaatcagtgcttatcatgtacaaagcatacttcaatgcatttcacattactaaatgtcttagtccattttgtgctcctgtaacaagatgcctgagacttagtaatttataaacaatagaagtttatttggctcatggttctgaagactgggaagtccaacatggaggggctgcatgtggcgagggctttcttgctgtatttcccatggaagaaggcagaagggcaaaataatctgcatgagaaagaaaagcaaagatggctgaacccttccttttatcagaaacctcttcctacgataattaacatactccctcaataatagcattaatccattcatgaaggcaaagccgtcatgacctaatcacttcttaaaggtctcacctcttaacactgttacattggagaataagcttccaacacatgaactttaggagacacattcaaattttagcactaagtcatttaattatcatccagtctctgtggtaattaccagtcactttattttataaatgc

SEQ ID NO: 472373 - DNA, 549 bp, Homo sapiens
agccagtggatgccatgttagcacagatacagaatgtttccagcatcacagaaagttgcactggacagctctggtctaagatctggttctttatcgggttatctgattcagaaatgtagtaaattatccagtgctgcctgctttggaggggtcaccagtgactcagcagtgggttggtggtggggccaaggccccctggggcctcgcctggaagctgctcactgtacctcaggccgcacgctgggagtcacagcaagtcagcaggccaacctggtgtggtgtgctgagggacagctccaagaccgtgtgtgccagggcggggggtacctctcaccactcaccacaggtcctgcggcctccaccctgacacttcctttttcccatgagctcatccaaaccacgacttgagtgaccacaaaccatggactgtggacatttcccagagctccaggctaatactcaccctcttgatacttgcacctgttcaaggggcctgacttcaccctgcagagaatcccacagaaggttctccatgccccagccccaacc

SEQ ID NO: 472374 - DNA, 1112 bp, Homo sapiens
gcattcttctttctggatgctaaccccaaatccgacactcaatggtgcacctcaggtacctgccaaggatctgtgggcccacatggaaggtgcagggtctgggtccctggatgacgaggtgaggggcagatgggtgaccagggaagggcatgacccagagctgccgggactcatggaggatgggctgtggctaggacttcaggaagggacgggcacagccttgacttcgggcaatggtcccccaatggctcgctgctgcctgcgtccaccctggcccgatggtgggcagacccagcggggctcccgcacctgcagcagcatgctgaggcccaggttgcgatgcttcttctccagctccgagaccgcctgcagcagtgacctgaaccgctcagtggggtcagccagctcgtcctcagggagcccctcctccttctcagcctcctgcaggaaatgctcctcctcctccacaaagaaggcccgcagcttcttgtagtcgtgagctatgaccataccactgcactccagcctgggccaacagagcaaggccttttttaaaaaaaatcaaaaaacagtgcaagatcaccctgacctccattctgcttcttaaaagcaaatgaaattcccaagtgaaagacgccctccccatatcaaataaaatgattttatcatcaaggacgacaggaagtcaaggccgacagaatttggtacagaccttgtgaaaacaactctttcaagcatccccacatcatgtagttgcttttttacaagtggctagtctttgtccaagtcagtatataagtgatttaattttgccactttgagtcttcatttcattataagggagcctgtgctgtataaaacttgtgttaaattaatatgcctggctggacacggtggctcacacctgtaatcccagcactttgggaggccgaggtggttggatcacttgagttgaggacctcaagcaatcctcctacacctcagcctcccaagttgctgggattacaggcatgaaccactgcacctgaccctgttagtttagcttatgtcagtttaattctcccgcccagcctggggccctaaaaggggagaaatagagttctttctcccct

SEQ ID NO: 472375 - DNA, 492 bp, Homo sapiens
agggtctctctgcactatttctatgcaagtgtccagcatgcatctgacagaggacatgctcctcacaacccacaccacttccctgaggaatccagactgggcctggaaggggagtcgggatgagcctggcctcggggggtggctgcctttgcccagcagggtgtcccagcagcgcccagacaccacggcagctcaggcagcccctgtacatgctgtcttgtgtgggcatagtcagggtctgcggctgtgggggattcagcacttcacagggcaggggacctccacaagcccctactgtgcctggggccactgcgacctgctggttctcctggaatcaatgtcggtgcagggctgtgtccagctatccctgaaaggtctgattatctcttctccccactgcatggtcaccctggtaaaaggccagaagtgcctttggggaaggctgggagaaaggtaagaacactaacttatttatttatttatttatttata

SEQ ID NO: 472376 - DNA, 1271 bp, Homo sapiens
attgttggaaagatcagtaatctatgtgtctgtccttacagcaacactacactgtcttgattactgtaaaccactctgggttgctgccatcgctgccaccgtcgtgccagcccctcaggtctccgcgaggccaggtgacgctcaagaatgggagacaagccagtttgggagccgattggatccagcttcaatcaacattactaccagttatttgataacgatagaacgcaactaggcgcaatttacattgatgcttcatgccttacgtgggaagtacgacagttccaggggaaagctgccgctgtggagaagttgtctagccttcccttccagaaaatccagaacagcctcacggcgcaggaccatcagcccacgccagatagctgcattatcggcgtggttgtgggccagcttaaggcggatgaagaccccatcaaggggttccaccagatgttcctattaaagaacatcaacgatggcttttgcgccaatgacatgttcaggtttgccctgcacaatttcggctgacctcctctcagccaggcactaatgctgtttcctcctcccttctcttcccaatactattcctactcctccagatgctccaaatatcatgcacaaataagcagggccgcggcgggagtgggcgcagtgcgctgctgccaccgaggtgttgtgcatgatgtttggacgctagactagttacatatgacaggagaagtttgtgttgtaccagcgcgtgccttggaaaggcttaagtaatgcaaaaggttgtccttagtttttggtttttttgtttgtttgtttttttaaatctactgacaggttgctttagtaacccaaagaagtgaaggagaaagcagctgcctcaccgcccagacattgatttgttcagatgtttcaatgccttatgatacaataaaaccacaaaaatttcctttaaaaattcagtcttctgatctatgaacatggaaaatatctgcatttatgtatgttttcttaaaaatttctaaacaatattttatagttttaagtgctcaagtttaggtcttgcaaatattttgcaaaacttatccgtaagtatttcatgtttttgatgatacaatgaatggtactgtgttttaaatttctgtttatagttgcttgttgctagtacagtttataaacatacaattgatatgtgtatattggccttttatcctgtgatgtttctaaacatccttcttggtaccagtagcttcttaaaagtttcttttggattttctacatag

SEQ ID NO: 472377 - DNA, 669 bp, Homo sapiens
cagctaactggccaccggagaaattgaagctggctgcagaaatttgcataagtaaagaggagctgaatgcccaagacaataaagatgcctcaaaggcattttggtgatgttcaccacagcccctaccatcacaggcctggagacataggagggaagaatgattttgtgggggcaggcccagggccccactgccctgtacaacctcaggacattgctccctggtcccagctgcttcagctccagctgtggctaaaagggccccagataacatcgcagtcaactgctccagagggtggaacccataaatcttggcagcttccacatggtattaagcctgtgggtgcacagagggcaagagttgaggcctgggagcttctgcctggatttcagaggatatatggaaatgcctggatgtccacacagaagcctgctgcaggggcgcagccctcatggagaacctctgctagggcagtgcaaagaggaaatgtagggttggagcccccacacagaatccacactggacactgcctagtggggctaacgactacaggaataagtcaggaaatccaagaggacccatagaccctctgaaggaagcagattgcaggacccaggagacatcccaaataccatggtatgcatggctgagagacccacagatggttcaca

SEQ ID NO: 472378 - DNA, 647 bp, Homo sapiens
ttgaggtggtgtcttctgggaagctgggacaagccaaagaaccgcaggaggagtgcattataagagggatggtggcagaggaaggaaatgaggcctggggggacatctggcaatggaggaacagggtggctaaagcagctctggctcccctggctctgggctctgagacagctccagtggccgtgcctctcttgtacaatcaggtcttcacctcagtggagtccccaccaagagatccagatctttatggcagccatgttgcctcctttcttgggtgtgtctctctgttcttgttgcttttgtctttggttactttccagaccaggatgagtagagtgaccagagtcatcaggggtgtaaagaagaagagaacatttaccaggcaagcaggattagatatggcagtggtgagtgtacccttgtcccataagaaagctggaagttgtggggaggacataagcttccaaaaagagctgagatagcttctattcaataagattttctattttttgtgccaagagtattcatatctttgtcagataattccaatatctgtgtcatctcggtgttgccatctgctgattttttttttcattcaagttgagattttcctggttcttggtgtgatgtgtgattttttaattgta

SEQ ID NO: 472379 - DNA, 649 bp, Homo sapiens
tattgtttgcagctgctgcggattgtttagaatacgttgctatgccccctgcctcaaagaaagaatatgcgaggtttcaacaaaaccactgtggttacacagttcatcctggtgggtttctccagcctgggggagctccagctgctgctttttgtcatctttcttctcctatacttgacaatcctggtggccaatgtgaccatcatggccgttattcgcttcagctggactctccacactcccatgtatggctttctattcatcctttcattttctgagtcctgctacacttttgtcatcatccctcagctgctggtccacctgctctcagacaccaagaccatctccttcatggcctgtgccacccagctgttctttttccttggctttgcttgcaccaactgcctcctcattgctgtgatgggatatgatcgctatgtagcaatttgtcaccctctgagtattgatttctggtttcattccaacgtggcatgagaagatgcttgatataattttgattatttttaatttgttgagacttgttttgtggtctaatatatggtctaccatggagaatattccatgtgctaatgaaaagaacctgtattctgcagcagtcaggtgacctgttctgtaaacatctcttagg

SEQ ID NO: 472380 - DNA, 1326 bp, Homo sapiens
ctagcatacgaccaatttccatacgacagaccctgagaccttctgggctgcctggggtgggcaatatggccaaggaaaagacaacttgggggccactgaaattaattttgcatcaatctctgattttcaacccccatcagcagcaagtttcaagcttcaaagaaatggaagaaatgcaattgacttacattcttggcagatgtcctacaataaacagggcctgtgaacaaaacattccacttccttccctcccgcttcaacccctaaaagatggctatgtaacgatcataacccatgactgccagcagaaaggagtgagagcagccaaggaagaggaaggaaaacatttggatggcacagcccaggaaagaaatggtcttcttctgggacagcaggtcaaccagcatcttgggtacaatgatgaaggtgtagcaaatctcagagcaagagaggatggcaaggaagaagtacatggggatatgaagggccctgtccaggacaatggtggaaatgatgattgcattggtgcccagagtgaacagaaaggatttgagatgatttaaaataggtactattaaggcaagaataaacatattacatagatatgttaacaaattagggcaaagggatattcatttttattattgatccaaaatattttatatgatatcaatactttattgattacatgtacttcaaatattttgtgtgactttgtaaatttcattttcactcagttgaagatgtcttttgatgaacatgtttacctattgtttagctgtcacttataagtaagaacatgtggtatttgacttagacttttgttctctttgactttttaaacaaaagattacttctgtactctttgacttcttgtattttcatatttcgtattcctaggcatagtaattctttctgctgacatacagaaatagaatttatttttgtattaccagctttgtataaggcaatcatgtaaatacatttcatttttaattcttatatttatctgcctattctcatgtaattttgtttttgtatctctgtactgtttatgtatttattaaggtacaattgacagaaattatatatatatatatttcatatccaatgtgaagttttgatatacaaatacatttttcaataattggtacaatcaaactaatcaatatacctgtcacctcacatagttacctttttttcatgtgtgtgtggtgagaatacttactgtcaacaacttttcaagtataaaatacattattgaccgtagtcaacattctgtacattaaaatatctaaagcttatgtatcttataactgaaagttc

SEQ ID NO: 472381 - DNA, 989 bp, Homo sapiens
ttgggaacattttatatgataagtgctctccatggagcaagtcaataagactgtggtgagagagttcgtcgtcctcggcttctcatccctggccaggctgcagcagctgctctttgttatcttcctgctcctctacctgttcactctgggcaccaatgcaatcatcatttccaccattgtgctggacagagcccttcatactcccatgtacttcttccttgccatcctttcttgctctgagatttgctatacctttgtcattgtacccaagatgctggttgacctgctgtcccagaagaagaccatttctttcctgggctgtgccatccaaatgttttccttcctcttctttggctcctctcactccttcctgctggcagccatgggctatgatcgctatatggccatctgtaacccactgcgctactcagtgctcatgggacatggggtgtgtatgggactaatggctgctgcctgtgcctgtggcttcactgtctccctggtcaccacctccctagtatttcatctgcccttccactcctccaaccagctccatcacttcttctgtgacatctcccctgtccttaaactggcatctcagcactccggcttcagtcagctggtcatattcatgcttggtgtatttgccttggtcattcctctgctacttatcctagtctcctacatccgcatcatctctgccattctaaaaatcccttcctccgttggaagatacaagaccttctccacctgtgcctcccatctcattgtggtaactgttcactacagttgtgcctctttcatctacttaaggcccaagactaattacacttcaagccaagacaccctaatatctgtgtcatacaccatccttaccccattgttcaatccaatgatttatagtctgagaaataaggaattcaaatcagccctacgaagaacaatcggccaaactttctatcctcttagttaaagagctattttttaaa

SEQ ID NO: 472382 - DNA, 1290 bp, Homo sapiens
aaattgcccagttgatatgcattggacaaaatctgatatgaaaggttgatggattccagtaaattagactctgggaaagggctgcatattaaccttgtaccaaacaaacaaaatcaaaccctcactattgtggacactagaattggaatgaccaagactgacttgatcaataacctcggtactgtcaccaagtctgggaccaaagcattcatggaagctttgcaggctgatgcagatatctctatgattggccatttcggggttggtttttattctgcttatttggttgccaagaaagtaactgtgatcagcaaacataacaatgatgagcagtacacctgggagtcctcagcagggggatcattcacatttattggatatcccattactctttttgtggagaaggaacatgataaagaagtcagagatgatgaagctgaagaaaaggaagataaagaagaagaaaatgaaaaagaagagaaagagtccgaagacaaacctgaaattgaagatgttggttctgatgaagaagaagaagaaaagaaggatggtgacaaaaagaataagaagattaaggaaaagtacatcgatcaagaaaaactcaacaaaacaaagcccatctggaccagaaatcctgatgatattactaatgaggacatatatggctggacagcaaacatggaaagaatcatgaaagctcaagtcctaagagacaactcaacaatgggttacatggcagcaaagaaacacctggagataaaccctgaccattccattattgagaccttaaggcaaaaggcagaggcagataagtacaagtctgtgcaggatctggtcgtcttgctttacaaaactgctcttttgtcttccggctttggtctggaagatccccagacacatgctaacaggatctacaggatgatcaaacttggtgtgggtattgatgaaaatgaccctactgctgatgatactgctgaagaaatgtcaccccttgaaggagacaacgacacatcatgcatggaagaaacagactaagctccagctgagggaaatatattttcaaggatatttttctttattttttgttaacattaaaaagtctgtatggcatgacaacaactactttaaggggaagataagatttctttctacttctaagtgatgctgtgataccttaagcactaaagcagagctagtaatttttttcttagtttcacattggcttattttaacagatcgaagtaatgtgtgttgcaggatgtgtgaaacatgatgtttactttgtggtct

SEQ ID NO: 472383 - DNA, 1060 bp, Homo sapiens
ctcaaggagagacactcctttgaagcattggagtgtggccagatatgccggctcctagttaagcccactcctcacagctgctctccgggctgcctttacttcatggttcctcagacagtaaatgatggggttgaggagtggaacaatgacagtgtagagaacagataccactttgttggaattgtaggcatacatgagtttgggacgggcataggtgaaaagtgtcatggaatagaagagaattacgacggtcaggtgggaggcacaggtggagaatgccttttggcggccctgagcagaagggatcctgaggatggtggcaaggatagcagctggattacaaatggctacatagcggtcaaaggccatgatagcaagaaggatgtactcagtgcagacaaaggtcacaaaaaagtaaagttgagtcatgcagccattgaaggaaatactcttgtcatgactgaggaagtcaacaagcatcttggggctgatgactgtgacataccacatctccaggaaggagaggtggctcaagaagaagtacatgggcttatgcagctgcccatcactgcagtagatggctgggttgaagaatggtacaatgatagtgtagagcacagagataatcttgttgtggttgaaggtgtacatggcccggggccgtgcataggtgaagagagtggaggagtagtagataacaaccactgccagatgagcggcacaagtggaaaaggctttgtggcgtcccctggacgtagggatcctcaggatggctgcaatgatggcagtgacaattgggaaataaaaagaagcttcatcatggagctgaagaagccactgccccaagaggcagcagcaaggcgagtggccagactggaaggcatgagactagggtaaaggaggggtccacagatggccagggacattcttcttctgatactggatagtagaagggttggacagcttctctaacaagctaagtagatgcctgtggctacttagttcccagtctgtgtcacttgcttcttacatcccaacctctggaacaaggcaaatggta

SEQ ID NO: 472384 - DNA, 1040 bp, Homo sapiens
tgctctgcagagctgtctctgctcacagaaggggaagaaacaagtttcttcttcctctctccctccccctttctctctctctctctctctctctctgggctaaattgtttggctactatgcatgcaggtacttgtgaggacgttcctaaaggtgtccactgggaagatctgatggatttggttgggcccacagaaaggcagtgtggaaatcatcacaatctcgggaagcaggataaggaaaccgaagaggcaggaacctgcagagagttgagcacagagccggggggtcatgatcatttgatagcgaagagggttgcagatggcaacgtatctgtcaatggccatggtgctatagatgatagggttgaaaaagggagcaagaactgcaaacatcagtgcaacagctgtgtccaaaatcggtgggaaagtggcagagaaacgcaggtacatgagggatacactgccatagaacatcagaaagacactaagatgggcggcacaggtagaaaaggccttctggcggccttcaacagagggaatcctcaggattacagtgatgattctgatataagaaaaggcaataatcaggacagagaatacaatggccacagcatggatcacatcctcaatcagaatcatggacgtgtctgtacaggccaagcgcagcacaggttcaaaatcacagaagatctggtggatttggttgggtccacagaagggcagtgtggaaatccatgcaatctctgggagcaacacaagaaagccaaagatgcaggaccccacagagagctgaacacagagcccgggggtcatgatggttgggtagcggagagggttacagatggcaacgtacctatcaatggccatggtggtcaacaaaatcccctctgaatttcccagtgaatggaagaagtacatctgcaagaggcaaccaaccatggagatggtcctctgcctgctgatgaggatggagagcatcttgggaattgtggcagttgtgtaccagatctccagaaatgagaaaatgctgataaaattat

SEQ ID NO: 472385 - DNA, 1085 bp, Homo sapiens
aaaggagaaaaggcttatagatccagtttccatttcccacacatatactgatccaggcaagatcaaagcagacactgaatagtgttcagtggttggatgcctccttcagacctacttcttccactccttgggagcgtctgaatgctaccttcttacagccatggcctatgatagatacctggccatttgtcggcccctccactaccctataattatgaccaccacactctgtgccaagatggctgctgcttgttggacttgtggcttcctgtgtcccatttctgaggtcatccttgcctcccagctcccattttgtgcttacaatgaaatccaacacattttctgtgactttccacctttgctgagcttggcctgcaaggacacatctgctaacattctggtggactttgccattaatgctttcataattcttatcactttcttctttatcatgatttcttatgcaaggatcattggggctgtgctgaagataaaaacagcatcaggaagaaagaaggccttttctacctgtgcctcacatcttgctgtggtcctcatcttctttgggagcatcatcttcatgtatgtgcggctaaagaagagctattccctgacccttgaccgaacacttgctatagtttactccgtactaacaccaatggtcaatccaattatctacagagtcggtcttgatgatatttatgtccccagtgtctccctgtcctcaccctttcagggtcaaagaagagcaaaacaaagaataatggtgaaagccaggtttctggtcattggaaaggacagttgtaaactaaaacatttcaaaaatggagagaactgtcttatgggtcaggaagcttccagtgctgtaaatccaggcagagggttgatgcccatttgtggcgatatggattcctttatgagtgagaagatatgagtttttgctgggctgaatcaaaattagaaacataagtacaaatatgaagtttgatacacatgatttatccttctattttagccttcctttttgtgatatttaaaggttttttctttttatgagctgttggaaatatataatacatttcaga

SEQ ID NO: 472386 - DNA, 1516 bp, Homo sapiens
catcacaccctgaagcgtgttgcgggggtgggagcctgggggagggttctacccatcacctacagataatggtgagtaaatacaagaacaatgttctgctgaaaggattagaagccatcaatgactatcacttcagcataattaattccttactgatcaatgatttaaaacttaattcaacaaggagagacgaatatgacaaaattcagattgccgacttgatggaagaaaagttcccaggtgatgctgcaaaaggaaaaacctcatcaaagaagaggaagcagagaaaagtaggtccaactacacctttagcaaccacagacaagaagttcacagctgaagaaggagaggagactcctatagctcagaaaagaaaaaacccaaccaaagaaaaggctggaaccaaaaggagtaagatatccgaggagcagactcagcctccctgtcctgcaggagccggcatgtccacagccatgggcattccccacctccccagacctcatcatcagctccacccaacacttcctcaactgagacagtccagcaggtgggaggaaaatccaaacaatgtccctgcactcacttctacgtagaagagtttttaatgatattaaggaaatagtattcttataagcttcaaaggaacattcaaaaggattataatacttgtgctaagtaataaagtatttaaagaaattaggatgacagggaagtaatttcatatagtgttcaagagaaagggttttgaataagacaaatctgatttgaatcctgaattcaacactcattagttgattgatattggagaaatagtttcactgatcccctaaaataatggaagtctccacttcatcagcatggttaaaatattaagtgagacaatgcatatttatgcatataagtttacatatatgtaaaatttatataacatatctcactgcctagtacatcatgagaaattaatctatggtaagcactacttttcctatcacggcaaagatattggaaggggatctaagcaatgaaaatgacacatgcaaatgctctaaagtgtgaaactgcactgtgagttctgtacaactaaaattctataaagagtttctatgaagaaactatggaaagatgcagcacagaataaaaattgggggcgggggcaggtggtagagtatagctgtttgtcagaaataaagaaacagaaaattcattgtgaaaaacagataaaacctaaagattttatgcagaagaatgtctgatcacattgacactttagcaaaaaaaaaaaaggtattatggtaacaattctagaagtatgcattagagaggcattaggttagagcagagatatcaattagaagcaatgatgtgcccaagtcagctctcaccagaacacttattgctaagtatttggggagtttatgaactgtttgtaaaatctttggaagtttgaaattagccatagtggaaatatttatgccagcaaaatatgcaaaggctacaaatagatattttctaaaat

SEQ ID NO: 472387 - DNA, 515 bp, Homo sapiens
ggaggtgcttaaccatgagaattccgagaagggctacgagcagagaagtcctacaacaatcctcagattctagtccccgtggaaagggtcgtgttaggacttctctgcgtggggcaatgccgggctttaaagcctgggatgagggcgagtgtgtctattttgagaaggcaggatttggtaatacatgggttgtcaagggaagcttcagtggagtgacagaagtggacattagtgagttcccaagtgaggtcagccatgaaccattcacattagaaaaacagcctctaatcttcacaaaatccatgaaaagtagatattattcccacattagaaatgggaaaactaaggctcagagaattctcagagggaatgctttcaacttttccccattcagtattgtgttggctgtgggtttgtcatagatggcttttgttatattgaggtatgtccattgtaagccagttttgctaagttttaattataaagggatgctggattttgttgaatgctttttc

SEQ ID NO: 472388 - DNA, 536 bp, Homo sapiens
acactgacagttaatagtagaagacacaagtgttggctgggatgtgcaacaatatgattttaaagtgtcttccaatcctcaaggtgacatctgttgaggtttgccaccagtttccagtcccagggcttccttgtggaccgctgtgcctgtgtgcccatacctgtcaggctgatgactgctgctgctattccttgtggctaagccaagaatggatgcagatacatttggtgttctcaccatgttcacaaaaggccatagctttttttcatgtggactgtgaaggcctaggaacgactgtgtgtgctgctttgagaaagttaaccaggttctgggcccagctccaaggagacacttctgactcattggaaaggcagaagagtgcaggagatgggaaagaccttcctaagcaagacacaacacctagagtcgataaaggaaaggaccgataagatttactgcataatttttaaaactgatataattgcagacccatagacaaaatgtaaaaaactctaagtacttattgtaaaatgtaa

SEQ ID NO: 472389 - DNA, 1469 bp, Homo sapiens
gccggctgctaggtgacatctgctgtgttcctgctaacaactatgctgattggaatggacattctcagcaagttacatgctttttcactgttcgatgacagggctaaggcccacagctacaatttagtcaggacattgccctttggctgccgctcagtgcccacaaattcaggatgttggcacagaaacaggtggtgtccatctgggctggtgaaagcacatgatcttctcttaacatgtgatgaagcaggcacccagagcagctcccaaacagcaggctctgtggccgccttcactgctgattccattaccactccaccacaagaggagcaagtaatcaaaggttcaaagaattcttctgtagcctgcagcacctactatgtggcagggtgtgtgcttggtgctgaagatactaagaagaatcataaaaatgctaagaagaagtccaaaagtcaaacatgagaatcactacttattaaactaattgatttgcagacactggggagacatcaatgatctctttgggggaagtacgtgaagagatatgctaagcaaagagaatcatggaaccgctaagagacaggcaactgggagataacttgatttagagtatcttaagcaaacaaataatccaacaacactattttcgttactggtgattcattgaggagggagaaaaggtttaggtttttaagtcagtcagtccaggctctgaattctgccccagttgctagctagctattgattgtgggcaagaaacataaactttatgagcaaatttttcctcatttgtaaacatgaaaataatacacatatcaaagaagtaaatgacagatgtgataagtacttctgaatgtaggaaaaagcaatcctttagtatttcctttatgtatttacatgctctaatatttggtgtatatgtctgtacatgtatgtacaattgttatatccccttgattaattgacatttcaatcattatataatgacctttgtaatctctttttacagtttttaacttaaatactattttgtctgatatgagtgtagctacgccttctacctttttgttttcctttacatagaatatctttttctatccctttactttcagtctgtgtgtatccttaaaggtgagacaagtctctcgtagacagcatatatttgggttttaaaaagttacattctatcattttatgtctttttattgaattatttaatttatttacactcaaggtaactgttcgtagtttgattattatgtgtcttggtgaacctttttatgggtttaatttgttagtttatttgggtgacgccatgaatttctgattatttttaattcttgtgcccttatgttggtgtctgcacatttgaagagacaaccacctcttccagattttacaagaattctttgacagggatagacttttccttatttagtctaacctgtgattttgaatggaccagctgg

SEQ ID NO: 472390 - DNA, 734 bp, Homo sapiens
ctgagctgttgctgacctgcatctctctgggaacaaagaccttgcctgtaacaacacagtataagaagccaaacagtgagtgtctctccactgtgataactgctgctatccccctcagtactcctgaaaacccatggagagtgtgatggagaggcatcttccgggtatcctgctcctcaccactctctcgagaggtgtgacaaggaaggagcaggcagcaatctttgctgttctgcagcgtctactggtgataccccggcaaagaggtctggagtggacctccagcaaactgcagcagacagacctacagaagaggggcctgatggttagaagaaaaactaacaaacaaagccacagcatcaacatcaacattaacatcaaggacccccacacaaaaaccccatccaaaaatcatcatcctcaaagatcaaaggtagataaatccatgaagatgaggaaaaaccaaggcaaaaacactgaaaattccaaaaaccagaatgcctctactcctccaaatgatcgcaaatcctctccaggaagggcacaaaactggatggagaatgagattgacgaattgacagaagtaggcttcggaaggcgggtaataacaaactcctctgagctgaaggagcatgttctaacctaatgcaagaaagccaagaaccttgataaaagattacaggaactgttaactagaataaccagtttagagaggaaaataaatgacctgatgg

SEQ ID NO: 472391 - DNA, 722 bp, Homo sapiens
tgtccttagccagcttggcacatggaggtcctttccaattaatattctcatgcatcaatattcacgtgctgctcttgctcaagaactcccagtacctgcccattacctgaagaatgaagtacaatattttattcagttcaccttcaagttctggatcttactgtgtctagtggagaagaaagttggggaaacaagaagagggcataagaaaaagatccagggcaataggacattcatgttgagttccccagacacaggctctaagacagagattcctatttcagagtttattgggaagtgcccttggcatcaaaacctaagtcctgataccacttacctagacaataaattcctgaaactaaactgtgagcggccccaatatctgataaacaatttgggattttgccaactgttccgctgttacagagaagagcaggcatcttttgctttgatttatgtactaccaagtgatttctcatcccgtgagtacactggaacttttaggcttgaagggtcttagagaactccccagggtccttgcctgaaggcaagataacatttttggtagatgaggaacatactctcaccaacttctttcaatagctacttcaaatatctatcaatctgtaccatctgcgtttctaaccaagaattctcttgttgcattttaaatacatttcctcctagcctttcctgtgaaatgacactaacaaactcttgcc

SEQ ID NO: 472392 - DNA, 1164 bp, Homo sapiens
tacggggacctgggtgtgcagggggctttggagtcagttctctgactggggttgcttctggaaactccctccagctccacagtagcccggggctgaggggggcaacctcagcgatgtcgaccgggcacggagaaggtcctggggctggcctgtggccaggaagcctggctgctgggtcctctaggagctgcccagtgcagagtgtggggagggcgcctggagccctctatctgcaggaacacatcccagtaatgcctgctgcctatgaaaagcctgtgaaacccgttgagaaggatagcctgtggccacacgactccctccaggattctgaaggaacagggagaggctcctgtctggaaagccagggggatgccaaacaggcagaggggctgaaggaaggagcagaagagaacgatcacgctatggaaaagcatgaagaggacctggggaaagctggtgacctgttgctggcctcatgcttccacatgaagatgccaggctgcaaaacggagaagaaggaagcccatgcagagatggcttctgagtgagagcttaggagcagctgcccgggtgcctgtaggcggtcagatttctagatgcacttcctgttcttgggttccgcaagacaccctctggctcttttgcatacattttaagcaactacttctgaagttgggaaatcaggagtagccgctgactctaaagagaaactatatcaatttggaatgtatttgcattatcagtgagtttactggaagtattaaagctggaccatcacttggagatgttgtaaggaaatgtgaacatttggcgaacagacctttaaataaagaaggaagccatgggagtggctgagatctccctgagagaaagtggagagatgttcagaggtaacttcgtttagaaacttttatttaaaaatcacatttagaaactagaaggtgtggggggacccagtaaaggagacagaaagggatttaccagagagttgccggagctacgattgtggtgtcaaagaaccaaagggaggagcaaatgcaagatctcaaccaataaggaagtgtaagcgacgaagggcaggccttggggtgggtcgactcagcagctccaccattttactgagagcccaggtgctttctacctctctgctctgctgtgcttggc

SEQ ID NO: 472393 - DNA, 1744 bp, Homo sapiens
ggcaggttcctccttcactcacatgctctccctctcacctgccaccatgctgtgtgcaaggcagcctccagcaggtggggctgtggagtcgcagaaggctggcagccttgagcggaacgcggcgctgctgccaccctctgatttggatggaataatccctgcgggtgaaatggggctgatgcttcctggaatccaccagaagtatgcaaattgcaccatctctttcagctgcctgcgcctgcattccatcgaggattccgtggtacaggtgcccaacgaccctttgttgacttggccatgggtacctgggcaaaccctcagctcctgcccttccactgacttccgtgcatctccatgcagagccacagggcctgcaggaatcctctcccataatccttcaagggccccacagacctgggaagggagagctgcccccatcttcttcccagtcatgctgccccaggactaacggaatcttcccatttggggcttgtgcaagagctgaactagccctgcctccccccactggttttacccacatcctcttcatctttctcaagggctggtagtgccccttggagtagggggacccgaccttgaagctttctcactatgtcccccaaggccctgaaggggctgttcattgcctttatcggctctagtcatggcggatgttatttattgtcagataaatgtatttccaaacaaaacagaaaacgaacaaataaacacagtgacagagctgtaaaaaaccctgccggctcgcttacttgtagaaaagcctgcacaactaattaacccgggtagacctctgtggtgtttggaaacaagcttggaattaatatcgccgttctcagctgctggaaccagcctctaaatctttattgggtagtagcaagagagagacacagagagttatagagacagtaagaggcgaagatggaaggagatagagtgacagaggaagataaacgcagctagccatctgcctccatacccatccatatcaccttagctatactctggatcctagacagacagatggagaaacagacagattgtgtctcctaagagcgagagataggagaaaacagagcctttgtcaagttcagagtacattttgcttccctatcattgaagtcagagaatcagaggctcctggactggaaggggcttgtgagaggtcatctaattcagtggtttcagaattatttttagcagcaaaaccttttcctgaaatgaaatcatacacagaagtgccgtgtataaagcagatgaaagtggagctgccccatttggagcttgctgctcctccaagcccctcccctctccaagcacagggcaggccctgtgtcttctgggtcttcagggctcaggagagcacagctggaaaattaaagctgcttggcctctggatggcaagcctttgggagtgttcctggttcttctctggattcaggcttagccgaatttgagagtcccccagaaagggggtgtggtagagtggatatgccagttggtgaaggaggtgggttacccaagggaacacctactctcttgccctgaacctgttgggttcttgaactttgatattcactttccctggggatcttttttggcaggagctgaggtactggcttgttgaccttgaggtaaggatggcctctcagctggtgggcttcaagagtcaaccacctgatccagacttcgcctggaggaggcttgtcatagctccacatcaagt

SEQ ID NO: 472394 - DNA, 945 bp, Homo sapiens
ctgatagtttccagcgggccctgatggtgggttggtgtgtggaactgctgcaagctttcttcctcgtggtagatgacatcacggattcatccctcacccactggggacagatctgctggtatcagaagctgggcgtgggtttggatgctgtcaatgatgctatgcttctggaagcatgtatctactgcctgctgaagctctgttgttgggagcagccctattacctgaacctgattgagctcttcctgcagagttcctatcagactgagattgggcagaccctggaccccatcacagcacccccagggcaatgtggatcttcgcagattcaaggaaaagaattacaaattgtcaagtacaagacagttttctactctttctaccttcctatagctgcagccatgcatatggcaggcattgatggtgagaaggcacacaccaatgccaagaagatcctgctggagatgggagagttctttaagattcaggatgatcactttgacctctttggggactccactgtgactgacaaagggcagaaggaggccaagaaggtggtccaggagaaggcactatatgaggagctagatctgctggccgtgttcttgcagtatgaggatgacagttacagccacagccacattatgggtctcattgaacagtatgcaatgcccctgctcccagccatctttctggggctggcgtgcaaaatctacaagcggaaaaatatgtattaagagatggggaaaaaatgtatcattcgcctgccttggaattccttccagctgatgacattctagaaacttttaatgaattaaagccacatttgcctgaagacgtcagcaaagttactgactgttttgaaaataaatatgtacatggtaggataagaaaatacacaatggtgttgctgtttgatcaccagtactgtttctgtcaaatctg

SEQ ID NO: 472395 - DNA, 1899 bp, Homo sapiens
agagcatgccatctatgagaaacgggctctcatcagacactgaatctgctggcacgttgaccttggactttccagcctccagaactgttcccatagaagaaatggtttccagaatgcagaagtggtccatgatgccagatgttgcaggaagagcaaataaggagaaaaagaatcctgcccaggaggcctcccaccccgacataggagggcaccacccacatggcatcagcctgcagctgatttcatattccatgctcatgacatagtaccttataggacatgtcacaactcacgccttccccttatccgccatcggggatagaacagaaagacataagcaccggcatgggcctattccacagccaaggcaggcaatgagctctcaggtacttgcaacaaactcgagtgtgcattcggtccaggaggaagagcccgcacccttttttgttgctgttcagtgttaatccttcggtggaacccaccaggacagcagtctcagtgctgttgtttttgacagggagaacatcccagggcagaaaggaaagcctaaagctacagcctgttcctctagttcttagaacagctggttactgagctctcaggccagacactggatcccggagagcttgtccactgcaacagtgcaacacgctaagggctgtgtggcggcacaggggctctgagctcctgacctgagtcatggggacctgaaggctgacacccagccctatacctacaagctgggtgagacccctggcagttgcctacacccctgctgagacccagtacctccctgtaaaatgggggaaataatgcctgcctcacagggtttcgatgaagggaaacatttggaaaccccttggaggagatctgccacatggcctccagtgaactgtagactcctgcatagccttccaaagttcttcatttggtgaatattatgagaaatgacaccgaggtgactggcacatggtcgaggcagctgcttaggcagcttaagcatgccctgtgaaacatccctgtgggggactccgaccagcccaggcaacgcggatcctgagaacgctcccgggtaggcatctgcccctgtgggatgcctcaccagagcagtgtgtggcaggcccccgtggaggaccaacacagtggctgaacaccgggaaggaacaggatcttggagtctggacatctaaaacttgcacatgtaccacccctagaatttctggtaaaccagcaccagcctgaagatcacgttctcatcaaacggtggaaagaagaaaaactcgagccaacctaggaaggaccccaccttgtgctgctaaccaccaagactgctgtggtcctccgtcgaccaggtgtgggctgcatggtagctcttttccaggattctacagcatggaataataagtcatgccaagctctctctgctatatcccaaagtcaggcaccctgcaggtcagcccccaagggccatccagcttccgtcccccaacactaagttcacttcgtgtttctcacgacagggaggaaacagcattccttggagacctaaagggatgcagtgagcttaagaattttcaagagcttatcaatcagtcagcccttgttcatccccgagtggatgtgtggtggtattgtggtggacctttactgggcactctgccgaataactggaggggcacttgtactttagtccagttgactatccctttcaccctggcatttcatcaaccagaaggaaaaaaaataagacatcataaagtgagagaagcctcctatgggtctttcgactctcatatctatttagacacaattggagtctcacgaggaacagcagatcaatttaaagcttgaaatcaaatagctgcaggatttgagtcaatattttagtaggtgacagtt

SEQ ID NO: 472396 - DNA, 723 bp, Homo sapiens
tgaagagttccttcacatcccttgtacatgaaaatggcaaatgagtccgcagccactcacccctcttcacttgctcaccaggcaaatggcttaatactccctggtctggagagctgtgctccttatgagaatctaatgcctgatgatctaaggtggaacagttttatcctgaaccatcctccagctggcccccgctgtctgtggaaacattgccttcctcaaaaccagtcacttggtgccaaaaaggatggcgactgctgggatagcccatttgtcagcttggaagcttgttctctgggcaattttgtaggaacagggtgggacttggtctcttttgttcactgctatgttcacagcactaataaaggtacctggcatataggaagtcttactcaaaaagcctttgttgatgagcgaatgaatgaatcctttgtgtattactgggtgtatgctcatcatttcatcaactcttcctgagaaagtgatgttggaagggcatagagagaccatctctaccttggacagggaaggatggaatgagtcttgtctgggctctgaccaatgtgcagttaaaatgatttaaataggacaggacaaagcctgctggcacatgggaagagctcttggtccacagtgcctgtgaaggaggccaggttcagaacgtgatgacaacttttgtatttaattaacatggctacagagggatcagcagcataatttaat

SEQ ID NO: 472397 - DNA, 725 bp, Homo sapiens
ctttatgaacacgaaggcaaaacagtggagtccttcattggcttctggatttccgttatattctaatgaaactaatgttcctgaagtcattcagtagtaacagtcatgatagtattcatgtcttctgggaggcctcagggagcttttacttacagggcaagatgaagcggagggagcttttacttacggggcaagatgaagtaggagcaggcacttcacgtggcaagaacaaacgtttattgaagatgaccttagaagagagacgcaaagaatacctaagagactatattcccctgaacagcattctatcatggaaggaggagatgaagggcaagggccaaaatgatggccccactgctgcaggtcagctggagtttcttggaggtccactgcacacccggtttgcctgggtatcaccagcagaggctgcagaacagcaaagattgctgcctgttccttcctctggaagctttgtcccagaagggcacctgccagatgccagccggagctctcctgtatgaggtgtctgtcgaccccggctgggaggtgtcacctagtcaagaggtaaaagggtcagggacccacttgaggaggcagtctgtcccttagcagagtgtgagggctgtgctgggagatccgctgctctctttagagccagcaggcaggaatgtttacttctgctgaagctgcgctcacagccgccccttcccccagggatctcacac

SEQ ID NO: 472398 - DNA, 570 bp, Homo sapiens
ccagcatctaagatggcctccagtgatccttgcctcctggtgaccacatccctgtataatgccctcccatgctgcccatgcattctgcataagcaacagaatactgtagaagtgacaaagaaccatctgagaagcacctcaatattaaaaatggaaaaggaagcaacattttccagcacttatgagttacaagaaaagagaatcaactcagtggaaaatatacataaagaccttggacgttccaaacccatcatttctaatcaagagttctgtttttggtgccatcagaaatttggggctttaaaatataggagagtgaacctatatgcactcaccttcccccatgacctcactgaaataaaagtaaataagcacaggggaaaaaaaaaaccaaaacaaacaaacaaacaaaacatgtagtagggagaggtagaaagcaataaactggaaatttcaacaaatcctaaaataaagtgaaaggggagggttaatggttaaaatgggtagaaaatgccacgggctagaatacacaagataaaatgacaattggaaacttgagagaaacaaaat

SEQ ID NO: 472399 - DNA, 672 bp, Homo sapiens
cagtaagctgtcttccgaaaacttggaaatgagggaaattcgaactcccagcccgctgtgggccagatcatgtattctttggacacagtgagggtgagacaccttcaacaggatggtgaagagctgctgggtgtcagctgggctgccacgattgcctggatactcccaatcaatgtccagcccatcgaagttgtacttcctcagaaactgtatggctgactgcatgaagattggctggagcttccgggatacacaaggccagaaagctggaagtctgagtctaggagagagcaaggaacaccggcagtggaagcatctaccatttactgagtgcctgctaaatgccagagagatgaagcaacttgaccgagatcatccaactcgtaaggtggcagagccaggactcacacctaagtcctttataccatggtcctgctctaccaatgaagcacggcatgagagtgactgtggacagcattcaaaggctaaacattctgctgttggtatcttttggggaaccctctcatgggatacttacccagctgcagcaggagggccagacctaaagacaaaaagatcttggtcagagggtgccagggtcatcctgtctctggctgggaaggggcaagcctatggcagccatggccagtaaatggggaaagggagatgggg

SEQ ID NO: 472400 - DNA, 1349 bp, Homo sapiens
agctggtctggaacatcctctccgacagacagcagctcccttgtcctgggtgagggtggttcagtcaatcacatggtggtgggggagagtctaaggccatggagcagctttttggccaccctccaaccacggaatggaagttcgtgtgcaggtgggccccctccaggcgagtgcagaggcagtgtgaagacgttggcagtgaccagcgctgccccagacagccttgtgctcgtctgtctgctcaccgcagctgctcctacctgtgtcctgtgcacacgcatgctgctcccggttcagttgctggcccaggcccgccagcgccagtacctcgagttctcgctgccccgcagaactcacctgtgggaccagggactaactccaccagtagcggtgcctggcagctattggtgtcccctggccctgtcggccaagcagccgatgctggtggagacagtggcactgctgagaaccacaagctgctggcagttgcacgtccgaccgcacagatccccgtggcgctggaacttcctgagtgggaggagaggcgccttcccgctgggccagcccgcgctggccatcaagatggtcattgccttaacagggagctctgcagggcagccctcgagagcctccatggtgctcctgcagtcctccggctttcccgagattctggatgccaataaacagccagccgaggctgtcagcgctacagaacctgtgacgtttaaccctcagaaggaagaatcagattgtctacaaagcaacgagatggtgctacagtttcttgcctttagcagagtggcccaggactgccgaggaacatcatggccaaagactgtgtatttcaccttccagttctaccgcttcccacccgcaacgacgccacgactgcagctggtccagctggatgaggccggccagcccagctctggcgccctgacccacatcctcgtgcctgtgagcagagatggcacctttgatgctgaggtgacgttctgcttctagaacacctcccttgtttgttagctgggatgcttccaaaaccagaaacttcctggcatcaactttttgcttaccttgaggtgcagtttgtataggaaaggctggataatacttgattcttccctttatttgccaatttctgaagtaattacatgattccctggcatccttcaaggatggggactaatgactttttttttcttcgggtatcattgtaaacgaatagattgaagctacattgaatagaaacacacctgacatgttgatatttttattgatggtcagtttccccatcttggtcagtgactcagctcataagggacccagctggggtctgaaacactgcc

SEQ ID NO: 472401 - DNA, 995 bp, Homo sapiens
ggccctgtctcagttcatcatgctcactgggggaaaccacaatgctggggaaacccagcccttgccttgccccttgtccatacctgtgcagccggagagacacctgcgggtgtgctgatgtcacggttcaagtttttaacctcatgtgggcccatgatactgcccggtcaggtgctggtggtccccgtccacgcttcccattctccaagtatttccctggccatgtcctgggacctgtacacaggtgcccacttcttacaccccaccactgggagtcttcgacagctctcacacagaagaggaatactgtggtcctggaagttgctagacaaacctgttcaggactgaatgaccaagtgccccagaaacatgggttggtgtgggtggtgcccaagcctgacccctgcctgttttctcatacacggttcacgttgcccccagcagaagtggagagtaaggggctcactggctatttctccaaaatgcgttggttggtgtggaattgggtacaacctggtactttctactttggctggctggctgttgagaaatgttggattagttataatagcaacaaaaacatagctgaattcaaaggatgcccgaagggtctgcagaccatatttggagaactgctactctacagacagccttgtatctgtgtacagagacatgagcaagaatgttctgtgttaacaacgtttacactaatagaaattcggaaacaatttaaagttcatcagtagtagaaggggcaaataaattgcagtattcttatataatgaaatagtatatagcagttgaaatgaataagctaaggctgtgtgtatatatgtataaagatcaaaattcagtggggaaaaaaacaagttgcaaaaagaaatgtacagcacggtaccatttatataagcttaaaacgtaaaaaatatttgttgtttatggacgcctacgtatatagtaaataaaaactaaatggaagatagcagctgcctctg

SEQ ID NO: 472402 - DNA, 2250 bp, Homo sapiens
gccgcctaactgcaacttttttttttttttttttgagacggagtctcgctctgccgccccagcgggagtgcagcggcggtgctttttttgtgtagatggttgtttaatttggcgttcctgcagggtgatgtatgggctcctccatcccagacctgagaaacagccctgagggccaaccccagcagacacacatccaggcctgccaaaaaggcatgtggccatgtcccaggcctgcaaaattgccctgtgggccaccctcagtagatatttccctaggccaccaagcagctatgtgcccatggtttgttatgtaggtatacgtgtgccatggtggtttgctgcacctattgacccatcctctaagttccctcccctcaccctccccagccccccaacaggccctgtggagggggtgtgcttcgctggggggaaacccgctcatctgggctgcctggattcctcagaactaccagcaggaaaggctaagtctgctggtctgcagagactgtggccacctctccccctaggggctcaggccctaggagatcagggttttgttcctgagcctctggctggagttggtggagttcctgcaggaaggccctgtccagtgaggaaggatgggtcagggtcaggctaggctagtacttctaaattcaggcaatatttctgtaaaagacagtcatatactgataatttgtcaatgttagcaacaggaatgtcaaatatctcatacatttgccatcacacaaggaatggcctcaacatcaagaatcagcaaggacagaacagatatattcacagaagcaggagatatttttgtctagtagccagtactacatcaatttacaacaaggaccttctatattactgcattcaggattacatcacagacctgacaaaatttctaatcattcttctattaagcaagactatactcataaagcgggcagcagtaaacaccatgggccaatttctgctacacttagaataattccttagaaaatatcttcagataaatatagaaaaaaaatgtaagctagaaactcttgatcttaatgtgcaggactgaaattatggattttagtaccacatactgataaaagcaccaataaagaagagctgtccttgtggaaaattagttgacgtgtaaggttggaatttatatctgcactgtttattctgcttcattgggctatgtgtctgtttttgtgccagaaccatactgttttgattactattgctttataatataatttgaaatcaagaagtatgatttctccaacaatgtttttctttctcttgattgttttgactactctaggtatcttatgattccacaaaaattttagacttttttttctatttttgtaaaaaaaaatgcatttggaattttgataaagattgtgttgaatctgtagatcttttggggtagtatagacattttgacaattttaattcttctaatccataaacactggatctttatggatttttttcaatgtgcaggtgtttcacttccttggttaaatttattcctaggtattttattctttttgaagctttcatgaataggtttgtttctttatttctttttcagatagtttgttattgatgcaagaaatgcaagtgatattttaacattaattttgtattctgaaactttacttaattcatttataagttttgtctacctaaaagagcaacagagagagtggttcttcaaagacatacatttattcaggaacaagcagggaattataatctgggatatgagtgctagaacagatcataggcatattcaaagatgttaggacaaggagaagctattaaggcaaaagggggaagttcatgcaagctgtcttaaagttgatcagtcacagaagcccattgcagggactggtgattactcattggtaacactaattgccgttgggaagatgtcttcatagaagcaatttatctggaattttttgtgctttcagagagttcttataatagttcttaccatgggcatatgtgcctcaggccttcagagagtcttggtaatagttcttatctcagacatacaagcatgaggacccctccttcatgacctgccagctgtgcagccttgggtctaatataagtgactcaattttgccataggcagcttttatattttccccttttgatcaagacctttctctgaaagcattgctgctaaatcaatctgcagttaggttttaattgtccttcagtgctggaatc

SEQ ID NO: 472403 - DNA, 1125 bp, Homo sapiens
gtgacgaagggtgaccggggtttgcttgggtttgggcttctctgagttcccctgctgaactagtgatgacatgtccatctccttgacctctgacgctccacgcctgctcctctggttacgaacccaaatcccaaaggccctagggtctcataacaacacatgcccaaacgtcttgggaactgatgtaaacagtggggccgcagggcagcgaggagaatgtgacacgtctccatcttctggtggccacagccctgtcatgtgtctgggcagctcagccaagaagcatgaagccataatactggtcagtctataccgcagtcaagcaccaaacccagagtcccagatgggccacagggagccagaggagatcatgaaaggccagaaaaacaaagctcaagcttcctggaggctgtgtggccaggacagagagatcagagcagaatatctgccccctgagattaaaggagatgaccaatttaagggatttctccaaaggtctgtggtgaatggtgatggtgacagtgatgattatggtgatgacagtgatggttatggtagtgatgacagtgatgatggtgatggtgatggtggtgtggtgaatggtgatggtgatagtgatggtgatgatgatggtgatggtgatgatggtggtgtggtgaatggtgatggtgatggtgatgatggtagtggtgatgatgatggtgatggtgatgatggtgtggtgaatggtgatggtgatggtgatgatggtagtggtgatgatgatggtgatggtgatgatggtggtgtggtgaatgatgatggtgatgatgatggtgatgatggtagtggtgatgatgatggtgatggtgatgatagtggtggtaagtggtgaatggtgatggtgatggtgatgacggtggtggctcagcagatacaatcttgaatccttattcatcaaagagaaggtcaggagaaatgagcctccctctcccccaacccctgagttagctccatttacagaaacctcatccccctcctgcccccatccacaggcatctgcctctggccaccagtgacaccaggcaccaccagaaacactcagcatcatctctcctccctgaatcctaactgctaaaccagtga

SEQ ID NO: 472404 - DNA, 1653 bp, Homo sapiens
aatttacaacacatccttttatcacagtctggctttctctttgtctctctctctctctctctctttctctctctctctctcctctctcctctctctcctatctctcctctctctcctctctctcctatctctcctctctcctctctttctccctttcctctctctctctcctctctcctctcttctctctcacctctctctcttctctctctcctctctctctcttctctctctctcttcctctaatctatgaacttttgttttttttggtgggagggggagtgtgggggtgctgtggctatccccacaaatgttcccttggctcattttctacctaatgtagagcagccttcttttgacatacacatctgggaaggctactcactttcacgacgagatgccactgctgcctccagcatggtttactgtctaactggtccagaagacatttctcagagaagagacttctctcctgagcctttcagcttcctgctctgtggaccagttactctccaggccaatggagaatcccctttgccaccagcctgggcattcccttcacctctctcctgtgttggagctgttccttcctggcgttcgtgcgctctctctctcctggtgtggtggagcatattgtcgagtagcttcttaagacacgatacttggaagtaagtttgttgaaatttttgtacgtttgaaatatatttatcctggctggtccaaatgcagtggttacaactaactgatcacaaccagttacagatttctttgtttcttctccactcctactgcttcactggactagcctgggggaaaaaaaaaaaaacaacttttcaaagtttcttaataaaaaagaagaaaagaaaaaaataataaaatatatgtatcttatcactacgcatcttgatagtttagctaattgtctattcctagactggaaatactatttctttataatcctgaatgtagttctccactgtcttctgtcttccaaggtagttgctagttactaaacttttgtatgtgacctttttttactctctggaagttctttatattacttctttgttcctggtgtactgaatttcctaaggatgtatcttggtacagtttattttaggggaatgttttttgggcttttactctaaatgcttatgtagtttggttttccaaaatgttataaaattattcatttgataattctgttttattcatttttctctgttatagctttctacaacgtctattagtttgatgttagaattctccattttccttatgttttttctcttcttattcatatctttgtgttttactttcagtgagacttcatcaacttcatgttccagttcttcttttaaatttttaatttttgctatattgtgaatgtataagagttttttcttattctcttcaaattccttttttatagcatccttgactctctggggatattaattattgctttaaggtaagtttttttctgttctttgtttgcttttttttttttcttttttttggagagcttttcttttctctctgctttttctgtgatagacctttctaaaaaatccagactctgctttgcattcatttctaagagtaatacactgaaactctctgtgattgagtgagacttaatactgctgaaat

SEQ ID NO: 472405 - DNA, 715 bp, Homo sapiens
ccaggtgccagtgggcagaaaggagctaagtggaagagagaatgcaatgggcctctttgaccccaagcatgtttctaccccttgactctgaggccaggaatacaatggtggccctcatagctgtggctcttgctctcttggctcttacaactgggccgtgtgaatccataagttgctatgggagcacagaggaaacttctagctcaactgccttgagggctagtaaagtctttctagaggaaagacagaacagtgctactcggagaaataaacaaacaattctctgctttgtggctggcaaggagggcctgaccttcactactcaatggcaaagaaaatgtgatctctcctccctcctaaaggcctccaggttccttttcctagcagactggaaggaggagccaaaggaagcccagaactggctctgggcagggaacctccgccccttcacctacttagctgaaaatctgttagaggcattagaggggcccagggacatccaactgagcgtgggtgtgtgccacagcaaagatttactgaatcggaatctggcttttaataagatctaccggtgattcatatgcatattaaaatttgagaagcacaagcatagagtagtttcaaaaacgtttcttatttatttaaacaacttgacataagtattattagataatctgattgcacattctctggttataacaaacaggaggacaga

SEQ ID NO: 472406 - DNA, 1149 bp, Homo sapiens
ttggtgtcatcatctgtgggatggggcagaggggcaggttgtacagtgatgcagttgcagcagaggtctcagttgatctcacaaggagctttggagctaggatggcccttaaggctgggaagccaaggcctttatgtcctctcattgatcagttactggatgtgggctgcccttgggtgctctctcctctgcagcacaatccagctctttccttgcagagaagagctggcgatgctcatctgtgaggaggtagaagctgacccacaggacgtttccttgggaatgtttgtggagctgtgtaaccttgtggatgccgtgaatgtctctgtgcttcagcctcctcgcctgcaagaagtatggcagattcacatcttgaattatatggtgcccaaccgtattagtgattctgattccctggtgaatatggcaaccagtgaattgggaagtggggacaagtcactgttcctgtcttggccttggaattttgatctggaaaatggggatggggaattgtggatgactaaagatttctgagctgccttccagctctgctgttctgtgatggcccataatatactccaaggaaataccccaaaagagacaaaaggaagtaatttgtatttacttgttcttagaaatgctatttttaaaaattggaagcaacccaaatgcccaaccattggggtttggtttgaaactcacagtctatttgcattctagaatatgatagagctattaagaatgacaaatatgggaacaatgtcaaggcatggacaaatgtgtacatacaaaacaagaagtggcaaaggggctaagtagtatgtattttctgatgacaactatgcaaaacatggacctgtatttgttcaatgaattgatgaagatgagatgcaagttgccgtaggtttgaatatttatcaaatggtttttgcttataataaaaataaaatggattcttttatactcatagatgaacagaactagctacacaatctgcaggcctcaatgcaaaagaaccatgtagggctcctttttcaaaaactaataatttcaaggtggcaattgcagagctgtaagccaagagtgggcccttctgaccatgaggccctgtgcaactgctctgtacatccaagccctagctagagctgt

SEQ ID NO: 472407 - DNA, 1512 bp, Homo sapiens
cctccacctgtgtggagggcatagcagggacatagcgagagtgggatgccataaatgactgaagtcaaggttgtaatggtccagcaacatttgcagaatcctgaaatggtgcacagaatcctgaaatggacaatcacctggaagcactgctgtagagggacttccgcattgagaggggactggagccaactactcccaacacctcctttccagaattccaagtctcaggttctgttcctcctagagaaaccaggagcaaagttccatgggccatgtcctcaaccggaggacaggagcttgggtcagaagggcaagcctagtccgaagcctgagaggccccaggatctgataggggagttcgtttttcatggcttagtgtccaattggtcagttttatttcagattttcatgcaaaatttccttggaataaagaataataatgatgatggtggtgatgatgatgatgatgataagaactccccctgccttggattgtaaatgccctgggtctcaaacctcagctcctttttcatccttggtcatccagcctcaggcttagccagcctggaaccctgactttgaaaaaaaaatcttcctctccttgaatgcctttatcacctgcacctttttccttagcctggagtacttttccttcagctcaaatgccacatcctggggaagctctcaccgacccttaggcagggttagccccccacccactatactcactgctgccctgcccatggtacacaccttttaacacagtttagattcacattttggcactgccatctcaggagctccctgaccttgagcaaacctccctccctggtgactcagtttccccatctgtaaaattgagatcatcataatacccgctcctattgttggggagtttaaatgaagtcacataagtaaagcactaggctctgtacctggcacattttacatgctcaaaaaatgttagctgctatgaatattgttattcagtgaattttggtaaccaattttgggctctgtttcctgcaccttttccctgtcatggctttagcacacacagctcaaatgcatttgcattttcttctcaattgactcttctgacaaggatggcaggttcctgtgacaataagagtagagaagcaacgtcaggaagaggaaaagaaaggagaaaagtggggttttttctaaccatagaaagccttctcaccctgccttatggcactgtgttattaagctgcgatccccaccagtgcctgccgtctttggtcagggagcacagacctctctgagagcatcctagccatcttcctgcacacagcaggatgcagttaggtccccctaccctgcggtccctggagcttgtctgatctcctcatggtgagtgtgccgttcattgccttcttgttgggctgccttctggaccataagcacctcaaaggcatctgcatttgttccccctataacccaagcacccagcagtttctttgcccaaaaactggttgttgattaatc

SEQ ID NO: 472408 - DNA, 783 bp, Homo sapiens
aacttatcaatagatggagggcagagcctggggcccccagatgttgtgcgtggtgccagcagtggcaggtcctgaagggcaggtcctctggtccccagacagcatgtgtgatgttggtggtggcagtagcagcggcaggccaaccctcagaacaccaagcagtgcacacaggcaccagcagtggtggtggcagtctgggtgtgctggaccacagtctcctgggtggtacatgtgggcaggggctggtagcagcaatgtcagtgtagacaggcaagtacccctgcttttaggaggtgcatatgggcacaagcagcatgtggggtggtcctgtccttatactgctagacagcattcacatatactagtggcagcacacagggtgggtctatacccaaaccactgcacagtggatgcaggcccacgcactgactttttcatgagcactcagtagagtccacagataggagttggtgaatgaatattaactcccttttggtgccctcactattctagactggcacactaacccacacttagcctttggaagctcctttaaaatgtgattggtttcttcttccccacttgtattgtggcctacagctttttctcatgtggtttgctacaggttgagtttcctaattaattaatattctagatcatttaaaattttggacaagttcttgttagatctgtttagacaaacattgctttttattgaaatatggctgaaatgttcattattaagagtggagagaatgtcagctgacactttcttgtttgctc

SEQ ID NO: 472409 - DNA, 734 bp, Homo sapiens
ggacgtaaccggcgataatgatgacacctcgctgtctgcggcagtctcgggagagcgtccctccaccgaaggccccagtggggcgcagcagtgttagtctgagctacctgagaaaaacaccaacagataacgccggccctttgtggacagcagtggacaggaataataaattgccagcagataaccgatatttgagtgggaactcacagggggatccaaaccagctgcctatctttctgaatcatgtcagaatgaatgatgcagccaaaataaacaaaaatgtgcctctgatatatgtggattcttgcatgaaattaaagggaccggggcacagagtgtgtctagaaaacaaaaagttctcaaaactcaacaataagataacacacaattcaattaaaaatgaggcacaagatttaaacaaccacttcactaaagaaaagatataaatggcaaatagcacatgtagagttgctcaatattattagtaatagggaaatgcaaattaaatccatgataagatatcactttactactgttagattaacttaaaaaaaaaaacttatgataccaagggctgtccctttacatatttggattaaaaatatgtgggtggtgaatagagttggggtttggggaacaagtaatagagtacagagtgcgatctctagttttttatcattttccccgtttctcccaagttacattccaagttttaaattttccacaagaaagac

SEQ ID NO: 472410 - DNA, 616 bp, Homo sapiens
aagaacccatcactaaaacccttgacggtattccgttctttctaatgatcatggactcgatttgggccaggcagcccagccctgaggacatgcagccactgacatatgctgtggtgatcaggtttcccccaagcatccatggtagatatgaggtctacattcatgccccactctcagcaaaaggtctccatttgggcgcctctgaggtgcctcagagaaagaaccgcccccagaaaggcaggagacctgcgttccgcctgcctgtggtccctggagccttcctgcctcctctgcaccaggaaactcctcaacagaaacgagcagaaagagatcaatgctatcctgaaaaagagccccaaagctccaccgatatgattccaggttttgacaaatgtcacctactcaaggaggccctcagtgtagaccaggagcggacactcactccccttacacactatacttctccttggaaacactcctctcacgggagatccttctccctctccccgctgaacctcattgcttcaggggcagcatctgttcacagcatcctcatagcaagtagtagttctcattaaatgcttattaaataaatctgtagcattactttgtgtcc

SEQ ID NO: 472411 - DNA, 613 bp, Homo sapiens
gaaaggcaggaattagttgtaaggcgaggctcccaagaagcaccagctccactttggtttacagctagagtatgatgaatggaattttcttcacattgactacgaggctgaagtccaagcacttaaggacgaacacaattccatcccgtaatccattagtcacagcctcatcactgacaagcctccactgtgtagagagccagcggtccttgtcatattgcagggtggggcccgcactgaggtaccgttctaggaaggcctggaagcagaggagaaaggccattagggaagaaacagcctgttttaagggcagtactgccaggcggctatccactctcacatctataaagaactttttccaaataaaccagcttagaccagagcccagctcatcacactcaattcccatcagaccctcacaactgagtcattactggggagggaagacttcttggacttcctcactcccctttacctactatccaccaagcgcaagaatagtggtacccacagaggggagggaaaatggggtggctggtgtcagtgtctggctggaagccgtcatggctgcatcactccattcttagggtatatatttttttcatctgtggag

SEQ ID NO: 472412 - DNA, 2238 bp, Homo sapiens
cctgagagtgtagtgggaaccccttaatttgaaaccagctggtcagaagagagggtggtctggggaccccagagcctgtgactggtggactgaggaagaccacttcctagaccagtattgctgccagcaatctagaccagcacagtggcctaacctaatgtccctcaccaaggtggaaatgtttggctgttcaaggctggcttctgcacagcgaggggcactggcacgcacgcacctgtgggactcgcaactggaaaaatgcatgaacagatgtacaccgcgtcctggttccagccctgaagggctccatccgtcctggtgcctgctctgctaccttgctacgaatttgttccggcttccaatgtggctgcagctcctgagtgacgttatccagatccatggattgccaagcctggatggcagctgcgggaacgcctcctaccagccctcccctggcacacaggccgcttgggagtgcgggctgccactgccgccaactacctggagcgcccggagagactgctggctcttcctgcgtattcctgctccctgcttccagtccccggacccctgggaaaggctctgtaggagagggtcctgctgcatctcaaaggccccccctgcagggagcctaaccagcactcctcccccacccccacacgcacttgatggagagatgacatttgatgatgatgtgtgtgtctgtggtgcaggatctgtgctagaaccagacaaacaatgcatcagcaacagcactgccttcgagagcttatagtctagcatagcttctgatctcagacaagttactggacttctctaagcacagctttcctggactgtggacattttttagggggaggtcctggcccagggaagtgaaacaaaaatagaagagacccgtactttccctgaatcaccccctgcttctagcacaactgccctaaccttaacccaggcacttaagaattactttgtttcctaaagcctctgaagggaaatttacaagcctccgtctttaacccttcaaagccctgcatgtgtacctcatctaggaagcttacttccaggattcccgtccacactggcctcccctttccctttgcccctgcacagttttttcctggggccccacagctgtcactgcacagcttgaggcttgtggaggtggtgccatatggtgtggagggcatagtagtgggcaagggggcacatgtgaatccaggtacctcctcttactacctgtgggattctgaccaacttaacctgtctgggcctcttctaagcacctctatgaaaatgggcttaatatttgcacctacctcagagggtctctgtgcagattaaatgagctgcccactgctcagtcaatgtaaattgagtgtgcataaggcaatgagtgcaccctgagaatgggttcatggaagcagatctcaagaagcgccctgcctgatgctctgcacgtaacagctgagagatttctataactgtgtttcaaaagcctgactccccttccacccctggcccaattttcttctgaatcttttcttttggaagagaacaaggaaggacattttccacctccctatacctttacagggaggtgggtggggctgccctgggcctgtggtcacccaccccctcatcctacccccagcctaacaatttttccctggggacctggggcagggaaaggaggctttggaaacaaaagtcaggtgtgtgttcaggctcagactcttacttatgacccaaggtttgccgctcaacttccctgagactcaatatcctcattggaaaatgggaatgttggattgttgggagtgtgattgaagatgagacatgagaaaagatcccgtgaaatctggagcattttacaggcttagcaaccatgactactaaaaaaccttcccgcttacttaccttcaggtcttctgatcccatttgcactccccaaactgaaatcctctttctctctgagatcttcttccaaccctgcctccttccttcctccagccttaatgaattgcttgttcccataggacttggcacagaacggataatttttcttctccctttaggctgccttaatcctttcttttgcctttttgctgccttttacatcttaacatttatgataatctgcccttagtactaatgacagcagagttcttacaatgttcgctgcagcacgctaagagctttacatacattatctcattacatcttcaaagcaaccca

SEQ ID NO: 472413 - DNA, 840 bp, Homo sapiens
aaaggtgaggaagggcacactagctctcctccgactcaatgtccctcaccccctgcgaccaagccttgcccccaggaagctggtgacagagggagaagaatgcaggggtgtaactagccgctcgcatttctcccatctgatcctcacgtttgctttgtgtgcctggtatggcattaatgtctgagggatgagtcgtcacagggactcactcctctttaaaaatggaacttggagtaattcgaacaagagaggagcaggaaaggaggaccctgtagggaaggtgcatgtcgagattggcgagaaagttctactgaatagtgctcaagagaaaataaattctatgcttaaaagtgtgactcaggaatttgacattggttctcctgtgtgtgctgaagagatgggacaaatgtcagccccaaacgacaaagctcaaggtttgtgtgtcaaatacctagacagccagtccatctggttagtcagtttggtggaggaaaagaaattaaactggttagtaaacatcgtctgtagcagtgatgacattgctagcttcttatataatttccttttcaactattcagtcattttacaaacatttgtggggtacctgttatgtctcggcaccatgtctagacgctggggatacaacagtgacaagacagatgttgctcttagccctgtggagctcacagtcctgtgtggccgagtgttagtctctcagctgaaacactgagcatttccagagcggcttaacatttctctcccaggacgtgtttcaactaactgcctgtggctgtcaataaaaagatacagccaagttctaaagatcccaaattgggtttc

SEQ ID NO: 472414 - DNA, 568 bp, Homo sapiens
aatgtatcattttgcaaggctgcatggtgcactgcagaacttcccaaccagtgccacagatgggtagcatgtggcccagaaataatgatgccctcatcccttggagtagcctgggatggcctagcatggtggcgcctcctccgtgtaccccagtgtgccatgatagtgttattttctgtgtcatgacatgcaaaagattggaacataccacagtacctctagttcatagaagtcgctgggctctattctccttccaggccaaaaggggagtagaagtcggagaactgagccccagtatcccctgtcagcccactgtgtccttgggcttgcacgtgcatgtcccacccagctccagggcgttgtgggatgtgggtgagtatgccttgattcctggctaagcccatttcccacatgttctcacatgaaggtggtagctggcactggttgatggcatgcccctgagggcctggcctgagttgagcataactcttttgttacctcattttatactcatgacaaccctacgaggtgtagcatccttcatccctatcttttcaggtctagaagg

SEQ ID NO: 472415 - DNA, 824 bp, Homo sapiens
atgatctgaaagtttgtgattagcaagcctctgcaacccagaccaagccggagccatctggacacgtttagatgaatggaggtgagggaggagtcctggcagcagcttgggaggccgcccagagggaactcctggaggcagctggagtaaacaagtgccgagtggctggtgaaatggatgaactcatcaatggctggttactcactaattcacactgtatgggaatgctgcactccctggttgcagggtcagcctcttccatggaaggattgggcatctgccaggtgacccgtgggagtaacctgcactttctaaacttttctgtggagctggggagggtaaagggagcagcaggcttggcagtccaccaagcgatagggaatcataggatgtccattaatcctgatgacaggctccaaaattgcaaagggattgccctttgccagatcacaaatatctacgcatcattactggatatcgcctaaatcaaatatctcttaaggggttttaaaatgtcagtttctatttctatcacttctatatttatttgatgaaattttattgagattctttttctttctatatttattaatgagattattttcaaaagaagagctttcttttattaactaggactctttagtgaccctgaattttaggttatgggaatttgtgcatatttctccactatttatactgataaggagtttgactatccccctatatatgaaaaaacgttccctattataaataacatgcttataaacatcatttttcataacttttttctttaatcctatttttcatattgtttccttaggata

SEQ ID NO: 472416 - DNA, 967 bp, Homo sapiens
tggggacaccgctgggggtccttgccagagggagagggtgtgggcaatcagagtgacctatttttcaccatgctctttgccatcctcccttttgtgttctccattgcagctgaggagaagacctccaaagctgccagcttcccccagctgcccttggactgccgagggggccccagagacgggccctctaacttgcaaggctccccaggcccctgcctggccagcctgcatcttcctctttccccgggactccctgactccatggagttggccaagaacaagagcaagaagcgtcgtaaccgcacgaccttcagcacattccagctggaggagctggagaaggtcttccagaaaacccactatcctgatgtgtatgcccgggagcagctggccctgcgcacagacctgactgaggcccgggtacaggtctggttccagaaccgcagagccaagtggcggaagcgcgagcgttatgggaagatccaggaggggcggaaccccttcacggctgcctatgacatctctgtgctgccccgtactgacagccaccctcagctgcagaactccctgtgggccagtccaggatctgggagccctggaggcccctgccttgtgtctccagagggcatcccctccccatgcatgtctccatattcccacccccatgggagtgtggctggcttcatgggggtgccagccccttctgcggctcaccctggcatctactccatccatggctttccccccaccctggggggccacagctttgagccttcctcagatggtgactataagtctccaagcctcgtctcgctcagggtaaagcccaaggagccacccggccttctgaactggaccacgtgatcggttgcatggacctgcagaatgagctgcccacctctttttccattcccagtcgctcccagcccacctctgcctccaagccccagatggttctggaggctgc

SEQ ID NO: 472417 - DNA, 699 bp, Homo sapiens
cgatggtggttttgtcgaaaagaaaagggggaaatggtttgaagaagcaacagggttgggaagccacagagagcaatgagcacaggcccaaaggttgagagaagcaacaaacaggaaagggattccccatgggccttgcacagaatcagacgttggcaaacagaatcaagtccagaactaagaattacagtacctgatactctccccgggcctcctctcacccctatacaccttaaaaactgcccatatgtaacatatttaggaacacgaaccattctcagtgtcctcactgccaggaattttctctcagcatctacactttgctttgtaaccctaagccagttccaccatggaaagctgctgggcaccctggatgggacagaccaggaaattgctgatttcaccctgagctccctcaggctgatgacccacctcaactactatgtgcctggcccagggaccactgctgggcacttagcactccccacaggagacagacaaatcatgacaatagcaagtggccatttttcaaaacgaacaggcatacctggcaccatgggagcagagtgtggggttcaaggcagtacactctgctccacatcggggctgactttctgatgacccagagtctactcaggttttatcagcactctggggtccattttatactcagactcaaagtgcatcaggatgcttccc

SEQ ID NO: 472418 - DNA, 557 bp, Homo sapiens
atagaatttagatccatagagcatggcagcattatcttcaacaaccaccaccacccctaccgccaccactgcctccacttcttccattaccatcactaccatcacctcctccaacaccatcatcaccactactttctccatcaccatcatcaccactactttctccatcaccatcaccactactttctccatcaccatcaccactaccacctcctccgtcatcatcatcatcaccatcctccccaacacttcctcaccaccaacatcctaccaccaccaccagcattaccacttccaacatattgccatgattaccatccccaccatcaacactgccattactattactaacatcatcatcatgatcaccaccatcatcaccatcatcatcatccccatcacttccaaagggcctccaaaagaagggaacaccctttctgacctctcctctcagcctccagaaggaggcacccctctggctagtccaattccatggcagcaacgactcccacttgtaagagaggagttctgggagttaaaggccaggccctgagcat

SEQ ID NO: 472419 - DNA, 714 bp, Homo sapiens
tcagtttcagagtttgtcttctttcagctttaagacttttatgcccttatttgaataagcctatatgatggcaaactcaacagggaaggaagaggaaaggaaaaaagcaaatctaaaacaggggatgaataaaatactgtttgctcagtccagctccatgtctatttgcctgtccttcccaccaagaactctaccacttcaatttggggcattttgtgaggaggggggaatccttgagctccccctagagccaaaagaagcacacagggtcctgagcaccacgacagggggctctgaccttattgaggaggagaaagtgatgtgtgagatgagaaatgaacacgatcagctagttaaggatgggactgaagtgaaggaatttccaagtagaagaaatggccttctgcaaagaaacctggtacataagggagcccaggaagtaccagaagctgaaaagaggccagcatggctagaacagaatgcagagaggaagctcacagagagataaggctacagaagagagctgcttggcttcttctataatcatggaagaacttgagcatgattgtcttttcacataaaggggggaaaggggggtgtatgtcttgaatgatgtgtggttcacattgtggccgatccctacaccaagtgcccaggagtggagtcatataactcacaggcaaaatgccagtgggtcgagagtataagaaatct

SEQ ID NO: 472420 - DNA, 834 bp, Homo sapiens
ggcacctctttcttttttttttttttttttttttttttttttttttttgagacggagagctgctctgtctatgagaatatgtggtcttgattactctaagccatgcagaaaacctaacagaaacaacccctcctttacaggagatgcagaaacaccagcatctggtgttcatatgctgctggtgactcactggataaggctgtctggttctggaattcaggattatgaatctctcttttgcataaatattagcgacattctccaaaatcaatgtttttggaatgttactgttctcataatggctgtatcaatttacattctcactaacggtatacaagggttcacttttttccacattctcaccaacacatactatcttttgacttttaacaatagccatcctaacagaaacaataaagaatgtgctggtgaaatagccagcaaagaagtgaaggctcccctctgtaggccatggatgatagtaaaagaagccattagaggacttagcttgctgacagcaatgaagataataggaccctgaaatagaggccaggtggcagcatttctgttaataattattttctagaagtacactggcttttcccaatacaatgatattattttcataactgaccagactatatctgcctacaaatagaggaaggaatatttatatctttcggatattttgagaagctgtatcagaaactgcaagccatatgccatttaaacaagaagacctttccttggccttcacagattacgtgaaaatatgatgctttcacccaaagtttgtgtcttccacatccctgataagttggcaaatgtttccat

SEQ ID NO: 472421 - DNA, 792 bp, Homo sapiens
ctgccacatcctgctctccccagacttctttgggactgtggctccttcctataaggccaagaaagcacagaatttgaagcaggggatgaggttggagaggtgggtaggaaccaactcatatgcggttctgtacaccgtatccggagagcaacagaggatttgaaactgaggagacaggcattaaggtagccagagtgacatttcagataaggcctctgcagccctgtgggattccaggttccctgtggagggaaaacttgcacgggacaagcctggctgcagttaggggttaccttgaagggttcagaaacacagtctgggaaagcttcatggaggaggtgggacatgagcagccctttaaagaagaacgggacctaggtggagaagaggggcagatctcaggcagggaaacagaattgacaaagccaaagaagcagcattatttaggtggtgttcacagaagaagtaggtcagttggcggctgcgaccagacaaggatagagcccttttcctctgctcctttctcatcctcgcctccagccccactccctgtcatccacgggctgtcaggggtgactggctgagaagtgtgccaagaagaagcagcacaatcgggaagggtgggcccctggggagggaaagacagtgtccaaaagcgagagatttccttacaacctggatatcatagggcttccccaagggttaaagcaggggtcagcatacttcttctgtaaagggctttgtgtgaattcactctgcctcaactacacagctctaccattgtggagaaaa

SEQ ID NO: 472422 - DNA, 522 bp, Homo sapiens
gggcagtagatgagatagtaggtagaacagagtgctgagcaaagagcctgctcatggcactcgagggtatgacagccaagaatgctttcagtccacctccactccaagttcctggacacaattcagaagtttcaccttcttccctttcatctcacccactgctgaaggtgggccttcaactccagaccaccaacaaccctgcccccccccccagaagactggccccatcatctccctcagtcctgtcccatctgggtgaagggaaacttgcctcttctttactcaggactgcctgtgaagtttcccgcatcccaaatacaagagccaaacatctagatgcttggaaagaagcatctggaaaacccaagtccatgaataagcaagccatttatctagaggtgaagaaacaggaggaggaggaggagaggatggaagagaaggagaagagaatgtgcttggagaaagaggagaaggagaaagaagcagaaaaatgtggccaatcatccagatatttctaaatac

SEQ ID NO: 472423 - DNA, 541 bp, Homo sapiens
ttgacatgcctcctttttctcatctattctttggaaagctttttttcttttttcttttttttttttacagaaatgggagtctcgccatgttgcccagaaaaatcatttggattcctatccgtccccttcacaattgggctctttttaaaattctatttcaactctgtcctggagcctgttcacctagaggaagcccctacacctttccttccaaacccccttgtagaagtgtgggtcaacagatcaatctgagcagtgcaattgaccctgctctgcccccaggccctcaaacacaggagctgggggtggttgagtttgctccagtgagctatgatcaaggaagagctatggatgtaggagagaaaccgagcacctatgtaaatgacatgagtgtctgtggagaggttgtagactcaccttcaggagccacaaggctcctagatgtgtgaagtagtaggtatgagaagataaggaggggacaaagcagagacagcatcccaagggcattcaaaatagaaaccttcaaagctatgctggccaa

SEQ ID NO: 472424 - DNA, 693 bp, Homo sapiens
gcagttgcgctatctgcattggagcccatctgctgcttttccttggacaatggctgcccgtttagggttgtgacccaggagtcgctgtggttatcaactgcgagagctcaaacggacacatgagaagcagctttgtttagcaaataggaatggctcactagcctgacacaaagaccaaaaactgggggcactgttctcctgaaagactatgcaagtgtgtggaagctgtgtgcctttgggaactggctctctgagggcaggggagatggtgcccccacggccctgctctggcaagccggggctggccatccagcagcattgtggagcagcagcctgggaaggcattgacatttttgcacgtggtgttgatggtggaggtggggagaggtgtcctgtgaagccaacttatgagatcatccttgattatccagttggttctaaatccaataacaatcatcttcataagagacagaagggaagacatagatgggaagcagtagagcatgtgaagatggatgcagagattacagtgatgctgccacaagccaaggaacgtctgatgccaccagaagctggaagaagcaaggaaggatcctcccctagagcctttgcagggagccctgacctgctgacaccttgatttcagacttttggcttccagactttaagataattaatttgttctttaaagtc

SEQ ID NO: 472425 - DNA, 879 bp, Homo sapiens
aggagagatcatagtgtggtctttgaattctgagacctcatcaacacctctatgccttcggtttttcaactgcaaagtgggggaaggactgggctgggactgagttgctggatgccctgcagaacaatggtgtgcacggagggcagtgatcacggagacataggagccaccccaggtccaggaatctgtgatttctcgctgctggacctggaagaaaggggcctggccgcggggacagccggggagcagcaggcccctctgcagcagcagcaggagccccagggacaccccgccggagggcctggcatggcctgcgtgctgtggcctccccagatgccaggcagcgccattcctgagcagggaggtctccaggttcatacagtgcaaagaggcagtttaagccaaagggaggatctgcaaacttctgctgtggcactcaggcgacccctggcaccagggcctgaggcattgtcaggatgcagtttggagatggctgaagccaacccactagcggccagaggccgctccacagcaggatggaacaggaaggggcccgaaagtgtctgaagagtttgctctgcactagatccctgtgaggcgtcttcagtgcatacactcattgggcttcacggttcaccctattttactaatgaggagagtattcgtgttcaattggttcttccaactagacaaaagcaatggttgtcagttcctgagacttccctggggcatgttaaacatagattattggccctgccttctggtgagggtagggcccaagaatttgtgtttctgattagttccaagtgatgctgatcttattggtcaggaacacatccttggagatctatggcaataaggaatatttacagagtggtg

SEQ ID NO: 472426 - DNA, 1062 bp, Homo sapiens
agcaaaagaagaaggaaatactcatgacaatcacagtccctatttctgcagctggtcacgtggtcatagctggtattactgactaccttctactacccattctgtattccctttgccttcagcaatcacctcggcagtttaatggaattgttgtgtctcctggtggcagtgttcctccctctggaactaagagctctaggccagcagaactaaatgttgtgggaacaggaagcaaaaattttactattggatcactaggggtgatgtttttgaccactcaaagaggtccatccacatatctgtcctccaaatttctttgtcaccgattttccaattatgcttcttccaagtccctgaccatccagccaaaccattggctacaacctgtgaatccgcatataatcgcacatctggccatttctccttccttgcaatgtgcacaaccaggtgcactgattgaagttctgcccactgggatattccccttcaccactgtgcttcagggatgtcctagaaagaggccgtactgctacagctgtccactttcgggaatggagaaaaaggcatttgccaagtcaatggctgtataccaggtaccaggaaatgtgtacacctggtacagcagctgcaactggagtcatcacttggttaagcttacaataatctactgtcattctccaagatccatctgtcttctgcacaaactgaatgggagatccctgaatctgaacagggatggagccaatgtgggggttctgccagctgctaagtatgtctatgccaattatgcattctggcactggggaaatgaccacaggatgaatctggggacccactggacccactcggctcttcctccttgtagctcagcaccctgtgaggttgaagaggcggctgctcagctgtggctgaaagtgaggaagctccctttaggggttcagctaaggttttctctcgaaaactttcaagccctgagaagtttgaagagacacaaacaggggaaaggaccctaaagcacactgactgtctttctcttggcatcgacgtcttgtgtgttttttt

SEQ ID NO: 472427 - DNA, 678 bp, Homo sapiens
catcgtggctaagcaggcactgctgggccggagggtgggggtggatgaacaccaacccttcccggacccccacccttcctgggcccccatatacctggtttggaccgcgcgaggccaagcctcccaggaccgcctcaaggtgtgtgctgggatcccacggccctgcgacaagaaacagctgaaggttgtttctgcggccctccaggtggtatgtctgaagcctacaagaaagtttgcctgcctggggtgcctgactcacgaagctggctagaagtagcaggcagtgacagccacctgcaggaggagaggaaggaaaaggccaggatttactcagggaaggaaaagcagctcttaaggccacagaaacaggcagcaaagaacatggagaaaactgacagatacgcagaggtcctcaagacccatggactcctgatgcagaatgtgaggctacagaggcagggtgcctccatgccgccctcctggatttcccctcaccacaggtatatcttcactcgcccactgcgctccagctctccactctcttcaacatttcggtcagatctttgctgtttattcattgtgttggtccttttgtgtgcaggggatgaacgctaggcatcactagccagccatcttacagatatcactcccagaaaaaaaattaaaatgtttcccttt

SEQ ID NO: 472428 - DNA, 1349 bp, Homo sapiens
ccccttcttaaacataagacgagcaaggagactcatggtctggttcttggacttccctaacagcatggcccctaaacgccagtctccactcccacttcaaaagaagaaaccaagaccacctcctgctctgggactggaggagacatcggcctctgcaggcttgccgaagaagggagaaaaagaacagcaagaagcaattgaacacattgatgaagtacaaaatgaaatagacagacttaatgaacaagacagtgaggagattttgaaagtagaacagaaatataacaaactccgccaaccattttttcagaagaggtcagaattgatcgccaaaatcccaaattttggggtaacaacatttgtcaaccatccacaagtgtcttcactgcttggggaggaggacgaagaggcactgcattatttgactaaagttgaagtgacagaatttgaagatattaaatcaggttacagaatagatttttattttgatgaaaatccttactttgaaaataaagttttctccaaagaatttcatctgaatgagagtggtgatccatcttcaaagtccaccaaaatcaaatggaaatctggaaaggatgtgacgaaacgttcaagtcaaacgcagaataaagccagcaggaagaggcagcatgaggaaccagagagcttctttacctggtttactgatcattctgatgcaggtgctgatgagttagaagaggtcatcaaagatgatatttggccaaacccattacagtattacttggttcctgatatggatgatgaagaaggaggagaagatgatgatgatgatgatgatgatggtgatgaaggggaggaagaattagaagatattgatgaaggggatgaggatgaaggtgaagaagatgaagatgatgatgaaggggaggaaggagaggaggatgaaggagaagatgactaatagaacactgatggactccaaccttccttttttaaaattttctccagccctgggagcaagttgcagtctttttttttttctcttgtgctcagtcaccctgttcttcagctctcttttctctactccatggttctcaacttatttggggggaaataccttgagcagaatacaatgggaaaagagtctctacccttttctgttcgaagttcatttttatcccttcctgtctgaacaaaaactgtatggaatcaacaccaccgagctctgtggggaaaaagaaaaacctgctcccttcgctctgctggaagctggaggatgctaggcccctgtatagtagtgcatagaattctagcttttttcctcctttctctgtatattgggttcagagagtacactgtgtctctat

SEQ ID NO: 472429 - DNA, 3268 bp, Homo sapiens
gggccagagggttcaacagtggaagagggacagtgtggcccagccagagacctcccctctcacgccactcagctccttctctctacagtgaggctgggtcagggaggctcagaatcaattgtcccaaactgggactcagaaggacatcctggattcccaccagcctggctgtaggctgtgtctgctgacagcaagtttccgttctgccaccagcttgcatctacttctgcacctcagtttcccacatgtcaaagtactaatgccagcatgttctccaaataccctgccctttggatgccaaagagtggttctgggctctgcatcaaggccagggtggcagggatggagcaggacccagtccagagcttggatcctcccccaaacccaactactgccagcccaggggtcgacctgaatgtagccatgcagatgcctgggccccatgctttctgtggcctgagaaggaaagagaggtctgcagggcctttcctgtacttcaaaggcaccggtcacaccctcaaagcagggtctaggcagagggaagcctggttttcgctgggcagtccaggtctctggtcacacaacaaacactggaacctgagcatagaccggcccaaagggagaccaggattgaagccaggcccccaagcccacccctcacagtcccagctccaggccctggtggcccctgcggggcctaggccaccctgacattcacctaattgtcttcctgctttgatgagtggatccgcagaggcgccgccacggatcaaattaaatgtgagccaagccggcagccccgatgatgggagggaaataccacatttacatagcccagcacaggggcagggagacccaggcccagagtgacagagaccatggacccaggaggaggcaggggaggaagacagaggtggggctgaggtagggtgggcagaggcatcctccccagggtcgctgtcactgttgaataaagggcaggtggggagggaggatcaatacagaaagaggctcttcccacctccaggcaggtgactgcctctctggcaagcccagcccgttggcctagacgtgggaaggtggggcccacagctcccttcaccccagcccagaccccacagctgggctgcagctgcctccctcagcacagccctggcctgaaggctctgggtggtctggaggcatccacctgtagacactgagtctgtgtgtgggacgtgtgtggcactggtgtccaagtcagagtgattgtgccaatggcccctccaccccaaaagcatgttcccaggtgcaaagcactgtcacagcctgcaaactaccctgggaggggagctaggcccacaaaagtgcctgttggctccactgagaagcccttccccatcacccacggggtccagggcggcttttactgggaaaataattagaaatctaattcttatttctcccactctgctaattgtctgtggacaatttgattgtaacagtcgtcactgaagcagaaaaaccaccttatttctgccagacatcctccctgcaattaacactagcaactgctttgctctcttctcacctgcagagacccagggccctgaggttccctcacctttctgcctcccagctctgatgcctggctcaaggcatcttccccagggcacctgcaggtgccatgggatgactcgctgcatgttctgtgaagggggcaggtgtgggcagctcagctcagctcatagaggagccctgagcagcgtcccctgccttcaccccagggctgcgcatgcctggctttggagtcttttatccagtctagagtgcagggatgtggaatctgtgggtagcactctcaatgcaagctgcatccaattttttttttttttggtcttaacttagaagagtatcttttgaacgtaaaaggccaacagtacacacttttgtttcttttgttccatgcaggggtgaccccagtgtcactgtgtatggtggagcaggctatgaatggcacccccgtgttgtgtaatgtagcaggctcaagactgatggccttacttccaaggctgggaaagacccttggggagcaagtaaagtcgtttgatgttatagttaagctcagttagatccccaccccacaccccaccaccccaccatcccaccatctcaccaccccaccaccccacacctggacgctgctgaagctatattcttttctctgtcaagacaatgcgtttaatcctctgttctcactggatgccttttgggggtcacaaactcttctctggctgcccctcctggacctccaaatgacaagttactgagttttccacccttctgcaaacttttccttgttctcatggttttgttccatctctctagtcagaacttcagctgacactcaaggcgtataaggaacactagggacattatctgctcagcacccttcccttctcttgggaatcacagcccatcccagccccctccagccctgtggtcatagtgtgagctgccaggctcttataggaaccccactcctggccacagctgattggcccaagaggggcacatggttgaagccccgccaattaaagttctccaagtttttggactggaaatgcaagagaatgtctttcttttatatcctataatcatatacaaattgagaggatgccattatgaatttttccatatttcctttttcctgtttcaaaggaatttcattgcttttgtgtgtgaatagtttttagattagtacatctttcttttttaatatatggatttctggggtagtcttttccctcttcacaaactatacattatcacatttcttcacatttttaggccaaaggtggccaggtcggccctattgaagagaaaaagtttaagataaaatttgattctgattttcaaaaaaatctaagggactgtggccatgtgtcctggcttggggaagaagcgggtctgcagctgggaaggatgaactggcattggagagactctagaggagctgctctctgggccattcctgtgggttagttccatggattctgtgagccagtaaatccctcttcgtgcctatgggaggctgagtagtgtttctgtcacttaaaaaccagagttctgatcgggttccctgccatatagcctttccatacatttcttccagagtggccagggcaaccctccagagagtgaaggcaaagggcagccaatgaatgttcctcccctggagagagaagtcccataggctaaagtcccatctttaaagatgattcacaaa

SEQ ID NO: 472430 - DNA, 1098 bp, Homo sapiens
tctcttgtgttcagaaattagaggtggttcagtcttagtgggatattagagttgagacaaacaaaaactagagatcaggctggagagaagtggcaagaagccctccgagagtgtgggtctgggatgctttttgtcaaatctgcaggtgcctgggtccgcagtctactcctctgctgggggtggaggggatcccctagatctacattttcacacattcccaggctgtcagagatgggcggggaccgtaggcaatggcagggagcctggcagctgtaggattggggccccatctactcctcttccatcctgagccctttggagacaagccgacctggtttgagccccagctcctgctccttctgctgcttagctctgtgacctttggcaagttgctaaacctctctgagtctcagtttacttatctgcagaatgggggatgccctcttgtggccgcggccccctcgcacgtcgccctgcgcccggggaccggaatccccgacaaggggtggtcagctcagcggcagcactggaccctctacctgcccccgccccccgattgtacggaagtctgcagcgtgtctcaggccacactgcgagttgggggtggccctggccgccagcctggtgtccttgcctggaggaaatgcgagggccgtctgggcccagcatgcccgctggctcgtgagctggccctggaaactagcggctggcgcaagtgggcgttcggcggcactgctggctgccagctgccagccccacaccccacaggcccctgcctggccagccccggtgcactcctgggatgtcccctgcaggcccaagttcaggctaaggccggctgtgccggaggggcacaacacctgagtggagatgagcagcccaggggcgccctgctggcccgcaccctgcccagaccacatgaaggcgaagaggttgctgagattcagacccaatctgctgactcccaaacctgcgtttgatttattgatttagatttgtacaagtttctatacacagcattaatttatatttatttatgcatttagaataagcccaacttgtgtttaaaatctctctgcttcccagattctcagtgag

SEQ ID NO: 472431 - DNA, 1223 bp, Homo sapiens
gacggtgaggggcggtggcccaacggcgggagattcaaacctggaagaaggaggaacatggagaggagagcagcgggcccaggctgggcagcctctggatggaggcctgcctgaaggaggagcttccttccccggtggagctggaggagagccttcggaatggagtgctgctggccaagctaggccactgttttgcaccctccgtggttcccttgaagaagatctacgatgtggagcagctgcggtaccaggcaactggcttacatttccgtcacacagacaacatcaacttttggctatctgcaatagcccacatcggtctgccttcgaccttcttcccagagaccacggacatctatgacaaaaagaacatgccccgggtagtctactgcatccatgctctcagtctcttcctcttccggctgggattggcccctcagatacatgatctatacgggaaagtgaaattcacagctgaggaactcagcaacatggcgtccgaactggccaaatatggcctccagctgcctgccttcagcaagatcgggggcatcttggccaatgagctctcggtggatgaggctgcagtccatgcagctgttcttgccatcaatgaagcagtggagcgaggggtggtggaggacaccctggctgccttgcagaatcccagtgctcttctggagaatctccgagagcctctggcagccgtctaccaagagatgctggcccaggccaagatggagaaggcagccaatgccaggaaccatgatgacagagaaagccaggacatctatgaccactacctaactcaggctgaaatccagggcaatatcaaccatgtcaacgtccatggggctctagaagttgttgatgatgccctggaaagacagagccctgaagccttgctcaaggcccttcaagaccctgccctggccctgcgaggggtgaggagagactttgctgactggtacctggagcagctgaactcagacagagagcagaaggcacaggagctgggcctggtggagcttctggaaaaggaggaagtccaggctggtgtggctgcagccaacacaaagggtgatcaggaacaagccatgctgaggcaaaatgcagtagcctgtggacactaggcctgttacagttgcttgccttagtctggacttgctgtcaggtttagaggttgctcagtaaccatttacctttgtctaacagagctttcc

SEQ ID NO: 472432 - DNA, 2866 bp, Homo sapiens
gcttgggcagccctatgtcttcccccaaccctgaggatgtgccccggaggccagaacctgagccctcaagctccaataagaaaaagaagaaaagaaagtggctgcggcaagaagccagcatccaagccctcaccagggctggccatggggcccttcaggctggccagaaccatgaagccttgaacaacttccagagggccttccttctggcctccaaggccccacaaaccagggatacccctgtgctccaggcctgcgccttcaacctgggggctgcctatgtggagactggggacccagccagaggccttgagctactcctgcgagcccaccctgaagagaaggcacagggcaggcgacacggcgaccaatgtttcaatgtggctttggcctaccatgccctcggcgagctgcctcaagctttggcctggtaccacagggccctgggccactaccagccacagggtgaccagggagaagcctgggcaaaaatgggagcctgctaccaggctctgggacagcctgagctagcagcccactgcctgcaggaagcaagccaggcctatgctcaagagagacagctgcgggccgcagccctggcactgggggctgcggcaggatgtatgctgaagagtgggcggcatcgggtgggggaagttgtgcaggtgctggagaaaagccggaggcttgccgagaggagcactgagaggcgactgctggggcacctctataacgatctaggcctgggctactcccagctccagctgttcccgctggccgtggaggccttcctgcaggccctgcccctgtgctgggtgccaggagagcaggccacagtgctaagaaacctcgggatggcccacaatgccctcggcaactatcaggaagctcgggagtttcaccagaaggctgctgacctacacggctctgtggggcagcggtgggagcagggccggagctttggcagcctggcctttgcattgagccagctgggggaccacaaggctgccagagacaactacctgcatgccctgcaggctgcccgggactctggggacatgaagggacagtggcaggcctgtgagggtctgggggctgctgcagccaggctggggcagtatgaccaggccttgaagtactataaggaagcactggcccagtgtcagaaggagccagattctgtgcgagaacggctggtggccaagctggcagacaccgtgaggacgcgcttggcccaggtggggctggtccagactcacaccctgacttcggctccgggaagactccaggctccaggtggggccagccaggcggaggggaccccagcaaaggcaggaagcagcacagcaggtgtccagcacagatcttccagtgggtgggaagatgaagagtttgaggagggccaccagaagaaaaaagaggagaggtcggcaaacgttccggtgagggctgggccgggaagaccagagcgtgagttgatgtagagtattcctggcggtgcctctccttactgcaaatatggcactcccacccccacccgcctgcctccgcttcttatgcccatcccaccatcccgccttcctgttgtcatttctttgaggcctggcacaacctcgcgccacccctgaccctggctgtcccagttcgcaagtccccaacagccctcccatgatttctgcttgtctctcaaggccctggaccattttccctgaacccttctagaactccctcttccttcctgctctcatggctttcctaacttctagaactttgcatcttggaccccagggttttgctgaaagcctactctgtgcccaacacagcgctgggtgctgttggtaaaccccagctcactactcaatagcatctcccacaaagacttgcaactcagggagcagagttctttgctacttgttgagctgacctgaatttaccgatgtctccttttcagtgtgtttccttccaggcacagtgaatcattcgcaccatctagcttctagttgccccacgtttaccaagcacacgccctgcagagggacagtcctcggcaaagcctccatctatagtccaggacccagggcccatcttccatttgtaggtccaggccctcccagagcggagtaccctagcatcttggtacccaatggccctcaagccaataggtcatccaggtggcccagggaaagcctcagcaggagccgccagaggagacccatggagtcgggcatctgcactattgtgtgacctccccctgccagcctcagccctcatccctgaagcacctgtccaacacgcacacactagggggtcctggggaccaagcctcttcccagttgctcagccctgcagggatgtggaacacagtgcagccagtggactcctgaggaggctggccaagggctttgcaggctcggccctgagaggttctgtttgttcctccttgggatttttggactcagtaggtaaaagaaaaaaggaaaatggatggcaaattccctgtctttctgaatccaaatcttacgattgctaggggcctggcagttctaaaaactgacttcgtggtcaagtagctttggagtcactgactgtctccagacgtccatttttgcacatgagaaatgaggatataatactacagaagaggcatcttacccaaccaatgcaccttacttctctgtgaaacacaggggatgctgggcgcaggcctaggctgtggcctgtagcctgtaggacagctcctgccagcagccacaggaacagtgatgtgatgtaacatttcccaagtacttagctcatgccccaccctattctaggtgcttagctcaggccccaccctattctaggtgcttagctcaggccccaccct

SEQ ID NO: 472433 - DNA, 1449 bp, Homo sapiens
aaatagttagaatgaataaacaaattcaggggagaactggggcctgctcccagagagatacagctacgttgatcaaaactgaatcttcggatgtgatccaccttatcatgcagtacttgaaggagaacggtttacatcgggcattagccaccttgcaggaggagactactgtgtctctgaatgctgtggacagcattgagagttttgtggctgacattaacagtggccattgggatactgtgttgcaggctatacagtctctgaaattgccagacaaaaccctcattgacctctatgaacagattgttctggaattgatagagctccctgtcaaagatgtggaagaagaaaagtttcctacacaactgagcaggcatattaagtttggtcagaaatcacaagtggagtgtgctcgattttctccagatggtcactatttggtcactgggtctgttgatggactcactgaagtatggaactttactactggaaaaatcagaaaggatcttaagtaccaggcccaggataactttatgatgatggatgatgctgtcctctgcatgtgtttcagcagagatacagaaatgttagcaactggggcccaagatggaaaaatcaaggtatggaagattcagagtagacaatatttaaggagatatgagagggcacacagtaagggtgtcacgtgtctaagcttttctaaggatagcagtcagatccttagtgcttcttttgaccagacaattagaattcatggtttaaaatctgggaaaaccctgaaggaattttgtagccattcctcctttgttaacaaagcaacatttacacaagatggacattatattattagtgcatcctctgatggcactgtaaagatctggaatatgaagaccacagaatgttcagatacctttaaatccctgggcagcactgcagggacagatattaccgtcaacagtgtgattctacttcctaaaaatcctgagcactttgtggtgtgcaacagatcaaacacagtggtcatcatgaacatgcaggggcagattgtcagaaacttcagttctggtaaaagagaagccactggcaaactggaaagaactttgacagtgcacgagaaggatgtgattggtattgcacatcaccctcatcagaacctgattgctacctacagtgaagatggactcctaaagctctggaaaccataattcaacttttctttttaaatcagcttgaaagcacgtacttaaatgaaggcatattcatgtaatgtgctttttttttttttgccagcttttctaagcaaatagattgtctgaattagtcacaaggataattttgtgaaaattcatgtttaagtagcaagtacccttccttttcttatatatttttaagatgttaataaactttatacctttctgggaaaaaaaattcagcaaagttgcaggacat

SEQ ID NO: 472434 - DNA, 1560 bp, Homo sapiens
tgggagcatcaccaccagagcatggattaaagtgaagcgcatggagttaaggcaagtctatctcactagggctcattccataaactccccacccttctcagcggagaaccacaagattcccggttcctgtccatggttcaccaattcaacaaatatctataaagcacctttgagtacgatgtcctgtgctacgatgggatctggggagccagcagaggagaacaagacagctagggttgctgatctcggagctgacactctgagcgggatacagatgttcaacaaagaagacactatctataatggtgaccatttccccaaggcccagacacagcccatctcgccggagtggaccatgcactgcagctgcttggctgagggcatcccagccaaccccggcaactggatctcagggttggccttccctgattgggcctacaaagccgagtcgtccccaggctcccggcagatccagctgtggcacttcatcctggagctgctgcagaaggaagagttccgccatgtcatcgcctggcagcagggagagtacggggaatttgtcatcaaggatccagatgaggtggcccgcctctggggccgcaggaaatgcaaaccacagatgaattatgacaagctgagccgggccctcagatattactacaataagaggatcctgcataagaccaaaggcaaaaggttcacatacaagttcaacttcagcaagctcatcgtagtcaactatcctttgtgggaagtgcgggcgccgccatccccccacttgctgctgggggcccctgccctgtgtcggccagcgctggtgcccgtgggtgtgcagagtgagctcctgcacagcatgctatttgcccatcaggccatggtggagcagctgacaggacagcagaccccccgagggccaccagagacctctggggataagaaggggagcagcagcagcgtctaccccaatttcatggaagaaggatccatggccttcaccccacccctgagctgctgggggcccaagctctgcacccctgggagtgcagctgaggccatgggtgtggggtgctccagggcctgctgggactcgctgggcctggacttggctctgccccaggcccctgccggctgggcctttgctgccatttggggagcgtccaaggcgagctgcctggtgttgcctccttcactcctcccctcccgccccctctgccctccaactggacctgtctctcggggcccttcttgcctcctctcccgtcagagcagcagctcccaggggcttttaagccagacatcctgctcccaggacctaggagcctcccaggggcctggcattttccagggcttcctctcttggcagggctgggacagggtgcgggacccaggcaagtggggtggggagacactggccttctctgctctgtaatactccactgtgaccatgaataaaatgcccttgcaaactgtcctctggctgaccacccccccctgcagtggacccccatcctcccactgtgctcctcctgcgttctggactggtgtgatgggaaaaggccc

SEQ ID NO: 472435 - DNA, 699 bp, Homo sapiens
ttatcacagctggcttgctgatgcttaagaggccctcacaggtctcttgactactgagggtaaatggactgatggaaacccagcatatgagtctctctgactatggacgttaccaaacacctgtgagacccctgctaggcattgacttcacagagaaggaggcatttgtggctcatagccctgtgactttcctggcagttgttcccccagcagaaacagtccagtgttcaggaaattctgttctatcaagtaaagcaaggaggcccaaaaggctgaggattcaacctgctttgaaatccaacaagccacaggaccagaatctgtatctaatttttgactgtccaggcttccagcccctgcagcctccccctgggaattctgattgtgacaataaaataaaactgctgcatgtaaggtgcttaaaatggatcttacacattgcagggattatcgtcttctcaaggaggtcgggagaggaagaagccaaagacaaggtccaggttcctggttggggccattgcctgagaatgggaacacagaaataggctagaagatgaagataaacgcagcatttgacacaccgagtttgaggcaccagtggagatgtctagtagagagctgaatgcagaatctgatgctaggcagaggatgggggttggagatacagacttgggcattagcagcgtggggatgatcatt

SEQ ID NO: 472436 - DNA, 1515 bp, Homo sapiens
tggcacaccaggagattatatcctgcacctggctcagagggtcctatgcccacggagccttgctctttgctagcacagcagtctgagatcaaactgcaaggtggtttgtgctagctcattgctagcacagcagtctgagatcaaactgcagcgaggctgggggaggggcacccgccattgctcaggcttgagtaggtagacaaagcagctgggaagctcaaactgggtggagcccaccacagctcaaggaggcctgcctgcctctgtaggctccacctctgggggcagggcacagacaaaaaaaagcaataacctctgcagacttaaatgtccttgtctgacagctttgaagagagcagtggttctcccagcatgtagctggagatctgagaatgggcagactgcctcctcaagtgggtccctgacccccgagtagcctaactgggaggcaccccccagtaggggcggactgacacctcacacagccgggtactcctctgagacaaaacttccagaggaacgatcagacagcagcatttgtggttcaccaatatgcgctgttctgcagccaccactgctgatacccaggcaaacagggtctagagtggacctacagtaaactccaacagacctgcagctgagggtcctgactgttagaaggaaaactaacaaacagaaacgacatccacaccaaaaacctatctgtatgtcaccatcatcaaagacaaaaggtagataaaaccacaaagatggggaaaaaacagagcagaaaaactggaaactctaaaaatcagagtgcctctcctcctccaaaggaatgcagctcctcaccagcaatggaacaaagctggatggagaatgactttgacaagttgacagaggaaggcttcagaagatcaaacaactccaagctaaagaaggaagttcgaaccaatggcaaagaagttaaaaactttgaaaaaaaattagatgaatggataactagaataaccaatgcagagaagtccttaaaggacctgatggagctgaaaaccacggcacgagaactacatgacgaatgcacaagcctcagtaaccaatgcaatcaactggaagaaaggttatcagtgatggaagatgaaatgaatgaaatgaaacatgaagagaagtttagagaaaaaagaataaaaagaaatgaacaaagcctccaagaaatatgggactatgtgaaaagacaaaatctatgtctaattggtgtacctgaaagtgacagggagaatggaaacaagttggaaaacactgcaggatattatccaggagaatttccccaatctagcaaggcaggccaacattcaaattcgggaaacacagagaacaccacaaagatactcctcgagaagagcaactccaagacacatgattgtcagatttaccaaagttgaaatgaaggaaaaatgttaagggcagccagagagaaaggtcgggttacctacaaagggaagcccatcagactaactgctgatctcttggcagaaa

SEQ ID NO: 472437 - DNA, 499 bp, Homo sapiens
tgggctccttccattacctggcaataccccacgggatccatggggatgggaaaggagagaggagcagaaaagaggatggagttgaggagtcgggaagagccttccctggctcatcccgttgtcgtcatcaagcaagcctgtgccccttttccaggtcccaaccaggtcaccgtccatcacaccagactgctgaaaatttacccaagagggcagggctccaagagccacagaggacctaaatgtgacctgagagagagcaaaggcctccccagagagctggaccagacagggatgccaggaccagcctacaaccccgggaccctggccgtgagcctgccactgagccagtgcaatgccagcctgacctgtgtgatcagcaaccacgaggaacagaaaactgccacctcagaccttgggggaaatgtgtttaactcaaaaaattgtccagcaagggcaggttctagttctggaggcacccctttcccagaagattgagggt

SEQ ID NO: 472438 - DNA, 621 bp, Homo sapiens
tgagtcgtgagtgaatgtgaagacctggacattactaaaaagaacaaagtcaaggatggcaccaagattttgtggctgcaacaaatggagtaatagagatgacatttattgggatgggaagactgtatgggaagcgtgtttggggagtttgaaagccaagctggagattcctgttatacgtcctagtggagctgactcatgtgattatactgaactgacccagataacccaggataattcacatctcaagacccttaaacttgatgacgtctgcaaagtcccttttgccataaggttatattggcatatggtccaggaattagtgcagagccacaatctcagaaagaaaatgagagtggataatgaagacagatcatctgggtgtaaacctgaggatattccagaatatagaggaaatgaaaatcaaaagcacaatgagttaccagttcacactcactcagaaggcaataatcaaagaaatggacaatagcaagggttgggaaggatatggagatattctcccacattgctggtggaatgtaaaaatggtgaaggtgaaggtggaaaaacggaaatgaagtattgagagggagatggaatataagaagctttctgacagat

SEQ ID NO: 472439 - DNA, 624 bp, Homo sapiens
gctgttctgcagcctccgctgcaaacctgcagcagaggggcctgactgttcgaaggaaaactaacaaacagaaaggaatagcatcaacatcaacaaaatggatgtccacacagaatccccatccaaaggtcaccaacatcaaagccccaagatagataaatccatgaagatgagaaaaaaccagagcaaaaaggctgaaaattccaaaaaccagaatgcctcttctcctccaaaggatcacaactccttgccaacaagggaacacaactggatggagaatgaatttgacaaattgacagaagtaggcttcagaaggtgggtaataataaactcctccaagctaaaggagcatgtactatcccaatgcaaggaagctaagaacatggagaaaagcagcacaggccaacattcaaattcaggaaatacagagaacaacacaaagatactccctgagaagaacaactccaagacacataatcgtcagatcaccaaggttgaaatgaaggaaaaaatgttaagggcagccagagagaaagaagagagtgggggctaatattcaacatgcttaaagagaagaattttcaacccagaattgcatctccaaccaaactaagctttgtaagc

SEQ ID NO: 472440 - DNA, 475 bp, Homo sapiens
accatgactgagcagggctaaagcagggctgcttcagaatctgcaatcagtccaaagttagaagatgtaccaacatgagcacagacagacatatctcccagtgggctcctgggtggctaggaatactctctgcccacaactgggtcccttggcagattgttctggtggcaggaccaaagccaaagagagctatatccagatttactggggcaaagtgttgtttccaggtctgtatccaggaacatgtacagtgagcctgctacctggttgtgaaaacaccctctcaaaacagctctcttcagtcttgggctctcctaaggttttgctgcctttgacctggagtccaatacgctcacaactgtactttggtctgtggaaggctctcaaattcttgttgctgtgggaggatatgagtgggacatcccctactctatattctgctctcaaattttattttacagagagacactaaact

SEQ ID NO: 472441 - DNA, 826 bp, Homo sapiens
tgcccacatgagctccaggcagtgtcctgcctcacagacgcatgtggccaccgagttgcatgccagctgcccctccctggaggagccatttcttttggctgctggggccaggcctatgtcctgccctccccctgaggcccaggagcagtgctggctggcttggaagcccaaagccagaacatccttcctatcttttgcagccaaaagctattttctgtttacctctggaagttcacttccttctgaatactgaaaaaattctactgggatcattgccctacacagaaaagcagacagagttgggagttgaacccaagaacctagaaccccgccaaatgcaagggcctgctgagacaacccagattgtggcttacaccagaaccatcttgcagagccttcccatcatggcccgtgttgttggaggtgatgatgctgcccacgctttccctccagtaggaactttcccatcatggcccgtggttgttggaggtgatgatgctgcccatgctttccctccagtaggaactttcccatcatggcccatggctgttggaagtgacggtgctgcccagagttttctctcgccaacccccccaccttttccctgagagggtgcctccatcctgcaactccaaccacctgctgcttttgacggccaatatcttctgcacaaatttcccctgtgagcaccaaatccaaatgcccaacatcctactggacaatagattttcaaactcaacattccccaactcaactcctcatcctccccctacttctttcccaaatgtattgttcttatctttcttctctccctgactccctgcac

SEQ ID NO: 472442 - DNA, 927 bp, Homo sapiens
ggtttcagtacattgaggtttttagtgcgtatgagatgtcccagtggagatgtctgtccactgggcaactggacatcaggctttggtgctcaggacctatggaatggacaccctgaggctgaagaccctgagaattcccaggagatgcagcagaaaagaagaagctggatgtgggactcactggggaagatctgctccacactgtgcaactgctctctcaaagctttggtttctgtttctacaaaatatatcaatatcatcatcatctctatccagggagcccatttaaaaatcaggtgcagctgcttcgaacttattaagattagtgtcactaaagttggtgttcaacccccaactcagccactgctacatttgactgggaagaagaagaagaagaagaagaagaagaagaagaagaagaagaagaagaagaagaaggaggaggaggaggaggaggaggaggaggaggaggaggaggaggaggaggaggaggaggaggggggcgggacagcccctcttgctggcagtaatcacagccatgagttgactgtccaccacggcggcactagattagtcacatcacctacattagctctgatcctcacaataactctcagaggtgctggggtccccaaacccagagccacagactggtaccagtccttggcttgttaggaactagaccacacagcaggagatgggaccatctagttgcagaaaaacaagctcagggctcccactaactctacattatggtgagttgtgtaactatttcattatgtattataatgtaatcataatagaaataaagtgcacaataaatataataaatataatgtgcttgaatcgtcctgaaaccatccccctcaccaccccagtccatggaaaaattgtctggtgcccaagaagtttgggggccactgcctt

SEQ ID NO: 472443 - DNA, 480 bp, Homo sapiens
tccccaattgcttgtctttatttgagcacccctatatgccaggcactggcaatgcagtggttaacccatttctccatggagcatctgttgaagtggggggaagtaaagaaaagattaaaacaaaatacgtccacttttgcagctatgtggggagagttgatgagccaggcctagctcagtatcgcatgactgctggcctagaacactatgccaaacaatttcctccagcttctcaaaatgcacagttgtccagcgtagaagcagagtatgcaggaggcttggcaactatgcaggttgtgaagccagaggggagtttgagcaccaagttcaagaaggcagtcttgcaagactttcctcgaagcagctcctacagactggctctttcaccttaaacgccatagttttggatacaggcttttctgcacgtactgggggcattggctgttgacacgtgaaatattgaggcagccttgtctatgc

SEQ ID NO: 472444 - DNA, 4966 bp, Homo sapiens
gccgccgccgccgccgcctttgcggccgccgccgccgctggtgggggagacgcggggttggggggggaggagggcgcgcgtggtgccggtggggggcggcggcggcgccccctcctcctcctccgcctcctcctccggcgtcgcgggctcctcggacatggccgcggcggtggcggtggcggccgcgtcccggcggcagtcgtgctacctgtgtgacctgccccgcatgccctgggccatgatctgggacttcaccgaacccgtctgccgcggctgcgtcaactacgagggcgccgaccgcgtcgagttcgtcatcgagacggcgcggcagctcaagcgggcgcacggctgcttcccggagggtcgctccccacccggcgccgcggcctcggccgccgccaagccgccgccgctctccgccaaggacatccttttgcagcagcagcagcagcttggccacggcggccccgaggcggccccgcgcgcgccgcaggccttggagcgctacccgttggcggccgcggccgagaggcccccgcgcctcggctctgacttcggcagcagccgcccggcagcgagcctggcccagccgccgacgccgcagccgccgcccgtgaacggcatcctggtgcccaacggcttctccaagctagaggagccgcccgagctgaatcgccagagcccgaacccgcggcgcggccacgcggtgccgcccaccctggtgccgctcatgaacggctcggccacgccgctgcccaccgcgctcggcctcggcggccgcgctgccgcctccttagccgcggtgtccggaaccgcggccgccagcctgggctccgcgcagcccaccgatctgggcgcccacaagcggccggcatccgtgtcgagcagcgctgccgtggagcacgagcagcgtgaggcggcagccaaggagaaacaaccgccgccgcctgcgcaccggggcccggccgacagcctgtccaccgcggccggggccgccgagctgagcgcggaaggtgcgggcaagagccgcgggtctggagagcaggactgggtcaacaggcccaagaccgtgcgcgacacgctgctggcgctgcaccagcacggccactcggggcccttcgagagcaagtttaagaaggagccggccctgactgcaggcaggttgttgggtttcgaggccaacggggccaacgggtctaaagcagttgcaagaacagcaaggaaaaggaagccctctccagaaccagaaggtgaagtcgggccccctaagatcaacggagaggcccagccgtggctgtccacatccacagaggggctcaagatccccatgactcctacatcctcttttgtgtctccgccaccacccactgcctcacctcattccaaccggaccacaccgcctgaagcggcccagaatggccagtcccccatggcagccctgatcttagtagcagacaatgcagggggcagtcatgcctcaaaagatgccaaccaggttcactccactaccaggaggaatagcaacagtccgccctctccgtcctctatgaaccaaagaaggctgggccccagagaggtggggggccagggagcaggcaacacaggaggactggagccagtgcaccctgccagcctcccggactcctctctggcaaccagtgccccgctgtgctgcaccctctgccacgagcggctggaggacacccattttgtgcagtgcccgtccgtcccttcgcacaagttctgcttcccttgctccagacaaagcatcaaacagcagggagctagtggagaggtctattgtcccagtggggaaaaatgccctcttgtgggctccaatgtcccctgggcctttatgcaaggggaaattgcaaccatccttgctggagatgtgaaagtgaaaaaagagagagactcgtgacttttccggtttcagaaaaacccaatgattacccttaattaaaactgcttgaattgtatatatatctccatatatatatatatccaagacaagggaaatgtagacttcataaacatggctgtataattttgattttttttgaatacattgtgtttctatattttttttgacgacaaaaggtatgtacttataaagacatttttttcttttgttaacgttattagcatatctttgtgctttattatcctggtgacagttaccgttctatgtaggctgtgacttgcgctgcttttttagagcacttggcaaatcagaaatgcttctagctgtatttgtatgcacttattttaaaaagaaaaaaaaagccaaatacattttctgacattgtaagattgccttactgtctgtcattccttattgctggcccctttctcaggccggaggccaagtggtggagaaggaaaggaaatgatcgaacgggcatgttgtcaagtgggcatgccactgggaaataccaccagtttaccctgaaacattgtcctcagaggagtaggaaagtggattttgaatctctattttgctcaaaagttcagttcctgagatactgatgactgagagtgctgctgggaaattttcaggattgtgtggtcttttggggttttttgtttttttttttttaagacaaagttgaccgctgttcactgtccacgtgatcagttgtaagattacaatgctgcatgctagttggttacataagatacaattccagtgatggaaggcggttataatggatggtggtgtgtacaagatggcactgccatctttgagcagagcccagctctgcagcgccacttcatctttttaaacaccctagaggtctgtttgttgttgctgttgtcctttattttgaaagagttgcaagagaagttacagtccaggtgaacttggagattgtgggattggttttgtttctgttttgttttgtttatcatttacctgtagtgctattgctgttgatactatcacctataccctgtttctagtgagtgctgaatacagtatggtacaatgacagtaacagccgcgtggtgctgccaggactgcccttgggcatatcagtgacagcccaaatgtgggtggaggaaacctgtaatttccttcttaacatgtgtttgaaataccaagtgaataatactgttctggaaaaaaatgataaactagtggaaattaaagaaattaagggttttatataatagacaggccccacctctcaaaatatttttagaagtctttttgtaaactaatttcttttgatcactattttgcatcagtaaaatgatttttttaaaaccaataaatcatcaattattagaaatagttgtctcacagtgatactggtttttcttttgtgctgttatgatttaacattgacaggaacactattttaaatccttacgttcaggtgtttgtaacttggccttataattaggctgaattatggcttcaaggtctacaatttatgtgtatggttcacagcctagcttctatttacatttgaaaatacagatttttaccaactttggattcttttttagttatatgtttgtctttcctttttaaattgttcaaaactattttttaatggtcaagttactaacacttgaaaatcagatactgcaccaaatacagtgtttttccgtagtgtttttaatgagtgcacctattactactgtgcgagaattcatgttttaccagtcattgttatattacaaacagacttgcatgattaaccagttgttacacttactttttcaagttggagtatatatgactcagtgcagactggtctctcttatgtgaatgcacacatgcagaaatgcagagtcaattttacatgcccataaagacatttgtaaagaattcagctcttatggtctgttgtataaatgtgtatctaggcactttggaatttgacctcacagatgttacaacttgatcagtcgtttgacctaatttgtggtagctatctgtatgttttgcaatcttaatacagacatgctttccaaaaagattaatacagaaccatcctgccgttttggataagtctatccagctgtggaaagggcaacctgtggtttctctgtactggtgtttaatgggggaagaatatgaacagctttaaagagctgtgtattgtggttactactattaaaaaataagatctgcacgagtctgactggcctttgggtggcctttgtggacggctcgtagctggaaagtgttgatctgggttttctggcattcttttaagttaaaaagttaacatcgggacatgggtttgatctgtacctgatgacagtgcagagattctccacagctggataaaaatgtcacaaagctacttactgtacatgggcagtatcagatttcaaatcctaatatttcagctgtgcttttaatactcaaaatattaggggatggggtgttgaagctttcccttttttgcttttaacaatttatagaatttaacagatgtactgtctttcatgtggcctcacatttaaagttatgagaacatacacatggtttacaacttttactatatacctttccttggccaccaagtattttaaaagtgtgccaccttttaacctttactttttttaagttgaaggtgatactttttctatatatgatgaaactcatgtcaactgaagtgagtgtaatctcagataccaacattattatattttaaaatcacgctatggaaatatcacctgaattctgtcatttgtcagatttacagtacctttttttctttaacttttagcattaaataaaaataaaattgggagcactgaacattttctgaggccttttttaattttctaaagcaagcttagaatggctattgttttaatcactaatggcaatgtgactaaaggatgtgtgggtttggggttggggtttgcctgaacttcaggagataaaagacatggaacaaaaaggcaactgatggtataaaatagaagtgccagggactgc

SEQ ID NO: 472445 - DNA, 893 bp, Homo sapiens
agaaaggaaaacaaatgcgttagattggaacgcttcgttctgcagcattgggagagagaggtggaagtcactcgtgtccctgccccctcacagtccccctgcccacgtgctcctgggccctggaaggactctttgtgctgagcggcacattatacgggttcaggaggcacagcacagggagccattgggtttttgagccagagaggaaggtgtattcctcagacgcagccaccaggagggcatttctgccaccgttgttttctcaggtccaggtacatcactatcatatggatgcattcatcccacactcctcctcttttctgtctgttcctccacagaagctaatatccctttcctctttcccctgatctccgtccctgtccctgttgtcccgctccacagatacccacagatgaggggagcctgtggaaatccagattccaagtcagcaggtccagggtggggcctgagagtctgtgttttcaacaagcttctgggccacgctggtgctgctggtctgagcactaccctttcagtgggaagcctaggcggtggtataatgatatcattgtctgcaggtctgggactctgggccctggggcagaggcagggcggcaacctgagctgcctggcagagatgtcagaatccgcagagtcaggaggaggaggccatgctcagagatactggacacacttctgtgttttgctgaatccctggaaatcggagtctgaggctgcagtgtgcaagccaagatgtttactggagagtgctttggggtcaacatctgccaggggtgaaggatgcagaattggggaaaaagagaggttgaaccatgaaacaggtgcaacagaggcctcgcccaatccctggggagctctggattgagcatggc

SEQ ID NO: 472446 - DNA, 712 bp, Homo sapiens
cagtgggtcaggacaatgtggctgccacacggtgcagggagggatagtcaccatatgcaggccacattgaccgagatccatgcgcatttgcttcatgttgttcgggatggaaaatcctcatcctttgtccccgaagaaaaatatctgtgaggccatcagtctaagctttaaaggtcatggagggaaaaggtaccagcgccatctaactctgctggaccaaatccgtgaggggaatgaggaattccattacctagtctccagggctctctggcggcttgagcccccagatgctctggtggaggctgtgcgccgctcctccgccctcctcctgcctggctgtcggccgccgctgcctgtgcaggaggctcatcgttatgccagggctgtaggtctgctcaaagcttcccagtcaccagaaacatgttcttctggggctgcctttcccacttggctggcggtgcctgacttgcatatgaaaccggcccttgggggcaacgggacttcaagatagaatggaccctctgtcatcatttttgcatctccaacagccacaacagtgctttatatataacaaatgaccaataaatgcctatcaaatgcattgaataatggagaatgcctttccgtcctttgaatcacagcttaagggattacctcttccaggaagtcttttgggttaatggagggcaccttcacctttcagtataatcct

SEQ ID NO: 472447 - DNA, 564 bp, Homo sapiens
agaaaccacagtggggtctttgtctttttccattctcctcactcccgcggtggctgcagggatgtacaatcacgtatcacaactgcgtgacacacgtccattctgcgccagcatgcactccgggacatgtcaataccacgttgatggaattgtgcctgattcccactcaaatccatccatccctcctggcattggtggggatgttttttccctaacgattgtcttcaccaggatcgtgggttacaaaatggaagctcagtgcttcctgcttcgagttccagtagaacaaacatgcaagagactcctcggcttggaaactcttcaaaccagggaagggctgctgatgtgtccccaggaggggaagggcaggaggagcacagttgtgcaggggggtgtttcacatgcttctctaaagaagagcttcctaaagtgtaaaaaggctggggaaagacacatttcccaaggcctggggccagtgcggggacaaacgcgaggctggcgcacgtgcattgcgggttccgcgcgccatctggtggcttcgggctgacattgggcgcaccatcc

SEQ ID NO: 472448 - DNA, 820 bp, Homo sapiens
ggttatgcaactgcctgtgcattccggaccatgaacgcatgcaagatttgtgcatttaagaagcatcttttcagtgggaggatgcggctgactttgggtgtacggcagcagtcctcaacctttttggcaccagggaccaggtttcgtggaagacaatttttccatggagccgggaaggtgggggtggctgctgatttgataggaggcggagctcaggtggtaagacaatctaaggccgctgctgatttgataggaggcggagctcaggtgataatgcccactcgcctgcagctcaccttctcctgtgcagcctggttcctaacaggtcacggaggggtagcggttcatggcccaggggttagggacccctggtggaattcctgggaagaagaacatcggtggggagtaatgatgctgggtgaagggatgaagggaatgaagttagatttgtaaaagtggagactgagaatgatgtcctgaataatattcaaatgaagacgtgtgatatatgttgacagaaacaatagttttctgcacattttatgttgaaggtaattgatatttactgacatgttaaaagggcttaaaatagaaacatttatgcattttgtcaatgaaaaacggaatgactgaaatatgaaaaaagtcttgcctgtgtaatgtcagataaccttaaagtcagataactttatataaaaataactgtaaatttaaataactaatttttgtcttatccattatgttattatatgtcaagctctttgaagttgggaccctgttttctctattgactaagaggcagatctttgtgtttagtagc

SEQ ID NO: 472449 - DNA, 779 bp, Homo sapiens
ggtgagggctttggaattagatggactgggtctatccagctgtcatgctaggtaacccactctctgagacaactgccatgtggtatgcccacgtcctaaccactgtaccatctgatggcaaggacaaggacaggatagaggaggaatcaacaggctgtggagaaggctccagcatgtccctcttcctcaagagccctcaggctgcaggagagggcagtgtctttgcctggaggtactgtcctgcatataacctgccctcctgtaaaactgtggttcatcctttgcattccaacagccaaatttcagtccacatagaagccaaagaatctggagatgctaacaatctgatgaggaaaaacaccagcaaagaggagtatgcatatttgtctgggttttgtgtgcaggtcattagcagcaccaaaacatcaccagattatgttctttccctggaacctatgctagtcaggagcatgactggggcttcggccgcatgtgaatggtggcagcgttttctgacccaaagtccaggaatccatatggatgatctggaaagggcaagtgggttgggacacgtgaacaaaggaacctgtctgttctacttggtgtttttcaaatctatccaagcatggaatatgttttccttataacgcctgttaactgcattacattttggaaaacgttctatttatatgtggttattttcaaataacagtgtagtgagtttggttctaagtgtcttaattttttttgtaattgttcatattcctttgttttgagga

SEQ ID NO: 472450 - DNA, 1114 bp, Homo sapiens
ctcccttccctctactcccagagcccgcccggcaggaccaccgagcaaggccttggaaaaccagagagattagagcggtgagtcgcgccggtcacgttggacgcctgcgcgttaggagattctggagccagaacagcggaattgccttcgcccgccctgcccctcgcctgcttcagaagcttccaggaactcccgggtcggcgacccagcccgagccgcctggggccccaagggaagctgaacgccctgtgggctcctgggatggttcttcccgttctttgcgccgccttcacccattgaagagcctgtgcccaccctgcccagtcgctctcggggccgcggaggagcttccgctgccatcttcggatcctgtgttccgcacgggggctccaccagggcagggatggtgcagaatggggaaatggagagagaacctgaaagagccccaaactcgaggacctattgctccccaagaataacatcttccagaagaactagacagaaaactaggcgtctgggaactctgaaatccttggaggagtagcatcatcatgaccctctgtgttccttttggcaaaggacttgctcccattgtttgcttgttccattgtctgtctgttaaataaataaaacccttttcatatatctttaaacttactgttatgtagttttactttatgcactataagctttgtgattcattattacttttatttattacttgcatccctgaaatccatcaaaagcccgggagagacaatcaagtgcttcaggatcaagagctaaacaggggaggacaaagcggggctccttcactaggagtcaagccaaagtcaactgatttggtctccaatggagaacagaactcggttcaccagcgacgtgaggacgcggcccagaggaggcggactttctcttcatggtgccttcagataggaaatctaggattttctttctttccctttgatctacttccaactctccctttctatttcttcaagaactttttcggatccctagctgggaaggacctaaggggccagtgcccttccctactggtccctccttgactgggtgtcttcggagcccaagctcaccctgaacattactgccc

SEQ ID NO: 472451 - DNA, 573 bp, Homo sapiens
tttgctgattgagcggtagagggaggcgatgttcgctgacccaacaaggacagcaggtggagtaggcacagatggaaaactgctgccggtgccctaagcagaaggcaggtggaaaaatcagcactaggacgtcgaagcgatggtaccacagtcaaatcccacgacgtctacactctaccaagcacttgcgcacgctcccccttttccattcagtactcccaagaggggttcggaagaaccccgagtccactgtaagctcaggggagagcgggagccagggaggtgaagtgcgcagactcggcagaggcggcgggcagaaccgcggggggacagtatggcgctgtggggccaggggtaaaccctgctttccggctttctggctgcagataaaggcctcagctggtgcaggaatcaaaagcaaaccaaaagacacgtgggttcgccccaccggtgccctctgcacgggcatcctgggctgtcccattgtctagtcctggtctcccctgcttctccctcctccttttcacgttttcccttttgactcccctgcctctttcccgctcccgccccacc

SEQ ID NO: 472452 - DNA, 1489 bp, Homo sapiens
atatgtccctttgctaattgttcttttgcccatctatcaggatgagcatccaggccccacccagactcctggagctggcagggcagagcctgctgagagaccaggccttgtccatctctgccatggaggagctgcccagggtgctctatctcccactcttcatggaggccttcagcaggagacacttccagactctgacggtgatggttcaggcctggcccttcacctgcctccctctgggatcactgatgaagacgcttcatttggagaccttaaaagcattgctggaagggcttcatatgctgcttacacagaaggatcgccccaggaggtggaaacttcaagtgctggatttgcgggatgttgacgagaatttctgggccagatggcctggagcctgggccctgtcctgcttcccagagaccacgagtaagaggcagacagcagaggactgtccaaggatgggagagcaccagcccttaaaggtgttcatagacatctgcctcaaggaaataccccaggatgaatgcctgagatacctcttccagtgggtttaccaaaggagaggtttagtacacctgtgctgtagtaagctggtcaattatctaacgccgattaaatatctcagaaagtcattgaaaataatatacctgaatagtattcaagagctggaaattcgcaacatgtcctggtcacgtctgataagaaagcttcgttgttacctgaaggagatgaagaatcttcgcaaactcgttttctccaggtgccatcattacacgtcagataatgaactcgaaggacggttagtcgccaaattcagctctgtgttcctcaggctggaacaccttcagttgcttaaaataaaattgatcaccttcttcagtgggcacctggaacagctgatcaggtgcctccagaaccccttggagaacttggaattaacttatggctacctattggaagaagacatgaagtgtctctcccagtacccaagcctcggttacctaaagcatctgaatctcagctacgtgctgctgttccgcatcagtcttgaacccctcggagctctgctggagaaaattgctgcctctctcaaaaccctcatcttggagggctgtcagatccactactcccaactcagtgccatcctgcctggcctgagccgctgctcccagctcaccaccttctactttggcagcaattgcatgtctattgacgccctgaaggacctgctgcgccacaccagtgggctgagcaagttaagcctggagacgtatcctgcccctgaggagagtttgaattccttggttcgtgtcaattgggagatcttcaccccacttcgggctgagctgatgtatcagcgctggtctttggatgctccttggtacgagtgacttgggcaacatggttggtggtgggagggaggcagaatcctggacaggaagagacaagcaacccactctgggtctttttctctgctgagagctgt

SEQ ID NO: 472453 - DNA, 1345 bp, Homo sapiens
gagcacctccctagcatcaactctctgctctgagggtgaccctctcctcagatccttattagaggaaaaaaggagcagcccctgtcttctgcaagcatgtcaattgtgggaactgagaatgtaggctgtgtggggccacaggacattctcgttcccattgttttagggtggatgagcctccaggccccacctagactcctggagctggctgagcagagtctgctgagagaccgggccttggccatccccaccctggaggagctgcccagggagctctttcccccactgttcatggaggcctttaccaggagatgctgcgagaccctgacaactatggtgcaggcctggcccttcacctgccttcctctagggtccctgatgaagtcatgtaatctagagatctttcgagctgtgctggaggggcttgatgcactgcttgcccagaaggttcgccccaggcggtggaaacttcaagtgttggacttgcggaatgtggatgagaacttctggggcatatggtctggagcttctgcactctccccagaggccctgagtaagagacgaacagcagggaactgtccaaggccgggtgggcagcagcccttgatggtgatcctagacctttgcttcaagaatgggacgctggatgaatgcctcacccacttcttagagtggggcaagcagagaaaaggcttactgcacgtgtgttgcaaggagctgcagatttttggaatagccatccacaggatcatagaggtcctgaacacggtggagctagactgtatccaggaggtgcaagtgtgctgcccgtgggagctgtccattcttataaggttcgccccttacctgggccagatgaggaatctccgcaaacttgttctcttcaacatccatgtctctgcctgcattcccctagacaggaaggagcagtttgtcatccagttcacctctcagttcctcaagctggactacttccagaagctttacatgcactctgtctctttcctcgaaggccacctggaccagctgctcaggcccccttggagacagtcgtaatgaccgaatgcctgctgtcagagtcggacctgaagcatctctcttggtgcccgagcatccgtcagctaaaagagctagacctgaggggcatcacactgacccatttcagtcctgagcccctctcagttctgctggagcaagctgaggccaccctgcagaccctggacttagaggactgtgggatcgtggattcccaactcagcgccatcctgcctgccctgagccgctgctcccagctcagcaccttcagcttctgtgggaacctcatctccatggccgccctggagaa

SEQ ID NO: 472454 - DNA, 1038 bp, Homo sapiens
cccgtacactcatgatcaactctccctaaaggctgacagtgaactcttggggccgttttattctctgaggttagcaaggagtcatctactagccattcaggaggccagctgggaagacaaaataggcaccccaaactcagcaacttcataacaccttcctctccccgcctgaagccttaaactgcatcaagtcaaagaaacctggggcaaatccttaacatgtttttgactgcagtaaatccacagccactctctactccgagctggcagattgagaccaagtattcaacgaaagtgctcactggaaattggatggaagagaggagaaagttcaccagagacactgacaagacaccccaatccatttacagaaaagaatacatccccttcccagaccacagaccagaccagatctccaggtggtatgggaagaggaaagttgagggactaccttacaaacacctgatcacccaccaccaggagcccccacatcgctacctgatcagcacctatgacgaccattacaaccggcatggttacaacccggggctgcctccactccgcacttggaatggacagaagttgctgtggctgccagagaagtctgactttccccttcttgctccccctacaaactatggactctatgagcagctcaagcagagacagctcacacccaaggctggcctgaagcagagcacttatacttcatcctaccccagaccaccgttgtgcgctatgtcctggagggagcatgcggtcccggtccctccccatcgcctgcatcctttcccacacttctgagagctgccaccccaggagcagctcagatagaatcagctggagaccacagcatcactggacttgccagacaacaagtggcgcagataaactcagagtacgagatctggcccgtcaaaggtgctctcagaatcatcatctgcatttggcggtacctgtcccccctcaaaacccacaggttcctttcttttccatccaacaattaaagatctttgacactattgcagggctatgtac

SEQ ID NO: 472455 - DNA, 1825 bp, Homo sapiens
atccaggatgcataaagagatacctgccttgacagctcagtctgcaggagggaaacagaagctcagaaatattctagagaccctgagcaagtgcctgggggagctttggtattctggtggagattctgtggaacttcggaatctaatcagattcatcaagatgagcatcagggccccacccagactcctggagctggcaaggcagaggctgctgagggaccaggccttggccatctccaccatggaggagctgcccagggagctcttccccacactgttcatggaggccttcagcaggagacgctgtgaaaccctgaaaacaatggtgcaggcctggcctttcacccgcctccctctagggtccctgatgaagtcgcctcatctggagtcattaaaatctgtgctggaaggggttgatgtgctgttgacccaagaggttcgccccaggcagtcaaaacttcaagtgctggacttgaggaatgtggatgagaacttctgcgacatattttctggagctactgcatccttcccggaggctctgagtcagaagcaaacagcagataactgtccagggacaggcaggcagcagccattcatggtgttcatagacctttgtctcaagaacaggacactagatgaatgcctcacccacctcttagagtggggcaagcagagaaaaggcttactgcatgtgtgttgccaggagctgcaggtttttggaatgcccatccacagtatcatagaggtcctgaacatggtggagcttgactgtatccaggaggtggaagtgtgctgcccctgggagctgtccactcttgtgaagtttgccccttacctgggccagatgaggaatctccgcaaacttgttctcttcaacatccgtgcatctgcctgcattcccccagacaacaaggggcagttcattgcccgattcacctctcagttcctcaagctggactatttccagaatctgtctatgcactccgtctctttcctcgaaggccacctggaccagctgctcaggtgtctccaggcctccttggagatggtcgttatgaccgactgcctgctgtcagagtcggacttgaagcatctctcttggtgcccgagcatccgtcaattaaaggagctggacctgaggggtgtcacactgacccatttcagccctgagcccctcacaggtctgctggagcaagttgtggccaccctgcagaccctggacttagaggactgtgggatcatggattcccaactcagcgccatcctgcctgtcctgagccgctgctcccagctcagcaccttcagcttctgtgggaacctcatctccatggctgcccttgagaacctgctgcgccacaccgtcgggctgagcaagctaagcctggagctgtatcctgcccctctggagagttatgacacccagggtgctctctgctgggggagatttgctgaacttggggctgagctgatgaagacactgagggacttaaggcagcccaagatcattgtgttctgcaccgtcccctgccctcgctgtggcatcagggcctcctatgacctggagcccagtcactgcctctgttgaatgcctgccatcagggtggatatatttcaagctttcttctggtcatttcggagctgaaacctaggccatgagtgcatgttaaagggagcacagacccatcgtttcaaatgcctcctcagtgtgaatgggaaaggaatgaggatgcaggaggggcaggactgggggaaaagttgacttggagtggatgggctctttagagacctgtgtcccagagaatcagaaatgggaatctgaattgct

SEQ ID NO: 472456 - DNA, 3234 bp, Homo sapiens
ggctgtgaatccaactggtcctggactttttttggttgatctcaagctgcatgctgggagaacgactactctcttcaaagctgtcagacagggacatttaagtctgcagaggttattgctttcttttgtttgtctgtgccctgcccccagaggtggagtctacagaggcaggcaggcctccttgagctgtgatgggctccacccagttccagcttctgggctgctttgtttacctactcaagtctcggcaatggtgggggcccctcccccagccttgctgccgccttgcagtttgatctcaggctgctgtgctagcaatgagcaaggctccgtgggcacaggaccctccaagccagttcaaactgtcaccatgcaacctggtgtcagtggaagaatgagcctccaggccccatccagactgctggagctggcagggcagagcctgctgaggaaccagttcttgaccatcttcaccctggatgagctgcccagggaggtcttccctctgatgttcatggaggccttcagcatgagacgttttgaggccctgaagctgatggtgcaggcctggcccttcctccgcctccctctgggatccctgatgaagacacctcatctggagaccttgcaagctgtcctgaggggacttgatacactggtggcccagaaggttcgccccaggaggtggaaacttcaagtgctggatttgcgggatgttgatgagaatttctggaccatatggtctggagccagggtcctctcctgctccccagaggccatgagtaagaggcagacagtggaggactgtccaaggatgggagagcgccagcccttgaaggtgttcatagacctctgcctaaaggaaagtacactggatgaatgcctgagctacctttttgggtggatccactacagaagaggcctagtgcacctgtgttgtagtaaggtgcagaattactcaatgcccacttcaagtttcagaaatctattggaaaggatatacccagacagtatccaggagttggaagtctggaaaaagtgctctctcaataaaacgggaaagtttgccccttacctgagccagatgagcaatcttcgtgaactctttttagccttcggttatgagcgtgagttgtacgtgagcgtccagtacctcaagaaccccttgggggcctttatattcagtgatgcttacctaactgatcgggacatggagtgtctgtctcagtacccaagcctcagtcagctaaaggagctgcgtctgattcatatcctaatgtggaccaccaatcttgagccccttggagttctgctggagaaagttgctgctactctcaagaccctcgtcttaaaggactgtcggatccaggacccccaactcagggtcctcctgcctgccctgagccactgttcccagctcaccaccttcaactttcatggaaatgagacctccatgaatgctctgaaagacctgctgcgtcacacacgtgggctgagcaaattcatgaagatgagcatccggactccacccagactcctggagcttgcagggcggagcctgctgagggaccaagctttggccatgtccaccctggaggagctgcccacagaacttttccccccactgttcatggaggccttcagcaggagacgctgtgaggccctgaagctgatggtgcaggcctggcccttccgccgcctccctctgaggcctctgataaagatgccttgtctggaggccttccaagctgtgctcgatgggcttgatgcactgcttacccaaggggttcgtcccaggaggtggaaactccaagtgctggatttacaggatgtctgtgagaacttctggatggtttggtctgaagctatggcccatgggtgcttcctcaatgccaagaggaacaaaaaaccagtgcaggactgtccaaggatgagaggacggcagcccttgactgtgttcgtagaactttggctcaagaacaggactctggatgaatacctcacctacctccttctatgggtcaagcagaggaaagatttactacacctgtgctgtaagaagctgaaaattttgggaatgcccttccgcaatatcagaagcatcctgaaaatggtgaacctagactgtatccaggaggtggaagtgaattgcaagtgggtactgcccatcctgacacagtttaccccatacctgggccacatgaggaatcttcagaagctcgttctctcccacatggatgtctctcgctacgtttccccagagcagaagaaggagattgttacccagttcaccactcagttcctcaagctgcgctgcctccaaaagctttatatgaactctgtttctttcctcgaaggccacctggaccagctgctcagctgtctgaagacctcgttaaaagtcctcacaataactaactgtgtgcttttggaatcagacttgaagcatctatcccagtgcccgagtatcagtcaactaaagaccctggacctgagtggcatcagactgaccaattatagtcttgtgcctctccaaattctcctagaaaaagttgcagccacccttgagtacctggatttagatgactgtggcatcatagactcccaagtcaacgccatcctgcctgccctgagccgctgctttgagctcaacaccttcagcttctgtggaaatcccatctgcatggccaccctggagaacctgctgagccacacaatcatactcaaaaacttatgtgtggagctgtatcctgccccccgagagagttatggtgctgatggtactctctgctggagcagatttgctcaaattagggctgagctgatgaacagagtgagggacttaaggcaccccaagaggatcttgttctgtactgactactgccctgactgtggcaacaggtcattttatgacctggaggcagatcaatactgctgttgaatgcctgcctatttggatgggtatgtcaaacgctttcttctggacacttggaaactaaaacctaggtcttaggtacatcctaaagggagcacagaacccatcatttcacacataggctctgaaagtgggaaaggaaagctgatcaagcaggggccggacttgggggaaatgttgccatggattcgatgggactttggggacctgtgtcctgtagattcgaaaatgggaatctgaatgtctagagtggaattcaggcttgagaatacatgagggagttactcttgcatggatgg

SEQ ID NO: 472457 - DNA, 624 bp, Homo sapiens
tgtcgccaaggtagcaatttagtgactatacccatggggaagaaaactactctccatgatgctctaatggtggatacatgtcattatccctttgttaaaatccatagaatatacaaaaccagcaatgatccctcatgtgaactatggacattgggtgataatgatgtgtccctgtggctcattggttgtgatgaatgctctgtgctggtgtgggtgctgatcctgtgggggtgctgtgtattgaagggggaagaagatggcacccgagacatacggattggaaattttgatcttattatgaatgaatccagtccagaaatgcccaccctgccccctgctggctcctggggctctgctctttgggggaatcatgataaaattgtggcagagagtagaagttgagccccattgcatgccctgagttcttgttgcctctctattatcaggaaaaggagggagagaggggatgtgttatgagaaaatctctcatcaatctgacctagctccccaaaaagatgtaacttttaaaatgtcagatggaaatatttaaaaagtgttacatgcctgtatagttttagtattttacttaaagggaatgtggctgtctttactggctacaaccag

SEQ ID NO: 472458 - DNA, 2128 bp, Homo sapiens
agatccttgaggaattgccacactgtcttccacaatggttgaactaatttacactcccaccaacagtgtcaaagcattcctatttctccacatcctttccagcatctgttgtttcctgactttttaatgatcaccattctaactggcctgagatggtatctcactgttgttttgatttgcattagagaagtgcaaatcaaatgaccagttatgatgagcattttttcatatgtctgttggccggataaacgttttatttttgagaattgcctgttagtatccttcacccactttttggcggggttgtttgtttttttcttgtaaatttgtttaagttccttgtaggttctggatattagtcatttctctgatggatatattgcaaaatttttctcccattctataggttgcctgttgactctgatgacagtttcttttgctgtgcaaaagctctttattttaattagatcccatttgtcaattttggcttttgttgccattgcttttggtgttttagccatgaagtctttgctcatgcctatgtcctgaatggtattgcctacgttttcttctatggtttttatggttttaggtcttacatttaaatctttaatccatcttgagttaatttttgtataaggtgaaaggaaggggttcagtttcagttttctgcatatggctagccagttttcccaacaccatttattaaatagggaatcctttccccattggttgtttttgtcaggtttgtcaaggatcagatggttgtagatgtgtggcattatttctgaggcctctgttctgttccattggtctacatatctgttttgataactgtaccatgttgttttggttactgtagccttgtcgtatagtttgaagtcaggtagcatgatgcctccagctttgttctttttgcttaggattgtgttgtgtatacaggttcttttttgcttccatatgaagttttaagtagtttttctaattctgtgaagaaactcaatgataccttgatggggatagcattgaatctataaattactttgggcattatggccattttcacaatattgattcttcctacccatgagcatggaatgtttttccatttgtttgtatcctcttttatttcattgagcagtggtttgtagttcttcttcacatcccttgtaagttgtattcctatgtattttattttattttagcaattgtgaatgggagttcactcatgattggttctctgtttgtctattgttgatgtataggaatgctcgtgatttttgcacattgattttgtatcctgagactttgttgaagttgcttatcagctttaggagattttgggctgagacgatggggttttctaaatatacaatcatgtcatctgcaaacagagacaatttgacttcctctcttcctatttgaatactctatttctttctcttgcctgattgccctggccagaacttccaatactatgttgaataggagtgatctgatgttgaccttagttgaaggtctgggatttgaaaactgctgggattggaatcctggctctcaccttactcccacctacaccagtaggatatatagtccatgggaagcatctgggaacatctatcgtgctcgcatcccttatgccaagagacccaccaaaaaagaaagtcccaagaaacaggaaggaacaccaccagcaagagacctcacactcacagacctcagagatattcatggcctgaggggcacaaaggagagtgtgttgggagcggatccccacttagaaagaagcaagacagtgccccaaggcctggaagatgtcagctgcttcctctgtgctgtgctgtggggaaggccatcaccgttttaacgcctcttgagtctcagatccaagtccccagtttatcagggatgtggctctgtgaaagccagagaacccggtccccagggctgctgccatctctctcctcctcatttactctggcccccatcagctcctctgggccactccctttctggagtccccctggctccatccggcggcagtccagagcagcagctgaggagctccctgctttatgccttgctgtgggcactgaaatagctcagtagaatttggggagaatgtatg

SEQ ID NO: 472459 - DNA, 1142 bp, Homo sapiens
gatggtaatgcctatccaggaggagtcgtggggaccctgcctcatcaaagtgacccttgactcaactgctggaggagacttggatgagagcctggggcatctgagtggggttacatcagcacagagagagattactaaatatgacgtgcagaagccacttggtccagatccttcctgttccccaggaaggcttctggggaacagccttgctatcattaagttcccgctgaccaccaagtctgccatgaagaagacagaagacaacaacacacttgtgttctctgtggatgttaaagccaacaagtatcagattgcaggcatgagccactgtgcctggctgaatattcttaaataataagacaaatattcattataccaggcttttccttttctacctttacaatgagtaagaactttttgcccagttgttgcccaatctgtgtcccggagatgccctttccagtcttttcaagaatggtaggatagggtgtcattaaaatgtgagccatatagaaaaattaatgttgtgtagattttatacatcgtgtgaaaataacttgagtttctctcaagaaagccataaaatgcaagatacgcacaaaggttaattacaaacaaatcgttcagaacaaagagaaagctcagatttatttcattttgcctggagaaaggtagccctgagttctaacacagtgtactgtttaattatagtagccttccaataattttaacatctgatagtgtaaatcttggttctttgcatttccacatatattttaagtaaacttgtcaatttctgcaaaaaaaaaaagcagataaaattttgattgggaatgaattaaattaaaagatcaaattggggagaatttatatttttcactatcaagtcttccagtctatgagaatagtattctgcatgtcttttagtgttctttaatttccctcaataatgtttcatagttttcaatatagagatctcaaacatttttcagtagattaattcctagctatttgaggttttgaagtgatattataaatatctttttaattattttaattcactttttacatttacacacagtaaagtttaaaattttggtgtgcaactgtataagttttgataaagtgcatatagttgtata

SEQ ID NO: 472460 - DNA, 1119 bp, Homo sapiens
tgccatctcaaaagtttttcactggagatttgtcagaatgagcctccagtccccatccagactcctggagctggcaggccagagcctgctgaggaaccagttcttgaccatcttcatcctggacgagctgcccagggaggtcttccctctgatgttcatggaggcctccagcatgagacattttgaggccctgaagctgatggtgcaggcctggcccttcctccgcctccctctgggatccctgatgaagacacctcatctggagaccttgcaagctgtgctgaagggacttgatacactgctggcccagaagcttcgccccaggaggtggaaacttcaagtgctggatttgcgggatgttgatgggaatttctggactatatggtctggagccagggccctctcctgctccccagaggccatgagtaagaggcagacagtggaggactatccaaggacgggagagcaccagcccttgaaggtgttcatagacctctgccaaaaggaaaccttcggttatgacgatgagttatatgtaagcggccaacagcagttcgttcctgacttggactgtccattcctctgcctgtactaccctcagatgctttatataagaaagatcagtaatatcaaagagcacctggagcacctgctcaggtgcctcaagaaccccttgggaacctttatattctgtcatgcttacctagctgatcaggacatggagtgtctgtctcagtacccaagcctcagtcagctaaaggagctgcatctgattcatatcctaatgtggaccaccaatcttgagccccttggagctctgctagagaaagttgctgctactctcgagatcctcacgttaaaggactgtcagatccaggactcccagctcagggtcctcctgcctgccctgagccgctgctcccagctcaccaccttctactttcgcggaaatgagacctccacgaatgctctgaaagacctgctgtgtcacacagactcagaaatggaacctgaagttcttgagtgatgcagaagttaccctcacaaggatggttatgtaaaaatgtcaaaaataaatggaatctgaatggaaactttctggtgtcttccatgattgat

SEQ ID NO: 472461 - DNA, 2243 bp, Homo sapiens
gcaggcactcggcaggctgaggcagattcaggaagatgagcatccggactccacccagactcctggagctggcggggcggagcctgctgagggacgaggccttggccatctccaccctggaggagctgcccacggaactttttcccccattgttcatggaggccttcagcaggagacactgtgaggccctgaagctgatggtgcaggcctggcctttcctccgccttcctctggggtctctgatgaaaaggccttgcccagagaccttccaagctgtgctcgatgggcttgatgcactgcttacccacagggttcgtctcaggaggtggaaacttcaagtgctggatttacaggatgtcagtgagaacttctggatggtttggtctgaagccatggcccgtaggtgcttaccaaatgccatgatgaacagaaaaccagtgcaggactgtccaaggatgagaggacagcagcccttgactgtgttcatagacctttgcctcaagaacaggactctggatgaatacttcacctgcctctttctatgggtcaagcagagggaaggtttagtacacctgtgctgtaagaagctgaaaatgttgggaatgctcttccacaatatcagaaacatcctgaaaacagtcaacctagactgtatccaggaggtggaagtgaattgcaattggacactgcccgtcctggcagagtttaccccatacctcggccagatgaggaatcttcggaagctcgttctctctgacatagattctcgctacatttccccagagcagaagaaggagtttgttacccagttcaccactcagttcctcaagctgcgctgcctccaaaagctttatatgaactctgtttctttcctcgaaggccacctggaccagatgctcagctgtctaaagacctcgttaaacatcctcgcaataactaactgtgtgcttttggaatcagacttgaagcatctgtccaagtacccgagcattggtcaactaaagaccctggacctgagtggcaccagactggccaatttcagccttgtgccgctccaagttctcctagaaaaagttgcagccacccttgagtacctggacttagatgactgtggcatcgtagactcccaagtcaacgccatcctgcctgccctgagccgctgctttgagctcaccaccttcagcttccgtggaaatcccatctccacggccaccctggagaacctgctgtgccacacaatcagactcaacaacttatgcctggagctgtatcctgccccgcgggagagttatgatgttcgtggtatcgtctgccggagcagatttgcccaacttggggctgagctgatggggagagtgagggccttaagggagcccgagaggatcttgttctgtaccgactactgccctcagtgtggcaacaggtcactttacgacctggagagcagatacgtgacctactttgatgtggctacggacagacgctccaacctcctggaacattcaaaaccttcttttgtccctggagggaaaaatggatcccacaccggggccgcaggtggagctgcctgccagtcccgcaccttgcgcctgcactcctcagcccttgggcggtcgatgggactgggtgctgtggagcagggggcggctctcatcggggaggctcaagctgtgcaggagcccatggtcgggggtgctcaggcatggcaggctgcaggtcccaagccctgccccgcagggaggcagctaaggcctggcgagaaattgagtgcagcaccagtgggcctgcactgctgggggacccagtgcaccctccgcagctatggcccaggtgctaagcccctcactgccaggggacagcggggacggccgggccggctggcctctccaagtgcagggcccgagcccacgcccacccgggattcacgctggcccacaagcaccgcacgcagccccggttcccacccacacctctccctccacacctccccgcaagctgagggagccggctcctgcctcggccagcccagagacgggctcccacagtgcagcggcgggctgaagggcccctcaagtgcggccagagtgggcaccgagcccgaggaggccctgagagtgagcgagggctgccagcacgctgtcacctctgagctctatctccactcactgctacctcagccccccgggttcaagtgattctcctgcctaagcctctttgccaaagtgctaagattataggcttga

SEQ ID NO: 472462 - DNA, 1086 bp, Homo sapiens
gagagccgcttccttctcgccgcggccggcgcgggccccccggccatgcgcccccgagccccagcctgcgccgccgcggcgctcgggctctgcagccttctgctgctgctcgcgcccgggcacgcgtgccccgcgggctgcgcctgcaccgacccgcacaccgtggactgccgcgaccgcgggctgcccagcgtgccagaccctttccccctggacgtgcgcaagctgctggtggccggcaaccgcatccagcggatccccgaggacttcttcatcttctacggcgacctggtctacctggacttcaggaacaactcgctgcgctcgctggaggagggcacgttcagcggctcggccaagctcgtgttcctcgacctcagctacaacaacttgacccagctgggcgccggcgccttccgctcggccgggaggctggtgaagcttagcctggctaacaacaacctggtgggcgtgcacgaggacgccttcgagaccctggagtcgctgcaggtgctggagctcaacgacaacaacctgcgcagcctcagcgtggccgccctggccgcgctgcccgcgctgcgctccctgcgtctggacgggaacccctggctgtgcgactgtgacttcgcccacctcttctcctggatccaggagaacgcatccaaactgcccaaagggatcatctccctgggctttgggtcctaggactggcgggtgtggattacttatgcgtctctgagacagctcagagcccagactggcaccaagctgcttgccttcaaatcctgcctctacttcttactgattgtgtgatctttttgtacccgtttcctcatctgtaaaatggggctgatacagtatccaccttctaggcttgttaggaggattaaaagggcattatttataaaggaccgagaacagtgcctggctcacagtatatactatggaagtaacctcacttctgtgtccccacctgtgacagtagaaggtcagataatggcgaggtcttctccacctgtgtaggctcatttctcatgaaacctctccttgcccaccccaaaggccccaccccgaggtcacttcccc

SEQ ID NO: 472463 - DNA, 2238 bp, Homo sapiens
ggggagatttcaataaagaccctagtgtcaaccaggagtcttgcccccgatccggttcccttctttaagccagttttatggtgtgggggctgagttttcaaggacagaccctattggattctttaaaatgcgtttctttgattcccctgctgcctgcacctgcctctaagccttcttccaaaatctctcccaacagaaccattgttcctcctccatctaaagacaagaccaagatagcgatggtaaaagttaaagacttaaaacaaactttggcaattgagacaggataccaagatgtaaatgcctggttggaatggatcaaatattccgtccacgcgttaaacaaaagcaattgttatgcttgtgcgcacggcaggccagaggcccagattgtcccctttcaactaaggtctttcaactctcacgtccatttagacacaattaaagtcccatggggaataccagatcgatttaaagtccaaaatcaaatagctgcaggatttaagtcaatatgttggtgggtgacaattaataaaaatgtacattggataaactacatctattacaaccaacagcgatttattaactacactagagatgctgttaaaggaatagctgagcaattaggggccactagccagatgggttgggaaaataggatagccctagacatgatattagcagaaagcggaggagtttgcatcataattaaaactcaatgttacaccttcatccaaaacaacaccgcccctaataaaagtataacaaaaggattgcaaggtctgactgctctgtccaatgagttagccagcaattcaggggtaaatgacctctttacaggatggctaaaaaaaggtacttcggtaaacggaaaggaataatagcctcaattcttacttccctcgcgtccgtaataggtgtacttattcttgaagggtgctgtgtcataccatgcatccgtaattaaatgcagaggctcataaaaatggcacttactaaaacctcccttaactatcttccaccttatccagagaagcttcttcttttagaaaatcaagcaaaacaactaagccaagacatgttaaaaaaaaagtttgaaaagaaagctgtaaggaaatacaaggggagggattgttagatatgagttctaaatttcttttcaaaaaatcgatatgtcagtatgttcaattctttgccttctacttttaaacttcctcataaagcaacctttttcaattacctgctccaccctgactcattctgatcacctgctccaccctaactcattccaattatctgctacctgctctgccctgactccctccaaagcactcaccccgtcattctctttaaattagccaatcggaattagtttagcctgtgcagtctaaccctagccaataggggaaggacacagcagcaggggccatgtgtgtcaggaataagaaccccttcccctcccttgtccaagtgtgcactcaccattgttccatctgtaaaggcacaccgttctatagagaagtaacttgccttgctgagaattaaaaagaaaattttatatttgagtgctatttcttttgaggcaccgaaacttcatatataacaagattaacaacaataataaaatagaaccattaacataccagcatcactacttttgcgctttgggggcaattattaagtaaaataaggctggaacacaagcactgcgataccacgactgtcaatctgatcacctaagatggctacaaagtgactaaaaggcagatagcattgacaacgtgaatacgctggacaaaggggtgacccttgagtcctgagactcaaagactttggtgtgctgagagaaagggagcacaacagctcaagatttcatctgctactcagaaagctgagcagggtctcatgcttccagatcccctgtgtttcacttcagctcctttagctaaccgagtctcgctgcccaaggcccatattccttctctcatgagctgctggctctatctggtccaggagggacccccagctgaatgcaattccttattacctcccactcctccatcctgatcaaaaggtcatgtgaccaaccttctagattctagacacatccgggggtgtgggatagaaggcaggtgtccttgaatcatgacctagcctcagcatccctctaaattagttgcatgtaacccaatctcccccacctaggcttcactgtgtttcaatctttttgaataaagc

SEQ ID NO: 472464 - DNA, 742 bp, Homo sapiens
cacagtgttgggggtcagcatgtttgagtgaacatcctggctcccggagaggcagcaaggcatagtgtggtaagggacatgggacctggagttagcctatccaagttcaaatcctggatctggatctaccacttcacagctggaggagttgtggttacttcttgggccctgtgctggttccttttaaagaggagagagaacaaacagcagcaagctggggcagggtcttctgggaactgttataaacccccgatcgctttcagaacaccttataaagtcaacctgtgtgcacacagacgcatgacattgaaaggtccccctggccagatcaccaggaaagctcctcatgttgcaaggccactggccagccggagctcaaataccagtagtatcagctggaccacaattccaaagctgcctgatgatcaacagaatgggctgccctggagtattgagaaacctgtggttagaggtattcaagtagaagcaacagaacaggctgtggtgggaactacagaacggcccccgaattcaatagacaattggcctgggaggatcagagcttccgcagttcttccaggcactatcttatctctcctctcaccccttacatgttggaggtgaattttggctttattgactcagggaggagttaggctacttctcagggcctggaatggtctaaagtaacacctctcagaatctggagatactttttggcccgtggagtacttcatgctgt

SEQ ID NO: 472465 - DNA, 515 bp, Homo sapiens
tatcacactttcctctgctcagctgtgaggaaaactgtctgatgacacttattgaaatggggatcagaaggctccaagttctgatcacaacccagaactacgttacaatcttcatgggacctagttgtgataaccaaaaatgcccatggaagggtgaggaaggagacctgtctttggttaagaaccatcggtctaggattgactgtgtaacccagagaggcaactcagcttcatggagcctcagctttgtgccaggcctttgcccaactgtggttggcagaatactgtccctcaaagatgtccacctcttaatctccagaaactgtgaatatgctactttacatggcagacgagctccgcagaatgtggtcaaggtcatggcctcacttcatatgtgggccagttatgtttactctgtgttaagtgcctggtctatggtcctgatctggccaaccattaaagaggaggatgcatgcaatgcctaacacatagtaggtgcttaagaaatgtgtatc

SEQ ID NO: 472466 - DNA, 720 bp, Homo sapiens
tggaaacacaaccatggaattgtcccagcaggaagagactctggctgcccaaggagtgacatcaagatattggtggaaattccagacaacacctggtttgatctattatttacattcccacgtaatttttacatcttttctggattttaaaattatctctgccaactacccattcctccgctttgctatcaaatgtcgccttgcttatcaagttactccctacaaagtagggaaaacaagtatgtcacagagcagtagccatagacaaaaaacaaacaatagcaaaaaccaaggcaccttctgcctctgggccttgcactggctatttcctgcatctggaatgttctttgctcagatattcctgtttcacaatccactgaagcatccttccataagaattcaaagtcagttatatttggaccaggtacctctgggcccagtgaaggaagacgggcatctaccatctactgatgttaaacttaaccttgagagcttctgggctgagcttatgagtcccgataaaagtctacggatgggaaggaaaggctctctgcctctccagcaaggaaaaatctgcctgctcccctacagacccatgggctgcctggtcttctcatcgtgaaaacccacagataacatgcgggaaagaagatttttttaaaaaggggttagagctgaatgtttttcattggtgactcttcttacctagtgttgtctctg

SEQ ID NO: 472467 - DNA, 682 bp, Homo sapiens
cctccagcaaactccaacagacctgcagctgagggacctgactgttagaaggaaaactaacaaacagaaaggaatagcaccaatatcaacaaaaaggacatccacaccaaaacccaatctgtagttcaccaacatcaaagaccaaaggtagataaaaccacaaagatggggagaaaccagagcagaaaagctgaaaattttaaaacccagagtgcctcttctcctccaaagaatctcagctcctggccagcaatggagcaaagctggacggagaatgactttgacaagctgacagaagtaggcttcacaaggtcggtaataacaaacttctccaagctgaaggaggatgttcaaacccatcgcaaggaaattgaaaaccttgaaaaaagattagataaatggctaactagaacaaacagtgtagagaagaccttaaatgacctgatggagctgaaaatcatggcacaagaactacatgaggcacgcacaagcttcaatagccaattcgatcaagtgggagaaaggaaactctacaagccagaaaagagtgggggccaatattcaacattcttaaagaaaagaattttcaatccagaatttcatatccagccaaactaagcttcataagtgaaggagaaataaaatgctttacaaacaaacgctgagagattttgtcaccacc

SEQ ID NO: 472468 - DNA, 930 bp, Homo sapiens
agtccagtggccgtgctagttgcttttaactggctgacagctgcctggtatttagcacctgagtttgaaggaaaaataggactgaatagcaagtgaaaggggtccgatggtactcatcgcttggcgataggtgatagtcccatctgggttgccaaaatgtgtccggaattggttcctttctgtgagttcttggtctcgctgacttcaagaatgaagccacgtaccctcgtggtgagtgttacagttcttaaagatggtgtgtctggagtttgttccttcagatgttcagatgtgtctggagtttcttccttctggtgggttcatggtcttgctgacttcaggattgaagccacagaccttcgcacatggaaggggacccaagtgggttgctgctgctggctcaggtggccagcttttattcccttatttggccccacccacatcctgctgattggtccattttacagagagctgattggtccattttacagagagccaattggtccatttttacagagtgctgattggtgcacttacaaacctttagctagacacagagcactgactggtgcattcacaatcctttagctagacagaaaagttccccaagtccccacccgacccagaagcccagccagcttcacctctcaaaactactgcagtgatccaggaaaaaaggtgatggtgactcagaccaggatggctgtagtggcaatggggagaaacagttgactacttcataggttttaaagttttctttttggttctctaagataactgagtggacccaggtgatgaggcttaggaattcagctgactggccctgtacctggctctcatggtaacttgtatttaacacttgtcatatggttatgaaataattatttgagtaatttttaaatgtttgtttatcagactgggctgcttttt

SEQ ID NO: 472469 - DNA, 776 bp, Homo sapiens
aagcagctgccgccaccgccgccatgagttgtccggtccagcatttcttctgttgggtacacctcccagacggggtggcggccgggcagaggggctcctcacttcccagaaggggcggccgggcagaggcgccccccacctcctggacggggcggcggccgggcggaggcaccccctgcctccctcccggacggggcggctggccgggcgggggctgccccccggcctccctcccggcccccctgaccaaattcttatgttgttttttttataccaatgcgagaactgactaatgaagaaaatagagacctttgcagcagcccctcctatcacagacccagaggcctaggaggggaggatggttttgtggtccaggcccatgaccctggttaccctgcatggcctcaggacactggtccctgcatcgtagccactccagcttcagccatagctcaaagggcccaggatagtgtggagggtaaacgtggggttggagcaccccccaacagagtccccactgggacactgcctactggagctgtgagaagagtgccatcgtcctccagaccccagaatggaggatccactgacagcttgcaccatgcacctggaaaagctgcaggcattcagcacagctatctcaacactccagccacctcagtcgctctctatcattttcaagactaagctgaagttcattatgcttggtttatgtaactcacatgtcatctattacccattgagagctaaataagttcattccacacacaggggaa

SEQ ID NO: 472470 - DNA, 893 bp, Homo sapiens
agccggcgcatggtgaactcgctgctgttcggggagatggccttggccttcggctgcccgccgggcggcggcggcgggggctgccctggcgggggcggcggcggcggcggggcagggccgggtccgtcgccggtgacggcggcgctgcgggacgacctgggctccaacatccacctcttgaaggggctcaacgtgcgcttccgctgcttcctggctaaggtgcacgagctggagcggcgcaaccggctgctggagaagcagctggagcagcagcagagcgagcgcgagcggcggctgcgctacaagaccttctcccgcgagcaggccgtgcagaccgggcccgagttgctgcggcccccggcgcccggcggcgggcacggcctcagcagtggcgcggcggccggcgccaacgccaatgccgtggccctgggcggcctgccccccggcggcggctcgcacccgcagcactacggccgcctgcccgggaccatctggagctacacgcaggtgcggcgcacgggcggcggcggcgtggagaccgtgcagggccccggcgtgtcgtgggtgcaccccgacggcgtgggcgtgcagatcgacaccatcacgccggagatccgcgcgctctacaacgtgctggccaaggtgaagcgcgagcgcgacgagtataagcggagcttctggcgctggcctggaatgagacggtgctgctgagacaggtggagtgcgggcgtctctcttcccgcccttctgggatgcgtgcacaccttgtcttccatttattttctgaagttaactcaagactcatgttggatttttccaaagcaggtatattcctttcctggggcctcagtttccccgtctgtgaagtgaggttgagggggggctagaattgc

SEQ ID NO: 472471 - DNA, 777 bp, Homo sapiens
ataaatggcttagtgccatccccttggtgatgataactacttggaatgcatgcggactgcacaagtgaagggctcagtcccccaaaactgcctgacttcagacactggtcccaggagatcacccagacttctgaccaattggctacaaatcgagagttctcctgaccccgcctcaggctcaatatttcacttgcatgactcgcagattttaggaaaacacttcatttatgtttgctggcttgttacaaagggtacaactccggaacagccagatggaaggaggtgtctccattgctgcgacttctgtttcagcagaaataagatgatgaaacttcaggggacctgccctgattcccttggagggttttccctgacacgtgagagagtcatttgtaaaccagcagtcagagtgaactaggttgacagaagtcatttcaaaacacgctcctccagtccatgtttaatgttctacttttgagttgttgagggaggagctacagtcagagcaggagaggggctggccttggaattcaaagctggattcaaagcttagctatgccatgaactgtgtgttcttggagaagccctttctcccctatgagcctcagtttccccatcagatggtcttttttggttgtctccatcagctcccctggagcccctttagctccttcctctgcatttaatgcaggatttgtgccgaagcaggtgctccacaagtcatcacggaaagtctgaatatctccagggcccagggcagggctgcccccaccctca

SEQ ID NO: 472472 - DNA, 784 bp, Homo sapiens
gactttagcgctgagtttcacggtgcagcaaccttttactcattcattggagacacaagcttaaacccattttggtggtggtgctggtgagagaatggcaagggcagagggcaggcaggtaacttttgcttcttccaacccaggatctcagcaacctggaatggatgtggctccctcggaagcaaagtcagatagtggcatttattgggtaacctctgtggctcttttgagcctattcttggcatggaccccatgccaggaggggaaggaacagatactccccaagttacctccagccctccattcaaagagctcagtccgaccaggaaacaaggcagccatgggcagcttgctggcagtgcctgaattagttcccgtgaatctcaagcaatcaaacaaaaccaagggcacaggcagaggcctgtggggaccgccaggggggactttgcacgggagcatcaaagtattggggtttgcttcattatcaaggtcatgcttgggaattttgcaaacaacaaggagccctcacagcaaccctgcaaagccagattatgatgctatttttccagacagaaacaaaacagagacaaatctgtcttctgatcctgggttcctctccaccaagaccagcgtttttcaagctgcaggttgtgacccatgagcgggatgtggagtcaatagttggctccacttccggctgcagagttctgaccccaggcagctcccagggctatgagcctccctgtcccctccagcaggagagagaagctctcaccttagcatc

SEQ ID NO: 472473 - DNA, 673 bp, Homo sapiens
cacagtgggtttgtttacaccagcaccaccacaaacacggcctgggcatggagaagccactaagggatgttcaaaaatgaaggtcagagaatccagaacgctgatgttagaagtcaggagaacttggatgtcccagctaaagaagaaagagaaaattcacccttcctctgccttttgttctattcaggccctcaagggattgaaagatgcctattcacattgtttctcaaggtggttgatccagatatctgcagtatacaaccaccttctgttgactacatccatatcggacagctagacaaaggctatttgactgacccccacaccctgcatggattgcacaaatatgctgcagtgaccaccactcagtcatggtgtggctccacaggactcatcccttccatccaaggtgtgctgccctctgctttccgggaccgctttaagaaggaactcaggcttggcattaccatggcagcagatgctgactgcatatttgttccttacctggcctaccccagggattcacctgtctcttagcccaatcaggcagtatcttactaatttccttcgacactaggcttaaatatagagttagcatctttggtggaaataacttattgaaaatgttgttttagagaaaaataagactttctttgccttgactcgtatttac

SEQ ID NO: 472474 - DNA, 1652 bp, Homo sapiens
ggctttggataacaccaagtcctgaggtttgagcctccatgaagtgttacagctctcatttgttcctgctgcccgcagctcgcccgcagctcgcccgcagctcacccgcagctcggcaaacaagagtgtgtggtgcccaatggacgttttgcttaagcaatgtcaaggtaacaggagaaacagcttcttcagaccaagagacagcagaagagtttccaagtgacattaagaaaatcattgagaaaaaaagatatgtgtatgaacaggtttttaatgcagatgaaagacctttaaagcttattacacatgacactctatggaaaggatcatcgatgttatggaagagaaccccaatagagaataacatcatgaaagtctggaagaattacagcattgaatatgccattgttgttatagaaaatgtcatgaaagccatcaatcccaaaacaataaatttctgtccagatgttgtgcatgacataggatttaaaacagagccaatcaaagaaattatgaaaaagattgtggatatggcaaaaaaaataaaagatgataacatgatggaggtgagtgcttccaaatcagtgccaaatgatgaggaagaagatgcagaagaaacagtgccggaaaacaaattcacttcaagcaatcttgcagaagagttctgatttttctaagaatatagtatgtaatacatgaatatagtatataatacatgtaataaatgaattatgtgtctatcaactgtctgtgttattggaaaaattttaaatattatttgccacaacactaaatattatttttcttaaataatgtcttagattattaaattttctatctccccttttttttctgcatggcaaaaccattccttagttttcctaagaaggccttgggggacagcaactcagtaaaaacaactatggcatgtcaaaggttcataattataatggtttatccatgcaaacctaccttcataatttcattcagattgaaatgttcttatttatgtctgcataattatgtaattttctacacagatctaattgcaatcccagacacactttgatcaaatatcaatttatatttagccagaggaaacaaaacattcaaactctataaatcatgagtgctagtatgccatgtgttttagaaataatactggtaaattacgattataaattcaaagcccaataaataaacttcaatatcaatctctgaataatgcaaaatcacctttctttcctaagcaaacaaatgtttctccatcctaggacatcctttaaataaaaaggatgaaaaaacttactataactcccttttagatttcccccctaagagattcatagcatacagttaatttagaggaaatggatagttttctagaaaaatatgaagaaatagaaaattaataatatgtactcattaaataaattgagccaatagtgaaaatatcccaccaagatatttatataaacttgtcccacatattttatactttaattctgccaaacattcaagggatagaaagagaatagaagaaaggatcaatacaacatttactttatatagttactatcttaacaccggattcagggaagaaaagtactagaaaatatatttaaaaagcaatctctgtcattcatgaagac

SEQ ID NO: 472475 - DNA, 699 bp, Homo sapiens
gcaatagatgtgttctacgtgcatgcatgcacacaaacactgatgtccaagacagtttctgaagtaatgagagaagtgttgattctagaatcaagacaagttagcatcattttccaaaaggttcaatattcagcctacagtggttatactgatgaaatatatctggtggccaaagaagaccgttttttggcaccagaagcctatgagcaacctatagccaacatgtgtattccagagattccaggatgcatgagaggaagttcttgggtcctctggagtgaaaaagtgtctgagaatgaatctgctcagagaagaatctcaccaatgtaccatatccatgatgtatcattcccattgatgccatcaatctatcttactcaggtaatcttggataaaggtggatgtgatcgagatcttgcctgcaaagattgtgtgatatgggaagattgtggggatgctatatgggtatccaggagacagacaattaaccgcagaaacaacagccaacatcgtggacttctcagctggctcagcttagacaattctaactgaaaaattaaagacaggcaaacgttccacttgatgggtgccaaaactattgcacccgcgtcagctgcagacaaaagcagagctttcaatggaaattattttttttttattgtactttaagttctaggatacatgtgcacaacgtgcagg

SEQ ID NO: 472476 - DNA, 586 bp, Homo sapiens
gcagataagaaatattaattccatctgcaatcttggtcatggagatagatttgagattgagttcccatctcctcagctgcagcggccaattaaagccttcttccttggcaatacttgtcgtctcagtgattggctttctacgaagcaagtcacacaacctggaccgaagccctggtgttttggttaaagtgagaagtaatgttactttatcaatttctccagggcaccctggagaaacagaactctgtgtggccgccctgcaccgatctggcgagactgaacgcccacatgcagccagtttattactgacagataggcagcaagggacagcagaagccttgcatgcattgcaagcaggtctgtccagactcaggaaagcctcctggggcagatggagtctcagtggggaaccttccacttacactgcagctgaggaaccccggaaagcagcccaactgggttttacatcctggatgccacacggggcaccagactaaagcattgaaagatttcttgttttggaaggggaggatggggtctggaacagagcctgggatatcctgcccattccctcactatctcagga

SEQ ID NO: 472477 - DNA, 578 bp, Homo sapiens
acaccatctccacagagtattggcttaaatcatgtcttccatttccaaaatatcatcaattaagaaagtatctaaacttaaaaagaattcatttcttttcacacacaaaatgttgattgattatttactgtaccggggccatacactagtgaatggaaataaagcaatgaacaagacagcagtagtatctgtcgtctttcagtctataaggtcagtggggtggcgctgcctcttcgtgctgctggtcggcaggtcactttcctgggtacctaatcaggagcctgaagggatgatggcaattcaagagacacttgtctcatgcatcggttggaagtacgtgagagcaagtgcccgtcaagcagacgcatttcaaggctctgctggtatcatctccaaacaactctttgaccaatgctgtatgggactgttccctgaaagctgcctcctctaatagtgatcctgaagacaatggctttgcacacttggcagtctactcagtgtgaagatgatgaggatgaagaccttcacaatgatccacttctacttactgactagtaaatatattttctcttccttac

SEQ ID NO: 472478 - DNA, 1535 bp, Homo sapiens
gtttatggaaaccaggtggcctgaatgccagaaactgcctaactctcctgaccccatgcgaaatatcaaacgtccagacctgctagatattgctgcacaccagagaaggccccatgacagtgtctcgtcaggaataccagggaccccagaagccccagagggagtgtgttacagtgttcttttagcttggctgtccacggacagcttaagtgttaaatacctcagtgggccctctgcctttttgcatgaagtggttgctctctgccagcaagggcaaagggattttattgccaatgaaagtggctctcagtgggaggggagctggaaaagggatggaacaggaagacgatcttcccctggagtccagccatccccagccagactcctctccaaagcaaagcggtcaagctgtccctctgaagtcaagctgcttctctccgacgtcaaaccgcagtccccgacgtccagctgcttttcctcttctccccttctctgttctctgctggtggagcctggggtttttacagaaacagttgaatatcaatatgaaaagaaaatctagacgtagactttacacctttcaaaaaatgagcttagagttgatcatagacctaaaagtaaaatgcaaaactacaatatttgcagatgaaaatctaggagaatgtgaccatggatttggtggaacatcaattattcttacattcggacatttcaaataatgtaatatttcttggagattttgcttgttttttcattcttttttctttatgtttgtattattgggttaatttgaaagccttgtctttgagctctgaaattctttcttctacttggtctagtctattattactactttccactacattttgtaattccctaaatgtgtctttcatttccacaagttctgattggtttttctttaaaatatctatctctttaggaaaggtttcattcatatcctgaattgctttttaaatttcttcatgttggttctcacctttctctggcatctctttaagtaacctaataataaacgttttgaattctttatctagtatttcaaagatttcctcttggtttgcatctattactggggacttagtgtatcttttggggatattatagagccctgttttgtcatattatcagaattgtttttctggtttcttttcattttggtagactatttgttctaaatattcttgcattcattttttatttaactgtgttttttgtttaatttccttccttcttgcttaaggatgtgattttaatggttttagtttattgtagcctaatttgactcttgatgcgttcaggggtgaagactctgtatgggtcccttggttatagagagtcttcgtatgttggctttctcagatgctggttgtggtagcaatgtgctcagtgtgtgagcaatttaatggtctcctccaaggttggaatggcagagatcacttgaagattatcttattaccctgtggtgtgcacttatttattgattattagttcagtctttgggtcagtagggaagg

SEQ ID NO: 472479 - DNA, 961 bp, Homo sapiens
ctcctcttctctctcttctcttctttctctcttttcttttctttgacaggactctcgggacagactgaaggatgcactgtcagcttccctacgtttaaggttttgggactcggactggcttccttgctcctcagcttgcagacggcctttcatgggacttcaccttgctgttggagtcagtactagtctagacccagttgaagcaagtttacagggtgtcaagtccatggaccatggagagattgctaacacagtctttgaagtcagctgtgtgaaaactcaacctaagaccggaagcagccatttccctgctgttccctgtgatagtgaggtggaggttcttgacactcatggccttgaggtactgaccagggcaggtgggcctgcacctggggaggggtgcatgtgttgcaaattagaagaaaatcgtgacactcatggccttgacgtactgaccagtgctggtgggtctgcacttcaggaggggcgcatgtgttgcaaattagaagaaaatcacaaaaagttttggacactgatgtattcacttatcaatacaaatgaaaggctgcttgccagagggcagtaagaaatccctgatattgaaaacaaataaaagtaaatgagcaaataactctaactgaatattgcattaataatataagcccatagtacatttttttcacgtgactttaaaatatgtattttttgactatataggcttagtgaagtgtattctaaagacaaaaagaactgcacagatactttaaattgtatttaatagtttaatctttttaaacttattattttgtgataattgtagctttacctgcaggtcgtaagaaataatacagaaagatgcatcctttactcagctttccccagtggtagtactttgcataactagagtataacgtcacaagcaggaaattgacattgacacaaactattgactgtgttcaga

SEQ ID NO: 472480 - DNA, 766 bp, Homo sapiens
gaaaactacaggccaatatccttgatgaacgtagatgcaaaaattctcaacaaaatactagcaaaacaaatccagcagcatatcaaaaaggtgccgttgctggcagggacacagaggatatatgggaaagcctacatgatcagacagaagcctgctgcagcagcagagccctcacagagaccctctactagggcagtgccaaggggaaatgtggggttggagctcccacacagagtcctcactggagcactgcctactggaactgtaggaagaaggccaccattccccagaccccagaatggtagatccgtcagcagattgcaccatgcatctgaaaaaggtgcaggcactcaactccaagccatgagagcagccacagggcctgcaccctgcaaagccacaggggaaaagctacccaaggccttgggagcccactccttgcactggtgtaccctggatggatatgagtttatcaccagcatctttgagtttttgactttcaattcaaaaatgctgcctgaacttttagactatggagagattaagactacagatggttccctaaaattcagcacattagttttctctaaaaggcctttctgttcaaaagctgtctcaggatttgaaggccatgcttacaagctgcagtggagctaataggttttggcttcgagcaactcagggaccctctgtgggtcttgatttctctgatgtaaaatggaatgtctaggcagcagggtgagtgtggtggtgtaccagtcatgtc

SEQ ID NO: 472481 - DNA, 909 bp, Homo sapiens
ccctactttctgcaaggtagaaaagggcgggtccctgaaaaaatcccaccctcaagtgtgataccacagcccaaagtgaaaacttatatccctgttttcccacacgaatgttgccttttccaaaaccatccatggcctgccccacccctcatcttgtgcccataaaaatcccagaactcagttggcagagaagagaagtcactggacatcagacgctacgaactcaggggccaagaatgtggatgcaaaaggctctcacactaaccctttgctctcgctggtggaaggcagctgcctcacatgaaaaggcagagggtccactgagctgttgtcagttaagttgtccatggatggccaagctaaaagagcactgtaacacttcctctggggcctcaggaggcgcaggtacctcccagatgctgctgcagggctgctacagagttggctcaagccggcacccaaaagcacttgccccaggtcctgcacctgctcacctgtgtcttccctcccatgaggggtggaacacagcaggagttagctagctctgggaaggctagtctttccttgttctgcaaggccctcaaatgctagatcatcgacaatacaaaagagtcagaaaatatagctaatataattgatcctgtgataaatagacgccaaactgacaaatacagaattgaggaaaacccatagcagtctattaagaatgaaccttcccccattctgtagtgtgtgcagaagaatataatggccccatgcatagttgggtacttctgccttgattggtgctcaggccccagctattttaaccaccactatttttgaaccgttggtgcaagttccaacatagcagaagggccaataatgcccagctttgattgtgcacaccccctgcgtgggtcttgaata

SEQ ID NO: 472482 - DNA, 1770 bp, Homo sapiens
tagacctgaatcaggacccagatggccacggctgagctcaggctccccctgacaggtgtgcgggccctggtgagcatcttgcagagctggtacacactcttcacccctactgaggctactagtattgtagctgccacagccgtatcccacaccactatcctgcgcctcagtcttgactatccacagcgggaggaactggctagctgtgctcgcacactggctctacagtgtgctatgaaggatccacagagctgtgccctgtcagcccttacactctgtgagaaagaccacattgcctttgaggcagcctaccagattgccattgatgctgctgctggtggtatgacccattcacagctgttcaccatcgcccgctacatggagctccgtggctacccgctacgtgccttcaagctggcctcattggccatgagccatcttaacctggcctacaaccaggatactcacccagccatcaatgatgtgctctgggcttgtgctctcagccactctctgggcaagaatgagctggcagctctcatccccctggtggtgaagagtgtgcactgtgccacagtgctttcagacatcttacgacgctgcacagtgactgcacctggcctggccggcatcccaggccgccgaagctctggaaagctcatgtccactgacaaagctccattgcgccagttgctggatgccaccatcaatgcctatatcaacactacacactcacgcctaacacacatcagccctcgccactatggagagttcattgagtttctaagcaaggctcgggagaccttcctgctgccccaggatggccacctgcagtttgcccagttcatcgacaacctcaaacagatctacaaaggcaagaaaaagttgatgctgctggtgcgagagcgctttggctgagagagcagatagctcactgccagagcagcctgggttcccaggtagtatcaggtcaggccaagggcactgaaacatttgtccaccctgagagaactctgagcacctgtggatgaggccaaaggaccacagggctaaggatggggaaagtccagctctagtcgataatgcctaccttggcaagcttctgactacagcctactgttcatggaggagctgggccctgcagatcgaccagaaaccccacaacatgccacctcatgcccctatatcctgcgtgtcctgagcattggccctgtctcccttggcaaacacagaacactgttccatctcagggattgcttaaccagagaaacagacacatttgtgggactgtaaatactatatgtgttgctaattattgtaaacttgtaactatttataattctgcttctgatttgatgggcacttgaagtagctgtgggtaggaggatatgcttattttctgaggagactcacaaccatttctcaggtttcccttgcagagtgtttgctggtagcagtggaagagtgggggtgccaaggagaaaaatggccagttaggatcaacccaagtctagtctatgcagaatcccccacctacagacagggcatttatagtccagtgctaaacgtttgttccccatctctgtgcctcctctattcattctctcaccaaacaagcttctaagcaccaatctccctctgccatcagattggctgctttagctccatagttctcttctcgcctcatacttgctttcttcccctgcctttctacctcaagcttcctcgccggcttttgtcacagtctcattgctcgctgacttggaggct

SEQ ID NO: 472483 - DNA, 1171 bp, Homo sapiens
gattttcagtgggccccaactaatgcccgtaggagagcccaatattccaagggtagccaggcccttcggtgggaatctaaggatgccccccaatgggctgccagtctcggcttccactggaatcccaataatgtcccacactgggaaccctccagtgccttaccctggcctctcgacagtaccttctgacgaaacattgttgggcccgactgtgccttccactgaggcccaggcagtgctcccctccatggctcagatgttgcccccgcaagatgcccatgaccttgggatgcccccagctgagtcccagtcattgctggttttaggatctcaggactctcttgtcagtcagccagactctcaagaaggcccatttctaccagagcagcccggacctgctccacagacagtagagaagaactccaggcctcaggaagggactggtagaaggggctcctcagaggcaaggccttactgctgcaactacgagaactgcggaaaagcttataccaaacgctcccacctcgtgagccaccagcgcaagcacacagatcagtgcagccgggagttcatgaggtctgaccatctcaagcaacaccagaagactcatcggccgggaccctcagacccacaggccaacaacaacaatggagagcaggacagtcctcctgctgctggtccttagaggtaaccactatactgaattttgattaatcttgccttagctatttattgtttttaccacataatgtatctgttcttaaatatagtgattgattttgtatggttttgaacttacctttattctgtttaggattcatcaaactttttcaatctaaatgtttagtggtcttaataaaatttggaaaaattttgggcattgttttgtcaaattttggggttctcctccaccttctatttctgacacagtctgcctatatgatggagcacttgatattgtccctcagaatatataagggttgtagtgaaatctgaagaaatgtttggggtttttggatgggttgggaatatgttactatttttcatatttaggttaatgaaataaaaactttagtctaaaaatttatgatctagcagattagatctggataatgaacagctgtatgatcttttctttttatagttgttgtacttcatgtaagactctagc

SEQ ID NO: 472484 - DNA, 3026 bp, Homo sapiens
gatgcctcccttggggtccacaatgatgacttctgcatgcactaacatccctgggacagttctcacccaggacttaacaatgcaccctcttaaagcccttgaagacctaagtgagacttattccatgggccagaaagtgacttcctttgatcaggtaaaacacacagcaggctcccagatgacagatgttactgtcaccccaaagtcatcacccactgattgccagaagacaaccatcactgcaagcaacatgacaatctccaatgaaagtagccagctgaacaccccaagcagtgaccagaccctcaatgagagtcagataccagccctgcttggagatcagatgaagaccctcagtgataaccagactctctgtggggaccaggtgaccttcagtagtgaccagaccctcactgatggtcatacagtgacttccggtagcgatgagaccctctctgggggccaaatgacaaccagtctagacctctatggagggcaaatgatgacttccattgataaccagaccctctgtggggagcagatgacgacctccagtggtaaccaggccttctacgggagacagatgacgacctccactggtaaccagaccctctgtggagagcagatgacaacctccactggtaaccaggccctctatggggggcagatgacgacctccgctagtaaccagaccctctgtggagagcagatgacaacctccactagtaaccagaccctctgtggggagcaagtgatgacctccactggtaaccaagccctctgtggagggcagatgacgacctccactggtaaccagaacctctatggggggcagatgatgacctccactggtaaccagaccctctactgggggcagatgatgacctccactggtaaccagaacctctgtggagagcaagtgatgacctccactggtaaccaagccctctgtggagggcagatgacgacctccactggtaaccagaacctctatggggggcagatgatgacctccactggtaaccagaccctctactgggggcagatgatgacctccactggtaaccagaacctctgtggagagcaagtgatgacctccactggtaaccaagccctctgtggagggcagatgacgacctccactggtaaccagaacctctgtggagagcaagtgatgacctccactagtaaccagaccctctgtggagagcagacgacgacctccactagtaaccagaccctctgtggggagcaggtgacgacctccactggtaaccaggccctctacggggggcagatgatgacctccactggtaaccagaccctctactgggggcagatgatgacctccactggtaaccagaacctctgtggagagcagatgacaacctccactggtaaccaggccctctacggggggcagatgacaacctctactagtaaccagaccctctgtggagagcagatgacgacccccactagtaaccagaccctctgtggggagcaggtgacgacctccactggtaaccaggccctctacggggggcagatcacgacctccactagtaaccagaccctctgtggagagcagatgacgacctccactagtaaccagaccctttgtggggagcaggtgacgacctccactggtaaccaggccctctatggggggcagatgatgacctccactggtaaccaggccctctacggggggcagatgacaacctctgctagtaaccagaccctctgtggagagcagatgacaacctccactagtaaccagaccctctgtgaggagcaggtgatgacctccactggtaaccaggccctctgtggagagcagatgacaacctccactggtaaccaggccctctacggggggcagatgacgacctccactagtaaccagaccctctgtggagagcagacgacgacctccactagtaaccagaccctctgtggggagcaggtgacgacctccactggtaaccaggccctctatggggggcagatgatgacctccactggtaaccagaccctctactgggggcagatgatgacctccactggtaaccagaacctctgtggagagcagatgacaacctccactggtaaccaggccctctacggggggcagatgacgacctctactagtaaccagaccctctgtggagagcagatgacgacccccactagtaaccagaccctctgtggggagcaggtgacgacctccactggtaaccaggccctctacagggggcagatcacgacctccactagtaaccagaccctctgtggagagcagatgacgacctccactagtaaccagaccctctgtggggagcaggtgacgacctccactggtaaccaggccctctatggggggcagatgatgacctccactggtaaccagaacctctacggggggcagaatatgacctccactgataaccaggccctctatggaggccagatggcaacatatagtggcaaccagaccctctatggggaccagatgctgactcttcaggtgggcaatatgacaacgctcactgatgaccacagcctttatgggggatatatgatgtcccatcagttctcatcattgccatacccaggattcctatgcttttcaagttcccatttgattcaaggacaactcccaaaacagaagacacagagctgccagttctggaagaatcctgaggtttcaaggccctatgtctgcacttacgaggactgcaagatgtcttattcaaaggcttgccacctccgaacccacatgcgcaagcacaccggggagaagccctatgtatgcgatgtagagggatgtacgtggaaatttgcccgctcagatgagctcaacagacacaagaaaaggcacactggggaaaggccctacctggtaacggcttttatcagcatgctgtgaatccttctagatcttactctgtatttacctgtatgtgtacttttaaaacgtatctatgtaggtgattgagattgatatgtgtatagctcagagg

SEQ ID NO: 472485 - DNA, 895 bp, Homo sapiens
ctgttctcattgtgcagggaagcaattggcattaattagcgaattttaccctcaccagtattaggaggtggattttatcattgttatcatcatgaattttctgctgctttatgagattggtaatctagctaaaggcttttcagtattccttagaggcacagggtttctcttcagtgtgacttctatattccatgagatggcatggtgtagaacactacgtgggctagagtgccggcaatgcagcaacactgctggcgtctcaatgctacagccttctgaggatgggagtagccacagccccagcatctacttctggccccgggcagccaggcaggcagaagtggggcttaagagtgattgctacccacaaagcaccagcagccagtgccacaggctgcagaagcgggacttcagtgtggggccagatgggttgacactggcagcaggggtaggagaatgttcccgtactggagtggcgttgggccaggataacttccccagcttcatggtgctacagatcccttttctgttgttaccttgaagtcttaagaaatatactatctgtccgggtctatttgtacactattcacttagattttcctcagtgttgatactgagagtacgccctaataaactttcaccacgctgatctgtttcagagtctgcttccaaggaactcaactggtggcactcttcttttttcctttttttatttagaatctcatccccacaacaattttctttaaagatctcagttggctttatttgtcattctagaatcaggctctggtatttatattacgctattttcataagttgagaacaattttaactaatatgctctagagctggggtccccaaccctcaggccatggactggtaccagcactttggt

SEQ ID NO: 472486 - DNA, 1237 bp, Homo sapiens
tttgctagtgcatctccagggtgttcgttgtaaggagagatgggcgagtcgaacgcctgcatcttagtttccgctcttgggctgggtgccccaaaagatggaagaacatcccagcatcctcagcattcccaagggtcttctctgactctctgcccccactgcagccaatcccttaagggatttggagtccagaaaggttcccccactttctggcctgtgatagacattcgcagtagctggtttggcaattcagaacctgcctgttctttgatgatatcttcagatagattattccaaggctatgagatcagaacctgtgcgaggagctcttctgggaatggaaataacttacccaaaaggggaagcaagtggcaaggcccagggtgtggcgtccctggggtcccgagcctggcccatgggggccagccaggctgcctcccgcatgcttgctagttgacaggggccaaataaaggcccttttaaaaaaaaacacacaaaacaattttgttccttctgaaagtgatggagcgaaaggcatgtttcatgggtcatcctctgcatgtgtgcgcgtgtgtctgtgtgcgtgtgtgcacacatgcccgtgcagctgtctccccaggtatatgggcatcttatgccacatcgccaatgtcttctacttccgctcttcctggaatagaggcgtttgttagctttggaagtttcccttcaggaagcagaaagagcctaagagaagaagggagaaaagaaccattcgagtaatagatcaggccacccttcatagtatcaccacagcagaccttgtttggattcaatatatagtcgtgtagcatcttgtatttatccttgtatcgcttagtcctaaatataaccaagtaatagatcaagtagctatatttgtttagtgtctaactcccactccaaactgtgagctctttgagtgcaggaccctgtttctcttgttaagtgccataatctcagcacctagcacagtgcctcccacgtagcaggcttgcaggatttgttaaatgagcggcctaaaataatggaattatggagggacagctgcgatgttggaagcccgtgccttcctgagtagaaaatgctgatcaatcagactttcgtctaactagacaatactagaatattcagataattgattcttcattgcctgttggaaatgtagcctgagaggaagacttcaggggttgcagtgaagctagaatattaggcattc

SEQ ID NO: 472487 - DNA, 518 bp, Homo sapiens
cgcctgcctcgtgcattgttcttgctaggagctgcagactagagctaatgcaggtgtctctggcttggactctccagaggatggcactcacttcttctgctggttttggggaggaactgttgcctggctgggggatgggatccagtgaaatcattaattccaccagggaactttgtgactctccaagagtggtcgtcggactacgtctatcaaaaccacctgggaaagctgtaaaaatgaactttcttgagtctcaaaccaagctgactgcatctgaatatctggaagactatggcctggaattagatttttcacaagcatctcaggtgatttttataaatactcaaactctcaccgtgaatgacctgaggagcacatgtatcaacactgcagccctgacctccaagcctagctcctccatgaagagcacccctttagtccagggatgcatacatcagtggtacaattttccctcaaaagttcagaccccaggaagaggcctgtgtaggtcctgaaag

SEQ ID NO: 472488 - DNA, 796 bp, Homo sapiens
aactgccgcctgcgccatggcagcggccactccagacaggccgctgctgcaaataggactgtattacattgcttcagaaaggcaaaaaagcaagttaccggtgaaaagctacggatacaaccgcaaatacaggacagacttggctgtgcacggatggctgggactccacggtggtgctcagttcctgtgcaggtggcctcgctccatcccctccgcacatctgccgggctttctctccactgtaactctcaatgttgtcactacaaggcttaatgtttatttagcgcctactggtgtcaggaacacggaggatgaattagttgccaaaggtcacacagaatttctaaatgctgaatttaaattcaaaccccttggactccactggttcatgctggtaagcaatttagagagagtccctaaccgcagtgaagaaagctgcaatcaagggatcgggtcaggtctttcacaaggctatactgaagatggctgtgaccaacagccatcacagatatatttcaagccgcaggatggcagaaggagggaacaggattttatcctccttctaaagagacttcctggaagtcttacgtaatactgtcacttatatcatggtgagcagaattcctcccttgggaagctgaaaaacagttttaagggaatatgtcaatgtatccgactgaaaataaaggttttgttaatttgagggagaagttgaggatatatcattggtggcaatgaggaaaattgacctcagttgtgcagctacttttaatttttaaaggtatacaaaaatgat

SEQ ID NO: 472489 - DNA, 627 bp, Homo sapiens
gcacagtaaatgtttcttcagaatttcagtagatatgtaagggtatctcatggtggtttctgcacttccctaatggctaatgatgttaaccatgctttcatatgtttattctccttctatattctttttggtgaagtatccaagtctttgcctccacacacctcctttttgtttttgagacaggatctcactctcatcacccagatgaagtttcactgcggcttcgacttcccagcaagctgtaccaggttttttccaacagcagactcagagttccaaagagcagccagagagcaaaccccaatgcacaagaaccttcctaggcctttgtttacatcatgtttgctaatgtcccacgggccaaagacaggaaaaaagaatgttggtgacagtcatcttatttatggaaggctttcaacattactaattagaatgctcttcagaaagttgacttgccaatgacatactgtaaaaacttttcagattagaatcttcatagcaatggaaatatttcctacaaatggaaatatacaaatgtgagctgacttgctgaaaagagatcgcctttaggaataggtcttagatccattgattcttttttaagattttcatcattgacatggagaa

SEQ ID NO: 472490 - DNA, 2332 bp, Homo sapiens
tgattgttatatgagcctcatcacacaaatgaaatacaatgttacttataaaaatgctcactctttttcccattgtaagttaaacacattgctaagaggccatttttcaaaccatcagtggccctgcaactctctaaaaattttcagcatttctcagaaggaacgctcacataaaacatctcagtatgaaaaaaaagactttgaccatgtaaacatgtccaattgtctgctgacattaccaaaagaaactgaattgtacaattttcaaaagtgctcacttaatagtgccagtggtttgatcttgcacatgttaccccttgatacctcctctgccaagccatacttgattacaaagagaaatctgaaccgctgttacagtagcagatgcacaggatgcaaggctgcatctactgaagacagtctcccgaggaagactggaaaaagagcagtgttaactgacatccagaatggaaagaatgagcttcagagaagcaattgagttgagagaataaaaaagatgacatcacttcaaacctttggtcttttttttttttttttttttttttttttttttttttttttttttttttttgctatgtaactgaccacccaaaactcagtggttataaacaactaccattgtatttgctcaggagtccataatctgggcggggctcagtggcaccgttccgttcatcttactggtggttgctcatgtggctgcattcagctggctagttggctgggatctgggctcaattgaacctctctctctcctcccctagaatctcaggggccagccttgattcaaggagtagtgactatacgagtgtgagtataaaagacatggttcactgtgagcaaccaatgtagccaattaccactgacacgcaacaagtcacctgatctgtacactttgatgttatgtttctcatccattaaaagggaaaataataattcctattttatagagatctcacagttaaacgtgataatgaatgtgatgtggttagcacagtgactgacacccagtaaatactctgtaagtggtctctttcatatatcccaaagtatttggaatttgtaacacccagaaatttgtgagtcccttcctacaactgtctacctttcccacaagagcagagtccacagttcacgttagccatcatagaagtcaccccagtacctagtacagaacctggcattgtgtgtttgttgaacgattatgtgatcaaatgaattggtactcactgtctccaaccactcacttctacaacacatagacagattgagctatttcacaagaatttcttatccgcaaattaaaagttatcaaattcaatgtcatgagcaatcatagtagtctggagttcatcttcacctctttttaaatatagtatatgtagcaaattccccaaaaatattttgccagatttccactgcctcaattttaaaactcaggcgcactataagaaatatgtaatccatatgtctctgattcatttttacccagttcatcaaaatgctgtttttgtattaaatgtcaaaacgccttttatgtctttatttatgagccctttaaagttgttatttttaaatgatgctagaacatgttttgcgaaatttaaaatctacaaaggcatttgtaattcaattccaaacatcagcttctgggacagttaattttgtttactcctgggaaaattcctcttttcaaatatggacttttaaggttattttaagtattccacattctcatattcttcatgttaaatgtgctaatgaatggaatcagctgtatgtacacagagagtttggaaaagcaatatgtgccctgctctctctttcaaaggaacaccttgctgtctcggtcatctgattctgcctcaactctataaactggtgtggggaaaataagcctgctatgtgttacctatttttaaggctgaaacaaattgcaaatttttcttctctataattctagatagtgcaagcttctctacatagatatatacatgctcagcttattcctcacatgcaaacttcatcaaatcctcttcctgtctctagagacttcttcctgttctctactattatttaacttttcactatgagatttaaaaataaagacgataatgacctaatggaacctttccataactcaaatttcagtgataaactgattgtgctttgagttaaaattttaaaatatttataataaagcagaatgttagctaaaaataaaaaaatttataaaagtcaaggttatattgtttaaaaatccctatatttgaaatcagagaacctgaaaaccagagtaacatttctgatc

SEQ ID NO: 472491 - DNA, 602 bp, Homo sapiens
cgactggatctgttatttagaatgattagcacactgggagtactggcagcaaagcctttgaaattgataaaaatatgtgctcatgaattaattaacaccgtatggttgttatgtgggttcggaatattcaatataagctcagcttctacaattgatttaagtaggaatcaaatcggagtacgtctacagaggattcagaggggaccaggccttccgcgatgtagtgagtggtgtaagtgtgagaatgggagagaagtatataatagatgctgcctgcccaatcgtaataaaacggtattcgactggctgtcctccgattcatgtgagtgtgagaaatataaagaacttgtgatcaatgttgagtgtaaacagattgggaaagaggccctgagcaatgaatttttcttacaagaaacccttggaggaaaagtaccctgcaaaatatcaagaagtacaaacaacactgtgaagaagaacttctgtgaagaagaactggcagaagacatggaagttctgtagggaaattgcaatagggttgcaaaacagggtcggggagcatgaatgaaacaggcagtcaatgaggatggaagggaagactggaa

SEQ ID NO: 472492 - DNA, 1512 bp, Homo sapiens
gcgactgctgttgccaatactaccattgctgctcataagcaacaaattacatacatccctgaagacgacactccgcttatgagggctatagttcaggcaagggaatatggggatcccgaagcctggcaatttcctgtaattttacaacctccagtacctgccaccccaacagtacaaaatcacccacagcctgttgttgatcctgcccagcaggcggctgaccccgcagctcaacaggatcaagaggctgataatcaagcccctcagcccgaaactcaggctgctcagggaaataatcagcctccgcaattgccggctcctggggcacagccaatacctggcattcccgctgttcaggcggtagttcagcctgaccccatacatccaggcttagcagaagataaacgtttggtgccctatgattgggaaattttagcaaaatcagtcttatctaaatcccaatatttacagttcaggacttggtgggttgatgctgtccaggaacgcattcatcttaatcagggctccaatcctcctgttaacgttacagctgaccagttactgggaatgggtcaatgggctgcaatccgacaccaaactatactaaatgatgaggttgttgaacaactgcaaaaatgttgcttagatgcttgggacaaaattcaagatgatggtaaagtatgcccatctttcacagctgtcagacagggacaacacgaaccctacccagacttcattgctcgtcttccagacgcagcagaaaaggctattcctgatagccacggccaaagacttgttgtagaacttatggtttatgaacaagcaaatccagattgtcaggcggctattcgccccgtcaaaggcaaaattccacttggtggtgatatactcacctcctacgttaaagcctgtgaaggggtgggaggaactctgcatacagcaatgattatggcacaagctatggcctctattctaatgcctggacaattctctggccaatgcttcctatgcggccagaagggacttgcaaaaagaaattgccctcggcgtgcaggtcgcagtcctttacatcaccaacaacaacaacaaaaaacttttcagcaacaagacgccccaccttctactgtatgcccacgatgccaaaagggctttcactgggcatctcaatgccattccagatttgatattgatggcaatcctttacagccttttaaaaatcagggaaacgggatgaggggccggccccaggcccctttaaacaatggggcattcctcaactctcagcccctggcgtccagccagacgggagccttcccagttcaatccattcaacctccaccccaattcccacttcagcgatgtagggaccagccccacaaggtcgatgggtctctccccgtgtgccgcgacgagagagtatagaaataaagacacaagacaaagagataaaagaaacggcagctgggcccgggggaccactaccaccaatgcgtggagaccggtagtggcccc

SEQ ID NO: 472493 - DNA, 615 bp, Homo sapiens
tccgagcctgcagtgccatggtggcgtttgtggccaagagactatgtgcaatcagaaggagggaagagctggcccagcagaatttggtccaggggagcaggcctctctgcagggggcaagggcacggctggagacggaggtcctgcagctgcagctgaggcccccactcttcctgcactgggcagagagccgtgatggggcctcagcaggagtgcatggaggaggacgcctactgtctggacctggaccggaggcttggcaagatgcaggacaactggaagccaaattggagaagttccagcgggagatcctcttccacgaggaaatggctcaggaagtgtggatggccaccgggtccaccaagcgggtgctccaggagctccgggaagaatatgacttcaagaggcagaagccggctcactgggaggccaagttccagcctttctggacagtgctttggctcctagggctccagccacagtctgcagggcctggaagtaccagggggaccgtgagccactaggacccccaggagggaggattttatcattagaaaagatcattttgctcgatcattaaaactgccattagtgcttaagcacaagagacacattc

SEQ ID NO: 472494 - DNA, 613 bp, Homo sapiens
cggcgtcggcggcctgtgcagcaatggccaagatcaaagctcgagatcttcacgggaagaagaaggaggagctgcggaaacagctggatgacctgaaggtggagctgtcccagctgcgcgtcgccaaagtgacaggcggtgcggcctccaagctctctaagatccgagtcgtccacaaatccattgcccattttctcacagttattaaccagactcagaaagaaaacctcaggaaattctacaagggcaagaagtacaagcccctggacctgcggcctaagaagacacgcgccacgcgccaccggctcaacaagcgcgaggagcacctgaagaccaagaagcagcagtggaaggagcggctgtgcctgctgcggaaaaaaagtgacaaggggttatatgccgctgatgttcctgcatcatcatcatcaaatactgtttattaagcttcctccacatcgctgatgttaagggcttgcagattctcttgggtttctcttttcttcctctccctgtactcagcctccaacatcattctaccctcccagctcttaccttagcagttttgtactagtttctgtactaagacttgactactcaatgttatgaagaagaa

SEQ ID NO: 472495 - DNA, 4468 bp, Homo sapiens
gatcgcgggccctgacgccgtggaaacagtacatgaaccacctctgggactgccaatctccagacttctgatgtgcgatttgttctctgagactaggattgtttctagaatgttccaggctcttcctccacctgtcgttcctgacgctctcttgcccagactgtgcatggctggctccagtgctttcttccctcatggcgtcctgaatgtcccctcctcagagacacctccccaaccactctcaggaactctgtttctccacatccttccctggtgcagaagatgcccctttctccacatgaaaatgattgaatggatcaatacttggcccctcggacccctcactaccagctgacagagggctgccaaatcttgagcttggggaatattaggtcctttcagaaaaacctggcattgcgttgtaaagtgatcctgccaatgcctattagtggcataatcctgcaggtatttatgcctgggttcagaacaatcaccagagttgagatctgtatggaacaaagaccttcaagcatgtggaagaggatcagcccagctgagggccagcagcaggaccgcaggccaggacgcaggttctgctctgacatctcatccaaatgtcacttcttagagttttgcttctggaaatggttctcacactcagaacaactagaaagcctagtgaaatataactatatccatttagaggcatcagagagatacccaatcagtgaggaaaacaggtgtgagagagaacggaggcccagagatgatcctggagttagggaccacttttccccagaggcagatgcaaattctgaaagtggaagctgagagactgaaaagctgaatagagttctccacaaatcaaggaactgcgggtttcagagactgctgagtaggagggatcctagtaaataccctaacctatcaagtacctggaagtaagtgtgaaccaatagattagccctcacagggcctgaagcccagcttcaaataatctatctatccttggctgaattaatgtgacctgaaattgctagtgtttctagcctagatgctggccagatgcaaaagtgcaccctctctagaagaatataacagcattcggagcctcaaattatctattttaatatatattatctgatacctatcaagacataatcagtcataaaggaagataagatatgaccaaacaaagagacaataggaaaagcagacccataaggatttcagataataaacagacacaaactttaaaacaaccatgattaatatgtttaagaatataaaatttttgatgaataactggaaattatgcttataaagtataaaaagtaaaccaaatggaaattctaatatggataaatattatgaatgaaattaacatattggataggtttaacatcagattagacacagctgaaaagagaattagtaaacttagaagctaggtcagaaaaaatatatctaagatgaaacaaacaagcaaaaagatgataaatatcaaaaaccaagagataaataggacattgtgaaatgttctaacatagttgtaactggtgtcccaaatgacaggagaaagagaacggggcaaaagtagtacttaaagatatattacttacctgatgagaatcaatggcttgcctgtgtatgtgcatgaatgcaacagctgaagactttagaaataggagcttgatgacataatttccctaccagatttatattcctattcgaagcctgccccagctccttcaatgtgtgtgaccatggttaccacacccacccagggcctcgcccacccagggcctccctcccatccttttcttggtctgtgatgtttgctgtagcaccaatgactactagtgctattcaccaaaaattttggtcctctttccaagtacggtggggatttcacttccttatcccctggaagtcaggatggtcaagtgccttgctttggcaataaaatgcaacagctatatgtgcccattttgggtggaagctttaacactcagtgttcaatataaattaaggtatgttcttgtccttctgcctcagtgtcacaacagagcctccatcagcctagttactggatgatcataagacgccaagagatggagcttccagctaatctgtgaggcctgttaacatgcataagaaatgaacttgggttgttttaacttgtgtcatacttgttgtcacactatgacacaacctatccagacacatgtccctttgacttgctttttcagtctccttgtcaccattcacctcctatttcaatccaaactccaggagacctttgctatcttgctttcttttgggcagcagaatcttcctttccctttagaatcttttctatatctgttcttgtgtcctattcctctttgctgaaggtggtgatgccctttattcccaagaatgtcccttttatctgtttcctttgttccagacagctggcagctttacacagccatgaaagtcttttcagcaaatgactaaaaagcatgtcctagggaaacatctacctccctcatctctctgactatgtgaatcccagccttccctgatttcatcagtacagctcttgttggtgatgagacctctcagcctgagtgctactggaaagtctccccgtgattcagaggcctgcgccccacagggcctcctgtgcttaccacagccacccaccttgccaagagcaactgatttgaaaactgcctgcctgccgcctcatggggaattgctcttaattgtttggtttccatgcgtgtcgtatatccactcccaacgtagaggctttgctttgggtaagaagaaatgcaaatggaagtaggggcattacatccaggattctttctggagacagcctggcccaacctggacttgacagatggtgcttgcccaagtcacaggggtggcaggactgagtcctgggctgcttcagaagaggggatgtcacaaacaagttctgatgaatgttaagcttttacaaaataggattagatccagggtggactccacggggaaaaacatcctcttctttataacgttgaatttattattttaattcaaaacaaaagcactgaaagtgtttctctgggggagtggaaaagattattctgcaagatccaaaaaaaaaattatagaattcagagtttccaaaataagctgaaatttctgaagaatccagactacataacttgtgtcaacagaatttagactctgattatgtaagtagctctttgttttgtggttgcttggtgtttttgtcctttccttttgttctgaagtaaccttggagtcctgggagtcaggactagaccaaggttccaatccaaagcaactgattaaatatcttcatttctttatctgtgaaataccacccattttgttcccctcaattgatttgaaagttcagtatttgatttctcttcttttcatggatatctttgtagaatcgttttttatctatatgcacatgtgaaattgctgatatcagaccattttttaatttacaaaaatggtaagttgatatggttcagcttgatatagtttctcctaatgcaagccaggaactctaacacactttttatctccctcagatacacactttccaatacccacttcctccagctttacctgtatatctgtaatatatacatattatgtgacattttctgcaaatttaggttcacatttgtaataaaagccttttttaaacaaagaatatattttgcttactttttcttactattataccttgtataacacttcttgctctgggattcttgtatcctctaactggaacacattctttggttatttttcaggtagagtctatatatgagaatatcttctaaagatcttatatgactgaaaatgtctttacttcatccccactcttaaatgttcattcggctagatatagaattgcattcacattttttttctcagaacttgaaaagcattcctcctgcctgttctgacttccagctttgccaatgaaggatctgttgctattgcaaagttgtattttctgtttccaagataaccaaatggtctattttcaaagccacatgttcttgtttcataaccacctattcttactttatggatataacaccctcctttatttctttgtgaattttaagtttgctttgcaacaatcctgttctgatcattccattaactttgtgccctcaggtgtaagttcagtttgttatctccttttgtggggcttatttttttcaagcatctggtgattcaaagttgcattctaatccctgtggtcaaggcccttcagttcttcaggagagggagagcttgttcaccactgcccccacctgctccaatgttagcagtagtagcggaaggacagtctggaccactggataaggtacacaggtgcctccatgttcaccgtggtgttgctattcacctggggctctgttctctccatcccagg

SEQ ID NO: 472496 - DNA, 532 bp, Homo sapiens
ctttctttttttttttgagatggacaagataaagtcacaatgtctggcagccaaccaaagatttccaggcatgcgaagaggcagaaaaatatgacccataatgagagagtaatcaatcgtaactgtcccagaactgacaccgatgttagcgttatatctgttacatttagaattatgtttagatgctatcaaaattgcatttcatgtgttcaagaagttaaagtagaaatatgggatgtatttttaaaatacccaaatcaaagttctatagaagaaatgacaaattatgagaagacaaatacactggatggaattaaaggcagattaaacattgcagaaaaaaggtacaacaccaaaagtggaatccataaaataataacatcaaaggaaaacttggacttcatcaaaattaaaacttctgctctacaaaagacactgctgaaagaacagaaagacaagccacaagctggggaagtgttttgcaaagcatctacctgataaaggatttgtatccatcataaataaatatctc

SEQ ID NO: 472497 - DNA, 1378 bp, Homo sapiens
gtctaattcaaaggaaaatgggtagatggtgggaggattagagagtggacgccatgttggaatgcagggatgacctggtgagccttgtgtcacaggctgggtacttcccccggaattcacatgttgaagctctaacccgcagtacccagaatgtgactgtatttggagagagggccttctctccaaatagaaggagagtggatgtctatgctgagcagcatctgctgacaccaaccagaccacttcttctgatgatggtgacagttgctcaggttctcaccaagagcctggggctccctcctgtgggcttccctggcacacttgctgttgtggagtcaagaaggatccagaccaagatccaaccttcacagcaggtcagagttaaaatgtcattactcgagcagcacttactggagcagaacagaactggctgctcactggcccttggccttgctgcccttgctgcggggggaccagagtccagagcctggctgcatattgaaggacaccagccagaaagggcagcagggggaactgcagttcgtaaggtcatcagctccaggggccactactatggccgtggaattggctgttgtcatcccagctcgctgacaggggactgtgcaggctgctgctgtaacctggtggtgggctgtcatcagacggccatagaggatcgccctgaggcttggttgtggaggttgtcaaagcagaaggctggcaatattcccatggcccagaacgtgctgaggcagcatatcactgctttcaacgtgtccctcaccttcattccttttgccctgccctggggccataggtaaagcctttcttgcatagttcaccgaagcctggagatttcaattctatcaatagctatacatgttgtgtgcccagggacacccataatagctaattttccctgcagtgaataggaaatagtctatgttcttgaccttttagactaaatttccttttttgtcacagatccacttaataataccaaagttttaatgaaattattgaatcattaagagagcatttctgagcaactctagaagggctacaccatctgcctgtttgcttaggtactagttaaggattgtcctcgatttggagtttattataaagaatcccactggaactacctgcttgaattaaaatctgatttttatcttttgaccggagggatgaaaacagtctaagacagatttatggcgatagttgcacaacttggtgaagttactgaaaatcactgacttatacactttgaaatgagtgaactttgatttgataatgtttttaaaaagtctgatatgcttaatggtccttcagtttaggaatcacaaacacgagagcataaaataggcataaaattcac

SEQ ID NO: 472498 - DNA, 2576 bp, Homo sapiens
caagtagccacctttccaaaggccgctgggctgtgtggtgggcctgggagccagccgtgcacaaaatggctccctacagcccactggtgacccggctgcagaaagctctgggtgtgcggcaataccatgtggcctcagtcctgtgccaacgggccaagatggcgatgagccactttgagcccaatgagtacatccactatgacctgctagagaagaacattaacattgtttgcaaacgactgaactggcctctgaccctcttggagaagatcgtgtatggacacctggatgacccggccagccaggaaatcgagcagggcaagacacctttcatcagcagtgggctgcccaaggtggccatgccgtccaccatccactgtgaccatctgaaagaggcccagctcggaggcgagaaagacctgcgccaggccaaggacatcaaccaggaagtttataatttcctggcaactgcaggtgccaaatatggcgatgaggaggtacctaagcaagacggccggacagacattgccaatctagctgatgaattccaggatcacttggtgcctgaccctggctgccattatgaccaactaattgaaattaacctcagtgagctgaagccgcacatcaatgggcccttcacccccgaccaggctcaccctgtggcagaagtgggcaaggtggcagagaaggaaggatggcctctggacatccgagtagcagctgtggccaagcaggcactggcccatgacttcaagtgcaagtcccacttcaccatcactccaggctccgagcagatccacgccaccattgagcgggacagctacgcacagattttgaggaatgtgggtggcatcgtcctggccaatgcttgtggcccctgcattggccgctgggacacgaaggacatcaagaaggggaagaagtacacaatcgtcacctcctacaacaggaacttcacgggctgcaatgatgcgaaccctgagacccatgtcttcgtcacgtccccagagattgtcacagccctggccattgtgggaatcctcaagttcaacccagagaccaactacctgatgggcaaagataggaagaagttcaagctagaggctctggatgcagacgaccttccccaagaggagtttgacccagggcaggacccctaccagcaccccccacaggacagcagtggccagcacgtggatgtgagccccactagccagcgcctgcagctcctggaggcttttgacaagtgggatagcaaggacctggaggacccgcagatactcatcaaggtcaaagggaagtgtactactgaccacatctcggctgctggcccctggctcaagttttgtgggcacttggacaacatctccaacaacctgctcactggtgccatcaacattgaaaacagccaggccaactccgtgtgcagtgccaacattgaaaacacccaggagtttggccccgtccctgacactgcccgctactacaagaaacatggcatcaggtgggtggtgatcggggacgagaactcgagccgggagcacgcagtgctggagcctccccacctctggggccaggccatcatcaccaagagctttgccaggatccacaagaccaacccgaagaagcagggcctgctgcccctgacttttgctgacccaggcgactacaacaaggttcaccctgtggacaagctgactattcagggcctgaaggacttcgcccctgacaagcccctgaagtgcatcatcaagcaccccaatgggacccaggagaccatcctcctgaaccacaccttcaatgagatgcggatcaagtggttctgtgccggcagtgccctcaacagaatgaaggagctgcagcagtgagggcagtgcctcccaacacacccccaacctcgccccccagagctggcgtcatgttcaagttcagctccacatgcgccatcagcagatccgatccatccagccatgggttctgattccaagatggtgtgaccagacatgcttcctgctccccgctcagcccacagagtgactgtggttgggggaggttcttaaaataactttttagcccctgccttcctatttttagtgtttggttccaatcttaagcagctccatgcaactgtatttatttttattgacaagactcccatctaaagtttttcccctgcctgaccattttattggtggctgaaggattctagagaacctgttgttcttgtaaggaaaacaagaagccaaaaaaaaaaaaaaaattaaaacggcagattcagcaagctgctgtggggaggtgttaagggcagctgtttgggggatcgcacataacaccacatggctagaatagggtccagggtccagggtatgctgtggggtgaacatgtggggtgagagcagtagacatgtctgcagtgggcacagcaccgagggtattctacctccagagcagtgggatttaagcaggtgattgatatgaagagttttactacttagagggctccagaccccagatgcagagcgttgagcaaatgaggcaccctttgcaaatttgaatgacaagtttaaccacac

SEQ ID NO: 472499 - DNA, 631 bp, Homo sapiens
ttcgcctggttttgatgccctgtttcagtgcatcatctggtaatttcgtgacctgcaatcggcagaagctgcccctgccgtctgtcggggacgctggccacactggccgattgtccagctgctgcgtgttgcctgctgtggccccttgtctggagcagccacgctttgttcccctgggtgacaagagtgaaactccatctcaaaaaaaaaaaaaaaaggacagttataagttatacgtgcatagtttaaaaagtcaattcaaggcctctgggtggagcagagcacagactggttctctcttcccagagcttcctcaccaagagcagggctggaaagccccagagaaggtgaaggagacgtattcagggggaagcaggagctgctgtaaacagccacctgatttgctaagagattcaagtgctttacaatgggactggaaagtccatggtgttcctatagcctccttgtcaggggcaacgacagggccaggagcagaccctgagctgaccagactgaagagatgtcatagagtggaattacataatatgtagcctttcagattggcttctttcacttagtaatatgcatgtaagtttcttccatgtcttctcagagctcaatagctcatttc

SEQ ID NO: 472500 - DNA, 575 bp, Homo sapiens
gcaaaccgacgaagccagtccatgtccacctcacagacttttaaaagaatcagaaactctgggggtggggcccagcaacctgtgattccccaaaccctccagggtgtgactcttctggggtcgcagttgaatgcctgtgtgttcagtgaactcttcccctttggtgggttggaactcagatgtatccgaatcccctgtgagctccgagaattgttcagcttacagctgcctgtacattctttgctcagacccatggagctttgtgttatgcacatacagcttagtattcagccagagcctccattggacccacaggcattaccctctattttaacaaaattaaaatctgagaatgaaacaccagttcattatcatcagtcttcagaagttttgcctcgggcttgcacagaactggcgttcagtgaacattgtggaaagggagtgcaggggaccaccgtgctttgtgcagcacgatatcctcagcacttggtacagtgcctggcacctggcaagggctcaatatagatctgctgtggggtcgggggtgggcagatggttttttctttaaaatgagc

SEQ ID NO: 472501 - DNA, 2264 bp, Homo sapiens
agccactctgcccttccagtgccacagggagcagggaggtgactgctgtgcttggcaggctgataaactactggcacttgcctgcgaggataggctcatgccgaagcatctccttgacggttgccaagggtatgctcctgattggacacatgggctcactggctttgtggcttcctgggaacacatctttaatagtagcctatttggcaccatcctgggccctgcagggggcagtggaaggagcaagggctgtggccagacccaactgggtgaggacctggatctgcatcttcatatctctgaacctcacaggagagtggaccaaagccaagcaccaagcacaaacaagtgagggaatggtacttctgaaaatagttaacccagctattttcatccaggaattcctaattgtcaccttccagggccttctgcagctcctgctgcctgcctggaagatggcttgggctcacaccccggtcctggtcactctgtggggacggtcccgggggaatggcttctgctctggccagcccttggccctgacctcttcttccgctcgcggagcgcctgctgaatcccccgatcgaatgtgagtttctcctcctcagtcagggcatcatattcttcctcatccatgttttggagaccctccttctctttctcaagagctcccttgtgcttgcgttctgtgaggggaacagagacgggaaggtggctgaacagtggcccccaaagatgcccatatcagattactcagaacctgtgaccgtgttgtcttccatagcagagggactctgcagatgtgattaaatttaaggatcttgaggtgggcagattattttggggggcccagtctaattataagggtcctttcgagggatgcaggagagtcagtcagagatagtgatgatgtgatagtaggagcaggggtcagagggctgcaaggaaggggccaggagccaaggagtgcagaaggcctctagaagccagaaaagacaagaaaaaggggctacctaacagccaaaaaaggaacgtggccctgctgagaaaagtccggagcaatgaccaggcatccctcagcagtcatcaagcctccagctgcctcgttttccagaaagttcatttctccataatgatccacttgaaaataattaccacttctcattttccccgttatctttggaatgaaatttctcctggttaaattgtgggctcttctcccctaaatcatctgcatttgaaatgtcctaaggtagcatactgtcatactactattacattaaaatctcatgtttgttaacatgtatgaacatgccaggcactggggaaggcactttacatgattgcttatttaatctccacaacagccctaggagggaggagttatcattcttatctgtgattatcccttaataagtggcagggaaagatgttaggacttctgaccccggaagtgtaagacaatacatttctatgttgtgttaagtaaccaagtttgtggttgctatggtgtaaatgtttgtgccccctcgaaattcctatgttgaaactgaattccccaaggggatggtattaagaagggccttagggaggtgactaggtcacaaggatagagtcctcatggctgggattagtgtccttataagaggcctgagggagcttgtttcaggacttagtgagaagatgctttctgtgaccagaaggtgacactgtttctgttggcaccttgatcttggacttgccagcctccagaactgtgagaaataaatgtctgttgctgataagcgacccaatctatggaattttgttatggcagtctgaaaagactaagacagtggtcatttgtcacagcaatgatagaagactcatataccacccactgacttgactcattatgagcatatgccactaacgggttcatggtgacagggccatttgcacaccaagggaaattccctgccctgccctacggattccaggtctaggcatgtgattcacacttaggacaaaggcaccagctccttcctcacacctccctagcacagcattctcaccgtcatcctcgcaagtttgagctgtggactcagacacctgcatttgagctccttcccggccacttatcaagagataatcacagataagaataaaaacatacggccgttgtagagattaaataagcgatcatgtaaagtgctttccccagtgcctggcatgttcatagatgttcgacaaacatgagattttagtgtaataatagtttgacc

SEQ ID NO: 472502 - DNA, 496 bp, Homo sapiens
taaggaccccatggccagcaagatccaaaccaggaaaggggcagctcttcagagacaggcatggttaacaacaaaccagccctttggaaagacttgcttcaccactgttaccaaccaacggcctgatgcttttcctcagttttgtgatggcccgcccggcaggacgactgagcaggccttggaagaccggagagattggagcgaatggggaggaattgaggggaaaatggagatagaacctgaaagagccccaaacgccagaacctgtagctccccaagaataagatcttccagaagaactagacccaaaactagccgttggggaacaccgaaatccttggaggagcaacatccgcatgaccctctgtgttcctttaggcaaaaggacttgcttccattgtttgttcaattgtttgtgtttgttaaataaataaaacgattttcatgtatctttgaaattactttggcgctactattttatgattgcaaataattc

SEQ ID NO: 472503 - DNA, 4560 bp, Homo sapiens
cccacagtcaaccttgcagagctcgcatatgaaaagttggccctcaacatatgtgggtttcacccaacagacacataaaaaatgctcatcatctctggtcatcagagaaatgcatatcaaaaccacaatgagataccatcacatgccagttagaatgatgatcattaaaaagtcaggaaacaacagatactggagaggatgtggagaaataggaatgcttttacactgctggtgggagcataaattagttcaaccattgtggaaagcagtgtggcgattcctcaaggatctagaactagaaataccatttgacccagcgatcccattactgggtgtatatccaaaggattatacatcatgctactataaagatgtatacatgcacacgtatgttaattgtggtgctattcacaatagcaaagacttggaaccaactcaaatgtccatcaatgatagactggattaaaaaatgtggcacatatgtgccatggaatactatgaagccataaaaaaggataagttcatgtcctttgcaaggacatggatgaagctggaaaccatcattctcagcaaactatcacaaggacagaaaaccaaacaccgcatgttctcactcacagatgggagttgaacaatgagaatgcatggacacagggtggggaacatcacacactggggcctgtcagggggtggggggctgggggacagatagcatcaggagaaatacctaatgtaaatgacaagttgatgggtacagcaaaccaaaatggcacatgtatacctatgtaacaaacctgcatgtgatgcacacgtaccctagaacttaagattaaaaaaaaacatttcttccctcatgaggtacaaagccaagcattacactggggccatgatagtccaggttgctgaaagatttagatctaaagactgaaaattgggatatatattgagagagagagagagagagaacaaatggtaacctaaatttaataaaataataatagacaaattagggtaacaggcatatgagtactttttgttctaacaattcttttattttcaaacttatctatgatcttacatttatttcccaataaaaaggattttaagttaaaaaaagaaagtttttctttagtaacattttcacaactagggcctttaagactgaggaaatactccaagctctgagcaaactcagtttagtttgctattcgttccagtgccttaatgtggaacgtcatcttatctcatcctttcctttgtcttttcattttgtaaatagtgtcttgttagcatcagaaagatgcccagaaaaaaagtgaataagaatttttggttcatctattacatcatttcatttcattatttcatttcttttcatcatttcatttcatttcctcatttcatcctttcatttcatcatttcatcatttcatctcatttcctcatttcatcctttcatttcatcatttcatcatttcatctcatttcctcatttcatcatttcatttcatccttccatttcatcatttcatcttatcatttcatctcattttatcatttcatttcattctttcatttcatttcatcatttcatctcaacatttcatttcatcatttcacttcatctcatcatttcatctcatcatttcatttcatctcaccatttcatttcatctcatcatttcatttcatctcatcatttcatcttttcatctcatcatttcatcatttcatttcatcttttcatctcatttcatttcatcaattcatcatttcatctcatcatttcatctcatttcatttcacttcatttctttgtttcatttcatcatttcatttcatcacttcatctcgacatttcatttcgtcatttcactttatctcatttcatcttttcatctcatgatttcatttcatctcatttcatttcatctcatttcatttcatctcatcatttcatttcatcttttcatctcatcatttcatcatttcatctcatttcatcatttcatttcatttatttcatcattgcatcatttgacttcatgtcatcatttcatatcatttcatcatttcatgttttcattcaatcatttcatcatttcacttattcatttcatttcatcttttcatttcctcatcatttcatttcatcctttcatcatttcatctcatcatttcatcctttcatttcattatttcatttcataatttcttctcattgttgcattttgtcattccatcatttcatcatttcacttcatctcatcatttcatcatctcacgatttcatctcatttcatctcgtttcatcttttcatctcgtcatttcatttcatctcatcttttcatctcatttcatttgatcatttcatcaattcatcatttcatcatttcatttcattatttcatcatttaatcatttaacttcatttcatcacttcatttcatttcatcatttcatatcatttcttcatttcaccatttgatcttctcatttcatttcatcatttcatcatttcacttcatttcatttcatcatttcatttcctcatttcatttcaccatttcatttcctcatttcatttcatcattccatttcatcatttcattacatttcatcatttcatcatttcacttcatatcatttcatcatttcatctcatgatttcatttcatctcatttcatcatttcacttcattctttcatttcatttcatcatttcatctcaacatttcatttcatttcatcatttcacttcatctcatcatttcatcatctcatgatttcatctcatcatttcatctcatttcatcttttcatctcgtcattacatttcatcatttcatttcatcttttcatctcgtcatttcatttgatcatttcatcaattcatcatttcatcatttcatttcatttcattatttcatcatttaatcatttaacttcatttcctcatttcatttcatttcatcatttcatatcatttcttcatttcaccatttgatcttttcatttcatttcatcattccatttcatttcctcatttcatttcacaatttcatttcatcatttcatttcatcattccatttcatcacatttcatcatttcatcatttcacttcatctcatcatttcatcatctcacgatttcatttcatctcatttcatcttttcatctcgtcatttcatttcatcatttcatttcatctcatcttttcatctcatttcatttgatcatttcatcaattcatcatttcatcatttcatttcattatttcatcatttaatcattcaacttcatttcatcacttcatttcatcatttcatatcatttcttcatttcaccatttgatcttctcatttcatttcatcatttcatcatttcacttcatttcatcatttcatttcatttcctcatttcatttcaccatttcatttcatcatttcatttcatcattccatttcatcatttcattacatttcatcatttcatcatttcacttcatctcatcatttcatcatttcatctcatgatttcatttcatctcatttcatcatttcatttcattctttcatttcatttcatcatttcatctcaacatttcatttcatttcatcatttcatttcatctcatcatttcatcatttcacttcatctcatcatttcatcatctcatgatttcatttcatctcatgatttcatctcatttcatcttttcatctcgtcattacatttcatcatttcatttcatcttttcatctcgtcatttcatttgatcatttcatcaattcatcatttcatttcatttcattatttcatcatttaatcatttaacttcatttcctcatttcatttcatttcatcatttcatatcatttcttcacttcaccgtttgatcttttcatttcatttcatcattccatttcatttcctcatttcatttcacaatttcatttcatcatttcatttcatcattccatttcatcacatttcatcatttcatcatttcacttcatctcatcatatcatctttcattgcattatttcatttcatctcatcatttcatttcatcatttcacttcatctcatcatttcatcacatcatttcatttcatctcatcatttcatttcatcttttcgtctcctcatttcatttaatcatttcgtttcttttcaccttttcatctcatcatttcatttcatcaattcatcatttaatttcattttttcgtcatttcatcattcacttcatttcatttcatcatttcatacatttcctcaattcatcatttcatcttttcatttcatttcatcatttcatcatttcatttcatttcacttcattatttcatttcatttcatttcaccattttatgtcatcatttcatttttcatcattccatttcatcatttcatttcatttcatcatcatttcagctcattatttcatttcttcatttcatcatttcgtttcatttcatcatttcatcatttcatttcatcatttcatcatatcatttcatttcagtgatacatgtatttaattgctaatgc

SEQ ID NO: 472504 - DNA, 880 bp, Homo sapiens
tttgcattggagcctgagagatattgcaagcaaatgtggtggaggggtgctctcctgagctacagaaggaatgggtctggtggtgaaaataaaacacaagtcaaactcattagaattgtccacagtcagcaatggtgatcttcttgctggtcttgctattcctgtacccaaagtgctccgtggcttccacaatattcacacgttctttcaccttgccaaacgccacatgcttgccatccaaccactcagtcttggcagcgcagatgaaaaactgggaaccatttgtgttgggtccagcatttgccatggacaagatgccagaacctgtatgctttcggatgaggttctcatcatcaaatttctccccatagatggacttgtcaccggtgccattagggcgtgtgaagtcaccaccctgacacataaaccctggaataattctgtgaaagcaggaacccttataacgaaatcctttctctccagtgctcagagcacgaaagttttctgctgtctttggaatcttgtctgcaaacagtttgatggagatgcggcccaagggcttgccatccctggtgatttcaaaaaagacgacggagtgagtccaatgaatatctactcatttgttatacaacaagttcttttaagagaaggatgtagaacaggatattatggcaatatatataaggcattcaatgtacccgtggagagtggcgatcagagaaaaatgatgtcaggaaattatgccaagtgttttgaatcagccaaggataaacaaatgcagactatcatttgatggaggtattataaactgataacatgattcgaagtataagaatggcaaattgtgaagaatgaataaaattacagagataaatagcaa

SEQ ID NO: 472505 - DNA, 785 bp, Homo sapiens
aggggctggaactatgggggtgactgagagtattccaaagccctgtggccaacttactggtgctgagtttgctggaatcatcatcgaatggaatcgaatggaatcaacatcgaatggaattaaatggaatcatcatcgaatggaatcgaatggaatcatcatcgaaaggattctgagggaatcatcgaatggaatcgaacggaattatgcaattgaatcgaatggaatcatcatcaaatggactccaatggaattatcatcgaatggaatggaatcaccatcgaatggaaacgaatggaatcttcgaatggaattgaatgaaattattgaacggaatcaaatagaatcatcattgaacagaatcaaattggatcatcatcgaatagaatctaatgaaatcaacattgaaaggaatctagtggagttatcatctaatggaattgaatggaatcagcaaggaatggaatcgaatggagaaattgaatggaatccgttggaatcatcatcgtatggaaccgaatgcagtcatcatacaatggaattgaatggaatcaatgaagggacttgaattgtgtcatcattgaatggaatcggatggaatcatcaaatggactcgaatggaatcatcgaatggactctaatggaatcatcatcaaatggaatcaaatggaatcgaattgaatcatcgaatggactctaatggaatcgtcatcgaatggactcgaatggaatcattgaatggactcgaatggaatcatcatcgaatggaatcgagtggaatcttc

SEQ ID NO: 472506 - DNA, 522 bp, Homo sapiens
ctagacccaaaactagccgttggggaacaccgaaatccttggaggagcaacatccgcatgaccctctgtttgcatccctggaatccatggaaagtccaggagagacaatcaagtgctacaggatcaagcccaaacagaacaggactaggcatggcttcctcactaggagccaggccaaagtcatctcctttggtctccaatggaggccagaactcggttcacctgcaacgggaggacctggcccagaagagacctttttcggatccctcctgcgcaggacctaaacgggcggtgcccttacccactggtccctccctgcctggtgtcttcggagccctagctcacccggaacgttactgcccgccggtgacagcgagaggaccaaagaggaccaaagagggcagcgggtgtggtgggaaccacagagtcaccgcgcacctgcgcctcgcgggctcctcgcaaattgaataaacgccccctgaagcttctcttcaagtcacagggaaggggaaggtggctgcc

SEQ ID NO: 472507 - DNA, 2157 bp, Homo sapiens
ctattgatacagtggctaggctgctgtcagctccagcaattagccaactccctttgaagtatgtctacccaatgctggctccagtggtggtttctgatccagagcactcccaggagatggaaagcctgagggaggctctgctgtcctctcgatcccaccttcaagagctggaagaggagctggagcaccagaaggtggaaaggcagcagcttttggaagacttgagggagaagcagcaagaggtcttgcatttcagggaggaacgcctttccctccaggaaaacgactccagactgaagcacaagctggttctcctgcagcaacagtgtgaagagaaacagcagctctttgagtccctccagtcagagttacaaatctatgaggcactttatggcaattccaagaaggggctgaaagtactgacgttctaccttggaggaccctatactttagcctacaggactaagaacttcccagccagcgctgaccctggaaacaagcagctgctcctccaaggcttgggtttggatacttctccagtaatgaaggcccctcccaagctggagggtgatgctactgatggctcctttgccaataagcatggccgccatgtcattggccacattgatgactacagtgccctaagacagcagattgtggagggcaagctgctggtgctaggcagcaaaggcattcatgagctttggagcagcaccagtgccctgcaccatgccctagaggagtcggcttccctcctcaccatgttctggagagtggccctgccaagcacccacatccctgtgctgcctggcaaagtgagagaatcgacagaaagggaacttctagaactgagaaccaaagtatccaaacaggagtggctccttcagagcacagctgagcatctgaagatcgccaaccagcagaaagagagcatggagcagttcatcgtcagccagcgtaggttccctgagagggaatgggggaagaaacgggcagtcttcccgatgccccacttgtgctgctgatgagcagtgactggggggcttggggatgttgggagttgaggctgatttgatgtccccaaacctcctgtgccccgagcagttgtggatgcagagggaggggaggacagggggtggatagcaggaaactccaagctgaatggccagagagaaataaatgctttagcattctcatgctaagcaagtagggttaatttctgctgatgatttctactctgtggtgctcttttgttgtttcagtaaccagaacacatgatgttttaaagaaggcaaggactaacctagagttaaggaaactactgcaccagtcagaggcaccaagcctgtccccaacccatcaccatctgttagcagatcttgtaggtgacgcttggcctgctttcgccttccaggagaagatttccagtccacttgtaagatcacaggtcctcagtgggcttcctgctagtttctgttcccatcaccctcccaccccatcagctcctgcccctgtatcttggttcactctcacattgtcctcatctctcctttttactccaatttttcttcgttgatgccaggtcaggagactggagaaatgcaattcagctcactctggaagtcattagacatttgggagtctgcctctgaatgagcttttggtagagggatcttgaggccagttatgtgttctactcttcatgaaaaagtaaaagcaatttgcaacctaataaactgatttcactgcacactcctgggttaagaacagcaatttgattttgatatttctttaagtaacacgacaaaagagatctgttgggtctcatttgtctaaaagagaatttgttaataaataacaactgaaccttcaggggaaaaatgttatatatatatcagacattatctacatttacttaaaacactaagtgtttaatcattccctaggaattgctttgaagaaaaacttgaggtatatgaaatggtttaaaaatcagaaactaaaccttttaacgtggacttcaaagctttgccataagcaattgagcatattcctagaaatgtttctaaaccataacctgagagaatgttgatctccatagtgtgaaaatgacttgggccagtttaacttgcacttttttttttctaaactaattcc

SEQ ID NO: 472508 - DNA, 2857 bp, Homo sapiens
ccctctgaacagctgggggcacaatttctcattgatttctagaatgttcatctctgccttctcgctggacaaagggccggctgataccaccatgctgaccctggggttttgggtcatcagggcctatggccaccttacctgggctgagcttttggacaaggtgctgtgccagtctacacccctcagccagctgttcttggaggtcctgcccctgggacttctctcgttcctgagagtgaaccaggactttatattgcctaaggaacaagagcctgtgcaccaggaagcagacttcactctcaccaagcagagtcgtggcgaggaggacagcacctgcatcgagctctccgcctcccccacccgccagcccaggcggccccagcagcagcgaccagaggagcccctgcagcaacgcaaaggccaggtggacacctccatctacagcctcgacacggccattgtgggcaacaaggacccaccttccatctgtgccaccgtcccagggaaaaccttcctcaacatcacgccagctgaggttggtgtcctggttggcaaagactggtcaagctttgtcatgaatgggctgacactggggggccagaaatatactgtggtcctggactcactgctgcaggatggggaattgaccacggatctttgtatgaagagcatcggtggagcccccaccttcaacgtcattgtcaccatgactgccaagacgctaggcctgctgatgggcaaagaaggtatccatggcaatttcatcaacaagtaatgttatgaaatggcctcccaccttcagcgttcccagtactgacctcctttgttccttccactccaccgctccccacagctttgcccgcctttccttcacatacacacaccattttaatttcaggagtcattaccccacacaccttattgctgccaaaaccacatgggctgggggccagggatagatggacagacaccttcccccacccatacccctcctgtgtgtggctggaaaacttttttgttttgatggattttttatgaataaaaaagattctactaaaaaaaatcaataactgtacatatgtgggcatattgtttgaatctgtattcttttgctttgatatatttatgaatacttacaccattactactgtttttaaattactgtagctttaaaatcaggtttgaaatctagcagagcaagtcctccaacttattgcttcttcaagaccgacttgcttattctaggttctttgattttcaaatacattttgaaactagctttcaaatttctctaaaatctcctactagaaatattaatcagaattgtgttgatgtaatatgctaacaaaattgagtcttccaatcaatgaacatgatatatatttatttagccttctttaatttttctcaccaattgcttttaggggcctcgtacctgcttcattgcatgtattgttaagcatgtaatgattctggctattaatctctattatgttttattgaatttcattttctagctgctaattgctagtatggagaaattaagatgatgaaatcaactttataaaggcataatttcggtacaacagactgcaccactttaaaatgtgtaattcaatgcacgtttacaaatggatgcactaacggaactactgccacaaccaagatagaggaaattccctatgcccaaaagtttcttgtacccctttgcagttcatcagcctttcaaccctcagccccaaggagccactgtcacttcaggtccgtttgcatttttaaccattttctataaatgaaatgatacctgtgttcttttgtgtctgccttctttcatgcatcaatgtaattttaaaatccatctgtaatgtcttgtaaatactgagtagtattccttcatgtggctataccatgtatgtttgtactttcacttattattggacatttctatcattccacgtttgggctattatgaagaaactatcatgagcatccatacgtagcaggccaggtctcactaacacaggcctccctaaaaactgtttcagtagcgactgagtggttcaattaaatattaagaggaaaaaaaaaaaaaaaagaagccagtgcccttatacaaaggctggaatgtaacaaaagcccaccaagagttttgcctaggtttttcctgggccttaaagcatgacgaaataacgaaggcattcttaacaggagccatttagtattaaacgagttttactgggggtctgaagaaactccccaggcctccacagacaagtttattggagatctgaagggactctccaaacctctgtgatttagcaggagacaagataagggcccccagcacctagacccatttagattaagtgaatttaactgaggttccagaggaaggtctttaggactcagacttagttatagattaaaagaagttaatcacttatgtatttagatgaatgcacacttccacatacacatatagcttagaaggtacattagctcaggaaaactttccaattttgagttggtctggtgataatttccaggccgtttccctgtaaccagttgcagaagtcaaaactctcttcctccccagttcatctgtgtctcgttactgagccacgagaaatagcagcccgcccctcaggttggtctggaaacacacatacagatcattgtgcagacacagtgtgtaaattcctaggaatggaatgactgtctatctgatttgtgttatgtttaacctttaagaaactgttagattttaaaggagcataccatttttcattcctacaagtatagacttccagtgcttatttctaaccacatgtgctatttcagcttttaatttatccat

SEQ ID NO: 472509 - DNA, 3229 bp, Homo sapiens
ctctacaggacaaatgacctggccccgcttcacaccttgagctcacagtcatttccgccgggcctgggctagcggacgcgcgcgtgggaaggaccagaacccgtgatgtcctcaccgtgtcaccctcgggccctcagaggtgggatccaccggacagggacctggagtttgcacaggctgcagcccttcgcccagagccagcctagcacctacgcgaatgcagtctaccactgccacaaattatacagtcaagtttcccacatttggggaaactgcaggggtcagcagatccggagtgcaatggataagactcgctctggaaaaaccaccttcgtgaccagggtatctctcctgccagccctgacacacagctgggactctcaggtccgaccagcggtcctgaacccgctcccacggcacgggaactccttcgtggcgaagcagcatgtggcgaagcagcagcccctgcgctggctcatctacatagaagtcgccctatccgtgatgtcaccgacagtgcctttcccagtccccgtctgcctttctgccgctcagccgaccaacccgctgccggagccggcaaggggaagtgacgtctgcctctcccttttttctctcctgcttccctcatctgttctcttccaaagaagctggtccttagcctgtattgcggagcaagctttcggcgaccagctggaccctgggcacccttcttcgaacaatggcttttaattctcagactagaacgtttaggattacaaaagaaactggttcttttcacattcttattcttgtgatgtagcattccgcatatatatatatatatgtatccaactatcctaaaagacactacccttcatcattccatggcattagacatgtataggaccatgcatggtgatctcctccagacaaaagtaaatgctggtgcagaacaggtccaccttccttggtgttgcttgagggatcagaagaaatgccttaacataggtgtgtgggaactatggctgctaagtatgaactcagttacctccagttataagctagtgtgaggttccatggtgtaatgcagaaaaatttaggcaagagctctggaggaccttcctagctcataaaaatgctgtggtcaagtctctccagttttggaagtgtccaaggttaccaagtgttttgagggctcactttggagcctctgaaaaggaggggtcagggcccatggaaggacgattgcctgcaagacagggcctggaggccagggaacccaaggccacagaaatgcccagggatgagtcctggctggagatgccttggctaagctgactgtgcacttccagggctcacaggggtctggccaggagactgagcaaggggaccagggaggttatgcagaggcttctgcacagcaaggcagacattcttcttggagcccccaacccaaatcaggtcttccacctcctcttcctaaagaccctttactgctgtcgttcttttactagaactacaagtttagaggacatggatttcagtgccctcatctggccaaccatcttcagctgccaatgagcaaggtaacctccctccctgccaagacctgactcaggacctttccttaaggagatgtcctgttctttctttcccaccagaactgccctggcccagaccccatttctgtctggtgaccaggacagtcccctcaccagtctcccaggttggggagggcagatcctcctcagctccctgcccctgagagaccccaaccgtcttgtgtggctccggcccacagagtgatatccatggcccatatctctcaaaactctcccctcccactctgaatccaccctctactgcatgctcccctcacagaacagactaatttttgtgtgtgtgtccttgttttgcctacctgtaccccagacagacttttctgtcttagaactacctgtccctctttggacagtgtcttcctggtactacacatgaagatgtcccgctctcccctgctcaaggagagagtgcctgacctgagctgggcccatcagatccagtacttacctggaatacgaaaaagatgaagagagtgaccaaagattacaaaaatctctgaagcttatctacttgagagagagtccctgaagatactggcctctcattcctgctatgtatatccaatgtgactgaactctgaataaaatatacaagttataacaatgtagcaattgacccagcaaacgaggacacaaacgtgttggagggaatttccagtattccaaatatgagaagctgagaaaacaaacaacaaactcaaaaccctaaaaaccggatacgtaagggtagatgtttgttgggtgtggattaaaaatggactttttttgccccaagcaacaaagaggcaccttagaaaatagacaagagacaagaagaagagaagctttaagagatatttggtccaaggaagagactcttcagatggaagaaacaaaagaagaaaaaaagagatatgaaagcctatatattgaagactaccaagtactgcttagagcagttaaagacctttggaatagaaaatgtttcttcttgcatttcaagattgcttttgttttggggggacacactattttttaggaatatgaagttcttcttaggcattcctgtaaaaaaggccacttcttgataggattgtattgaatctgtgggttgctttgagttgtatttttatcttaaccatgttacaacttccaacccatggacacaagatgtctgtccattgatttaggtcttcctgaatctcctcgagcaatgttctgtagttgtctgtgtacaagtacggcaccttcttgaacaaatttattcccaggcatattattcttacaagtgctattataaatgaaatcattgtgtcaattttcttctcagattgttcattgctaacacaactgattgtttactgaaagtttgctgaattcacttattaactctagtagtgtgtgtatgatttcctttttatcactggttttgatggatttgattaaggcgttccttggtgaagttttcttcatgtttcttgttcttagaataatcatatttctgtaatatttgaagtttatggtttccatggagcttctaaatctttcatccagtatgttttaaatatctttgtctctcttctccactacacgcccttcagggattccatttagccctatactggggcgtttaaagttttgatgcc

SEQ ID NO: 472510 - DNA, 633 bp, Homo sapiens
ctctctccccgtgaatgcaggtgatcttccgaaacgaggtgacaaatgagttcttgtactacaatgtgagtttcagggtcatcccttcaggcatcatcaaaaccatcgagatggtgaccccagtccggcaagttgcgtcagcctccatcaagttggagaaccctctgccctactcggtgaccttctccacagaatgccagatgcccgacatcgccctgccctcccagtttgtggtgcctgccaactccgagcaacaacgatgttgttggatagtgagaaaaactactgctctagaggctcttgaattctgcgtgtgcatatgtgcatatgtgtcgcaggcactaaatagtaacaacttagaatcagaagatacccttcaagctcatgtctctcttcatggaaacgaagtagaggtatttgttaaatgaaacatgaatacatgaatggtgcctggcacatagtaactactaataattaatctcttgtgcttattaaatgccagccacttgacagattattaaaactcacaccaaccccacaagtgagtgttgtaattattcccatcttaaaatgaaaacttgacactcagctatgttcagtaacctgcctggggtcatggaggtatttggaaat

SEQ ID NO: 472511 - DNA, 592 bp, Homo sapiens
agccttgttcctgggaacctaactgaaccatcagctgtgttacctagcaacactgcttgtggtagaaatgacacccaatctccctgtagtgaatttcacgtgccaggtgcgctccaagcacacgcagaccatcctgctgtcaaaccgcaccaaccagacctggaatctgcaccccatctttgagggcgagcactgggaggggcctgagttcatcaccctggaggcccaccagcaaaacaagccctatgagatcacctacaggccccgcaccatgaacttggagaaccgcaagcaccagggcaccctcttcttccccctcccagatgggaccggctggctgtatgctctgcatgggacttctgagctccccaaagctgtagccaatatctatcgtgaagtgccatgtaagaccccctacactgagcttctgccaatcaccaactggctgaacaagccccagaggacctctagaggatgttgaggggctcgaggagttagagacaaagttccctgatgtgaccaggcatttcctgaacactaagcctctagcgagattctcttttctgtgcttagttacttattccgggtcatc

SEQ ID NO: 472512 - DNA, 960 bp, Homo sapiens
agtcaggtgggatggcgcccctatgaggctgtgtcttatccctcagaacacgggcaccccacagagggtcctgcctcctgtggtctggagccccccttcaaggaagaaacccatgctgtctgcttgcaactccatgatgtttggacacctcagccccgtgaggatccctcatctgagaggcaagtttaaccttcaacttccttcattagatgagcaggtgatcccagccaggctcccgaagatggaggtgagggcagaagagcccaaagaagcaacggaggtgaaagaccaggtagagacccaggggcaggaggacaataaaaggggcccctgtagcaatggggaagcagcctccacctctagtctcctggagactcagggaaacctcacttcctcctggtacaatcccaggcccttggagggaaatgtccacctcaagagcttgatagaaaagaaccagactgacaaggcccaggtgcatgcagtgagtttctactccaaggaccatgaagtcgccagttcacacagccctgctggaggcatcctttcttttgggaagcctgacccacttccaacagtgctccctgccccagttccgggctgctccctgtggccagagaaggcggccttgaaggtgctggagctgccagccacagttcccacaaaagaaaactgtcggagccaccgctgcagctgcaaccgacccctcccctgcaactgaagtgggatagagacgaggggcccccaccggctaagtttccatgtctatctcctgaggccctgttgatcgttcttgtaatttgtaagtcttagagaaaagaagtctgattatccagagtatcagaatcccttccaaaataaaatgtccccattcaatcactcatgaattttgcaaaacactgtttgcaccttttcacctccctctgttcaagacctctcagtgacactttatgctttcct

SEQ ID NO: 472513 - DNA, 3179 bp, Homo sapiens
tgtaaagatgcctcagctcctgagaaatgtcctctgtgtaattgagacattccacaaatatgccagtgaggacagtaacggggcaacactgactggcagagagctgaaacaactcatccagggcgagtttggggacttttttcagccctgtgtccttcatgctgtggaaaaaaattcaaatcttctgaatattgacagtaatggcatcatcagttttgatgaatttgttcttgcaatcttcaacttgttgaacctctgttatcttgacataaaatcattactaagttctgaactaagacaggtgactaaaccagagaaggagaagctagatgatgtggatgttcaggcaaccaccggagatggtcagtggacagtgggaacttcaccaactcaagaaaagaggatgcttccttcaggaatggcatcatcatctcagctcatccctgaagaaagtggagcagttggaaataacagagtggacccatggagagaagccaagactcacaactttccaggagaagcatctgaacacaatgatcctaagaacaaacacctggaaggagatgaacaaagtcaggaagtggctcaagatatacaaacaacagaagacaatgaaggccaacttaagacaaataagccaatggcaggatcaaaaaagaccagcagtcccacagagaggaagggacaagataaggagatctcccaggaaggagatgaaccagccagagagcaaagtgtttccaagataagagaccagtttggagaacaggaaggaaacttggcaacccaaagttcaccaccaaaagaagcaacacaaagaccatgtgaagatcaggaagttagaacagaaaaggaaaaacactctaatatacaagaaccacccctacaaagagaagatgagcccagttcacagcatgctgacctgccagaacaagctgctgccaggtcaccatctcagacacagaaatcaactgattccaaggatgtctgtagaatgtttgacactcaagaaccaggaaaggatgctgaccagacaccagctaaaacaaagaatttgggtgaacctgaggattatggcagaacatctgagacccaagaaaaagaatgtgaaacaaaggacctgccagtccaatatggtagcagaaatggttcagaaacatctgacatgagagatgaaaggaaagagaggagaggtcctgaggcccatggaacagcagggcagaaagaacgtgacagaaaaactcggccactagtcctggaaacccaaacacaggatgggaagtatcaggaactccaaggattatcaaaatcaaaagatgctgaaaaaggttctgagacacaatatctaagctcagaaggaggagatcagactcaccctgaacttgaaggaacagcagtctcaggagaagaggcagaacacaccaaagaaggcacagcagaagcatttgtgaacagcaaaaacgcacctgcagcagaaaggacactgggggcaagagaaagaacacaagatttagcaccacttgagaagcagtctgtaggagaaaatactagggtcaccaagactcatgaccaaccagttgaggaggaggatggttaccagggggaggaccctgagtcaccattcacacagagtgatgaggggtcttctgaaactcccaacagcctggcttcagaggaaggcaatagcagctcagagacaggtgaactgcctgtgcaaggggactcccagagtcaaggggaccaacatggagagtctgtgcaaggaggtcacaataataacccagatacccagaggcagggaacacctggtgagaaaaacagagctctggaggcagtggtaccagcagtcagaggagaggatgtacagctcacagaggaccaggaacagcctgccagaggagaacacaagaatcaaggcccagggaccaaaggcccaggtgcagctgtggagcccaatggacacccagaagcacaggaatccacagcaggagatgaaaatagaaagtccctggaaatagagatcacaggtgccctggatgaagacttcactgaccagctttccctaatgcagctccctggaaagggagatagcagaaatgaattaaaggtccaaggcccaagtagcaaagaagagaaaggaagagcaacagaggcccagaatactctgttagaaagtctagatgaggacaattcagcctccctcaagatacaacttgaaacaaaggaacctgtaacatcagaggaggaagatgaaagtccccaagagctggcaggagaaggtggtgaccaaaaaagtccagccaagaaagagcacaattcttcagtcccctggtcaagtcttgaaaagcagatgcagagagaccaagagccctgttctgtggagaggggtgcagtctattccagtccactataccagtacctacaggagaagatactgcagcaaacaaatgtaacccaagaggagcatcaaaagcaagttcagatagcccaggcatcaggcccagagctttgcagtgtatccctcaccagtgagatctcagattgttctgtctttttcaactacagccaagcatcacaaccatataccaggggacttccacttgatgagagtcctgctggtgcacaggaaacaccagctccccaggccttggaagataagcaaggtcaccctcagagagagaggctggtactacaaagggaggcaagcaccacaaagcaatgaatcattatcatctcaacatgcccccaatttctctcccaatcaccctcaatactcacgtgtacacattcagatgcagattaacaatcttttaaattctcttcctaaatttctacaaaaacaaataataaaatattcagcagtgggggacaccactaaagaaacatctgagcaaacaaatacagtcagtaaaactcctaccaaacaatgctacttccaaatgccaaaatgggctttgtcatgagacagtttatctcaatgtacctgtcattaaaaatggaaaaattccttccatatctttagcaggtgccagtttttccaactgattcattgaatttaaaatagagcagtaggaaattataagactctgcaataatatctcataatcataaaatattaattcatatatatagattactctgcttcatgacatttcctagaagtatttcaagttcatcct

SEQ ID NO: 472514 - DNA, 569 bp, Homo sapiens
ggggcactcctccagccacggccaacatgggtctggctcaggtcgttcttccagccgtggcccatatgagtctcgcttgggtcactcttctgtctttggtcaacatgagtctggctcaggacattcctctgcttacagtcagcatggtagtggctcagggcacttctgtagccaaggacagcatggttctacatcaggacagtcatcaacctttgaccaggagggatctagcacaggccagtcttccagctatggccaccgtggctctggctccagtcagtcttctggctatggccgacatggggctggatctggccagtctcttagccacggccgacacgggtctggttcagggcagtcttccagctacggccaacatgggtctggctcaggacagtcctctggttatagtcagcatggaagtggctcagggcaagatgggtattcttattgcaaaggaggaaaaggtgaaggctctgaaagcaaagatgcagcagcggtagtgtctttacttatcaaaaccatcaagtcctttttcttgggtatatatttaatcagaaaaaaaaaaa

SEQ ID NO: 472515 - DNA, 1562 bp, Homo sapiens
agtcttttccttttgttagttagacctgtaggtttgcagagctcctcctagcagtgtgagcaatgagattttggtggccgcggaaagtaggaacgagagagctggagcacgccccctacctctttggcctctgtggttgctggcgtctcactcaggtttttgggtgccactgtgttcccctcatccagaccctggtacttgcagcggaagccgcctgtggtacacctggtccagctgcagcctcgcaaggagctggtgccggtgccggttcctggagctgcatgccctgccgcagcagctggcgtgcctggctgtgtgcagtggccagaccccacgatcacttgctcacaaaccccttgccactctgtacctggctctgtgcctggcttgcctttggcagccgtgggatccagggtggtagcgtgagccgagtgcagcttgccaggtcgagtgggtggaaccagcccagcaggcatgagcaaaactcaagcagaggtaccaccggctactggggctggtgaagcaacaccccaaaaagtcctgcatcattttaagtggctcatccgggatctgtagatgtgtctttgaggaatcaccgcactgctttacgcaatgattgatttacactcccaccaacactgtgtaagcttgccttttcaccacaacctcatcagcatttgttattcatttattttttttactttttaataatagtcattctgacttgtgtgagatggcatctcattttggttttggtttgcatttctctaatgatttgtgatattgacctttttatcatatgtttgttggctgcatgtatgtcttcttttgaaaagtttctgttcatgtcatttgccaactttttaatgtttttttttttcttgtaaatttgtttaagtactttgtagatgctggatgttagacctttatcagatgtgtagtttacaaaaattttctccccttctgtaggttgtctgtttactctgttgatagtttttatttttatttttatttatttattttttgctgtgcagaagcttttaagtttaatcagatcccatttgtccatgtttgcttttgttgctattgctttttacatcgttgtcatgaaacctttgccggttcctatgtccagcatggtattgcctaagttgtctttcagggtttttatacttttgggttttacagttaagtctaatctgtcttgaattaatttatgtatatggtataaaaaaggggtccagtttcaatcgtttgcatatggctaaccaattatcccagcaccgtttattcaacagggagtcctttcccattgcttgctttgtcagctttgccaaaaatcagatggtacagcttcattttaatataaataagttatattaaatttatttaacattaaaaataataaaatgtttaaaatgttaatgaagaaaataaaatgagtgaataattctagacaagtgatgttaaaacatttattaaaaatggttatttgttccagtatccactaatgaaggattaagtaattcagaactacctttctgctgaagacaagaaaaacc

SEQ ID NO: 472516 - DNA, 912 bp, Homo sapiens
tgcccacagcagaagccatgtacagtacatctggtccagtagcagattcgcatggagccactacctgtgcctggagctgcctgcccagcccgctgcagcagccagcatgtttggctgtgcacagtggctggaccccatactcgctcatctacacacccctcactgctccatgcctgccttgcgctttgcaggtgtgggatctgggccggtagagctacacagtttacactacaagtccccatgtcccagcttcgccattggcctcctgaacctgagcaagtgaatcataaagcctcaggttggaacagtttggagggctcccaaggagacaggaagatgagggaaagtttggaacttcctagagacttgttaaatggttttaaccaaaatgctgatagtgatatggacaatgaagtccagtctgacgtggtttcagatgaagaggaggaacatattgggaactgcagcaaaggcactcttgttatgctttagcaaagagactggtggcattctccccccgccttagagatctgtgaaactttgaacttgaaagagattatttagggtatctggcaaaggaaatttctaagcagcaaaacattcaacaggtgacctggtttcttctgaaagcatagaattatatgcattcacaaggagatgatttgaaatcgaaacttatgtttaaaaggaaagcagagcataaaagtttggaaatttgcagcctgatcacggggtaggaaagaaagacccattttctggggagaaattcaaacctgctgcagaaatctgaaatatactgcagaaacccctgataaacccatcagatttcgtgaggcttattcactaccatgagaacagtatgtgagaaatcgtccgtatgattcaaattatcttacaccgggtccctcccac

SEQ ID NO: 472517 - DNA, 624 bp, Homo sapiens
cttgaccactattttctaggtatggaatttccaagatgttcagatgtgtccagcgtttcttccttccagtgggttcatggtcttgctgacttcaggagtgaagctgcagaccttcgcgaacaaactacacaaggacaggtggaggcaccgagaaccagatcagaagccattccttcagcgacccaaggagagggccttaccgtccccagttaacagccacaacacaactcaagattattttcagacagtatatgtaagcatggatagatttttatgtatgcattttattccaaaattttgctttgctattttcaataaatacttgatatatttaagaagtcatgggttaaggaactctacagcttttgttagctcaactctaaagctcctgcaaaaagaagatggaactgtcacagacaaaggctcctatggagatgtggtatctaaatgtcatgtggtgccatggatggcatcctggaacagaaaaggggcattagaaaataaatactcttagatgctaaatatacatataatcaataattgcagcatttacttgatatatttagatcttttcttcagtccatttacaaatattggccaaataaatctttaaaatggtttatc

SEQ ID NO: 472518 - DNA, 588 bp, Homo sapiens
agggtttatcttctcagacaaatgtggaaagggggacagcagcatgggtcaaggagggaatgttgccactattggagatgggaaagctattttttctggcaaaatgttcatcagagtttacaagtccagcttcatcaggttcctcccaaatgtccccattctaagtttcggggttccatccttttccaatcagtgccctcactttaacagtagacacctggtgaggctgtgcatgcacctttcatttcaggcatttataatttatcgagtacttttaactcctctaagtccaggtaaacaagcaggctccagagctctggaaaaaatcggagctagtgaagcagcactgatgagaaataattgtgacttcttatcccagagcaaaagtattttggtttctgcatctgctttcttatctgttgctgtgggcatcctacgaatcacagaaattcattgaaatggaggagagggatctgtcccatgctgttccaattagggaggtcctgttcccatattctgagaattattgactcaataataaaagcaaaggcaccaaattgcatactagatcttaaagccttcttccag

SEQ ID NO: 472519 - DNA, 530 bp, Homo sapiens
gagagaaagcaaacagtaacaaaagttcttacattgggctgcagatttcaggctgcttttggcttgaagatattcattcagtaaatccttaatcagtgatgactgagtgtcagatcagctcccaaaaactggggctacaacataatttgctagagaccgaagatgtagggatcggcagctacagatatattccttattcacatggagtttgctgtcaaatgaagaaacaggagaaacgacttaataattgcatttctacaggagagctgtggctccaatatcaatgtgtttatattcatttgctcaatcctacagtactgcccaaatggttacagaatttctacaaaaaagggggcagaagctggggagccaagtggtccagctcagcggatcccacccccacagaacctagcaagctacgatccactggcttgaaattctcactgtcagcagagcagtctgaggtccacccgggacactcaagcttggtgcggaggggcatcctcctattgctgaggcttgagtaggcc

SEQ ID NO: 472520 - DNA, 600 bp, Homo sapiens
tctctggaatgtttaagtgtagtagggaagctgatatttgatatggctgaagccattgcagctgctgctgctaccagaactgcaaacaagatgctgctgttgctcctactggccttggcagtcatggcaaggattttggttgtagatatatggaaacctattgcacattttgagcagagaagttacgtgattgattttcagtttaaccagttacactattttctgttaagcacagaaagagtggaattgggaaggcagaacaagttagatgtggccatgaaaaggtgttctcagtggagtgtgaagggaagtgatgtggaccacttctggagctggcccgcaaaatctcctaaaagatcatccacgctctctccctcatttaccaaatgcatagagaacatcaaaagacttcctacaatgttggattctagagggcatcctgcctgcatttcttggctactctcctcacttctcccaatcactccaccaatgcttctgtcctcacatctctgactctttcattctacctccctcttgcaagcatgcttgtgattacattgggcatttacagctgatctaagataacttctacatctccag

SEQ ID NO: 472521 - DNA, 3441 bp, Homo sapiens
cacctttcctacacgcatgggttattcccacatcaacaccaagcctggggccagctggtcaaccaggcaccttgctctcctccgttccctgagctcaggtggcataggcgttgccgtgagctgcggagaaatctccacgcagagtcgcctgttgataaccctccagttaaaacgttcttggcagcgggagcccctcagatgtaaatttccctttcacacgcttgagcttcagccctcctttcttcaaatgaagtcacggactctgatggcactggcttgtcaggcaggacgaccggactgggaaagagaccaggtagaaactagtgacctagtgacgggcgctttcgggggcgctgtgccggtgaggcttaggcaaggggacggggaaccgtggttagatgcagcagcggcgcagcagccctcccaggtcccacttctttggcgttcctgctgcctgtgactcaagacaattgacttccacctgaaccctcagctccgaacgccttgcattagaagctagagctttggaggttctgaggacggtccctggggagcaagtggtaggtttcgaggcgcccgcttcccctctgattcctgcagtaactgagagagagtgtgccagaaatggctttgctgccgaatgcattatcttgccattttcgtgtcccaatactgaacaaacgatcgcctgatcgatcggctgttgtccagctctaatgatgtcctagagcagaagtgtttcttctgatgtctcattttaacaagaggatgatgtctgtgtatgtctctgtgttttagagaggctggcaaatgctgctaagaggatctgaggttcacataaagaggatgaaaattctgaattactttcattgcaaataaaccttaacaattgtgagagttagagagcatacttttcacataagactttggtatgctgcctaaagctacttacataatttgctattcagagaaatgcatttgtttattgaggacccacccggacttaaattggaaaaatgtaacattcagatttttattttatatgtgaaataaatgtgtgattgctgttcttaaaaatttgaaaaaaaaaaaggataacaagaatattaattttgtgacccatagttcatgaactttaaaagtgtttacagcatttaaagtttatttaacaatttaagtatttgagcactatactaattcatatggttacatttgatcaactccttcatgaagccataggctttatatctcctagctgccttttaccttcagaacaaatctggtttatacttagattgctccaaaagttatgcattttaattttatgttgaaaatgtctttcttagataatcacggtgcatatttgcagctaacactttagtatattttatattagtggtaatgcttttattagccatcctgggtgctgccttcttataagagctatgtatgagtaccaactaatatatttctttttttttttttctttttcttacctattaacccactaaaatttctaatctaaaagcaatattcaagttacattttattacagaaattggaaagcaatttgcctgggaagcaaaatgttgatatgattcaggtgattttaacattaaatctaacttgtaacaaaaacggattatataaagataaataaattgagactattatttgcatagcaaagaaagtcaaacatgacccacacatttatgcacatataattaatttcaataaaatgtttatatttattcattttcatctctgctatgtttgcttttagagttttctctttgaaagagtctaaagttttaaaaatacctgtgtatgcaggaatcttcacattttattttgtaagatcaataatgctgctaaataaactggggctaatgtgttcaagtctcataaaaagtgtgttggaacttgaatggacattaaggaacatttaatcttatcactcatgatgatgaagaagttaagaaccagagaggttaaatgattagtgtaatcatacactaactaataacctaaggaactttaaatgcaggtttattaacttcttagctagtgttcattctatattagttacattctattactaagacaggcattgtttgagagggggcctaggaaataagtgaaaggaagagaaagtagtacaaagatgaataaatagtagccagtctttttagagtccattttgttgataactaatactctttattgtagaaaacttttattcccctgctttattttatcctccactccgccgccttcccatgattggagatttcatgtaatttacctttgcagaaaatatcttcagtattcttagacatagtgcggtggctcgcacctgtaatcccagcactttgggaggccgaggcgggcgggcaaatcacgaggtcaggagatggagatcatcctggccaacatggtgaaaacctgtctctactaaaaatacaaaatttttctgggtgtggtggcacgtgcctgtagtcctagctactcaggaggttgaggagaatcgcttgagccagggagtcggaggttgcagtgaaccaagaccttgccactgcactccagcctggcaacagagtgagactctgtctcaaaaaaaaaatatatatatatatatatatgtatatatatatatatatatatatacacacacacacatatatacacatatatatgtgtatatatatatacatatatatacacatatatatacgtgtatatatatatatagtcagtattctttttgtacactcattgagttgctgttccctagactattttccctcatggtatataaactgtcgataatttcaaccacctgcagtgtcatactccgtcatgtcacctgtctgctctactttttaaattccctaaaaatgtagaaataggattgttccaagaggaaagctgtcctctcaaaataagaagtttaattagactctaatacatatctgaaactatacacacagaaacacacacacacaatatgaaagaaacgcagagactaagacaacatcttttaatggaaacattatgtaaaacatacaaacaaaaaaatctcaccacatgttccattagtataaaaatagtttctaatttgaataaaagctacaagacttcaactattttggaaggttcagtgttctggagtagtttgagccataccagtgttttcatatacatcaatatttgtgtgttacatacaagccatttttgttttgaaaatggcaattctaaagtagaatatcaacattaagatctatttggcactaatcatcacttcaaaagggttatcattactggattaaacaagatgaacatagaatcaaatcaaacattttaaaatgtctgcagtgtatgcttttaaaatttaaatttttgcactaatctgaaaaattagtgctttatagaagcatttct

SEQ ID NO: 472522 - DNA, 805 bp, Homo sapiens
cctgaataaaccaatacgttagggatatatgtggaccatagcaattctgattatagttgctaatcaatgtccgggcttatggaccagggagtttggccgctggaaagtaaataaccttgcagttgagagaagaaatttccttggctctcctctgcctcttgcccctgaattcttccgcaacataagacttttgggacgtcgacctacccttcagcaaatcacagaaaaccttatcaagaaatatgggacacatttcttgctatctgctactctgggaggagaggagtcactcacaatttttgtggacaagcggaagttgagcaaacgagctgaaggaagtgattccaccaccaatagctcttcggtcactctggagacgctacatcagctagccgcttcttatttcattgacagggacagcacccttcggagacttcaccacattcaaattgcatccactgccataaaggaagaaagtgttccttctctcattattatctaggatgttatctgtgggtttttcatacatgctctttaatacatggaggaagttctttttaattcatagcttggtgagtgttttttacatgaaaatgtgttgattttgtcaaatgcattttatgtctattaagcatgtaatttttattttttaattctatttacatgatttattacattagttgattttaggatgttgcataaactttgcattctttgggctaaatctcatctggtcaatgtgtatatttcttttatatgtggctagatctagtttgccagtagtttgctgaggattggtatgcct

SEQ ID NO: 472523 - DNA, 548 bp, Homo sapiens
ccattgtatcttggaaataaggaaatgaaggcacaaagaagtcaagtgcttttccaatgccagagaagtaagagatcaattcccttgcaaagttatcaaggtgctggcaacaatgcattaggtctcttccttggagataacattcaggaaactgataatgcagaacacaaatattccgtttgtgtttataacgaccttcccttctgtgaccatagacgaaaactgactttcatcaatgttttaagtaactgtgcttacatcagggctttaaggtggttggaaagtaatgcttatccagtagaaatcagtacaatactcgcttgtgctgttgagcaatggcagcaaggtgcaactcccagtcagccaaatgatcacaaggtaagcaatcaatatgccacagtggactgtgttgtcagataggcttccccactgtaggttagtgtaagtgttctgagcacattgaagataagctaggctaagctatgatgttcagcagtgtattaaatacattttcaacttacagtattttcaacttaagatgtgtttat

SEQ ID NO: 472524 - DNA, 987 bp, Homo sapiens
gaaggatcgtatgaatgccccatggaaaattacaatcaaacgtcaactgatttcatcttattggggctgttcccaccatcaaaaattggccttttcctcttcattctctttgttctcattttcctaatggctctaattggaaacctatccatgattcttctcatcttcttggacacccatctccacacacccatgtatttcctgcttagtcagctctccctcattgacctaaattacatctctacgattgttcctaagatggcttctgattttctgtatggaaacaagtctatctccttcattgggtgtgggattcagagtttcttcttcatgacttttgcaggtgcagaagcgctgctcctgacatcaatggcctatgatcgttatgtggccatttgctttcctctccactatcccatccgtatgagcaaaagaatgtatgtgctgatgataacaggatcttggatgataggctccatcaactcttgtgctcacacagtatatgcattccgtatcccatattgcaagtccagagccatcaatcattttttctgtgatgttccagctatgttgacattagcctgtacagacacctgggtctatgagtacacagtgtttttgagcagcaccatctttcttgtgtttcccttcactggcattgcgtgttcctatggctgggttctccttgctgtctaccgcatgcactctgcagaagggaggaaaaaggcctattcgacctgcagcacccacctcactgtagtaactttctactatgcaccctttgcttatacctatctatgtccaagatccctgcgatctctgacagaggacaaggttctggctgttttctacaccatcctcaccccaatgctcaaccccatcatctacagcctgagaaacaaggaggtgatgggggccctgacacgagtgattcagaatatcttctcggtgaaaatgtagacatacgttctgtgttagagtcaaagc

SEQ ID NO: 472525 - DNA, 1601 bp, Homo sapiens
gttgacctcatgtacatctccaccacagtgcccaagatggcagtcagcttcctctcacagagtaagaccattagatttttgggctgtgagattcaaacgtatgtgttcttggcccttggtggaactgaagcccttctccttggttttatgtcttatgatcgctatgtagctatctgtcaccctttacattatcctatgcttatgagcaagaagatctgctgcctcatggttgcatgtgcatgggccagtggttctatcaatgctttcatacatacattgtatgtgtttcagcttccattctgtaggtctcggctcattaaccactttttctgtgaagttccagctctactatcattggtgtgtcaggacacctcccagtatgagtatacagtcctcctgagtggacttattatcttgctactaccattcctagccattctggcttcctatgctcgtgtgcttattgtggtattccagatgagctcaggaaaaggacaggcaaaagctgtttccacttgttcctcccacctgattgtggcaagcctgttctatgcaaccactctctttacctacacaaggccacactccttgcgttccccttcacgggataaggcggtggcagtattttacaccattgtcacacctctactgaacccatttatctacagcctgagaaataaggaagtgacgggggcaaaatcaagactttctgttacagaaagtagaaaggagaaagaggaacaaacgtttgtgtgtaaaaagcatatatgtggtgctttttattcatcgcataaaagcctgaagctaagggctttattcagatgccttgcattttgtaccagcagcaaaagcaccgatgagatctacatggtgatccagggggccagagccatggaatactaggaaccttctacatgatggctgctcctgatgcagattattgctaagactctgagactgagtgcatacaacatgggttggtgttctctgaagcttttgggttaattccgccaggtttttcacttcccggccaactcctatgcagaactatacttcagtcagttactgaatgcttatgttttggtcatgtactacagcattgtaataacctgccagaattaagaaaacctgtgttgccagggaggatgttttatttttttatttccaaaattatttccataattttgaggatttcctcaaaattaatagcattttgtaaacaaagaatctggatctcccctaataatttaataactattccattttatagtctctcatatacattttataaaatttgtaaaacatgacatttgcctgtcaattaacatgtatacgtatgtaactaacctgtacattgtgcacatgtaccctaaaacttaaagtataataataattaaaaacaaacaaacaaaaaacatggtctctgagatcaccttcgctttcatattgtattccatggcaacaatgtaatagttttgtaatagtttttcttgttatgcatcatgaagaatcttggggaaaaacccacaacttgtgtgtatataggatttttccccccttttctttggggttacttcttagaatgcaacttggatcatagt

SEQ ID NO: 472526 - DNA, 686 bp, Homo sapiens
ttagtgttgtcagcctttctgtaagctgcccagcacataggccaaaatgaaggacatgggaaggcctaaagtgaaaatctttttggaaatgctggtattggcttattcctcaccccagacgtctctggagattttgcaggggtcgcccagagatctgctggagtttgctgggggtccgctcgagatcctgtttgcctggttatcaccagcagaggctgcagaacagcaaagattgctgcctgttcgttcctctggaagcgtcgtcccagagaagcacccaccagatgcagctggggctctcctgtatgaggtggcagcggatagttctgtcttgctggcattccaggcgccacttgtgtatggaaaaagactcctgcagctagctcagtgtctgcccaaacggccatccagttttgtgcctgaaacccagggcactggtggcataggcacctgagggaatctcctgattagacctcaaatggacacatcctgtacgtggacagcagagctatggaaaacaagagggatgcatttgtaaccctctgtttacactacaacctaacttcttcagcagctgagtccttgtcaagccaaaaggagtgatagtagaaaattatattcgtacagccaacatttaattgttgacatacagaaaatacttttttttcagttaatttcttaattat

SEQ ID NO: 472527 - DNA, 617 bp, Homo sapiens
aggaaaaccagagacccttgttcacttgtttatctgctgaccttccctccactattccacaccagcctttctacacatgtagcccttcctcttccaaagccttgatactggctactccctccccttgggatgccctccatacccatgctgtgtgacttcctcctttgtttcaggggagagcgcaagtggcagtccctagacctcatgtcaccttctccaggctcaccctgcatggcagttgatcgatttactgcctcaagatggttatgttggaggattccaatagttctactggatgtggagccagaaattgtgtggaatgcctggtgtttctttcagttcttggatgccaatctgagggagcagttgggtgagcacatgaccaatcagcctgagcatttaaggcagttggaggagagtgtgagttatggtcatcattctcctctgtgccaaacaggggctgatggatggtcagggcaaagcacagtgctgtcctcatggttctgggagggtctgcgttgtctgctatccccacataaactgatgaggacctgcactcctgtcctgagttgacacccagccttgaggtcaagaagatgacagatatttggggtaac

SEQ ID NO: 472528 - DNA, 1081 bp, Homo sapiens
tttaatcaataaaattctcctggtaaacctgtgggaacccatgaaaactatcgcctatggtggctgtttggttcacctttacaactcccatgccctgggatccactgagtgcgtcctcccggctgtgatgtcctgtgaccgctatgtggctgtctgccgtcctctccattacactgtcttaatgcatatccatctctgcatggccttggcatctatggcatggctcagtggaatagccaccaccctggtacagtccaccctcaccctgcagctgcccttctgtgggcatcgccaagtggatcatttcatctgcgaggtccctgtgctcatcaagctggcttgtgtgggcaccacgtttaacgaggctgagctttttgtggctagtatccttttccttatagtgcctgtctcattcatcctggtctcctctggctacattgcccacgcagtgttgaggattaagtcagctaccaggagacagaaagcattcgggacctgcttctcccacctgacagtggtcaccatcttttatggaaccatcatcttcatgtatctgcagccagccaagagtagatccagggaccagggcaagtttgtttctctcttctacactgtggtaacccgcatgcttaaccctcttatttataccttgaggatcaaggaggtgaaaggggcattaaagaaagttctagcaaaggctctgggagtaaatattttatgattattaaaaaaaaatttaagtgacactgtgatgaattttttttttggtaaaaagtagcatcttttaataagaggattttttatgggctcttctcacattttcttttgattaaatatttgtacgacattttgcattatgtaaaatactatggaatatatgtctacatacatacatgaaacatatgtctataaagtcgcaacttggccattacccagtagcagtataagattttagtaccaggatgatgctggcctcataaaatgaattagggaggagtctctctttttctgtggtttggaatagtttcagcaggaatggtactggctcctctttgtacctctggtagaattcagctgtgaa

SEQ ID NO: 472529 - DNA, 1510 bp, Homo sapiens
gacagtgacatgaccttcgcatctgtgctgatttaccttcaccaagcaccactgcatgagaggtgcggatccccctggagggatgggattgggcaatgagagttccctaatggatttcatccttctaggcttctcagaccaccctcgtctggaggctgttctctttgtatttgtccttttcttctacctcctgacccttgtgggaaacttcaccataatcatcatctcatatctggatccccctcttcataccccaatgtacttttttctcagcaacctctctttactggacatctgcttcactactagccttgctcctcagaccttagttaacttgcaaagaccaaagaagacgatcacttacggtggttgtgtggcgcaactctatatttctctggcactgggctccactgaatgtatcctcttggctgacatggccttggatcggtacattgctgtctgcaaacccctccactatgtagtcatcatgaacccacggctttgccaacagctggcatctatctcctggctcagtggtttggctagttccctaatccatgcaacttttaccttgcaattgcctctctgtggcaaccataggctggaccattttatttgcgaagtaccagctcttctcaagttggcttgtgtggacaccactgtcaatgaattggtgctttttgttgttagtgttctgtttgttgtcattccaccagcactcatctccatctcctatggcttcataactcaagctgtgctgaggatcaaatcagtagaggcaaggcacaaagccttcagcacctgctcctcccaccttacagtggtgattatattctatggcaccataatctacgtgtacctgcaacctagtgacagctatgcccaggaccaagggaagtttatctccctcttctacaccatggtgacccccactttaaatcctatcatctatactttaaggaacaaggatatgaaagaggctctgaggaaacttctctcgggaaaattgtgattcctatggacatgatttgcaaggaattcattataagccaggtagcttattcagcttctatttagtcaaacccatagttctaaatttcacatgaactatattactgctcacttattttctcttcataagggactttttccttttttatgtgtaactaagtaaaatgtttatatgtttatttgagagcataaactattgaaaagagagctgtggatggttgtaaattgtgatcctcaccacaaagcctctattttatgtctgatacttattcccagggattcagaaaaataaattattaagtatttaccatgtatttatctaggttaggagacttttcttcagttttaataaaatgttcagtttcctgccaaacactttacatttacatcgtaatgtccttcattatagctttatgttgaaaataagcaattcctgcatgtgctcgtagttcaaatttattggtcagtaggatattgcataagctatttttaaataacc

SEQ ID NO: 472530 - DNA, 1618 bp, Homo sapiens
gcagcgggaatacacgcaaaatatcagtcagtgagagcccaagccaattgctctaggccccgtggctggctacttatggggcactgtcctgaccagctctgctaagatgctcctggcccctccctccaccccgtccagaggacggacccccagcgccgtggagaggctggaagccgacaaagccaagtatgtcaagacgcaccaggtgatagctaggcgacaggagccagccctgcgtgggagtcctgggccgctcacgccgcacccctgcaacgagctggggccccctgcatcgcccaggacgcccaggccggtccgccggggaagcggcaggcggctgccgaggcctgattccctcatcttctaccgccagaagcgggactgcaaggcttcggtgaacaaagagaacgccaagggccagggtctggtgcggcgcctctttctgggtgccccgcgggacgctgccccgagcagcccggcctccacagagcgacctgcggcttcagggggttgggctgcgccccaggatgccccggaagcggcgggaaagcgggcgctgtgtcccacgtgctcgctgcccctgtcggagaaggagcgcttcttcaactactgcggcctggagcgcgcgctggtggaggtgctgggcgcagagcgcttctccccgcagagctggggagccgacgccagcccgcaggccggaacttcgccgccgcccggctccggggacgccagcgactggacatccagcgacaggggcgtggacagcccgggcggcgcgggcggcggcggcggctcggaggcagcgggctcggcgcgggaccggcgccccccggtgtcggtggtggagcgcaacgcgcgcgtcatccagtggctgtacggctgccagcgcgcccgcggaccgccgcgcgagtccgaggtgtgaccgccgcggctccggactggccccgggactggccccgggcacggaaaaggacacccctcttctggcgcgctgggtgcctttgcgtaagcccttccttctggaactcagtttcgcgtctgaaccttggggaggtggaacaagttgctgccgaaggcccttccctgctcccgcggcgaagggggagggagaggcctcttggtccctgtggagacccggtctggggagtcacgattggggtgggagatgagcaaacctgctgaataaagttaaaacgttatttaaatggggagctgaggaaggagcaaacgggttttcgcggttaaacccgtgggttttggaatgtgtgttcccggctgtgtgatcctgggcaagaacttgacctccctggacgcagcggcacccctcggttattaaggagggaggagtaggggatagaagtatttcaaaatagttgtaatgcgcatggcaaagtgcccagcatatagaaagtgctcaataaacgataactgctgtgacttctaccgaatgagtactaacactgttgtgatctccactggcctccaggtcgatccaaactagagctgggagctgggaataatgcgctttgggagcccgaggaggcgtctgctccagaaatctgggctccaccagatcctaaaaggccccattcccggagttttgctgccccagttgtgg

SEQ ID NO: 472531 - DNA, 847 bp, Homo sapiens
agggcgcttataattttgaactatgaccaatcagacacagatgatggaattcttgcttgtgagatttactgagaattgggtgctcctgaggctgcatgctttgctcttctcactgatctacctcacggctgtgctgatgaatttagtcatcattctcctcatgattctggaccatcgtctccacatggcaatgtactttttcctccgacatttgtccttcttagacctgtgtctcatttctgccacagtccccaaatccatcctcaactctgtcgcctccactgactccatctccttcctggggtgtgtgttgcagctcttcttggtggtactgctggctggatcagagattggcatccttactgccatgtcctatgaccgctatgctgccatctgctgccccctacactgtgaggctgtcatgagcagagggctctgtgtccagttgatggctctgtcctggctcaacagaggggccttgggactcttgtacacagctggaacattctctctgaatttttatggctctgatgagctacatcagttcttctgcgatgtccctgccctactaaagctcacttgttctaaagaacatgccatcattagtgtcagtgtggccattgggtaaaaattatgtcacgtgggtttagcacagaaataataaaagacttactgaataggataggaaggacagcttgacattccttacatcacccctacatcaagcccaggcagcacagtgtggagggagataccctctgtatgaaggaaggaaagtgaagtgaacatccaactttgcaatcagtaccagcaccaggcccttgaataaactctagtgccaggtcag

SEQ ID NO: 472532 - DNA, 1347 bp, Homo sapiens
ttctgattgctagtttgcctctgctgttcattatggtagctatgcccaccttgcctttgatagttgactgcaccacttggcccctgccacctcgggatccaactattccgactgaatttacattttgtagtagagtggctgtggttcccactgttagagctgacatacagagaagagcaagtacaaggctcttcaaagatgcaggtgctgccctcacaaatctattttgcaaagcattggtcagggacaaatatggaaaggctgatggcagtgtggattggggaggagatgttgccactactggggatgggaaagctgtctcttctggcaaagaagattcatcagagtttgcaagctcagggtcctcagctttatcagggtcctcccacacatccccattccaagttgcaggatcccaatatgttccagtcaatgccctcactttaacagtagacacctggcctttggcatttgctattggctgcccactggatgctccggcgattttggtgatggtcggcccccagaaactctggggtttctggcatttggagtggggaccctcggtggctgatacttggggtactccaggttttcagcatctggtattggctgccccctgcttcctccagggcaccaggaagccacgcctaagggatcccctcctagctgctcccactagaaggcctatgccctccctggagcctcctcaggtccccagttctgaggggggtcccgccagtcctctaatgaaaaattccatcccaaggtcatcagacacccctcctctttatccagctaacccaagcatataccctctgatgactgagaaagtaagtccaaccagtaccaccaggagtgggaccccatatcagcccctaaagtcaaagctgtctccattgcaggagtgtccattagaacacatagagaccaaggatattgaaggtgatgacaatgaagccacctcagaagatcaagttcttccgtaccaactgatgttatcagtcactaagaggcacatccaacgaaaaggtctttgtcttagatgagtgcaataattctacactagcacatgttcagataaaattactacagtgtagtcatatattttataagtggtcagctctaagaaaagtgggaaaagaatgaactttcaaaagtagtcatggagtttgtagagttacctaaattgattaacaagattatttttaagaaacatctttaagttttcagttttgtctaattattaaaactcttcttgtcctatttacataaatcattttcccatatttttcttgcttctattttttattattatgtatgcatttttgggaattatagaaactt

SEQ ID NO: 472533 - DNA, 1119 bp, Homo sapiens
ccgactctgcggcccagcccgaaatgctgccgccaaggagcaacggcaccgcgtacccggggcagttagcgctgtaccagcagctggcgcaggggaatgccgtggggggctcggcgggggcaccgccactggggcccgtgcaggtggtcaccgcctgcctgctgaccctactcatcatctggaccttgctgggcaacgtgctggtgtccgcagccatcgtgcggagccgccacctgcgcgccaagatgaccaacgtcttcatcgtgtctctacctgtgtcagacctcttcgtggcgctgctggtcatgtcctggaaggcagtcgccgaggtggccggttactggccctttgaagcgttctgcgacgtctgggtggccttcgacatcatgtgctccaccgcctccatcctgaacctgtgcgtcagcaggtcatcagccctgaatcgaacctacgccatctcttcctcgctcatcagcttctacatccccatggccatcatgatcgtgacctacacgcgcatctaccgcatcgcccaggtgcagatccgcaggatttcctccctggagagggccgcagagcacgtgcagagctgccggagcagcgcaggctgcgcgcccgacaccagcctgcggttttccatcaagaaggagaccgaggttctcaagaccctgtcggtgatcatgggggtcttcgttcactatgccttcaacgccgacttccggaaggtgtttgcccagctgctggggtgcagccacgtctgctcccgcacgccggtggagacggtgaacatcagcaatgagctcatctcctacaaccaagacacggtcttccacaaggaaatcgcagctgcctacatccacatgatgcccaacgccgttccccccggggaccgggaggtggacaacgatgaggagaaggagagtcctttcgatcgcatgtcccagatctatcagacatccccagatggtgaccctgttgcagaacagatgcgatcagttcattgaaaagttcatgtagaataatatcttgaatctttctccatctgaaatctgtagcatgttttagaatcacatggcttttgagaaatcctgttttctgaagggctttgaaatgtgtgaa

SEQ ID NO: 472534 - DNA, 646 bp, Homo sapiens
tctggctttttcagcagaaagaaagaattcactgttcggctggaaacagagaagcggctgcacatggtgggcgagccggtggagttcagatgcatcccggaggctcagaatgttcccgaccgttactttgctgtctcctgggccttcaacagctcgctcatcgccaccatgggccctaacgctgtgcctgtcctcaacagcgaatttgctcaccgggaagccaggggacagcttaacgtggccaaagagagcgacagtgtctttgtgctgaagatctaccacctccgccaggaagatagcgggaaatacaactgccgggtgactgagcgagagaaaaccgtgacgggggaattcattgataaggagagcaagcatcccaagaacatccccatcatagtcctccccctcgctcagcttggagggaaacgaggaatcccagaaagctgtttgctcttgtgtgggaatcaagtcccagaagaagtgggtagatagatgcctgccttgaaatctcacttaaggagagctggtcttttatgggaggattttaaatcataaagtgcattattaaggatttgccatctgggtttttcaggtataaaggctggcatttccctaaatggcttttccctgttgaaattgtgtttct

SEQ ID NO: 472535 - DNA, 800 bp, Homo sapiens
tcacaccgaggagagaaactgcccaagccccagaggtcctttgccctactctgaatccagtccttatgtctaccccctacctttctctgccctgctctgtcccctgggaggagaacctagataaactgcatccttccttggcttcattgccttctggcttccagttgcgttcagccaatagtgagctctagcagggcactgtgatggtaactcttcctgctgttgctggcagaatgttttcattgtctcttgttggtgtcacttactctgtccacacctttgtggacacattaaatgccactcatcgatcccatttgaatgagagagagagacagagagtcctggtggacctgcgaaagtctcatattcttgatgagagacacatagaggaaaaaggtgtggaccgtaagaccagagatgtgtgggaagggaaggaactcagtgaatgcttgtgtggaccactggcgctagtgacatgggagtggctaatgcatcctcttgccgttcccggtgtttgggccctgcctgtgacggtgggaaaagaaaatggccttgctgtgctacaactggggctgcgctgggtgcaagaagctgatgagacttcgaagttgttgcacaggagagaggataagcatttgctgtgacaggccatgtatgcatggatattggacagccaaaatattaaactgaggaaaacacagtagtctgctatgtatccattcccttcacttttcttactaccagtcccctaatttttatggagttatcacacgctcagttagaaaatacgtacgttttaa

SEQ ID NO: 472536 - DNA, 814 bp, Homo sapiens
agataactctcacagtggaggtcaatatggaggctacccactccacattaccttcttttcaaggtcctgtttcccttgcctccataactgttgtgggtattgacggccaggcttctaaacctcttaaaactccccaactctggtgccaacttagaaaacattcttttatgcactcttttttagttatccccacctgcccagttcccttattaggccaagacattttaactaaattatctgcttccctgactattcctggactacagctgcatctcattgccgcccttctccccaacccgaagcctcctttgcatcttcctctcgtatcccccaaccttaacccacaagtatgggacatctctactccctccctggcaaccgatcacatgcccattaccatcccattaaaacctaatcacccttaccccactcaatgccaatatcccatcccacagcatgctttaaaaggattaaaacctgttatcactttcctgttacagcatggccttttgaagcctatatactcttcttaccattcccccattttacctgtcctgaaaccagacaaggcttacaggttagttcagaatctgcgccttatcaaccaaattgttttgcctatccaccccttggtgccaaacccatatactctcctatcctcaatacctgcctctacaacccattattctgttctggttctcaaacatgctttctttactattcctttgcacccttcatcccagcctctctttgctttcacttacactgaccctggcacccattaggctcagcaaattacctgggttgtactgcc

SEQ ID NO: 472537 - DNA, 663 bp, Homo sapiens
tttcaaaccatatgctgtcagtactagggtggactgcgacagtggtccagtcagaagcagcactttggctagacccatctgtgtatcatgcttcatcaggaatgtggggacacccttccttaaatggtgaaggctcagggtctagaggtgcctcaggcaccatggccttatcttgcattaggactacagttcccaagatctcttgcaactctgctgctaagggacttatatccagcgtattccgctgctctaacgcagtcaaaaatgcccatccaactctggcagcaaaggcttattccttcttggtgctctctgcttccagctgctccagagctttctccatgctgacaggggacccatctactgccaccccggtttccaccggagcccatccaagcagcagagctgccaccagaggtgccttctgccatgattgtaagtttcctgaggcctcctcagcaacatggaactgtaagaaaattgaggcccaacaggactagttaccctatatgcctgaacataaaacaacccagaatacaatgtgatccttcgatatccatatgggaagacatatacaataaaaatgacgacaagagcctgacttgaaaatatatactaataaaaaaataaattttaaaagttaaatatgtatgcatttgattt

SEQ ID NO: 472538 - DNA, 1201 bp, Homo sapiens
tttttctcatatgatatgctagtgttctctgtggatatttttattaacgcacatcctcctcacaccttccacagtctcctcacagccagcagctgcccgctttgctctgcatctgcatggcttcagcatcccacagccgggagagatgagctccagtccagacccccctcaccagaggagtgcggataccactgatcagatggaaggctttgatttggaaggcagctgtgtgacaagcaggctgaacatgggcactccttttgctaatcttcttgtggctgcctgtgtccctctgcttgtgacttctgtctccatcttcaaagcgtaccgttccgatctttgcttcccccattcacctttgatttactactacacccactacagggacaggcagaatgaaaagatccagacttcccgtgttagaagcagacctgacagtgcttctaactgtgcctttgcagagacaatcctagtaatactaaaaggctcaagaagaccagacgtccacagcctccgagggccactcaccacattagatatctgcacaaagccagaagttatccccacgctacctgtgaccaagtcttacacgtggctctcagcccccttggctgctcttcttcacttggcatctgaatagcagtggccaatgaatgaagggtcttgtataccatgctaaggacctctcagttctgcatgaatacttgtgactcataggtttgtatgctttgcataacctcatatttcttgaaggttttttttattgtttaaaattctttttcatttttgtttgactgggttaatttgagagacctgttttcaagctccgaagttttttattctgcttgatctggtcttttgttaaactttcaactatatcttgtaattccttcaataaatttttcacttttagaagttctgttattaaaaaatatgtatctctttagtaaatttttattcatatcctgaattgtttttctggtttctttgtgttggtttccaacttttttttggatctcattgagcatccttataattcatattttaaattctgtatttggcatttcagaatattcatttgattaggatccattgctatagagctagtgtgatctgtaggggttgttgtaacaccctgtgttttcatattgccagaattcttacactggttctttctcatttgtggaatctttcatttctt

SEQ ID NO: 472539 - DNA, 634 bp, Homo sapiens
gcgctgtgctgcagctacccagtactcagaagcccgtgggctccaccacggcagtgtgatgaaacgatgggacattgagtgccagacttacttctttttcttcctcatcaaggagaagcctcaggattgtgaaccttctcttcattctggcccagaagaagacagaaaaatgtgggaaagtttggaacttcccagagacttggagggctcagaagacaggaaggtgtgggaaaatttggaacttcctagagacctgttgaatggctttgaccaaaatgctgatagtgatatggacaataaagtccaagctgaggtggtctcagatgaagatgaggaacttgttgggaactggagtaaaggtcactcttgctatgcaaagagactggcagcattttgccccggccccagagaggatgcagagcataaaagtttggaaaatttgcaacctgatgatgtgatagaaaagaaaaccccattctctggagagaaagtcaagcttgctgaagaaatttgcataagtaacaaggaaccaaatgttattcaccaagacaatggagaaaatgtttccagggcatgtcagagaccttcatgacggcccctcccatcacaggactggaggcctaggagggaaaaa

SEQ ID NO: 472540 - DNA, 619 bp, Homo sapiens
ttttggaccaaaccagtgttctctcatgtggttacaatcaagccataggacagggctgctgtcatctgaaggcttgcctggagatggagattctacttccaagatggctcacttctacggctgtaggcagtgggtctcagttcctcgacacctattgacaaagaccctggcttatcatcatgaatttcaagaaatttgtggacacattttaaatggccatagccttgctaaaccaagtttcagcctgaatggttacttccttgggaggtgtaaccctgcctactggtggctggctggaattccaagccagtgggtcttatcctgtgaggtgccatggaagtggggtctgcagactgtcgctgctcagccccccggattcagcatctttcctagggaaccttatttttggcttttagtttttgactcttatattgcataacaaattttaagggctaatgagtgcctgcccacgtccatttccatatggtctaaaaaagtttaattggctatcagtcttttggctctaagtcccgtggccaaaggaaatcccaaagaaacctgaaaaactaactcaaaccatgacaggaaatagggggtcagacatgcttcgccatgctta

SEQ ID NO: 472541 - DNA, 703 bp, Homo sapiens
gtgcctgtgtcccggagacagccagactcaacggagaagatgagttcaactcccacatctccactatcccttgcttccagccaaagtcccaggactgactttcactggacccgtttgggccacatgcccctgcctgagccaatcaccacatccagcctggccagacctggctttcacgaagccccttcaggaagcggttggggtcatcccctccagaaggacatggggaaaaccagaaagtggcaggagggatgcttccttctgaaaaatagggatgcaattaccacaagaggtatcaggtacagggctggcacaaacaagagctatccacggcaccatcatgtaggcgtgcagcaggtccaccatgaagcaacctggctgctccgcaaaacggagtcacagttaattcagtcaatgagaaatatccctctatttgggttcccaccattcaccccaggcctggcacatcccaaatttgcttggtcaaaggcaagcaaattacccgccttttatgctgcacaaaaagctgaaaatattatcttacttctctggctcaagaactttctatgactccctctggctacttatgtggctcccccacccttaatgatagaagccaacattcatgaatccctaaccacatgccagttaccttatggacctgcctcttccaaacagcatagaagaggttggtactcttacc

SEQ ID NO: 472542 - DNA, 522 bp, Homo sapiens
ataacccgtaatagttaaaaacatgacgacacaaaattctgaaggaaaagaagaatggaatatggaagacaagaaaggaagaagcagtgagggaagaagaaaaccaacacagctacttatgtttttaattccctcacattatgaagacatgaagagaaagtttcaagatcttctgtctgaggaaaatgaatccacagctctatctcaggttctagcccagggccccttggaaagttccagggaaaggagcatagcgaggttgggggtggagtttgtagagactggctggctggctgctgacatcttcatgagaacagcaggtaccttggtgcataataacaggccaggttatattctcatccttgccctcataaagatacaggtctacagtctttgaaacctttgggctagataagttgtgaaatttaattacccaattttaggaaggtgagggactcagcagtcaggggagatggcaatgtgatgatgattgagtgtcttagtcttttttgtattgctatg

SEQ ID NO: 472543 - DNA, 706 bp, Homo sapiens
cagcagcatgaagaaaccaggccacgggcagcccagttcccactgttttgggtggccccattactatggcttttctgggcccactatcaccaaacgggcccatatattgcacaaactatcagtctttcctcagaacactctatagaatggggccaatgcctggtaagacacacaccagctgtcagtggtgggctgtctgcatgcacactggcctgctagcatgtgggagccctaccactctaacgagcctcttgtccaggagggccattagtgcctcagatctactcagtacagacccaaggtccttcccacccctgcaagtcacctttcacggctatagttcaaatggtaatgggccttgcccaaaactcaaccacttttgtaaagctaacgaaaggccattaggctatggggaggagaggagcctgagttctgctaaggcacaggcacaagtgacagtcagccattattccagaggttataagatatgcaactcctccaattacttctcatagcaatgtttatgtcaaaattcaaactgcaccaattttaacattaatgatcagaatattctacaagacccgttgttatttaaatgattatttaaaatattttatttgtaagattgagtatttgtccatgtacttggacacattctctctcatgcttgttttattttcaaagccatttgactatcagatctttg

SEQ ID NO: 472544 - DNA, 841 bp, Homo sapiens
agccattacttctcgtgttgacatgagccgtctaaatagacaaatgtgttccaggtcgagttatacacatatggaggctggacaagatgaggaccctatcacagactctgtattcatccctgtggctatatttctggagaagccagatgaatgcaagaactattttatattgatccctgacatttttaaacaaaactgtataaatagaaagtatgcactgacaaacaatgtcaatatcaggtgcacttgtggaagaaataaggacattaaaggtgatactgatgagggttctgaaagaaaagaggaagacagtagtgcaagctattattgttttagagaacatatatatcgttaccataatgttagtagaaatatgaacactaaaggtgctctggtagggtctcagctgaaaatgaggaacatgttatcagagactgaaagaaaaactgttcatgctatgaagtggcaaatacttggctgaattgtgttctagtgatctgtggaaggttcctgatgtcagtgccataaactggttcaggaaattgttataatataggcaaaacttcatactaatgaagaaattattattttcccaaaactgtggtctctaaaaacttgttttatgaacctgggtgctgctgtattgagtgcatatatatttaggttacttagttcttcttgttgagttgatctctttaccattatgtattacccttcccaaagttctttttactatataacattgactgccaatattctaagtcctaagattctaattagtaggtatttcccttcctttcaggtacagaggaaacaattctttagccaaatgtgctattgg

SEQ ID NO: 472545 - DNA, 481 bp, Homo sapiens
tctcatcagcccagtaagcgccaagtaccaagcaacagcagtctgatactgagaaatgacaaaaggtctcggtacagcctctggagtaccccttgagcattctatcagctacctggggataaccatgtctctgcttaccacagctaacactttaatgaacaattcaccaccaaggggcctgaaggtaggtccaggttcaccaagcttctcccccatagtacctaagcatactgtccagagacatgaagcccagtccaatccaccagtggcacctgaattctcctggggtctgagatcaggaccactcaatctgctgctaccaccactactggcaacaacctgcataaactactttaggtctgggcaccagcctgtccaacctgttgcaaccactacacatactcacatgcaccgctttggtcctaggcattgtcccaccactgctactgtcatcacccatgccacattcaattcttaagtg

SEQ ID NO: 472546 - DNA, 1140 bp, Homo sapiens
agcccctcgtccttctgttacttagcacctgtcatggggccaagaatccgagactgggctggtgaccgggctgtgaccacaggcccctcctctccggctggggcccatgtcttcaggttcatgcaggtccagacgggtcaaacaaacacagctcgcccacgcagggaagagggaaatccagactcagacacagagaggaggaggaggaggctgagacgacaaagcagacagtggggtgatgcggccacaagccaaggatgcttggagccaccggtagtggaagacgcaggaagggtgctcctgcagaaccttcagaggcagcgcggccctgcccgcacctccatctgggacgtgggactccagactgcgagggagtggacacccgttgttgaagccctgtgtgggcacccctatcacggcagccctgggattcctcaactgtgccctgtcacctctcaccctgctgctggagaggctcggtttgctcctggaagtcgtgactgtgaaatgtggatgttttgctgtgacgtccattgctactctcatgctggggtcctgctctctctgtccgggttccgtcaccgctgagctggacatcaaggccgaggatcttctcagtgggcagaagtgtgtctctacaaatagtgccaggtccttttcattatcctccctggtccctcccctcccctcccctgccccttcccctccctccctccttctctccctccctccttccatgtctggagaggaccccggcttggagcaggcatgctctgctctgttgtgaggcagatctcgggcctcctcactcaccgtcccactcgccaggagtctggagggcatgcttgggggctctcagttggggtctctcattgggtgccctcgggggctgctgccattgaaagcactctggggtgggaggccggcagtgtttgctaggggtgggagctcagctgggctgccagaaggtgtccccacatgggaacccctggatggggggctcagatggtggctgtcccctgcagagagatggcccaggagagtgacgtgggctgcctgctgctctgcaccggcctggacatggcaaatcactgtgctgtgtccactttccagtgtggggccttgagcactgccaagagg

SEQ ID NO: 472547 - DNA, 671 bp, Homo sapiens
ccttgggagaaaccagtgctgtgttggcttcaagtctgagccagtgaagttccagtggtgatggccatgggcatgattgtgtcacccatcccccagttccaggctgctcagcacatggagagagactgtttgggggaaaataagggaagagaacaagagtctctgcctcacttcaaaagaattcaaaagagctgttttgaggaagaaacatcagacttaatctgcactgtagaccaaatggatctaatagatatttacagaacatttcatccagtagctgcagaatacacatttttctccacagcacatggttcatcatcaaggatataccatattttaagttacaaaacaagtctcaaaacattcaaaaaaattgaaataagcatcttctctgaccacaatggaataaaactacaaatcaatagcaagaagagatttggaaactatatcaacacagtgaaattaaacaatgtgcttctgaatgaccaatgggtctatgaagaaattaaggaaattaaaatacttcgtgcagcaagtgaaaatggaaacacaatatacccaaacctgtggaatacggtgaaagcagtaataaaaaaattttagcagtaagtgcctacatcaaaaaatagaataacttaagcaaagaaactaataatgcatcataaagaatt

SEQ ID NO: 472548 - DNA, 839 bp, Homo sapiens
agtaggggatgggaggtctcacactgacctcaagtttatgtgactttttccacctctgctttcccagacagcccctgctgtgggacttgcacagcagctgtgctgtgttatgggaaactcctcctggaccctggtgccagcaggctagagtggccaactcaaaccacagatatagtggctgcccttccctccaggaactcggtccatctctggctgtctccagcctgctgcctctggccagctggaattccaagccaatgggttttgatgcaaaactcctgggtttccacgcatgccccagtgagccagcgagcattccgccgagactccacacagctctgtgcttcagacccaaggccatggtggctgagctcaccgggggacctcccaatctgcaggttgcaaagatccgtggggaaagcatggtttcccaggcagtcacgcaatcactcaccgcctcccttggctgcgagtgggggctccctagctccgtgccacacctggatgggccatcaccccacttgcttttcctcactccctgtgggcctagtgggcctagtcagtcccaatgcaagaacctggatacctcaactcaaggtgcagaagtcacttgtagttttcattgctctccatgagagccatgggccacagctgcttctaatcggccagcttggccccatctaaagtatgatttcttaatacatgagatgttttaagtacatgacaataatgatatttatcacaaataatattttatctcaatttcatataaaaattgctaacaaatcaattatttttggttaccacaaagctatctggaaatgtaacatctgccattt

SEQ ID NO: 472549 - DNA, 474 bp, Homo sapiens
tggcctctctcctcagcggcacaatggactttagacatcgcgcctgttttgtactctccaagccggacttctctactcgctggcctggcgctgatgcccagaggccccctgtgcttgtggtcgtggccttagacagttccctgccctttactgagcatcataacttcactgaatgctaccagttggattcaaaagtcagcaaactgaaacgtcgaatttcagccagctatcagaaatattgtaatctgacaacaaaagataaacaagggaacatggaagtggcagctattccagaagctgcacctctcagcatgggcacagaaccacagaagtggagccagagtcctctccacatctcctctgggtcggcgttatcattgtcacaatgggtggaggctggaccttgtgaaggcaaaggcatacggtgctttcttgcttctgctgtttggtgactcccttactcattccctctgc

SEQ ID NO: 472550 - DNA, 608 bp, Homo sapiens
ggaagatactatgggactaattccccacggcttaagaagtgaagtgcatctcagtgtccacaaatgcattgttggaggtgggacctggtgggaggtgatcagattacgggggcggatccctcatgaatggtttagcaccatccccttggtgaaacagagaggtcccatgatagacagtctgcaagctggaaatccaggaatgctgactcagtccaagtctgaaagtctcaggatcaaggaagctgatgatgtattaataactctcaatccaatgcagcccctactcaactggacaatgcccgcccacagtgagggtggttcttcactcagtccacagactctcacaccaatctcctctggaaacaccctcacagacacatctggaagtaatgcctcaccagctctccagagctctctagagaaaagaccatttgagaatatggcaagaaagtggctatctgcaagccaaggggaaaggccttaccagaaaccgatactgctagcaccttgatcttggacttttagcctccagactgtgataaaataaacatctgtagttttagccatccagtctgttcatactctgctatttactaacagtgtggcct

SEQ ID NO: 472551 - DNA, 651 bp, Homo sapiens
ttgcaaggtttgaaagaactgcttcaaacggaaagacaaagttcctgccaaagattaggataccatttttgatggtggccatagttaagcctccagaacctatacctttaaaatggttaacagataagccaatttggatagaatcatggctgctaagcaaagagaaactggatgctttagagaaattagttactgaacaattagaaaatgggcacatagctccaacattttccccttggaattctccagttttcataattaagaaaaaatcagctgagctagactgtgaaccgtttgcatttacaattcctgcagtaaacaacctgcagcctgctaagcgttttcattgtttcacagatgggtctagtaatggtaaagcttcttattctggatcaaaagcctgcccaaaggccagatgttaccagcagctgaacagcatctacagaaaccagctgcaaagacagaagcagaacaactggtttggtggagagatccaataacaaaaagttgggaaatagaattcagaagccattcgtgagcattcctaaattatggcaatataattatttgcataatttcaataagaatctgtttttggtaacaggattcaattggagacactgtttgttttatcaaggctttaactcgaac

SEQ ID NO: 472552 - DNA, 478 bp, Homo sapiens
gtaacaccgctactcttcccaacctctggaaactctcactaggacttccagtactatgttgagtaacagtgttggaagtggacattcttgccttgttccagatcttagaagaaaggctttcaggttatctctgttcaggatgatactggctgttggcaagagtcacactgaggaagggcaggttcttggcatcgctcaggaaggaatccaaaagcaagcctgtggtggaagaaagcagctctacaggggcactggcggtgttacagccctgcttctgctcctgcaggacagggagccctccaaatgggcagtaacttccagctgtttccatggcaagggttggggacttcccgtgctgccatggcattggcaaactgtcatggcactggtgggagcatcttctggtgatctgaggcctgaggtgctttcgctgtctctcccagtttcatgcgtgcctcttacctgaaagcccttcaca

SEQ ID NO: 472553 - DNA, 1347 bp, Homo sapiens
tttatcaccataagtgccaccctgacttaaaaccactcagagctaaaaaatcaaggcaaaatggatgctgcggtgacagatgattttcaacaaattctgcctattgaacagctgcgctctactcatgctagcaatgactacgtggaacggcctccagccccctgtaaacaggccctctccagcccttcccttattgtgcaaacccacaagtctgattggtctctggctaccatgcctacttctctcccccgcagtctcagccagtgccatcaactgcagcccttgcctcagcatctgagccaatctagcattgccagctcaatgtcccatagcaccactgcctctgatcaaaggctcttggccagcattacaccctcaccttcaggccaatccatcatccgaacccaacctggagcaggggtccacccaaaggctgatggtgctctgaagggagaagctgagcaatctgcagggcaccctagtgagcacctcttcatctgtgaggaatgtgggcgctgcaagtgcgtcccctgcacagcagctcgccctctcccctcctgctggctgtgcaaccagcgctgcctttgctctgctgagagcctcctcgattatggcacttgtctctgctgtgtcaagggcctcttctaccactgctccactgatgatgaagacaactgtgctgatgagccctgctcttgtgggcctagttcttgctttgtccgctgggcagccatgagcctcatctccctcttcctaccctgcctgtgctgctacctgcctacccgtggatgcctccatctgtgccaacagggctatgatagcctccggcgaccaggctgccgctgcaagaggcacaccaacactgtgtgcagaaagatctcttctggtagtgcacccttccccaaggcccaggaaaagtctgtatgaccttccaacaaggtggatccagagcttttctccttcgagtccccaacagcaaagcataggcctcatctttggagagggggaggagtgataaactagccaaagttagggcctctcttttgttcctgcagtgtcagggggaatgaccaagtacatcctggtgcaggatgccttgttctttctcacagtatctatcccactcctcttcagtctttacaccctgccagctcagcctttatggttgtcatggcaaattcaggtgatatatgggtatgaggtttgaacactgaggactgacagggccagcaacgtggaggtttaggggctccccaatgtaatacctctcgatgcaggctctgatcgtcactctgttttctgctgtgcctttggaagctttcttctaagatggttttcacagactga

SEQ ID NO: 472554 - DNA, 801 bp, Homo sapiens
tgaatgagtgtggattggcgagtgtgaatgagtgtggattgggaagggggaggtgagcccgggatggaaggaaacgcgggggggcagcagcactacagagggtgccagtggtggccaagagcaccgggaggctggggcagggccaggcttggcactgagcgggctccacttcacctgggagagtttcggccctgggagccctgccccactcacagctgggaaaacagacccaggaatgatgcctgtgaccccagctggggccccacaagacgcttcctgccacctgtcctggtccccagccctggacccaggagcccggctgctgcccccctgtggtggtctggggaagcgcacttccacccgctacagcctccagacccctccgtgcactcagggacccacagccaaggcctactgacctcgctggctggcacgtccagggcccaactcccaggacaatgtgtgacccacaagttcgtcctgttctagagaaactgctgggaatagcgctcaagtcctccccaaggtctgatgggcaaggaactcaagcttgagtctcagacacatttctgtgacaaaagacaagaggcccccacgtctctggtgagaggcagcccagccttcagccttcacacacggtgggggagaggctgcggctccagagcctccactcaaccgcctggggcggacgcaaaggcccctctcctgtcgctgagctgttgggggcagcagcttcccagtgcccacccatgccctgctacccaagtccaagggcccctgcacatccctgctcttaggaat

SEQ ID NO: 472555 - DNA, 1283 bp, Homo sapiens
tgttagaagaaactggcctagggcaccacaggagcagttatgcaaatcgcctccaggtgtggctctcattaccttttggcggctggggctgcagaacgccctgatgccacactgggccggattttggaggagcggggaggaacaaacagcctgcgcccttctcttcccccaactacagcttcagtggaaaagaaaaacatctctctggaagagcccccaaaacctcatcacatctggttcccatcggccccgtttggttctaatcatcctgcttcctgctaccgtctctgggtgcccccaacccctgccaagttgtgggaacagcccccaccccttccctcagccttcagcaaatcctgctcagtggggtccctgacagcttcattcagacatggaagactggtgctcaggagcccgcgggtggctgtggtcctggacagcgcagctctagattgaaaggctgtgtcaggggtgggttccaagtgtccccctgcagtcctggggatgcttggggtctatccaggctccagagggtcctgggctcaccatgaatgtgatggatcatctcgctgcccccggatgtttccccagacctttcctctggctgttcccgcagcttgggggcctgtgctttcatagtgcccacacacagcctgccaggtcccacccagacctccaggaaccctgctgtcccctaggcctggttcccctcacctcttggagtgggccttcccgtgcatcaggcactgtgttgggctacctgctccccacctccacctcccaccaaccctccctgggaggtccttggtaaccaggagtaaaccagaggctctgtctgtcctgagagcacagaagcaagacaaagtagtatttacctggaaggcgtttctcttcaaagccacttccagaggccccagggcctcagggacagagctgggatagggtagggtggtggcagcttgggaccggctgggagtgcatctctctctccagggcaggacactgccttcagccctcgcaggtgctgctgtcaggaccaggtgacacgtgatggacagcatttgtcccgaattataactaatcattaccaggttgcacgcactatgcgcaaagctctgccccacctgagtcgggtgtgttaactcccttcatcctcacagaaacccaagagggagctgcttccatggtaatgataattattatcatccccatttcacagatgagaaaactgaggcataaataggttaagtaactctcccaaggtcatacaaccaggaagcagc

SEQ ID NO: 472556 - DNA, 776 bp, Homo sapiens
ttctgccacgagagctcatgtgtaagctgagattggtcataaagaaagaaacatggctttagcacaatgtttgactcagataatagtaccaatactgataagaattgcagatgtgcagatcaaaaagcgcctcagcttgatgtatagtattacaaaaggctatatcaaaagtcaagaagatgccaaacttctaataaaacaaatagctgtctgtgaatcaatatatcagaaactatgtgaaattttggaaaccaacaaacaggatgctgtcaaagaattagtactcatggagcatgagggtcgtgatgttgtcattgctttgaagactaaacaggcaatccggaatgtgattgctaaagctctaaaaaatctcaccttcctttgttcaagaggcattattgataagcatgaagtcattgagataaataaggtacttcttaaaaaattaaaagcactaaataactttccaaaggcaatcccacccccaactcctgacatataccttcacaacatcatttggctggaaggtaaagatgttctcattgacttcttcaagagagaataccaaccttttgatgttatgaggattaggaaaacatctacgtaaaatgcctgacacatataggtgctcaataaatggtcaccattatgacaacagtgtttttaaagaatatttatttgtttttaaaacaactccattaaaaagtgggcaaaatatatgaacagatacttttcaaaagaagacatacatgtggccaataagcatatgaaaaaaa

SEQ ID NO: 472557 - DNA, 521 bp, Homo sapiens
atgactcctttgaatttttttgagctgcatttccctgatgatcaatgacgttgggcacattttcatatacctgtttgccatcttcagcaggtgatgaatcctgccaggactgggtccttcccttcaagacagcagtttctcttctgacccagggtgtgtctagaaatgttgtccaggaactagagcctgaactgggggcctcaaaactctgcccagtgccctattctgctgtggttgagctggtatccaagatgcaggacaaagttctcttcactctcctctcctcaagcagaaggaagaaagtccagacagagaggcagagaaaagatgataagatggctactgatttcacagctgcatgggaacagcaggtaggcaccaatttaggccccactctgatgaggtgggggataggggtagcactcagggctgtgtacacagccttctgtgtgagagtgactatctgagttgcatgcagtgccttgcgttagcagactcaagtttccatgggaacatactat

SEQ ID NO: 472558 - DNA, 833 bp, Homo sapiens
gggggatagcattaggagatataactaatgtaaaggacgagttatgggtgcagcacaccaacatgacacatgtatacatatgaagggaagttcttccctcacgttcattgaaaatgacttgtacaatgatgagcttttctcaaaacagaagcagcaagctgcttcacaccaacgtatacttggcccctctcctgtcaatccatatgtagcagatgcagatagaatctgttggttggcacaagaagctctgttgcacatggctcctatttttaagcctctgttggtatccatgtgcggagaacacggcttgttactgatggactctgaatcactccacaaggaaccaaattcagaaatccatgcaagcagcctaaaaatgaagaactgcttagtgtttttggaaaatactgccccatacactttattgtgggtgtctgtcaacaaccaatcccatcccaagaccaatgacacccagatggaatttatcctctggtaatctgactattggagatctcaccagtttctttgtcaatgatgtgggagatgtttacttctaatgagacaagggacaacagagtggaacagagtgtgaaacaaggtatgctttagtcctttagaaatttagttggggacttttgttttgatgtagctcattgtatttttctcacttgaaataatgtgaaataggctgctgattcgtgttttggtgcagaacattcgatgcgcaggaatgcttaatgatgttaaatagaagttacctattcttaaaaggtaagatcaacagggaagggatgggtcaggaatgattccatagtttttagtctgggaaaatc

SEQ ID NO: 472559 - DNA, 2321 bp, Homo sapiens
cagtaagctttactgcagcccctcatggatgacttttgctagtgcagtgcagaaaggaaatgtgggatcaaagcccccattcagagtccctactggggcaccacctagtggagctttgagaagagggccaccatcctccagaccccagaatggtagatccaccaacaggttgcactgtgtacctggaaaagccgcaggcactcaatgccagcccatgaaagtagcctggagggaggctgtaccctgcaaagccacaggggtggaactgcccaagaccatgggatcccacctcttgtatcagtgtgacctggatgtctgccagtcctctattagtattgtcatgcttccctaccattctttgaaggaaactggggtgtgtctcaggcccatgattagtcaagggcctagttcagccattgctactctgttgatctggcaacacaaggaaaatggggcttcaataagataattggtgtatccctttgtctagttttttgaaaaactctatttggattgtgattaaaagttatttaaatccatggaaaatgtttaaagtcagggaaaacctgacatcttaaaatattgaattatcctgtccaggtatattgtatctcattttttaggtgttctgaagagattttcaaaattctatattttttatggatagattgtacacagttttttgctatttttatttacttatattgttactgcttataataaatattatattttttaaattatattttctaaatgtatgcttagtatatttgtgtatattaattatatatccagaaaacttattaaactcctcaacttatttctggatagatgttccatgagtccttgaaaagactgttttgggtgtttccattatttggtggagtgttctataaatatgagttaaatcaagttgtgtctacttattctatcaattattgagagaatggtaataaaatctctgactttatggatttatttatccttgcagttacatcagtttttacttcagacttcttttgaatttagcacttttatccttttattattccatttgagctcttaggtttgcttattcactcaaatgttttattgctttttataaaatgtatatagtgtacaactttacacaatttgtcttaaagtattaccacataaaaccatattttttaataagaattttaaaataatatagttgtatttcttcactttaagttttcatcctgtgatgtcagatgacacattgatgaacagtttttattttaattacattagaaataggcaatttgcacatcaaagtcatgatttcatggttattgctcaggatagagctaaggaacactaactcaatagacacctgtaaccatggtgttaacctgttccatgaaattgaatgaataaaatgctctgtgcacaatgggttttcaggtatttgaagagttcatcatgactacactgatgggacaatttcaacttaagcgctacgaaattcctgagggaagagagaatcttaaaggattctcagacattaactaaaaacttgaaaatgtatgccaacctgttggcattgtctatttttgagagaaagaaaatactgggaagcaatgtgtttgcaatatagtcccaaggtgcaggcttagttcaataatttaaatctgtgaacgaaaagcagagctctttcttggtacattaattatactttcactagactttaaaatggaggagttatgtagacttctctcctcaattcaacaattttctgagaggtcactgagagctttgtctttcctacagtatttttgagggaaaatgtgttttaataagtaaaattatttctcaagagcttgaggacttgacactgatagaccagagctgaagatgctcagctctgccagaaccttttgcattagttcatatcctcaggagttttggactgacagtgctgaagggtttgaaattgggaaatatattactcaagtttgcccattaaaatattggaggaaaaaagtaccgaagttgcagccagcgtgacgtgcagtatgtgacactggaaaaatgctgtgaatttcaggggttgtctgagcatagaatcatgtgatgtgacaagtgcaggcaatacttttttttgtgaacagctgatttaacaggaagagaaaactccatggaaaagtatcagtgcataaactcctcctttcctaaactcaatgctattaattctttgattcaaagagtcaaattttgtcagaaaaatggaatacactctgacattctctgccaaatggatagacaccaaaaaatgacattaaatgatatttatgttc

SEQ ID NO: 472560 - DNA, 795 bp, Homo sapiens
tttgcagaaaaagatatagtctctctctctgtgctgagctgcctagaactgggggaggggtaagacaagcacccctgtggccaccaccactaggactgccctgggtcagacctgaagccagcatggcactgggtcttgcccaaggcctgtggtggccactgcctagttattgcttatattcactcaaggcccaatggtctacaatcagcagttggcaaatacagccaggcatgcgtccttccagtagtctctccctgtggccaccactgcccaggcccacagcaagtccacctggctactgctggtattcacttgaggcccaagggctctacaatcagcctgtggtgaatactgcccagcatgggtttctcccttcagggcagtgggctctcctctggtccaggccaggcccagaaatgctctccaggagccaaggcttggaatcagggaccttaggatcctgcttggtgtgctacaccactgtggctgagctggtacccaagttgcaagacaaagtcccatttactcttccctctcctttcgtcaagcagaaggtgtctctccccttagtccctacagctggggaatgttctgggtcacccctgaagccagcatggctctgagtctcacccaaggtccgtgtatttgtcattgtcttttttttctatttaaagtcaccttatttaattttattgttaattttgttaacattgaactcacaaccaacagcattataattcatgtctgaatgaaacttacctaacacagtattttctctgtaagacacattaaatc

SEQ ID NO: 472561 - DNA, 685 bp, Homo sapiens
tccttaacccaataacccgtagatggcccaaatacattcaatctgtagcgacaactgctttgctaacagaagaaagtatgaggcaattctgttaaaaaaaaaaaaaaaaaaagattcaacattaaccactaaaaattcccttaacccagcaggtttcctagcaggggatctaaatcttaattactacacaaagggaggaaacttagtattccttggagacctgaagggatgcagtgagcttaagaattttcaagagcttatcaatcagtcagcccttgttcatccccgagtggatgtgtggtggtattgtggtggatctttactggacactctcccaaataactggagtggcacttgtgctttagtccaattggctatccctttcactctggcattttatcaaccagaggaaggaaaaataaaacatcgatgatgctcataaaatgagttagggaggattctattttctattgtttggaatagtttcagaaggaatggtaccagttcctctttatgtgacaagccgcatgctacagacatctgggaagagtgataagactcacagaagtcagaggggagggagaaaaaaaaatagggggtggggtggctaatccataaaaggaaagaaagttttgtcattgggaaatcaaaacttaaagtggggaaggagacaagatgtaacctt

SEQ ID NO: 472562 - DNA, 621 bp, Homo sapiens
agtgtagcatctatattgtagaccatacaacacaaccaaacgttcctaggcactttgaaaaccgatacttaaacagactcaagggatgctatcacccacctcgaataatagctgctttggaatctgttattggcaccagaaaaagaaagagtcctctgaagtcattctaaagccatttttattgtgcattttcaaacaaagaacctcaccaaaagaacttctgttacaaaatcagggtagaaagtcaaactcatctcatctaagagtcaattaccctggcaattttgtgaggcgatgggaaatgagcgttagaggagaggactgtggggaggaggtgggattggcttttaaaatcccctggaaagaagaggcaaaatgttggaaagctttgctcccagatgtccatcagttgattacggttattggtatagttaaaattttcagtgttacacctcttttagaatttatctatcaggttttccagtaataaaaagctccttaataggttatgagtttcctactagattatgtatctcagcacctagaactgtgcctggtttatagtagatgtttagtaaatgtctgtggaataaatcctgtagaatttatctagcattttaa

SEQ ID NO: 472563 - DNA, 672 bp, Homo sapiens
cccagaaacctggcatgctgacaacaggcacctgtgaggttacttgcctcagtctctccttctggcttatgcccctcagtcaaattctttcttccgaggaggcaataattgaggttgctgcagatccatatggattcgtggctggagagtgggtgctccagatgcctcgagatctgctgggatgtggagcagagagggttcccttgctcaaagatctccacacaggacagggtagttcaaaaagctgcctagtggctgcaggggggcttaggcggaagccctgttgctctacgaggggcccttcagaagtcgctgggggcagtaggctcctagtcgtgcttgagagctatggtggcttccgtcgcgtccagggttttatccgtactcatcttgagccggcatctggatgtcatggaagagagcgcagctgccgtgttggctttgcattttcaggaaacgctctgtgccctggcgcttctcctcagccaattcgccaaagtgacccatgccttccagagacacattatcacggtgggaatagaagcccagacagaggcagatgtaggaggcccgcaggtgcaaattgaccaggcggttgatggtagcctcaccctccgtggaataattttgatgaatctgggagctcatggttggttggcaagaaggagctaa

SEQ ID NO: 472564 - DNA, 734 bp, Homo sapiens
gtctttaccagcattccataaaaatggaatcagacaatgttcagatgtgtccagaatttctcccttctggtgggttcgtggtctctctcacttcaggagtgaagctgcagacattcacagcagtggatgggacctggtgctacagagcagggggggtgttgctcatccaggaggctcgggctgcgcgggagcccaccacggggtgggagggctctggcatggcgggctgcaggtcccgagccctgccccacggggaggtgggtgaggcccggccgagaattcgagtgctgcatgggtgggccggcagtgctgggggacccggtgccccctccgcagctgctggcccaggtgctaagccactcactgcctggggctggcggcactggctggctgctccaagtgcagggcctgccaagcctgtgcccaccctgaacgtgcgctggccggccagttccgcagggagccggctccggcctcggccagcccagacaggggatcccacgatgcaggggtgggctgaagcgctcctcaagcacagccagagtggacacggaggtgctgagagcgagcaaaagctgctagcacgttgtcacctctccgtcaggcttgacagtgattgagttttatccagtagaatcttggtgcagatgagcataatgactgggggaataggggagccattgctgggaagacttgtgtccctcagtcaggtttctgtctctctgtttcccagt

SEQ ID NO: 472565 - DNA, 680 bp, Homo sapiens
catctggctccacagggtacccatttatggactacacttgcactttgcagggtttgctcacccttttgggggtacactcaggctttgtgggttacagcataggccctttgagcccttctgactcctccatggttgcaaacaactggttagtcctgggaaagtccaatcccaaaaggacctacatggtgtcacagattagtggatctgtgactggcagccccaacccccctttcgggttgcaagagaaatggttaacatattatggaggcttactgaaagaaattgtaacaagacttcttaccaatgaaaggaggctgaataaagctgtgaccattgccccagattatggggtatataatactgccgttagagagagtgaaataaaccagattgaatgtcaaaacaggaactcaaatattcctaatagttttcaggcgttctggatctctccgcaagacactgaacatgttgcagtgatgagtagatcaaactgtcgaagaacttgataggatggaaatgccttgcttattctgtagcagtgtgtgaatgtaaaataagacaaaatagtttgggacttagcaccaaggaggtactcagtatctgtgtgattggtatcaggagtcacctgagctgggagagagctgagctgccaaatattagaatagccaatcaaagcaaca

SEQ ID NO: 472566 - DNA, 595 bp, Homo sapiens
ctcctgacagctgtttcatcactcaatgatgttcctctctaccttgttcaccctccagttgtttgcatacctcaatcttcctggatgcagggaaccatcacattccccttgtccagatgcagatgcagatgcctgcagcagatgcctcatgcagtacatcttgtctagccacaaccttcagaagcctcatgcagtacatcttgtccagccacaaccttgcatagagcccacacctgtgctggcacctggagctggcctgccctgctgcagcagtgacatgcctggctgtatgcagtggccagaccctgtacttgcttggccacacacctcttgccacactgtgcctagctccaccttggcaggtatggaatctggaacaccttccattataacaaaagcaccctttgaacaatctttctattataatttggaccattattactcataaagatgctactaattggcctacaaattaagcaaaataaaatattttcaaataacgatctgcaaatagtttaaaaaacatattttatatttatttccttaaaagaatcttctaaccttgggatgggcagtcatttcctagtcttcaaag

SEQ ID NO: 472567 - DNA, 731 bp, Homo sapiens
gacattcttaaaatattttaaaaatggaggatgtaaatgtgtcctatacttgtggattaaggtgggggtatacaagaggaagacgtgaaggaggctttgggttgggaataagggtggcaatgagatgtggctgtagtccaggaatggtcagggaagcagataatctggttaaaatgtctcagcctaataaggaaactgcgcaggaggggataactaaaaaggagtgcataaaggaatgttgtccaagttggcaccaaagtggaggagttttaatcggtttagaagcctggccgtcaatacccactaatagttatggagcttactaccctcagcttgtttttgaaatcatcaatttaaaagcaaacacctatcaaggtgtcaataaacccagaaactagtgtaaaggacaactatattaatagaatataaaaatattaagacatgttttatttatgtatttatttattcatttattatattcttgtgaagcaacatatgacacttatgtagagaatatacttaagtgatcaggtccaagttgcaatattccaggtcaataatccccaaaccagctcatttctagttatcaaaaactttaataaagtgtaaaaaaagctttcttttggacttttcaaatattttttatgctacttcattttgtgtcattctaaagcaggaataaacttcagaattttttcagatttagttggataaggatttctatttggact

SEQ ID NO: 472568 - DNA, 1097 bp, Homo sapiens
ctcccacttctccccagttcctgctggcttcatggagtgtgcagccctggctgcgcctccctgctgcagctggcatgatggcagcggttgctacaaatggcctgccactgccatcaactggaagtccaagatcaaagtgttggcagaggctcctgcagcatacacatggcttcactaccaccttgctcctgcagcacaggcagcttctccagcaccaggcctctgatgtgcacccagcagacagcaatgtccccaacatcccttcctccgggtggttttgtaacagaatgcctccactgagacacctctccatgaacagcttttcccagcaccctaaagggcaattctccagcaatttcagagagcaagtttccagcaagagatgtgagaagagggcaggggaaaggagaaatgaaaggcaagaagggggagttgagcaaatcctacttccatttagaaaccagggagtagaaataagctgccaaaaacctggagcctggttaaccacttcctacccaagttctcctaccctcttttcatccccaacctagtaaaaatacttcccacccaaattaaactcagattgatagaaccatgacactcccctctggttcccaacttaaatgaaaacttacagagaagattttccctaaagagctttcaacacttttgcctaaaaagctgaccattgtgtttcccggctcttggcaaacctatataagatacctgagaatgaaaatgattcaaggtgtacttggcttcattttgctgtaggtagaggaaataattatatcttgcatttggaagtggtgtaatttggcagaggatagaaacatttacagataattgaaggaccacctcaccaacaaagatgaaaaagacccaaacaattcttggcaggactgcccagtcagggaaagacatttgaattttgtatgtatgaagataaaggggggtaagattgtctgtgtgcatttgctaaagagcttctttgatcacttgagactccctgaatttccactctgaaggtaaaggtttatatgaatccatcattagaaagagaaataataaaattaactttcatttacctgcattac

SEQ ID NO: 472569 - DNA, 1224 bp, Homo sapiens
agcccaaggtctagtaaaaccatgcaacagccctgcaatactccaattttaggagcacagaaacccagtggacagtggaggttagtgcaagatctcaggattatcaatgaggccgttgtccctctatacccagctgtacctaacccttatactctgctttcccaaataccagaggaagcagagtggtttacagtcctggaccttaaggatgcctttttctgcatccctgtacatcctgactctcaattcttgtttgcctttgaagatcctttgaacccaatgtctcaactcacctggactgttttaccccaagggttcagggatagcccccatctatttggccaggcattagcccaagacttgagtcagttatcatacctggacactcttgtccttcagtatgtggatgatttacttttagctgcctgttcagaaaccttgtgccatcaagccacccaagcactcttaaatttcctcgccacctgtggctacaaggtttccaaagagaaggctcagctctgctcacagcaggttaaatacttaggactaaaattatccaaaggcaccaaggccctcagtgaggaatgtatccagcctatactggcttatcctcatctcaaaaccctaaagcaactaagagagttccttggcataacaggcttctgccgaatatggattcccaggctctattacttgaaaggccagtgctgcaactgtgcacttgtgcaactcttaacccagtcacatttcttccagacaatgaagatagaatataactgtcaacaaataatttctcaaacctatgccactcgaggggaccttctagaggttcccttgactgatcctgacctcaacttgtatactgatggaagttcctttgtagaaaaaggacctcaaaaagcggggtatgcagtgggaacacctatcacacatcaggaagccattaggagattattactggcagtacagaaacctaaagaggtggaagtcttacactgctggggtcatcagaaaggaaagaaaagggaaatagaagggaactgccaagcagatattgaagcaaaaagagctgcaaggcaggaccctccattagaaatgcttatagaaggaaccctactatggggtaatgccctccgggaaacgaagccccagtactcagaagaagaaatagaatggggaacctcatgaggacacagtttcctcccctcaggatggctagccacc

SEQ ID NO: 472570 - DNA, 1840 bp, Homo sapiens
tggatcctggatagcaagaggccggaaagttggggtagcggtaagagggaagaagtcaacaggatgtagaaactgcattctttgattcatgaagatgagcatccggactccacccagactcctggagcttgcggggcggagcctgctgagggaccaagccttggtcatgtccaccctggaggagctgcccacagaacttttccccccactgttcatggaggccttcagcaggagacgctgtgaggccctgaagctgatggtgcaggcctggcccttccgccgcctccctctgaggcctctgataaagatgccttgtctggaggccttccaagctgtgctcgatgggctggatgcactgcttacccaaggggtttgtcccaggaggtggaaacttcaagtgctggatttacaggatgtctgtgagaacttctggatggtttggtctgaagctatggcccgtgggtccttcctcaatgccaagaggaacaaaacaccagtgcaggactgtccaaggatgagaggacagcagcccttgactgtgttcgtagaactttggctcaagaacaggactctggatgaatacctcacctacctccttctatgggtcaagcagaggaaagatttactacacctgtgctgtaagaagctgaaaattttgggaatgcccttccgcaatatcagaagcatcctgaaaatggtgaacctagactgtatccaggaggtggaagtgaattgcaagtgggtactgcccatcctgacacagtttaccccatacctgggccacatgaggaatcttcagaagctcgttctctcccacatggatgtctctcgctacgtttccccagagcagaagaaggagattgttaccaagttcaccactcagttcctcaagctgcactgcctccaaaagctttatatgaactctgtttctttcctcgaaggccacctggaccagctgctcagctgtctgaagacctcgttaaaggtcctcacaataactaactgtgtgcttttggaatcagacttgaagcatctatcccagtgcccgagtatcagtcaactaaagaccctggacctgagtggcatcagactgaccaattacagtcttgtgcctctccaaattctcctagaaaaagttgcagccacccttgagtacttggatttagatgactgtggcatcatagactcccaagtcaacgccatcctgcctgccctgagccgctgctttgagctcaatgccttcagcttctgtggaaatcccatctccatggccaccctggagaacctgctgagccacacaatcatactcaaaaacttatgcgtggaggtgtatcctgccccgcgggagagttatggtgctgatgcacccccacaggatcagcacccacaccagcacagagcattcatcacaaccaatgagccacagggacacatcattatcacccaatgtccatagttcacatgagggatcattgctggttttgtacattctatggattttaacaaagggataatgacatgtatccaccattagagcatcatggagagtagttttctttccctaaaattcctctgtcctcttcccattcatcccattgtgctcccaaccccttgcatccactgggctttctactgtctccttagaaaaatgcaaaagctttttctggaatgtctaacaggatgagtcttttcagattgccttctttcacttgtacaataacgtgcatttaggaatttttcatgtctttttacagctttataatagttcactgactggatggatcagtttgcttatccagtcactgaccgaagggcaacttgctagcttccaagttttggc

SEQ ID NO: 472571 - DNA, 602 bp, Homo sapiens
ggcgggaaccaagcaaaactcaggatgaaatccaaaagtaagcctgtggtggaagaaagcagctctacggaggcattggcggtgttacagccctgcgtcccctctggcagggcagggagccctccggcgaagaggaacccgtgggcctcgggcgatcccggggggccggaccagtgttccccagttgtgggagcagacgcgtgggcgcatcacaggcgagcgaggcctgacgtgccggtgcgggccgcagacagtggcaggtgctgggaggacacgcttggggtcccggcagtgaagcgggttccagaggcccaggagcacgtagccgaggccggtggccctgggcctggagtctgcaggccacgctcctgtcctgctgctgagggacccggttaccaacccgcatgtcactcagtttgcccatctgtcccagtgctaacacacagttctcgggagacgttccccatttccagagtagtagtgtgaaatgcaaactgcatcaccattaagcaattaactgtggaaatgactttaaatagttatagttaaagacaattgacaaggaaatttggttatttctgtggtctacaataacttaataa

SEQ ID NO: 472572 - DNA, 8411 bp, Homo sapiens
ggtccctgagaaccgcgcccagtcctggtccctgagaacggcgttttggttgggagtcggtgttgctggaggctcagtgagggatgtcaatgcgtgtagctagtcatggactggccgtgttgtttccatcatgggacacttgcaatgactataatgacagcagaagtcttcaggaatcctatgtgagggacaaacactcagaagccagctggagtgttctagaatcctatgtgagggacaaacattcagagcccagcagcagtgttctggaatcctatgtgagggacaaactttcagaccctcgtagcagggttctggaatcctatgtgaggggcaaacatttagaccctcgtagcactgttctggaatactatcagtgttctggagtcctatgtgatgaacaaactttcagaccacagcaggagtcttctggaatcctatgtgagggtcaaacattcagaccccagcagtattgttctggaatcctatgtgaggacaaacattcagacccacgtggcagtgttctggaatcccatgtgagggacaaatattcagaccacaacaggagtgctctggaatcctatgtgaggggcaaacattcagaaccttgtagcagtgttctggaatcttatgtgagggagagacatttagaccctcgcagcagtgttctggtatcccatgtgagggacaaacattcagaccctcccagctgtgttctggaattctatgtgagggaaagacattcaaactccagcagcagttttctggaatccgatttgaggggcagacattcagaccccagcagcagtgttctggaatgctatatgggggacaaacattcagaccccagcagcaggcttctggaatcctatgtgggggacaaacattcagacaatggcagcagtgttctggaatcctatgtgagggacaaacactcagagcctcgtagcagtgctctggaatcctatgtgagggacaaacactcagagcctcatagcagtgttctggaatcctatgtgaggaacaaacaatcagaccacagcaaagtgttctggaatcctttcaatgttctggaatcctatgtgagggacaaactttcagaccacaacaggagtgttctggaatcctatttttctggaatgctacgtgacggacaaacattcccaccacagcaggagtgttctggaatcctatgtgagggcaaacattcagatcacagcaggggtgttctggaatgctatgtgagggacaaatattcagacactagcatcaggcttctggaatcctacatgagggacaaatattcagacaacgacagcagtgttctggaatcctatgtgggggacaaacattcagagcctcgtagtgttgtggaatcctatgtgagagacagacatttaggccacagcagcagtgttctggaatcccatgtgagggacaaacattcagatccgaacaggagtgttctggaatcctatgtgagggacaaacatttagaccgtcttagcagtgttctggaatcctatgtgagggacaaacattcatatcctcgtagcattgttatggaatcctatggacattcagacaccagccacagtgttctggaatcatatgtgacagagaaacattcagaccacagcagcagcgttctggaatcctatcagtgttctggaatcctatgtgagggacattcagaatttcatagcagtgttctggaatcctacgtgacggacaaacattcagaccacagcaggagtgttctggaatcctatgtgagggacaaaaattcagaccccagcatgaatcttctggaatcctatgtgagggacaaacattcagactctcatagcagtgttctggaatactgtgtgggggacaaacattcagaccacagcaggagtgttctggaatcctacgtgagggacaaacattcagaccctcgtggcagtgttctggaatcctatgtgagagacaaacattcagaccctcataacagttttccggaatcctatggcaaacattcagatcacagcaggagtgttctggaatgctatgtgagagacaaacattcagacactcgcagcaggcttgtggaatcctacgtgagggacaaatattcagacaacggcagcagtgtactggaatcctatgtgggggacaaacattcagagcctcgtagtgttgtgggatcctatgtgaggggcagacatttagaccacagcagcagtgttctagaatcccatgtgagagacaaacattcagacccgaacaggagtgttctggaatcctatgtgagggacaaatattcagaccctcttagcagtgttctggaatcctatgtgagggacaaacattcatatcctcgtagcagtgtcatggaatcctatgtgagggacaaacattcagaccttcgcagcagtgttctggaatcctattgttctggaatcgtatgtgagggacatacattcagaccctcgcagcagtgttcaggaatcctagatgagggaaaaacattcagacaccagcagaaggcttctggaatcctatgtgaaggacaaagtttcagacaacggcagcagtgttctggattcctatgtcagggacattcagagcctcgcagcagtgttctggaatcctatgtgaagaacaaacaatcagaccacagcaggactgttctggaatcctttggacattcagaccattgcaggaatgttctggaatcctatgtgagggacaaactttcagaccctcgtagcagtgttctggaatcaaatgttgggtacaaacatacagaccccagcagcagtgttctgaagccctatgtgaggaaccaacaatcagaccctcatagcagtgttctggaattctatgttagggataaacattcagactccaacgttgttcttgaatgttatgtgaggaacaaacattcagaccacagcaggagtgtcctggaatgctatggacattcataccacagcctcagtgttctggaatcctatgtgacagacagtcattcagatcacagcaggagtgtcctggaatgctatgtgagggaccaacattcagacccttgtagccgtgttctggaatcctatgtcagggaccaacattcagaccctcgaagcagtgttctggagttctatgtgagagacaaacattcagaccctagtagcagtgttctggaatcctatgtcagggacattcagacaacagacacagtgttctggaattctgtgacagacaaacattccgaccacagcagaaatgttctggaatcctatgtgagggacaaacattcagaacacagcaggaaacccagcagcagtgttctggaagcctatgtgagggagaaaggctcagaatccagcaacactgttctgcaatcctatgggagggacaaacattcacaccagagcaggagtgttctggaatcccatgagaggggaaaacattccgactccagcagcagtgtccttgaatgctatgtgagggacaaacattcagaccacagcaggagtgttctggagtcctatgtgagggagaaacattcagaacacagcaggagacttctggaaaccattgtgaaggacaaacatacagacctttgtagcagtgttctggaattctatgtgaggaaaaaacattcagaacacagcaggagtgttctgaaatcctatgtcagggacaaacattcaaaccacagcaggagtgttctggagtcctatgtgagtgtcaaatattccgacaacagcaggagtgttctggaatcctatgtgagggacaaacattcagaccctcgtagcagtgttctggaatcctatgtgagggaaaatcattcataccctcgtagcagtgttctggaatcctatgtgagggttaaaatctcagaatccaggagcagtgttctggaatcctatgtgagggacaaacattcagtccacagcagcagtgttctggaaagctatgtgagggacaaacattcagaccatagcaggagtgttctggaatcctatgtgagggacaaacattcagaccctggtagcagtgttctggaatcctatgtgagggaaaatcattcataccctcgtagcagtgttctggaatcctatgtgagggttaaaaactcagaatccaggagcagtgctctggaatcctatgtgagggacaaacattcagtccacagcagcagtgttctggaaagctatgtgagggacaaacattcagaccatagcaggagtgttctggaatcctatgtgagggacaaacattcagaccctcatagcagtgttctggaatcctatgtgagggaaaatcattcataccctcgtagcagtgttctggaatcctatgtgagggttaaaatctcagaatccaagagcagtgttctggaatcctatgtgagggacaaacattcagtccacagcagcagtgttctggaaagctatgtgagggacaaacattcagaccatagcaggagtgttatggaattctatgtgagagataaacattcagaccacagcgggagtgttctggaatgctatctgaagaacaaaattcagaacccagcagcagtgttctggaatcctatgagtgttctgaaatcctatgtgatgaacaaacattcagaccatagcaagagtgttctggaatgctatgcgaggtacaaacattcagaccacagcaggagtgtcctggaatcccatgtgaggtacatacattcagaccctcgtagcagtgttcttgaatgctatgtgagggacaaaaattcacaccacagcaggagtgttctggagtcctatgtgatggacaaacattcagaacacagcaggagtgttttgaaatcctatgtgagggacaaatattcagaccacaggagtgttctggaatcctttgtgaaggacaaacgttcagacccttgtagcagtgttcaggaatcctatgtacaaacattcagacaccagcagaagtgtgctggaatactatgtgagggagaacactcagaccctcgtagcagtgttgtggaatcctatgtgaaggacaaacattcataccctcatagcagtatcctggaatcatatgtgtgggacaaacattcaaaccctcataacagtgttctagaatcctatgtgagggaaaaactttcagaccatggcagcagtgttctggaatgctacatgagggagaaacatcctgaccctcctagcagtgttctgcaatcctatgtgagggacagacatttagaccctcgcagctgtgttctggagtcctatgggagggacaaacattcagaccctcgcagcagtgttctggaatcctttggacatacttaccccagccacagtgttctggaatcctatgtgacagacaaacatacaaacaacagcaggagtgttctggaatcctatgtgaggaacaaacattcagaccccagcagcagtgttctggaatcttatgtgagggaaaagcattcataccctcgtaggggtgttctagaatcctatgtgagggaaaagaaactcagaatccaggagcactgctctggaatcctttaccccagcagcagtgttttggaatcttatgtgatgtaccaacattcagacgcttgtagcagtgttctggaatcctatgtaagggacaaacactcagaacccaccaacagtgttctgcaatcctatgtgagggacaaatattcagaccctcgtaggggtgttctggaatcctttttgagggacaaatgctcagaatccagcagctgtgttctggaatcctatgtgagggacaaacattcagaccagtgcagaattgttctggaatcctatgtgagggacaaacattcagactccaacagtagtgttcttgaatgctatgtgagggacaaactttcagaccacagcaggagtgttctggagtcctattcctatgtgagggacaagcactcagaagcccacagcagtgttatggaatcctatgtgagggacaaacatgcagacctcagcagcagtgttctgggatcctatgtgagggacaaacattcagaccccaggagcagtgttcttggatgccatgtgagagacaaatcttcagaccacagcaggaatgtgctcgaatcctatatgaaggacaagcattctgactcttgtagcagttttctggaatcctatgtgagggacaaaccttcagacctcagcagcagtgttctgggatcctatgtgagggacaaacattcagaccccaggagcagtgttcttggatgccatgtgagagacaaatcttcagaccacagcaggaatgtgctccaatcctatgtgaaggacaagcattctgactcttgtagcagttttctggaatcctatgtaagggagaaacattcagaccccagtagcagcgttgtgaaatcttatgtgagggacaaacattcagaccctcctagcagtgttctggaatcctatgtgagggacaaacattcagaccctcctagcagtgttctggaatcctatgtgagggacaaacattcagaccctcatagcagtgttctggaatcctatgtgaggaacaaacattcagacaactgtaggattgttctggaatcctatgtgagggagaaacgttcagaccctcgtaacagtgttctggaatcctatgtgagggacaaacattcagaccagagcaggagtgttctggaatcgcatgtgacgaaaaaactttcagagcacagtaggagtgttctggaatcctacgtgatggacaaacattcagaacccagcagcagtgttctggaatattatgtgaggggcaaaagctcagactccagcagcagtgttcttgaatgctatctcagagacaaacattcagaccacagttggagtgttctggagtcctatgtgagggacaaacattcagatcacagcaggagtgttctgaaatcctatgtgagggacaaacattcagatcacagcaggagtcttctggaatcccttgtgaaggacaaacattcagacacttgtggtagtgttctggaatcctatgtgagggacaagcatgcagaacactgcaggagtgttctgaaatcctatgtgaggaacaaacattcagaccacactaggagtgttatggaaaatcattcataccctcgcagcagtgttctggaatcctatttgagggaaaaaaactcagaatccaggagcaatgttctggaatcctttgtcagggaaaaacattcagtccgcagcagcagtcttctggaatgctatgtgagggacaaacattcagatcgtagcagaattgttctggaatcctatgtgagggacaaacagtcagaccacagcagcagtgttatggaatcctattcctatgtgagtgtgaaacattcagacaacagcaggggtgttctggaatcctatgtgaggaacaaacattcaggccacagtaggagtgttctggaatcctatgtcagggacaaagattcagaccctcataacaatgttctggactcctatgtgagggacaaacattcagaccccagcagcagttttctggaatcctcttgttctggaattttatgtgaggcacattcagaccccagcagcagtgtttttgaatgctatgtgagggacaaacattcagaacccagcaacagtgttcttgaatgctatgtgagggacaaacattcagaacacagcagcagtgttctggaatcctatgtgagggacagacattcacacaacagcaggaatgttctggaatcccttgtgaaggagaaacattcagacccttgtagcagtgttctggaatcctatgcgagcgacagacattcagaacacagcaggagtgttctggagtcctatgtgagggtcaaacattcagaccctcgtaacagtgttctggaatcctatgtgaaggacaaacactcagactcgagcagcagttttctagaatcttatttcaggatcaaatattcggaccctcgtagcagtgttctggaatcctatgtgagggacaaacactcagaacccagcagcagtgttctggaatcctatgtgagggagaaacattcagacaacagcaggagtgtggtggaactgtgtgtgaggaacaagcattcagaccacagtaggagtgttcaggaatcctgtgtgagggacaaacattcagaccctcataacagtgttatagaatcccatatgagggacagacaacctagcagcagtgttctggaatcctatgtgagggtcaaacattcagaccacagcaggagtgttctggaaacctgtgtgaggacaaacattcagaccacagcaggagtgttctccaatcctatttgatggacaaatattcagaccctcgtagcagtgttctggaatcctgtgtgagggacaaaccttcacaccccagcagcagtgttctggaca

SEQ ID NO: 472573 - DNA, 640 bp, Homo sapiens
ctccatgtgggtagcaaagatgtctctatggaacacagatgtttcggggtggcgagaggctctggggagggtgagaaccattgcttgccaacttacctaggtgagcgtgcaagggccagcacattcccagaggactgcgtatctcacgtatataccctgaggcagagccagacctgtgcatcaggggctcgagtccacctggaggaggaacagccccagctgctgcaggtgatcaagatgagaaggcctgtccatgaagatgactctgggcaggaattcactctagggcagctggagttgctgggcctgcagtgggtgggagtgggagaaggcagtgcaggaggaagagagaaagcaagccccaacttcagcattatggtaggagctgagcacagggctgcccaagtaagggccccaactagtagcaacaggagtcaaaaactgctgcaggaacagcagaaagcacatcagagggtggcccagcaggacagattctttccagagacctcagtatacactattaggttgccaagctctgaccaccacgattaggttgccaagctctgaccacgggatgcaatatgaatgaatcaaggcccatggcccagggaaagggcctagaggctgtttctgtcctagc

SEQ ID NO: 472574 - DNA, 583 bp, Homo sapiens
tatagatgcctgcttaaaaccaggggctcccagcctccgtttcttcatatggctctccccagaaatagagacactgttcacttacgtcattgggagattcttcaagattgatggtgttatgaaagactcagaaaccctgcttgtggaggttgaacctgagaagccaattgctggaagtaaccagctcgttagggggtctcctgacctctgcccttcagagcagtgtgggctgatctcttttaggtatgctgtgtttgcaggagtgtccatgctgagaggagaaagtggaggtgatgagaattccctggaggaagatttttttttatccattgtattaatcagtttgcattgctataaagaaatatctgacactaaggaatttataaagaaaagaggtttacttggcttatggttctgcagactctatgcaaagcatagtgccagtatccactcctgtttcttcatctgtcaaatgggttaataatataatttgaaaggttatggggagaactgaaacaaaatgcattaatgactagctctgcttccattccagatgtggaaaacgagaaagagtgacattctt

SEQ ID NO: 472575 - DNA, 598 bp, Homo sapiens
aagatgcactgagaggtacccagtttccatcaacctacaagatggaatctcaaggacaaatgataaagagaccacatcatcggcaatatactgaagtctacttagaatataagctgggtgcaagtacccactcagccactgactgcagcagccatgcagcctggggaggaaccaacactgtgggcagcttgatcttggactccaaacccccagagccgtgtgacaagacatttctgttgctcaagccactgggtctgtgggtctgtggcacctctgaggccactttcagcctgaatgttacccaggcttaccctagagcatctggggactgcgagcttctcagcaacacctttgcctgggagaagagggtccacctagcagtgggccaacctcgatggggtggtacagtagggatcatcctggcatctggccctgcctcctcttcctgggctcttctttctgacctttgaattgggccttgcctctccccttgctcacaagcttcaggggctgtaggctgacccagccttgtgtgccacatttttccttgcctggccccacctgtgctcccacctcagtacagggctcttcccacaga

SEQ ID NO: 472576 - DNA, 641 bp, Homo sapiens
tcgttaacagacgctaattgtcccacagaggtatttgtcagctgatggggtgacatcacccccaccccaaaccacatgcatgagactgccctgattggctgctccttccagcaaagcttggtcatccctggtggactcgtgctcctgggttcattcgtcttggtctccagtggcaggaatcggaggttggcttcccattttcaattcagcatccgggtcacctccttttgtcagcaggcaggaaatgcgaactccttccggcagcaagcacatcatagagactttcccagatcaagcaaaagtggggacagtattgaggatgtagcttctccttccgcacgcactgttgggcctgacctctgcctgcagggctgggacgaggcagaacttgctcttggggcagcgcaagctgttgccaagggtgaacttacctgagtatgtactgaaaacttcagccattattgtagggtgatgttttctcatgtggccaagctcttttatgttgggttgagatttttaacactcaaaacaagtttgaatcttctgtagtgaagttgttcctctctttccagggagaaggaggaagaaagaggtggcagtacgcgggttatgacatcattccagagacatcttatctaaat

SEQ ID NO: 472577 - DNA, 1090 bp, Homo sapiens
gaagagaaacgtccatcaagttctcatgctgagtcagtatgtgtgctacactagtcagtacgtgtctactgtggacaactggatatatcagtgaagaaaacggactcacaaagcaggtaccactggagagaaaaacaacagacgaaacacacaagatggtaaagaaacacaacgcagaattcaggatggtggagaaacacaacgcagaattcaggatggtggagaaacacaacgcagaattcaggatggtggagaaacacaacgcagaattcaggatggtggagaaacacaacgcagaattcaggatggtggagaaacacaacgcagaattcaggatggtggagaaacacaacgcagaattcaggatggtggagaaacacaacgcagaattcaggatggtggagaaacacaacgcagaattcaggatggtggagaaacacaacgcagaattcaggatggtggagaaacacaacgcagaattcaggatggtggagaaacacaacgcagaattcaggatggtggagaaacacaacgcagaattcaggatggtggagaaacacaacgcagaattcaggatggtggagaaacacaacgcagaattcaggatggtggagaaacacaacgcagaattcaggatggtggagaaacacaacgcagaattcaggatggtggagaaacacaacgcagaattcaggatggtggagaaacacaacgcagaattcaggatggtggagaaacacaacgcagaattcaggatggtggagaaacacaacgcagaattcagaatggtggagaaacacagtgcagaattcaggatgggagtgcgggggcagcaagggctgcccttctacatccgttgcttagaaaagtcctctcagaaaaggggacgttcaagcaaagttgtgaatgaggcaggaaggagggtgtgtggggagctaacattctaggcacacttggaccctcacacagcctcatgaatattactgggcacttctgaaaagggaggctagatggggtttccctacaggtgggcttctagctctgggatctccctccaccccttatttaaagcctaactggtccccccttc

SEQ ID NO: 472578 - DNA, 579 bp, Homo sapiens
cactctcttttcctccttctccggccacatgaaacgtgcctccttccccttcaccttccgccatgattgcaagcttggggtggacacagagatgcatcacccaggctccattctgggagggctttgctgccgagcagcaggaagtgtgttggcagacaggccccggctgaagctccttcagcggcaggcccagcagccaaactgccctgctccaggtctcatcttcccagggcagccacacccagggactgagcaaggcagggggacagaggccactcgctgctgggcgacttgctccagggctcctggactggcactcattaccaaatatagcattgactcatttgcatgccaaggcatggaaaggctgccacgggttttgaaagatgctgtcagagcacttgcattgcctatggaaccagtttgtggtctcagccacaggagctacgaggcaccgagttttggccccaaacacctgactggaatttgaatcttctgttggcatcatagccgctcatcaaacttctcagtggttgatttgaaaatgtctgtgcttggaaaatgtgccaccagcaagca

SEQ ID NO: 472579 - DNA, 1496 bp, Homo sapiens
ctctccgtgttttctctgaattcctcaatggcgcgtgactacagagtcaccagaggaaatgaggcctcccgtggcgtcagcatgttcgtgtggaggaatgtggaaggtcactctgtggccgtgttcccctggtactccatccccttcctgacccctccctgcagccacatgaggcccagcaacctgccagtcactcagtggcctccaaccagagaaaacaacctgccaagttggcagctgttgctcataagcgtccaccagatgatgtcaggcccagtccctcagtgcctgcgcaaggaacaggactcatcttctgagaaggatggacgcagccccaacaaatgggacaaggaccacatccggtggcccatgagtgccggtcatgatcttcagcaagcggcaccaggccctggcagggcgcaccagggtcaccccaaccactataaccggaccatcagccagatgctgagcgagcggtggtacaccctggggcccaatgagacgcagaaataccacgacctggccttccaggtgaaggtggcccacttgcaacaaggaccgaaagaagtccagctcagaggccaagcccacaagccaggggctagcaggattgcagcccaaacactccagagctcggataccaaggagcagcttctgtggggcagaacggctgcacacagtcaggaaacctggctcagcctggcccaagccttctcccacagcggggtacacagcctggacggcagggaaatagaccgtcaggcactacgggaactgacacaggtggtgtctggcactgcatcatactctggcccaaagccttctactcagcatggagctccaggccactttgcagcccctgagggcaacaagggctttggtgggaaggtatttgcacctgtcattccttcctcctttactcctgccgccccttgctggatcctgagcccccagggtcccccgatccacctgcagcttttggcaaagtctatggtcccaccctgtcctcctcctacacatactcggatgcttcctcctcaaccttggcacccacctccttcttactgggcccaggagccttcaaagcccaggagtctggtcaaggcagcagagcgggccccctatgacccctacccctggggatgggggcccagggacgccttccaaggtgacctgtttcctcccaatggatcctgccaccttctggtggagaagccgaggacaggctcagggaaccggagaccgagaaggcgctgtcctcttcactgcacgcgccctggaccagtgccggccctgatcatgcagctcttccaggcccactgcttcttcctgtccactaggccacagttgccctccaggcccactatgcacacatcttcccctccaaggtttgttctgcccctgccctgactcccagccctgtgggggtcctgaccggacctcacctggctcagactcttgacgctgccctggctgccccaccactgcctctgccc

SEQ ID NO: 472580 - DNA, 950 bp, Homo sapiens
attggacccatcgtcattgcctcttgagggagggaaaatctggtgaccctttcactatggttcaggggttcaaagtgaataagtttatgttaaactcatgtgaagagaagcagaggaagggctggggagaaggagcccatgggggaaaagggggtggctgtacaaggagaatttcatgggaaagaatagaaaagtatgcaagggattttaaagaaagtttgctacagtatgagaatgttacttttggctaccagcaaaggccacactactctaaaagactatgtatgccagatggttatatcccagaggccatcaagtcctccaagaagaaactgagctatcagaactctgatggtcctgtggctgactgcactttcccagagtttcacattattcattcccagaaaggtggagaaaacttttggagcaggcttgtagaggagatggtgtccagggagatgggagcaaggtcccaggtggaaggttgactattactggggagaaggataccagattttctgagtttggagggaaggaatcaaaattgctgtggctgtatattatggactgaatgtgtgtgtcctctcttcatgatgatgaaggtgacatttccctcaccttcccttgatgtaatcatcaccttgacttttatgatagacattttcttgctttcatgtataattttaccacctacatatttatccctaagcaaaatagtatagttttgcctgtttttgaaattgacatatatttttaaaattgatatatatacaggactcatcctgtatatcttatgctgctagcaccaagaaaataaacctactcagtaaatgttgattaaataaatatccaaatagctggaaaaaaataaaaattgctcatattaaaaatggataatggtgggtatcaaatgatatttaaatttattatctatacttaaaaaggaatac

SEQ ID NO: 472581 - DNA, 1556 bp, Homo sapiens
gtcgcggggcctcgccgcggcctccagcgccccagtcacggggaatgcagtggtccccgacccctggcgcctctgcgtgtctgggctgggcttcctcgctcgcctgctccacggccccgacgctcctgggccgagccggccggggccccctcatggcggccaagtggttcaaggagttccccctgaacctgaagaccgtgtcggagcgggccaagcccgggggcggcggcggcaaattgcgcaagaactcggaggcgggcggcgctgggccgggtcctggcaagggccgcaagaactcggcggccgagctggggagcggcagggccggcgtcggccccaaggacagccggctgtcccgcgacagcctgcagggtctgattcaggccgccgcgggcaagggccgcaaaaactcccgggccacggaggaggagccccaccggggtgcaaccaagagctcgggctgcagcacctacatcaacaggctcatcaaggtggacactcaggagaagaacgggaagagcaactaccccagcagcagtagctccagctccagctcctcttcctccgcgtcctcttccccttcctccctggggcccgagctggacaagggcaagattattaagcagcaagagacggtcatcattttagaagactatgctgacccttatgatgccaaacggacaaagggtcaaagggatgcagagagagtcggagagaacgacggttacatggaaccatatgatgcacagcaaatgataacagaaattagacgacggggttccaaagatcccctggtgaaggctctccagctgcttgacagtccctgtgaacccgcagacggtggcctgaaatcagagaccttggccaaaagacggagttccaaggacctcctggggaagccgccacagctatacgacactccctacgagcctgcagaaggggggcccagggcagaggggaaggcgcggcccccagacagccggctgcccgagaacgacgagaggcccgcggcagagtacgagcagccatgggagtggaagaaggagcagatcgtgcgggctctgtcagtccagtttgaaggagctgagcgaccttccttcagggaggagacagtgaggcagcaccaccggcagaagagctggacccagaagatcctgaagccagccctctcggaccacagtgagggagagaaagtggacccgggcctgcccctggagaagcagccctggtatcatggtgccatcagccgtgctgaggctgagagtcgactacagccctgcaaagaagctggttacctggttcgaaatagtgagtcagggaacagcaggtactccattgccctaaagatcacctatgggagcccccaagccatgcctttgtatgtgcgctcagactcccatgggtcagcctccagccccagctcacactgataaacgtgacaaaccacatgaggataccaggtccatctcctcccggggcaagccttttttttttagatgacccagatgcccaaagcaataattacatttcaagggtattttttaagagtatttatt

SEQ ID NO: 472582 - DNA, 458 bp, Homo sapiens
gaccgagaatacaatgagaaattccagtatgcgtaactgcatcaagacctccaagtacaatattctcaccttcctgcctgtcaacctctttgagcagttccaggaagttgccaacacttacttcctgttcctcctcattctgcagttgatcccccagatctcttccctgtcctggttcaccaccattgtgcctttggttcttgtcctcaccatcacagctgttaaagatgccactgatgactatttccgccacaagagcgataaccaggtgaataaccgccagtctcaggtgctgatcaatggaatcctccagcaggagcagtggatgaatgtctgtgttggtgatattatcaagctagaaaataaccagtttgtggcgcttattagctcagaataataatatgtgttccttataagactaaccatacagagtgtataagaaaaagtgaatagaggtc

SEQ ID NO: 472583 - DNA, 1411 bp, Homo sapiens
ctccggaagtggctatgcttcctcccgacgggcacctgtgcaggcgccggctgccacccttggctggcgtcacatggagggcggggctggccatggaggcaagaaagagctgttttgctgatgagctgccctcctgtcacacgggccggagtgccaggtccctggatgtgggtgggggaggaggaggactgccctgctgtgccaagctggcccagatccaagttcggctggccggcttcgtgcagttctacatcctcttccggcctcctctcctcttccagctgtcccctccaaaagaccacttgcgcctcccaccccacttcatagcccttctcttccactgggaagcccacagggggcctggctgggccctgggcactggccccttggaagtgcctcaggaagtgcaccagcctccaggaagtgtgctttccagttggggcgctccatggccctgcccctgcaccccttcaggatcctggtcccttggcccagacagccgcacgtccacaggctcccacacggtcaaggccaagcaagggcaggcatgcgtgtgggtgtatgttaacccttgtaagtgattcatgtgtgtgagccagcatgcaaaggtgtaagtgcatacgaatgtagaaaacgagaatgtggatgtgtatatgtgactgcgtgtgtaacggtgcatgtgtgcaaagctgaatgtggcaggtgtctgtgcacacatgtgtgggtcagtaatgaaaatgactgcatgaaggagtgtgcagtttaaatttcacattctaaacacttgtggatttcattcattttactattcaacaaatatttactgaaaatttgtgccagatgctattctttcatcactggttttcagtaatttgaccatgatgtgcctgaatatggttttcttcaggttccttctgctgtggagttcattggggcttcttgaatcggtgggtttatcattttcatcaagtttggaaaagctttagccatcatttcttaaatatctttcccatctccatcctcttcttctggacctccaattacacatatgttagacctcttacgttgtctcacaggtcactgaggctctgatttttttttcccctctgcatttcactttagatagtttctattgctatgactttgaggtcactaatattttcttctacaatgtctaacttgctgttaattccatccattgtatttttcattttggatggtggttgcatttttcaacattagaagtttttgagtctttttagtatttttatttctcacatcatgttcgtgctttcctctatcttcttgaacatgaagagtgtattagtggtagttgttctaaatgtctgctaactctaccatctgtgacatttctgggtctatttctattgatttgttttttttcctggtt

SEQ ID NO: 472584 - DNA, 1177 bp, Homo sapiens
gggctcgtgtctgccacccggaccaggcagagctccccgagaacaaggactatgtctgtgtcctcggcccctgaaacactgcctggccccggtaattgcatctgtgcaatggggcactaccaccatgagcaccgtcatcaccatgaccatgatctctaccactgccaccattactaccgccatcaccatcaccatcatcaccagaccatgatcaccaccctgatgaccaccactatcatcatcaccatcgatagccttattccacacaacaggcgctaccactaccaccatcacaactaccaccatgatcaccaccatcactaccatcagtaccaccaacaccatcacacctgcaccaccatgagcagcattgcaaccaccaccatgatcaccaacatcacaatcaccaccatgattaccaccaccacaaccattgctaccatcactactgccatcattaccatcactactaccactgccatcaccatcaccattactatgacaaccatcactatcatcaccaccgtcaccaccaccacaaccattgctaccatcactactgccatcattaccatcactactaccattgccatcactatcatcattactatgacaatcatcactatcatcaccactgtcaccaccaccaccatcatcaccatggccctgatcaccatcattaccatccccacaatcactagcctcagcacaggcaccagcacccccactatgatcatcaccatcaccaccaccatcaccaccctcatcaacaccatcatcactaccactatcaccaccatcatcaccaccaccatcactaccatcaccaggatgactgtcaccatcattatcactgccatcattaccaccataatcatcaccatctatcactaccactattgttatcaccatcattaccaccattgccacccatatcacatcacaaccactacaatgactaccaccgtcaccaccaaaatcaccactactactatcctgatcaacatccacatcaccatctgctaccactgttgagtcctaattagggaaaaggagtcaggctggcaggagcaggggaaagcagaaagaaaaagcagataagctctaagtctgcctttcttcatggtccaggacatgtagccctcctgagcccaacttctcaccagacacctgcaag

SEQ ID NO: 472585 - DNA, 563 bp, Homo sapiens
tccagggatcaggctggggacccgggtggacatggccacggggcccgagttcaaatgtgtgtgcaaaaaggacacacgaggagcccccgagacaggctgcaaaccccctcctgcctcggttcagcatacaagtgccctcttagcagattctgtccccaatgtgggaacatttgaaatgcccaccttgggggtggtgaagaaccagctcttgctggggtggcacagcgaggactgtgccttggaggagctgctgtgtgaaccacatgcccctggtttcaacaagcaaagggaagccgcccaggctgtcttaaagggcttcccacttctcgccgtccttggctccaccctggatcccatcatccccgtgcctatcgccagcagcagtgctggccttcgattcagaaaccccagagagcagggatcttccacatgacaactggtccccaggggaaaataaacctataaggtcctttcgtactggtcatgtaggaggacaagatggtgttgttgaaggatgatgaaggtggtgatggtgatgactgagaaagatgaggagggagaat

SEQ ID NO: 472586 - DNA, 678 bp, Homo sapiens
acaaaggcttatttctttctgatgatacacgtccagggcaggcagcctcaggacagaaccgtcggagttggaggtgattaaatgccctgacccagaaatcacacatatgattcccacccacaactctctggccagagctagtctcatggccacatctaacttcaatgtggcaagatgtaccatcctcctatgcacccaacagagaacaggcccacactacccgctgggccgagccaccatcatcctggactgtcacagcagcctccgagattctacctttgccctctatggaaagtctccactcagcagccagagggatcttgtcccgagggagttcggcaggcctggccgttctcccaacagccctgtgggaggaatgctgctagagcagctccactggacagatgagcaaattgaggcctgcaggaaaagggaaggctctggctctccctactacatcctgtctgtggggctgggcggctaccccgggacccaggactgccgtctgcccacaccttgcccaagctctgcactctctcttcctggcaactctttctgtccagaagacgggggtcccacaggtctcaggctctgggctgtgccttctggcagccagtagcttccatgaaggcaaaggaaatgcattccttcccatcccaactctaatcaggcccacaa

SEQ ID NO: 472587 - DNA, 489 bp, Homo sapiens
tgctgtagcacaatgctcatgtcccttcttcctgctggaaggtggcctgctcaggcctggaagctggcactagctgtgatcttaacatgcagcacctcctgcccagcgctggcaccaggcagagcctcccccgccctccaccatgtgtggaggctccttgccctcggcctgcccatctgcctcctccttcagctccctggcttggctgcagcagaccagggacagaatgaggcttcagcctgcagctcaggcccaaggggaactggaaagcagaggccttggggggtccctggcagcggggtgcacacaggagtagaagcagagacgtccctccctggaaacgttcaccatcagagcagtaatgtggggaagagcgtcggctttagggccgcggatctaggtttgaatcctggctttaccactttgctgtgtgattttgggcaaatcgcataacctctctgagccccagtgtactcttctgtaaaataa

SEQ ID NO: 472588 - DNA, 927 bp, Homo sapiens
gcgcgtttccaggacaccatggccctgtgtgaggtgctcatgtttgtgggttctcccaacagccctgtgggaggaatgctgctagagcagctccactggacagatgagcaaattgaggcctgcaggaaaagggaagatgagaagactcccgcagcacccccaggtcccaagggcaccctctttatcttcacccacgggggccttctgcacccccagggactcctcaccaagatctgggacccaggggccatgccggaagcccctctgctcccagagggcagcccccgcccctccgctactctgcccggctggtaccacatcctgccgcagccctgcattctgggtcctggcaccaagtgggtgcccagggcagaaagcttgggccaccgcttcctgctcaaccctcctgccccgatgctggcaatgatgttgagaatcgatgtctgtgtgctggcaggggcagcccccaagctcggcatagccacagcctgcggtggcctctgtgccccaggaaccaccctgctgtgcccagttcacatacaccaggatccacagagccccgtgtagacagatagaatgacacactcatagacagagcatggaaatgaattagaggccagctagaaggagactccactcttcagatggaaagtaattccttgataatgcaggctttctggaaacagaaacagtcacactggtaggtgttgccgagcacacaagctagcacacacacacagaaccgcaatcacctttacacagtcccacacacctcaacaacttctacacgggcagaccctgacatgcatgcagacaccccaacacgtggacactctgacatacacacaggcacagccaacattcacatggcaccccgacataaacacgaacgccctcactgacatatggctaccccaacatacacac

SEQ ID NO: 472589 - DNA, 580 bp, Homo sapiens
aggcatatacccaagagaaaagaggacatgtccacacagaaacttgttggatggcttctgttgtttgcaactgagaacaccgactgctctggaaatggtgctgttggtggttatggggatggcaccagtgcgggtggtgaggttggagggaacagtcgtccctgcagccacacacacagtcatgttcacaggctcacgtctgcacgctcaccacgtgtgacaatacacagatggctccctaggaaggacaacacgcggcccctgcgcatctgtccaggctcagccctgattcctgagactgcctgggcattgctccctggatacgcagagggccccggcccccctgtgttcctctgctctgagtgtgtgtgcacacaggctccgactggacctcctgtccccatgtccccttccttgaatggcgtggcagcccctaagagagctgtgctaaagggtggtcatacatccctgacatgtccttgcaagcctcacagaggccaacgagtgctggatacacggctcactgacaacacaacctgaagtctacaactgcccctctctgagcctcagtgtcttttcc

SEQ ID NO: 472590 - DNA, 1254 bp, Homo sapiens
gaaagcctcggagggtggccgtcatgcattgtaaaggacatcagcaagccaccacttctgttgccttaggaaattctcaagcagactcagaagcttacaaagcagcatccacccaataccgagcatcagtcacagccgccttgctccctcaggcacctgatctagtgcctgcttattctaaagaggaaagagactttttccaggcagagggggagcaagcgataaaggaaggaaggatccagttaccagacggaagagtagccgtgccacagctactgggagctgcagctgtgctggctgtgcatgagaccacctatctaggccaagagtcacttgaaaagttgttaggctggtacttctacatttcacgtctgtcggcccttgccaaaacggtaacagagcaaggtgtcacctgccggcagcacaatgttaggcagggtccaactgtcccgcctggcatacaagcttatggatcagccctctttgaagatctccaagtggatttcactgagatgcctaagtgtggaggtaacaagtatctgctaggtctagtgtgtacctactctggatgggtagaggcctatccaacacgaactgaaaaagctcgtgaagtaacccgtgtgcttctccaagatttcatccctagatttggactgcccttacagatcggctcacacaacaggctggtgtttgtggctgactcggtacagaagacacagaagatcaggtgcaccccttctaaaagaacaggatattctccttgtgatcgagtgtggatcaaagactggaatgtagcccctttgcagccgcggtggaaaggaccccagagtgtcatcctgaccacacccaccgccatgaaggtagaaggaattccggcctggatccaccacagccgcctgaaacctgcagcacctgaagcctgggagctgggctatactggatatgtggacacagagcccatgccaagctacctgatcaatgggcaggcagtttttgttattggcaccattaaaacatccttttttcctgctgccggtaaaaacagcataccacagcagccctacagaaaacggccaaactgctatatcagtgcccattcctacatctctttgctggtagggttctccatacctggtcctccagccacacaccaccagagatatcaagcaagtagcagctctggcccatggggaaactgaaagcctctctctactgcctctgcagtagaaatgcccatgctacccttagtgttac

SEQ ID NO: 472591 - DNA, 672 bp, Homo sapiens
acccactccatgggctcctgtgctgcccaagcctccccaacgagcaccaccccctgctccccggcgcccagtcccatcgactacccaagggctgaggagtgcgagcgcatggcacgggactggcaggcacctccacctgcagccccagcgtgggatccactaggtgaagccagctgggctcctgagtctgctgtagcactcactgcgaagatctgcagcttcactcctgagcccagcgagaccacgagcccaccaggaggaacgaacaactccagacttgctgccttaagagctgtaacactcaccgccaaggtctgcagcgaactcaccagaaggaagaaactccgaacacatctgaacatcagaagggacagactccagacacgccaccttaagagctgtaacactcaccgcaaggactgtaaactccatgaggccaattatcccatctgcgttgttcatcacagtaaagccaatacctgactctcagtcgagagggatccagtaagcacttctggaatgttaaaccactgttgtacaaccagaatacattttaaaagcccaggtcacttttcagctctagtaaggaagacattaatgctttataaaagcaactggggtatctcaccacagtgggaaaccacttttaaactgacatcaggaagccttcac

SEQ ID NO: 472592 - DNA, 1197 bp, Homo sapiens
ttctgtttcaggatcccatccaggatgctactttgcattcaaccatctacctctttaggcttctggtatctggcagaagaaatttctaagcagcaaagcattcaaggtatgactcaggtgctgttaaatggtttcagttttaaaagggaaacaaagcataaaagtttggaaattttgcagcctgacagtgtgatagaaaagaaaatcccattttctgaggagaaattcaagccagctgcagaaatttgcataagtaatgaggaacagaatgttaatcaccaagacggtgaggaaaatgtctccagggcatatcagagacctttgcaacagcccctcccatcacaggtctggaggcctaggaggaactggccagaaccagggtccctctgctgtgtacagtctaggaacttggtccgctgcatcccagctgctccaggtgtgaataaaaagggcaaggcactgctgaagggaaatgtgggatgggtgcccacacacaaagtccccactggggtgctgcccagtggcactctgagaagagggccattgtccttcagaccccagaatggtaggtccacagacagcttgcactgtgtgcctggaaaagccacagacactcaatgccagcccatgaaagcagccgggaggaaggctgtaccccacaaagccacagggacagagctgcccaacaccatgggaacccacctcttgcatcagcatgacccggatattaataacattcttatcattgtgtagttgtttactttattactaatgaccctttttcatttatggagcatatttctaaaacttttatggctacccttcatttcttcgggtgtatctttgaataactattcttatctttatgcctgttaacatctttctaattttccatttcctttatttctgtacttcatttgacaatttcttttgattaatctaccacttaacaaatttactcttcaaccacgtgtattcttttgtctacaacattggtttcaaattcattccaatcattctatatatattgccgtttctaggagttacatgcagtactttttctgaaggtactatctaatcatttttatggtatttttttcattacttatgctttgaacccacattttgtctctttaatcatttttaatatagtcattttatattctttgcttaattattctaaaatataaaactttt

SEQ ID NO: 472593 - DNA, 907 bp, Homo sapiens
tgaaccaatcagcatgcacttcctcccctctgaagcccataaaaccccgaacacaggagactggagagactccatgacaacctgccagcagagaggagctacccactccagggtctcctctctgctgaaagctgaacactcctcaagacaccttggtggggcgaaagagctgagctcaccaagccagggctgtgacaccctctttggggctctgtggttcctggtgtctccaacctgccatgcaccattgtgttccccagtgccagccgtggaagatgcttatggtgcgcctggtccagctgcaaccttgcagggagccagtgtccatgctggcacctggagctgcctgtcctgctgcagccagtgtgcctgggtgtgcaccgtggctggatcccatgctcacttgctcacatacccctcaccactctgcttgcctttggcaggcaggggtccgggccaaaggaacagtttcaaagagcaaccatagattgatgtattctcttcccatctactccctcctttgatttttggctatgcctttatatatctattttgttttatttgaaataatgcccatagagataatgaagaaaaacatatattcattctgacatcttgaaagatttttaagttgtttaaaaatgtattatttattaaataataaaattttattataatgttatagttacatcttggctatggtcactatcctaagagtaaggagaaaaagcaactcagaaaccattctaatcaaagaagaagaacttacagtgtatgaaaataattccatccacttgttaatggctttgggagacaaaatgaaatttgcttgaatgctgccttctctttccatttctccctaaacattttaatgcactagacattaaaaaaaatcgtaaatgtactt

SEQ ID NO: 472594 - DNA, 1024 bp, Homo sapiens
gaaaactttgctcataccatcacctctcccttggagagattttcccagctttctgacaaatttagcctttacaaggatgattgttacattttatcatgaatttgtgggcttttgtgaaatttcaacagccactctacccttccaccatctccaccttggccagtcagctgccatcaacattgatgcaagaccctctgccagcaaaaagattatgagtctgaagctgagtgatttttcaggactcagttggacttacacgtgctatttttacccagctgtcagtcagcttctggtatttttctggctgtcggttggagttacagtgatagcctcagaggatctgaatggcagctgctcctgttccttcctgcaggcagtttcccaaacttgctccctcaggtcacactcttgggcctctaagagccctgagccccgatgtggtgctgcccccggggccagcctgactcaccagagggtgcccttggcaacttaattaataccatcacactccttagctatactggctgtttgggatctagcatttcaatgcatttcattcatcttcatagttactttaaaggaatgtgaaaggtattagttggctgctataaaggatgtgtcagagactaagcatgtctttctttgcaaatgccaaagggctgaattttcaatttgagggtttccttccgatcgtgttcatgtgttatgtagattctcaaagttgaagaagaagaaaacaaaatcatagaatcacagaaaataagagaggtggaaaatgttctgcgtcttttttccagttaaaaaaactggtctcacattgtttgaataactcacctctaaaggtttgtaaatgcaccaatcagcactctgtgtctagctaaaggtttgtaaatgcaccaatcagcactctgtaaaaacgcaccaatcagtactgtgtctagctaaatgtttgtaaacacaccaatcagccctctgtaaaaacgcaccaatcagcactctgtaaaatggaccaatcagcaggatg

SEQ ID NO: 472595 - DNA, 616 bp, Homo sapiens
ctcaggctttctttgagaagagttgagttcatgaagactattcttaggaaatagaaagattaagtaactacactgagatcacacagctagtacgtggcagagggggatgcagagctgcctgactcctgacaccagacacctgacaccagcgtccaattgcctaactaggaagctgcaccacttcacatttcatctcctggagaataaaggcggcagtgcaagagattcagggaacggagaaattgcaggggcaactacagacacagaggacaggacacattcccagcagcaggaaatagataggagaaagtccaggcagatggcaaatctgcatcaggggagagtcagcagtgagcaacaggtgtgctggcagagaagacaaatacagcatcaggagccaggttggcagcagacagagtcaatatcagagaaatctgacaacagtagttttggaggccctcattttcacagctacagagcaaatactgataccactctgccattcatgcatacacagggtgaccaataaatgcctgaaatgctttgactttgactgtccaagcaggaggtagaaagaagtaatcaatttcatttagagttgtgagtatcattttgg

SEQ ID NO: 472596 - DNA, 606 bp, Homo sapiens
ccagcagcagatgccagcactatgtttcttgtgcagtctgcagaactaatcgtcctgaagcagcggccagagaagagacaagggcacgagcatcagaacgccatgcctttcttggacgtgcagaaaaggtttggccttaacacagatgggtggttgacaatccaaagtgctgaacagccctacaagattcctgctcgacaccatccttttgaaaaagaatggagagaatgtgcacatggaattggtggtatttggggagagaaagagtgcagaatagaatacgactatttcatagagtgtatactttggcagaaaatgatgagatgtaatggcatatctcaaaaaggagctgctcctaatctgaaacacaaccctgactttaatctcagtcctggaaagaaaagattaaacaaagccacagcagttgactatggctgccaatatgtaacatgtctgttacaccagatgaaaatcccatgatattgtaaggaaaaaaaaagattatttaacatatttatttttgttgtgtcttttcagaatgttttcctatataccctttgccaactgcctttccttagacttagatgccgggacacaggctgtggt

SEQ ID NO: 472597 - DNA, 665 bp, Homo sapiens
cagttgaggaggcagtctatccgttctccaagctcaaacaccatgctgggagaaccaccgctgtcttcagaactgtcagggatgtttaagtttgcagatatttctgctgccttttgttcagctatgccctgcctgcagagttggaggctacagagccagcaggtcttgatgagctgcagtgggctccacccagttcgagcttccctggggctgctttgtttacctactcaagcctcagtaatggcaaatgcccctccccctgccaggctgctgcctcgcaggttgatctcagactgctgtgctagcagtaagcaaggctctgtgggcttgggatctgctgagccatgtgcaggatataatctccttgtgtgccatttgctaagacagttggaaaagcacggtatttgggcaggagtgtccatttttccaggtgccatctctcacggcttcccttgcctaggaaagggaaatcccccgaccccttgcgcttcccggaaagaatatgagctgaatatggtcaacaatgtcatatggagtggagaagtaaaaagaatggaaactgaaaagggctaatgtcttgatatttatcaggtcattaatgacactgactatgaaagaaataagtagaacatttcagtccaaaggaggatttagaagatttaagc

SEQ ID NO: 472598 - DNA, 1327 bp, Homo sapiens
ggaagacaaaggaagaaatgctaaaggactgtaaacacaccagtcactactctgtgaaaacggaccaatcagcgttctgtaaaatggaccaatcagcaggatgtgggcagagacaagagaataaaagctggccaccagagccagcagcagccacacgctcaggtccccttccatgctgtggaagctttgttcttttgctcttcacagtaaatcttgctgctgctcactctttgggtgtgacggacacaccatctttaagagccgtatcactcaccacaaaggtccgcagcttcattcttgaagtcagcgagaccaagaacccaccagaaggaaccaattccggacacactaccaggaggaaaagcagtctgaggacccacaggaaagatgcacatgaaggggatacccgcctagccagccagatcagcccaaccaacccaggtaatcaatggggtaacagatgtcacagccagagtgacgtcacatcctgcatcttttattaatagaattagcaatgtcttgcgaaaatatttactatcactttaattctgggaaaataggaaaaagtaatctctcatttatgtgaatgttaatttgcttacaaaatgagaaggtagtttaactgtgacttaataataacagtgttttatttgtttcattacaacattataaaaacaattttatttggaaaataaaatagattttaaaagattaaatgtaatcactttaatgtaacatttcaaccaatattaactacttccttttctttcccttctgaacctgggtctttatatttaaataaatatatttatatttaaagttaaatataaactatttatatactggtggacattatatagttgattccactttttatccaaactgataatatctgcctttcatttggactgttcacactatttatatataattaatatagggaaggaaatccagaagatgtgcctatatttgacatgagtaaaaaagactccaaagataatttataaaattataaattattaacagtttatcttaaagtataccataattgctcattttgcattccaaagcacatgtaacatcagagtggtcaggctggtatcttctatttagctatagccatgtaaccaatggggtagtgtgttgcttactactgccaaaacccaacaaaacttttctatttttatggaagatatgagaagaggatagcttttgatgagatgtaaataagctgtgtctctggttactatcaaaatgtattaatccattatattaaccaaggcaaatcaagaatttgtaaaaatttgggtgctttgaagagttctat

SEQ ID NO: 472599 - DNA, 559 bp, Homo sapiens
ccaggtgccacctccttgggacattgcagctatatgttgggaaggaaagatgagccatacccttgtgtgaacctgtgcagcagggacactttcagcagggatgcagatgctgagaatagcactggaaaggctgtctctaagtgcatgtacaacagcccccagttgtgtgggagggatcctgtagttcaccaagaacctaccgatcctctgtggctgccagaatcagagcagattctgggttatgtttatggggtatttggtgatgcagcaatacaagggctgagaatccctgggcccgatgccaggtggccagtgagagagagaaagagagagacagagaggaaaaaagaagatcttacagtagccccagggaacccaaaagagataccagagggtgcaagagattgcaagctgctgaaaaaggaactctgcaattccactctaacttggaatttacacatgacaatttaattgcaatatgcaaagatgctgtcttctattgggttccctaaaaagtacatcctggaacctatacttcatttagacggtgccttcagat

SEQ ID NO: 472600 - DNA, 782 bp, Homo sapiens
ggcatagataagagccacccacatactgagttaagatccaacagcaaagagcaagccatggtacttacagctgccaatgtcaaatataattgtgcccaccagattaagggtggatctgccttccacaccccactgactcaaatgcttatctcttttggcaacagccacacaaaaacatacccaggattcatactttatatccctcaatccaatcaagttgacactcagtatttcaccatcgcaactagcatggtgaaacctcctgcattttctcgggtgaatcagcccattcagctggaccttctggtagtaacttggctgaatgtgccgacagtggctgctgacatctggctgtcatggtggccacctcgatatttcttcagtcacgtcctcaggcggtgtgaggaaaatgtgttactgtggaggcaccggaagtcttacccaccactgcttttgcacaatccatgcaacagtcaacaaaatgaaaaagatatgacaaaaggcaagaagagctccaagtatgaaaaatagaacaatggtgttagggttgcctatacattaaaaaaaaaatctgttccaacacagagggaaaacaaacctccaggtacaaagtagatttaactaagacataaagtttgagggatattttcaaacaaagaatcaaccagtatatgtactcattatgcccaacacagagcccccctcaggcaacacagccctctttgtgacttaattaataaacctgattttacttgcctataaatcttaccaggagtaggggg

SEQ ID NO: 472601 - DNA, 637 bp, Homo sapiens
aaactaatagttgtcacagattattcaaattctaaacctttccgggaagaaagaaatgcagagccactgccaatcagaatgatcagctgtgggtggggtggctgtgctgtgaacccaagctgtgggacccttcctggtgaagaccaggatggatgggggtctcatggggaagacagtctggcctcttctccatatgagagacacagaagggctgccaatgggaaggttcagccaggagtgggcctgctggagcagggggtcaggggttcacaggaaagagaaactgggctcctttctgtatggtggctgcaatgtgctggaggtgcgagcaaagcaagcaggttctttgttcctcaacccaagggcagcaaagatggtactactgcagcagcaatggcagagaaagtctgtgggttgtctctgggtattccactccagagaaaagcggagttgccaccaactgaagttatcaacctgacggcagtagggatggggcctgcagcagcacagcaaaggctgcagtcctgttggttacctctgggagcaccaacccagagaaatgctgagctgtgaccagttagtgtgctctgaggggatagattagctgtgcttgggtcctagggcagtggcctttgcc

SEQ ID NO: 472602 - DNA, 626 bp, Homo sapiens
caagtagaagccaaagactatagaagtgacgttagacaaaaagcaaattcgcgcaattttcttattcgagttcaaaatgggtcgtaaagcaggggagacaacttgcaacatcaacaacgcgtttggcccaggaactgctaatgaacgaacctcattggctggaccaagaagaagctccaaagcacttcccaaagccaaacttgcaccagaaaaaggtcatggtcactgtttgcggtctgcggccggtctgatccgctacagctttctgaatccagaggaaactgttacatctgagaagtatgctcagcaaatcgatgagatgcaccaaaaactgcaacacctgcagctggcattgggaaaatgcttccataatcagcaggatgcagaaaatgctttccaagatccagtgccccaaatccccactggtcaaccccaaccagaagccagaggacttggaagctacagtgtggtgtgttcagaccaacctccaggtggaagtgtggaacaaagaatggaaaatggagctgaagtggcaaacagaagtcaaccaaactcagtcaaactcaaccaaacatagtcaaccaaatttacaattcaaagtgtcacttcttggcctgcattgggtt

SEQ ID NO: 472603 - DNA, 705 bp, Homo sapiens
gagttcagaataggtgatgtgaagagccttgagagggtcagggatgggggttgggagaagctttgggattgctgtggaaggaagaaggtgcaagtctcagacactctggaagggtcggggacatagtcagagaactgtctgttcatcccatcctgctgcctttaaatgggtgtggcctgcctgtgcaacaccttccaaagaagtgtatgaacatctcccaggtatcagtttctgtgagattaatcctgctaccctactcaatcttgctaccccagatctccctcctctcactctgtccaccttgaccagtactgagcccctttgtcctgatgacccatttggacacacttctctggtctcccctttgctggacctcacccctgtcatcagccccttccctgaccgtcatctgactcccaggccttccaagggcaaaggagccatggcaacctgcaggccatctcgccacacagctgcctacggtgtcaagagagagcagtgtgaggctacccaaaagggagctgagagccagaggaaaaataagttctagtggtatttacctgtgtttcttaaagggttgtacttttttaaatgggattaatatattaagggtgttcatatatagtactaatatgaatacattagacctgtgcttcttaggaatttcacagaaatttcacaatcattaaggtcacttttctattt

SEQ ID NO: 472604 - DNA, 1051 bp, Homo sapiens
gcccacactcctcagcccttgggtggttgatgggactgggcgccatggagcagggggctgcactcatctgggaggctggggctgcacaggagcccacggagtccccagccctgccccgcgggaaggcagctaaggcccggcgagaaattgagcgcagcggctgtgggccggcactgctgggggacccagcacaccctccgcagccgctggcccgggtgctaagctcctcattgcccagggcggcagggccagccgccgctccgagtgcggggctcgccaagcccacgcccacccggaaatccagctggcccgcaagcgccccgtgcagccccggttgccgctcgcgcctctccctccacacctccctgcaagctgagggagccggctccggccttggccagcccagaaaggggctcccacagtgcagcggcgggctgaggggctcctcaagcgccgccaaagtgggagcccaggcagaggaggcgccgagagcgagtgagggctgtgaggactgccagcatgctgtcacctttcactatcttcactaaaccatattggtgttttatttactaaaaattacacaagcaaagatcattctcttttggtctgagttttaagttttgtatactctatgccaaattttgacaccttatagtatctgtcagtgataagcatgaaattgcttgatcaataaatgcaaagaaaaatgtatcctggcaaatcttcaggcatttctaatgttactttaccaatatttttaaggctcacttatttatcaaagattttacttgagtcacgtaaacacgaaaaagcatttgaatagtctccttttttctgttaaagcacttaagaacttttaattttcttaagccaattaattagagttcttttatatattttcagtagtaaaacactgtgtacacaacacataaatacatagatgtattaagcatgtcaataacagtacatcttatagattcataatatctcattttttcctatcttagatttgcaaactcttgataacctggtttattaccctggcagttgt

SEQ ID NO: 472605 - DNA, 691 bp, Homo sapiens
gcatcacaggctttttggtcaacgatgggccatgtatccaacagtggtcctgcaaaaccttcagaaggtattctggaagaaggcattgtcatcataggagatgacagctccatgcctgtttttgcccctgaagaccttccagtgggacaagaaatggaggtgaaagacagtgatctagatgatcctgaccctggggacatggatgaagctggaaaccatcattctcagcaaactatcacaaggacaaaaaaccaaacaccgcatgttctcactcataggtgggaactgaacaatgcgaacacttggacacagcaagaggaacatcacacactggggcctgtcatagggttagcggggtggggagggatagcattaggagatatacctaatgtaaatgacgagttaatcggtgcagcacaccagcatggcacatgtatacctatgtaacgaacctgcacgttgtgcacatgtaccctagaacttaaagtataattaaaaaaaaatacaaaaaaacacaaaacaaaacaaaacaaacaaaaaaaaagaattacccttaaatataatataaacaaataggctatctccttctgcttcttgggtttaaaagccgtaagaatgtttttccttctatagaaaataaagtagagctcttgctaaaccatttctagggatcataaagtagaatcttgct

SEQ ID NO: 472606 - DNA, 582 bp, Homo sapiens
gcagcacagtgggctctcttctgaacagctgatgctgacttccaacaggaaacactaaccctctaatcatggccctgccacaagaagagagtccaggagacgtatcatttggttctggtctggtgtgtcccagttcccctcaatctgtgctcagggctacaaaggggaaagccatctgtagcaggccctgcctcaggcttcccgtgaagacgtctacctgtgagcagctggataaattcactccacgggaaccttttgtgggttgtactgctcaggcaacttgcagttttctgggggaaagtcagctcacgctacatttatcaccccctgctgctggctacaattcaacccacttcgaaccactgagcagaggtgctgatgggggctctggcattcgaatttcacatcataatggaagtgcagggaagcaaaagacaaatgtatcagggccgctccaggtgtccactaaaaaagaggtcaaaaagtatgacactgggtgatggggactaaatatgagtatatttgcaataataaaaatatacagttgctccccccacaacttttatattttttgcctctggt

SEQ ID NO: 472607 - DNA, 792 bp, Homo sapiens
gctgtgaggactgccagcacgctgtcacctctcaacttggtatggttttatattgggctaacctacaagccagtagatggtgcttatgggcagtgagctgatctgtgaagtacacagtggtctgagttccctgctcagctctggagtggggagaggggtacaggatctctgtgtaggaacggtggggcagctcaggttgctcatccaggcgagtaggtgccccaaatgcctggagatctgcctgagtgtggagcagatagggcctcatcgcaccaagatctcagggcagcaggccaagatcttggagccaaagaggcttcccagctccacatgtaggcacacctctgggtgctcggtgactgctgaaggtattctccctcagcaccctgcagggacacatgcagacaggttccaggtcaccaagctggccctggctgcaagtctcgtttcccgggagaaactgggcccagccaaaaggaacaagcatagccaggccatcaggacagcagtgccagtgagcaacaacagccacggctctgatgagccagtgactgcagcagctctggcagagaaagctgtaaagtaattagtgcatctgaaaatccatttaggcatctagttatatgacatctccagatggggagagcagcattctgattctgaaggacacatattttaagtggattaagaaaggaaattattttaaatgtaggaaggtataattaacctgaggaccctggctgccataagatattgttgaggggaaggactaacggaaactcagaacccatt

SEQ ID NO: 472608 - DNA, 471 bp, Homo sapiens
aggacaggaaatgagaggtgcatgatggtggtgaaggtggtaggaaatggaagttgtgatagagatagtgatagaagcagagatggaagtggaggtggaggtgttagaggtggtggtggaggtggaggaggtgagaagacggaagtggaagtggaggtgttgaaggtggtgctggaggtggaggaggtgatgatggcggtggaggattcctttagaaaatttgatgacatagaaaatcctaaagaaaaaggaaaaacaattacccagaactgctcagaggtcaccactacttacctgtaccatgagcctatagaggagaagatggaatggttgtacatgctgatgttcggtgttggtgaaagaaactctcaaagggacagccaaatatttaaaatcctcaggcatacacattcttattctgacctgcctgtttgctcttcctaagacagaaagttggaatcagtgtttttc

SEQ ID NO: 472609 - DNA, 557 bp, Homo sapiens
gtgtcatttttcccaattcaatatgagacgaagaaccaacaggttcctctgttactgggggtccttgcttccagagctcccaagatggtggcgagccacttccaaaatggcggcaagcttcgtgttctctgacctggggttcttggcctcatggattccaatgaatggaatcttcggccatgtggatgaacccaggcacttagccgtgcaggaacaatggcaagcctttagcccgattggaagtggcagtaggtgcctctctggatcaggagcacagcggacaccctgccggatccggaggaatggaagtcagcggtgggtctgcgacggcggcaaacagcagtggtggacggtgagcgaaagctcagctcaagccgtaacaaacacagaccagaagagtgcagcggcaagatttaatagagtgaaatagagtgaaaacagagctcccacacaaagggaggggacccaaagggggttgtcgttgccggcttgaatgcctgggtttatatccgatcactgtccctcctgctgtgctctcaggcaacagatgattggct

SEQ ID NO: 472610 - DNA, 1710 bp, Homo sapiens
ggacacaagattcccctcagcatccacatcattctgccgatcgatggcctgctggtatctgctggtgcctgttggtgtgctcttcagctcctctacatgtccagctgctcatttagaaaagagaagcaggccattcaagggcgaagagaattccaacagcacaaatgctatgatgattggagaagatgccccgggagcaggaaagacactcatctacagcatggcccgtggtatttcccccaaagttaagtgggaacttcacttcctgtttagaggttgtcagggagcacagagagcattgcagagtctactggactcatggtcaagagacctggtgctcctcaagtgcctccatttgccagtgctgtggctaccacacttgcaggctatttattttacattagaacctagatgcttgttgcctctggcggactccaaagacactatctctccaaaaggctttgaagaatgatctatgaaggacgctacaaaacatctcaagatcaattgctgtaattatcctctgaataattttctgccattattcaggctgtacatattgtacatgaaaggctgtgttcagccaaaccagaagcttgctgggaaaaacattttagctaatatattttataatgggaatgtctttaaacttaaaaatgtggactcttgcaaattgcatggctcctctgtacgggatctaagctgtgacaaaatctgtgttcacaattgtaaaaataaaactaaggtactttctattatttatttgactccatccttcacatctcttcagatatttcacaggaaaaaattgtcacccactttcttttaatcagtctctcaaccccgttgtgtgtctctaacatctgcatttactgtatttgaagaagaggttaaaagatcagaaatgtggaaatgaaccttttagaattccatatttaccttaagaacttaaggtaaatacaaccagagctggttaaaaggtgaaaaaacaaagtcaaacaccaagaaaagtacagattgtaccaggactttttgctgctttcgaaaatttggaattattacttggaaatgtcttcaacaaaagcaataaaaacatgtcagaaatgtaaaacatcagcctgctccccatacctgcttttaaaaattgctgtttgattgactccacagggaacggcagaagcaaggcaatgggccttacacaacgaaacacttaaatatgattgaggaaaggccagggtctgaggctattgcagtgaagaatttattcacagtgtttctaaaggtgtataaggaggcgaggttgtaggaaagggggaaggaaggagaagaagaaatttgttggcaaaggtggagttgggggcatacaagagcaaaatatggagaaaaacattttttaaataaaacaaaatacccttaagtcagattcctttatataaacctttggggacccaataaaaagctatgactaaatgaaagtgttaccaaagcagatggagaataacatcagaaaatcaaatgacacatttaaaagggcaaaacatcaatataacctaaagaactgatcaaatgtgtcattttgaaatgcacaccaaagcaagaagatcatgaaatgcattaaaatggtgaactggggaatggagagtgggcgcttggttgactcccgccatgtagaaaatcagacgttatgtgctagaatacatgaatataaaa

SEQ ID NO: 472611 - DNA, 560 bp, Homo sapiens
catcttcagaagattctgagactttaggaatgaatcattgctgtttagatgcagatttcggggggttgctgatggttgttctagctgaaacggctgttaaatttggacttcatggagtatttgagaagtctaaatttggaacatttggcaaagactggagacttggtcactgctgggcagatgctactggcattgagtgggtagcgaaactagtgcggttcctgaaagtggaccaggagttcaatgtggaatacttttgttctccctttacaatatcacaggaattacataagcaattgtgtaatgcacaaaacaccagaagccgctcagcttcctgccagcagacctatctatacacccccgtaatatttcctttccatcttgcctgcaaatttagtattgaaatatgctgcattttctttcttcaccctactcactcttataccccagtaagctgcacagcacctttctaggcactcttttttcatggctttgagatctgtcttccttttcctactccttatatctggttgttcctcagttgtcttctctgggctttc

SEQ ID NO: 472612 - DNA, 466 bp, Homo sapiens
ctgtttcagtatgctggggggttcgctccagtccctagtcacctcggattttccaggacctggaggtatcaccagtgaaggctgcaaaacagcagagacagcagcctgcccctccctctgggatcttggtcccagggagggaggcccaatgctgctaccgtggctggctggaattccaagcaagtggatcttatcctgtgaggcgccatggaagtggggcctgcagaccgtggctgctcagccccctggattcagcctcttcccagagatatgttacggggatctaacctcctgctttgccagagttgcagctacttttgccaggaagcctgaagagcatgaatatctgaagctcccaggcatctgtgcatgcctgagcagctgctctgctgagactccatgggactctatgtgtcagactgaaggccctggtggaatgggtttcctgacctgacggttgcaaaga

SEQ ID NO: 472613 - DNA, 635 bp, Homo sapiens
cgacacttcttcactatcccatcctagagccaaaaaacaaaagcagggctgcagcagcacatgctttcatgagggcaggggatgataagcttctaaatggtttctcaggttccagtggagcacacagtctgggaacgaggagattgcccaacccgatccactactattggtacttcttgcccaacccaatccaccactattggtacttctcctgggagactgaagttggacttaactaccaggctgctaccattacagctggcaactaccttgcagaccacttggacccagaggaccatcctgccactgacactgctaacttccagaccacgccatctgcccaggggcataagaacccatccaccaggctgaccccttgctgctactactggcatttgagtaagccacctggagggccaagaattagcctgcctgggcccactaacattggtgccagcacacaccactcagggacccaaggaccaacatgcttggcccaccactgccaccactggagcctaaagactagctcacctgccattctagtccccagcaaaacttctccacatcctccattaagccaccaagaaaattacagataccactgacactgtttacagccaaagaaattacat

SEQ ID NO: 472614 - DNA, 592 bp, Homo sapiens
ggctctggagccgtacgtgacagaaatggctcagggaactggtggaggcgtgttcatcacgacggcacgttccatgtctaacggcaagaagctctctgccagtgacctgaccaatggtgtggatgagatactggccacaagctccaacctcagtacaatggctccagggtggagaccccggtgtgagggagggatctctagaagagcatcttgcacaagacagaagatggacaagatgatcttcaggggagcttcccatgctgctatccagtgtgctggtgctgagctgattggcaatcctttccaagatttgcgaaatagactcatcctgtttcgtcttatttctattatcctggacagaggcagcagctcttgtctggaccttggtgcctttgggcatgtgaacaacaaagcagaaagattgcaaggatatgctggggcagtgaggacccctgagtgcccccttcgtctttccagggtctcagaaagactcagaaccatgtgatcttcaagcttgcaagaaggatgaggaaggggtgatggatgcacaggaacctgagagtccaaacaaggaaaatgaagagtaacccta

SEQ ID NO: 472615 - DNA, 572 bp, Homo sapiens
gccagacttgctccgtgaatagccttgtgtttcatgcctattcctcaatcaatcctgggcgaggggattgccatgattaatttaattgacatccctcacccctatccccacactgacactggggtgtggaatgtgaaacatgaagaaaatgtatattctgttaaaaagaaaatgtatcttctggagaaagaagagggtgctgtgtggttcacaacaggctctccccagtgtattgggttcatgaaactgagaaatgcagtcctgggcctcaaggctggaacttgctgctctgttactcactttggattcacaccttcgttcattcattccataagcaatagatatttacggaatgcctgtgcgtggtgtaagggacataacagacatgtggttcctgccgacctggagctttcagtcttaatagtaaccatgtctgcacatccctctgtggggagaagctcagtgcaatccaggaactgtcacagtggagtgcagagcagagatccaggggaggacagcagggattttgagaggttaggcaagggccgaatctcgtagggtttgctcatgtt

SEQ ID NO: 472616 - DNA, 1078 bp, Homo sapiens
tctcgccgtctctgctgtgctgctctgctgctcttctgcttgtggagcctggcatttgaggtttttaagggtacagaatgggggacatgccaacgctggcagagattcatgtgtttactgtacagctcgcccagttaggctctgctactcagcagagcagcaatgtggaattccaaacagctgcaagtataaaagcacattttcaagatatcgatgtggaatcaggggctttggtggtggtctaccaagaagtatacctaatctcatttcagtctacccctaatggcgagcaccgttgctgccaagaactcatgaaactggattcccatttggccccttctgatcagactcttctggacaactttgcctgcttggaaacaggcggcagttatgccacgtcccttggacttgtctatggctgctcagggaagggctgtgtctggtccgtggacctatttcctgctgccagatttaagaagtttgccacagaaaatgaggcctgggcctttgtcaggaaatctgcaagcccagaaggttcagaagggcagaaaaataaacatgtacaagaatcacaaatgaaagccagcaagggactctgtgagccactgaatggagatggagatgaaagtgcagagtcttgtgcaaagcctgtgaagcaaatcatagagccggcacctcgagtgatgaacaaaaaggactttgtggcactggagaagctcagtcaaggcatggacattcagtggatacttgttcctggtcatccagggtgtattggcaatgaagaagctgatagattagcaagaggagctaaacattctgaagactaagcaaagtgaatttattacttgggaaaagttgagccagtggcagttttgctacttttgcttactgaaacacaacttatgagttggccatttttttcttgctatggaaaattagataacaactactgaacaagctcacagatagtaacttggaaatatacttaaaacagaggtacatatgatcgtttactactatttttcttatttccaatagatagaatcactataaatgtcccacattaagatttgtgttc

SEQ ID NO: 472617 - DNA, 979 bp, Homo sapiens
catctgtatatgccacccttcaggcttgtgagagtgtgacaggatgggctacagccattgtacagatgacttacctgatagtgggatgggtacattcatggcaggagagtttcaagaggtcttgggacctgtagccctaattcaagataaagccatggggcctgaggcacccctagaccttgagccatcaccatttagggaagtgcatcccctcattcacaatgaggcatggcacacagatgggtctagtcaaggtgctactgctgcttggactgctcttgctgtccaacctaatactgacaccatatggtttgaaactaggcgtggacaaagtagccagtgggctgaacccagagcaatgtgcatggtgatcaccaaggaggcgatacccataaagtggctagtcaccagcccatgtggggccaagtcatgtggcaagacctataagagggaggatgaccttctctgaccagccaggttgtatattacatcaaattgttgttttaattaccaggtttttactagttgaaaattgactgttattaaaaaaccatagtatattacatgtaaggttgatattttggggagactaggaaatgataataaaaacaaagtaaatttagtattcagatttggaataaggtgcacatgcaaatatatttacacattttggaaataatttataataatcttgtggagaattaccccagactatttgaaatatgattaaatgtggcataggtccacagttatctgaacagttattgtgcaggatcattaacagttggtgacttgattttaaactgttaatttgaaaatgaccttcaagctaggtatgattgatatgggtgacattaatccattaatgttcgcagtgtgacatttatccaagttactgtaatcaaaagacagccaactattagaaagtaaaagggagtgtttttgtaagtacacggaaatgtctttctctgtgtagaaa

SEQ ID NO: 472618 - DNA, 615 bp, Homo sapiens
gctgcaggcgttcaataaccttctcaagacccaggaaggggtaatgtttgaatttgagtccagaaacaaatgcctgtcccaactgaaaagcagtcaagcaggaggaattccctcttattctggggatgttgtcctgtctttccagactgaaccaatgttcatcttgcgtatgttgattaatgtctcatgtctccctagaatgtacgaaagcaaactatgctctgaccaccttgggcacatgtcgtcagaacgccttgagactgtgtcacgggcacgcatcctcaatgctggcaaaatcaactctaaattaactgagacatgcctggagatctgccttagtgtgaaacagacagggccccctgcacctaggtctctgaacaggaagggttggtgggtccgactgccaatctggtctccagggcttgggaaaatcaaagtgctctcctttagcctgagttgcttggatccccagtggaaagggccctctgctgcaggtctgctggatttcgctggagatccactctagaccctgtttgcctgggtatcaccagcagaagctgcagaacagcaaagaatgttgcctatttcttccaatggaagcttcattccagaggg

SEQ ID NO: 472619 - DNA, 820 bp, Homo sapiens
gaggtgattggatcatgggggtgaatctctcaggaatggcttgggccatccccttggtgataacgagcagatcgcggaagctcccacaatcccccgcagcaacggcgctgaagactgaaagttcaaccgaagataaagaacaagaagagaagtccggtgaagatggtgagaaagacacaaaggatgaccagacagagcaggaaccgaatatgcttcttgaatctgaagatgagttacttgtagatgaagaagcagcagcagcagcactgctagaaagtggcagttcagtgggagacgagactgatcttgctaatttaggtgatatggcttccgatggagaaaaggaaccttcaggtactgtgaaaaacgatgcaagtgcttcagcagcagcaaagaaaaagcttaaaaagcgtcgtttcccagggagtatggaaggttttctcactctagatgaggttggtgatgagaaagatttggaacttcaggaacttcgtaaatcgggcatggcatttaaatctggtgacagaaatgatgatggtttggttgaaattaaagtggacaagatggaggaatttaatcaagaaaacgaagcagcattggaaaatggaattaaaaatgtggaaaacacagaaccagatgtaattttacatttctgcattttaaaaacattttggccataatcctagatgcatgcttctatttcatgtacctgcacatgtgacctttgtgaacagaaatttgcatgtataatttgtgtttgcttgtaactttctggttatatactgcttacatctgtggattcaagttactgaagtgaata

SEQ ID NO: 472620 - DNA, 791 bp, Homo sapiens
caagaagagacaaactgggttattagaacacatatatcaaaatgaaacaaggggctgccctcagcctcttccccatccttcctcccttgctcattggtgcccaaagtctggagggggctgagacagcaggggtctggcatgtcagtgccaccctgagcatgtgcacacttgatcaggtcatgatggcacctggacttggctacagctttgcttctcactggagcaggctcctggagccaggggaggccagggagcaggagggagcacttccgagcctgtggggggcagggcaggcttcctgggctcccgatagtgcagggaagcttgggtgcagtgccacaaatgggcagctgcagctgtgcctgggagcctggggctcctgcctctctgacttggtagggggcaggacgcccatgggctccatgggccatgcagccttggacacacctcccctgctgcagcctacatctttgcagccgcggccactgatgggctgccgctgccatcacttgtatctcattttctctaacatttctggttttctttgttaatatcaccattttactatctcagttatggtcccttttggctaatacatcacatgggaattatgtagttttcaaaagtttatgtagacatttcagaaaaaagttcaatctcttgtgtagtgaatgtagtatctaaaataaatagaaaagaaataaatagataaataggttgaagaaaaggtgctttcagagtacaatcttctaaaaatatagaaaacaattgatagatcaagataagcaaaa

SEQ ID NO: 472621 - DNA, 816 bp, Homo sapiens
aaggtgtcctttgaccatttcccatgaatgatcagtctcatcataggaatacgcggtgatacagaaatacgaagtgttccaatcacactgcatttgcatgcgatgttcaagactcactacccgatctccaagtcaaatagcagccaatatttgatcaatgccttgttgagaattccacatctggttggaattggcttgccaatcattagcaaaatgagccgtttgaacagattgatggaggattcccaaggtctgggcaaagttaccagaatccagattccttctcgagctagaaccaacattacacttttcctggagtcaaaatgggaggaaatctacattagccatgaaaatgaccccagtctcaggcgagtgtggctgcaaagtagaaagattcaattgcatgggcataagaactactacaacatcctccaatctcagaactatgtctgagaaaagcttgccattactcttggcaagaataaagaattatttctctggagatcatggccattatgtattgtcctgaagactaaagaacaccaaaatttgtgttcttctaactgttatcaattcaagcaattagaacctctctaccatctgctgaaatcaaagtaaattaagagagagaaagagagacagagaacaagtacaagccatggccctaaacctacaatggcctatgggttcctggtatgtttccagttcattttctttctctcatttattaactgctgtcacgataacttactgtttcccctctccatacacctgtgctaatcattgaacgtatcagacattcactctccttaggaa

SEQ ID NO: 472622 - DNA, 633 bp, Homo sapiens
acccgggaggcggagcttgcagcccagaggcctagcaggaaaaactggtttcaggggctgggcccagggctactctgctgtgtgcagcctagggacttgatgccctgtgtcgcagccactctagccatggctaaaaggggtcaagggacagttggggccatggcttcagagggttcaagcccaaagccttggcagattccacaaggtgttgagtctgcaggtgcacagaagtcaagaattgagggaatctcctggtctttgggttgtaaaaactgtgagaaaagcataggaaaaagcatagtatctgggccggatagcactgtccctcacagcacagtgcctcacggcttcccttggctaggggagggaattccccaaccccttgcacttcctggaaatggtttggtttaccctgagaacaagaaaaatacaaggatgtcccctctcgccactcctattcaacacagtactggaaatcctagcaagagcaatcagacaacagaaagagataaaaagcacacaaataagaagaagaagtcaaactatctttcattgatgatatgaagatatacacagaaaaccctaaagagtccaccaaaagcctcgtaggactaataaacagattcagtattt

SEQ ID NO: 472623 - DNA, 743 bp, Homo sapiens
aagcagctgcctgcctacttttggctggaggtgagtttccatctctctctggccccgcctcagctggtgccaaacatgttcctgattgcctcggaagaactgcctttgaaatttaacattggcattgggataggatcagcttccctcaatttgggaaatttctatggaatttattgtttgcaggttgatcaagcccaaccaacagagagagcatctcaaccatttcagtttggacatttgtatttgttgctgcaaaagttggattgtcttctggtgattgtgtgtgttttatatagtcatgagaaattagaatttggtaaagtgatattcttttgcaatactgtttggccccgatattgtttggaattctggagtttgctattgaatgggaaagacagatggagttgcatatatccaggcttttgtgctgctgttctaagcagggttaggcctgcttactatgcgatgttttcctttggtgttgttaggcccctgtgttcttttgagtctggggaggtttggcctttaaaaatcaaacttgaaactgctttacccaaaattttggttcacagccttaactggattacctattggggcaaacaaagtaaaactgaaaactgccactgacaagcatcatcattaaccctatcagaaagaagaaaaggcaaggcagtctgcaagggagatttagtgtgaggtttccatgctggatatctatttatttattttttacatttttgcaa

SEQ ID NO: 472624 - DNA, 475 bp, Homo sapiens
gcggcttcattcttgaagtcagttcttggggtccccaattccaggaaatggctttttggatgacatttctggacctgccctgggccagaggggagtccagtaccctgaggggtgcatcacagtcctggcagcattcaccacaagctgagttaagagtccttaggccttatgggaacatcagtggtagtccggcagtactcctcatggcgggtagtggcgatgtccacagggcagtaccccagtgtggactccatgtgcaggctccaaccccacaactgccctctgtactggctctttatgagggctgtgtccctgtaacaggcctctccctggatatacaggctttttcatacatcctcctaaatctaggtagaggttccgaagcctcaactctttcactctgtccacccacaggagtaaaaccacatggaagccttgaaggcttacaaccccctgaagaagagccctgagctgt

SEQ ID NO: 472625 - DNA, 648 bp, Homo sapiens
aggatcaattgaccctcaaagaaatatgagtttaataatactggaatgtgtaaggaaatttgagacagcagagggttcagtacaagacaggaagatgcaggaaagtttggaacttcttcgagacttcttgaatggctttgaccaaaatgctgatagtgatatggaaaatgaagtccaggctgcggtattctcagagggagatgaggaacttggtgggaactggagcaaaggtcactcttgctatgctttagcaaagagattggagacgttttgctcctgccctagagatctgtggaactttgaaattcagagaggtgctgtatggtatcaggcagaagaagtttcaaagcagcaaagtgttcaagatataacctgggtgctcttaaaagcattccgttttatatattcacagagaaggtttgaaattggaacttatgtttaaaagggaaacagagcataaaagtttggaaaatttgccgcctaaggatgcaaaagagaagcaaaacccattttctagagagaaattgaagtcagccccagaaattagcataagtaacaatgagccaattgtaaatcacaagacaatggagaaaatgttcccagggcatgtcagagaccttcacagcagcctctcccatcataggtttg

SEQ ID NO: 472626 - DNA, 1417 bp, Homo sapiens
aaggatcctgtgacactggtcgtgatgtgcgtgaatgccaatttgccacaatgtggaatgtgtaagctttgtgatgaccaagtcggggagaccaagattaatgtccataggtcaggggatcagagagaggagttgcacaaaaagaattccagagatctgcagaaggtgccttcaagcattcagataagtagtgatcagtgcacgggtgtgagggacatggatgaagctggaaaccattattctcagcaaactaacacaggaacagaaaaccaaacagtgaatgttctcactcataagtgggagttgaacagtcaaaacacatggacacaaggaggggaacatcacacaccagggcctgttggggggaagccaagtattggtgaagatgtagagaaaagggaacccttacacactgttggtgggagagtaaatgggaataagttattatgaaaaaagacattatagtaatttgatcattgtcaataaaaatgattttctgcattttaaaactatacatgaataattatttaaaatagcagataatcaataaacagttcattattaattttaatatgaatgtttaatgtgttgattacttattctaacagcatttttttaagtttaggcaaatactttaatacatgtaattgataatattaatttaaccattcatatataattattaaaaggctaaaacactatttttctaaaaaataatcaaattcaactgaaattaaatttgtagtaataagtcatattttgcactatcatacaagctatagaatagctctatactgtcagaagttttctgctctataagatttgattgatgttatatagtaattgattgtaagaataaagtaaaaaatatttaacatatgttgatttaaagaaatattaaactatttttaaaagagtgtgtttttcctctgttttagggcatgcagtaaatttagcaataagattctgattgctggagggagactgtggctttgcagtgttgcctgactgtgatggttaatattcattgtcaacttgattggattgaaggatgcaaagtattgttcctgggcaaaatatacttagattttaagataacttttttctgttccatgtagttgaaagaatcctgactgaacagaaattaacatctttagaatggatacagcaggaaacaacttgagaacacatgctagtacataaaaatgtgacagatggaaaatatcagatttccaaattcatagtattgatatttgtaaaatgctatgtatggaatagaaaaagagaaggatacagatgcccaggaataactgtgaaaagctgaagaagatagaattgagatgagaactgaagaactgataagatttgaggattggcttaggatcatatacactatgtagtttagaatgcattctac

SEQ ID NO: 472627 - DNA, 664 bp, Homo sapiens
tattccctgctaggaacaatggctaggttgaaactagacttcccagcacagccatctctccactctctcctcctgtgtgtgctgccaacctcactgcgtacgctctggtatgaaataattattagaaagtactttgtaagtttcagatactcaagcttgagggcttcagtagatgaaaagaattggagttgctttctttgttatggtttcagcatggaagcctttccagttgtgagtaatttgctgattcattgtcaagaggagacaaatgaaacaaaagggaaaattcgtgtgctgcttaaacacagaatgaacgagtttggtgctggtgagattgtgaacaaatgggtcccatcctgtagggaagaagaaacacatcaggccatttttggctcctttataagacacacatggtatccagtctggctggaacacacttcaaacccatctttgtatgaataactttttacttattttaaagcatcttctctcattgctatgagaatattctaatttctaaaattttttgcattatcattttctcttctgaaatcttctgtgatctatttgatttgatctcttagattttcctcacatatttattttcttagcctaaatcattataaagatgattgaaatgttatgttcatgtatgggacttgtc

SEQ ID NO: 472628 - DNA, 790 bp, Homo sapiens
agtctaggtagacactttcactggatagaattcaggcctgccctcggaatgttacagggttcccgtgccgcccctaatcccgctcgaagcagccctgagaaacatcgccaattatctctccataccatcccccaaaattttcgccatcccaacgctttaccactatttccttttatttttcatattaatataagaagacaggaatgtcaggcctctaagcccaagctaagccatcatatcccctgtgacctgcacttacacatccagatggccgatgcagacagcacacttggggaagtagaaatctctggccacagatgctgcgtgagaaattaccactgggccacagaatccctggaggagccagcatcagcttccaaaactgggagctaccctgtgagcaatctgtatacaacactgggcccaggcggaaaagaactgccagaaataataacttcaaactccaaaataagagcgaattcaccaaggaaagcaaatgtaaagaaagaaatgaacggacttaaaaatatctaattagtgttcatagttggatttaagagaattgcagtgataaaaacaatagcaacttgcaaagaaagtgaggcaatcagagcaagaagcgttcttggaaatagaaagcatgattgcaaaacttaatagctcagtaataattcagtaacaaaatggatagttctagaaactgaatttgtgatgacccactcttattaaaattatgggaaagggaaaggctaaaacacatagaaaatggtaaagtacatgcttggcaaaa

SEQ ID NO: 472629 - DNA, 648 bp, Homo sapiens
ttaggaaaaagatggcatccgatgtggacagctaaaacacaaaaccccagaccagctttccttccttctgggtgtggggcaggactgtctctggaatgggggtcttatgacctacagtcaaataaggtagatcagaattcgtatgttgaagccccaaccctcaatgtgactgtatttgaagacatgacctttatggagctgacatatgttagtaggtcatttcaatatcgaaaatatgatttgagaataattgtgcatgctaagtgctacactgtgactaagatgatgaagaggattatgttcttaggaagtcatgtaacaggaaagctgcattcagctgcttctgcttcagtcaaacagccagttattgcacaactcatccgatccgcctttccttcgctaacaaacccaagctaacttgccagtgagaatcattccttttgcaaattgtgaagaatctcacactggcacatctattttcttcatcttctcacctttcactattttattttatttttgcagatgaagtctctgctatccacgaaatttcacttggtaataaacaggttgaatcaagcacaaccaaataaaagtaacactgttttactcatttcacttactctcttttacacagcctgatttcctttc

SEQ ID NO: 472630 - DNA, 802 bp, Homo sapiens
agctcatgtatataactccagacactggctgtttgagaaatggagccaggacaggagaaggagttggaggaggaggaggagttggagaaagaggaagaagaggaggagaaagagaaggtgatagaggaggaagaggtggtgaaggaggaggagaaggaggaggtggtggtagaggaggtggaggaagaagagaatgaagagaatgtcagtggagaaaagttggaccactggaaagttactgacatcctacaaataccagtgggtaagcccactacagcccagcctccacctggaaatcgagtaattattttggtgatttctaaatggtatggtatcgtcacttttagccagaaatgtgcaacagaaattacttacaaagcttttctaaaaatgcaagtgtcaggtttgacttcagaccaactaaatcagaatctccaagaaaatagttgaggtacatacagtctgaattgcatctggtaattttaccaatatattctgtatattgctgccagggtaatctttctcaagattaaatgtgatcatgcctttgacctactgaaatttcttcagatatctctattacccatgaagaaaacaatcagatgcttttgcatgtcccctgtgttcttcacaatgttctattttacttcagttttgttttttttgttttgggattttgtttgttcgtttctttagcgcaatcagagcctataccctaactaggacaacgatcatgtttctttgcctagtcttagtgtctcataaactctattctctggccataactgttactcatgtttac

SEQ ID NO: 472631 - DNA, 749 bp, Homo sapiens
cctctctctggaagcactgcctccttaaccagctgcaagctgcaggatggcagagccacgtgcccctcccagagactcacacgtgcatacaaaggggtacctcgtctggcgtgcatcccgggaacagctgtgggcatgcggtgggcactcaaagaagacttggccatgtgcgatgatgctgatatgaccagagctaaggggacattcacactggacctgggctgggactctggccagggggtgctcgccccttctggaaggagagctgccggcagtgtctcctacattgaaagaactaaaatacggctggaggcacatttccacatccccatcgaagatgacctgctcctgctcctggcctccttggaattcagggaatgctgcccgagccgcctcctggcgttgcttttctggaaagaaggctcaaagcggggtcccccatgggagccctggccctgcagtgctggggaggggcagacccgggctttgagcagagccaggaacgcacttctcttgagagaccgtttgctcctctctggaggtttccatcctgctgctattttgtgagcaggatgtttacccccatggggttttagagcagaacttagcctcgcttaggggcttcagatttgtgtacagagtacgagccaataagacaccggccagtccgggatgttctggtccagtgggcaccctcagagctgtggagccgtttgtccccaagggacatggttgggctggccctggct

SEQ ID NO: 472632 - DNA, 1140 bp, Homo sapiens
cctggcggtgagaggaacgcaagcctgggcgtccggtcctctcttccccacccacctccctctgcagcctcctttccgccctctggatccagccacctgtgctccagcaggtccccggagggccttagacctagctctgcctggcctgcacatggcatcccataacccctatggacatccaattgctccgttagagcatttgttgaaaatgctttccttgctccatgtgatgactctggtgcccttgtcaaaagccagctgggcctattcgtgtggagctgctagcactaccagagcagaagtgccaaagctgatggaaaacacaggattcctgggatttgacatccagtgctacaggaaagcaaaccctgctttatccaccattgccagcatagtgaaaggtggaagaagaaccggattcctgagtttttctgttgatcagcactggaaactgggcatgtctctaatctattcaagtctggtttttcacctacagcatgggaaccatgagaatacttacggccttggtgtggggtcagttgaaacagtacatgcaaagtatctcacagtagaaattatgaataaagctgctgggaatattcctgtgcaggtttctgtgtggacataagttttcaactcatttgggtaagtgcagaggagtgcaattgcggtttgtatggtaagactatgtttagctttgtaagaaactgcaaagctgccttccatagtggcagttccattctgcattcccaccagcaatgaaggagggtggctgttgctctgtgtccttgtcagcattcttctaagactttagccgttctaaaagtgtgtagtggtatctcatggaagttactttcaagtctatttttataggtggagaatacgcgtgtatctgatgtgcacaggaatccctcattgctgagggacgccttcgtgaaataggtaggaagttctgaaatcttgttgatggtctttgtttcttcccgtttggagtgggtccccaggccaggccttgccttttccaattcactgtgagcatgtacacaactgtccccatgaaaaatactccagaaagccctagaagcacaattaatcaacgtgtaatttattgcttatgcagcaattacccaatctggtaac

SEQ ID NO: 472633 - DNA, 647 bp, Homo sapiens
gttttgctgatttggtgcttgcgtagttattttttatatatataaatagggatggaaatcattgaaaaattttactacctgcctactaccctgattcctgtcccactatggcctgggctttctccagcacccagagactggggtacatggcttttccctgtggctctcaaaccagttgatggttttcagatctccgtggccatcgtgtccatggcaacagcagctttcagctctcccacctcagtggttctttctgataatggtttccaaaagaattcccaagaacttgatcttcgctatgtgggaatctccaatctctgcaggagggatttgctgccttcctgtgacactcactccatcccggggacactaagcattataaagctattctttatgctaagcccaatctaacgcattcagactcaaagccactgaagttcagggaagacataattgtgtcgtttgatttgttcaccaaagagcaggtcagatggaaaggttactgtcctcttaaaaatattctgacaacaaattttttaaaattttaatgttatcattttgcctttttggagaaagggtttctatttatcagcgatgattaaacacttctgaaatctggaattactgactttgaccttttctttatc

SEQ ID NO: 472634 - DNA, 1003 bp, Homo sapiens
gctgaccccagcagtccttggtaaggagcctctgagtacgtctcccccagactcccacccacttgtgcagctccaccctccagcggctgttgtgcgacgtcaggatggaatatccaggaagcagtttgttgaagttggacgaaaacataggagcatttttaggctggatattgttacctaagatgaggttcgcatggaggttaaaggaaatggtttttatccggaaaacaaataattgcaattcgggtacactggatcagggcagctccgaagagggtcctaacagccagtgccggagagtttttctcattggagatatctgcaaaaagttgttttcggaggccgtcattggtcaggcagaaatcctaaatgacaaacccgttctgattggtcagctcgtgaggagagaggtaatagctagtcaggtcctgcccccagctccctgtctctaccctctggggctgcggtgttttggttgccgaagggaactactgaccatttgctcagcaccttctgggtggcagaagcttgaagcctgtcacgtcactcagtccccacagtgaccctctgatgtggcagctgattgtaagctccctaaaacgggggtcttttctctcaccttcatcctgctatattccctggcagagagagaggctcactaatatttagtgcatgctaccttttaccttctagtattggtctcaactcactgcccagcccagcccagctgatttttaggcattctccatcctcacatcttttgccacaatttatttggtggtttgatgggcaaaaaagattcctggtctgtacctttaatgtaacgaggacattagtgatgtgtaatggaggtggaaatcgctttctaatgcataaaacataaatacagcaaaagtgcacaaatgagccataactcttcttcctttcataggcaataaaaaaatccccatactctttcctcattaatttggaccgcatgaaactgtggagctgctgattttcc

SEQ ID NO: 472635 - DNA, 3677 bp, Homo sapiens
tctcctgcttctcctgctgcgtctcccacaccccatgccgcgtctccacaccccatgccgcgtctccacaccccatgccgcgtctcccacaccccatgctgcgtccccacaccccatgccgcgtccccacaccccatgccgcgtctcccacaccccatgctgcgtctccacatcccgtgccgcgtctccacaccccatactgcatccccgcaccccatgctgcgtctctacaccgcatactgcatccctgcaccccatgctgcgttcctgcaccccatactgcgtctccacaccacatctgcatcttccacaccccatgctgcgtctccgcaccccatgcttgctggtttctcccttgtaatgagaatgagctttatgcacttgagcctgacccttgcccagcattaacggagcccagggtgtgagtgctgccagagtgtaccttcagccctccttatccacgacacacttaatcaatcccgaatcctcaggaagagtgccagagccttggttccaggcttaacacatggggaatgaactgaatgaatgtatggtccccctcaaggacaaggaactttcattctgtggtatccagaggactcagcatgaaacctgggcgatggccttccgcgtctcccttcggacggcaacccctcccgtccatcgcctttgctgcatccgtgaagctgctgtaacaaattatcccaaacctggtggtggaaaacagttgtggaggacagacatctccattcagtctgaaggggttaaagtcaaggtgttggccgggctgggtccttctggaggctccaggggagactctgttcccgggttcttccagcttctggtggctcctggtgtttcctggcctgatgccacatcgctgcatcattccggtctttgtctctgtggtcacatagatctctctgcttctgtgtcaaatattcctctgtctgcctcttataaggacacttgatgccgcttgcgttcactgagactgaaccacagtgctccagcccccaccccttcatgtttaacagctgcacttgcagcctgtgcctgccaccatcctatttattctgttccacccagagacctagagacatgctcatcataccagcccgtctaaaccgactgaaatgtaaagagacacctctccacgcatgtgatgctctggcttatggggagacgaaggtggggaatgtctgcccttgatgaagattagttgactgtgtatatgtaggttaatttctgagctctctattctgttccattctgtgtctgtttttatgccagtgccatgctgttttgattactatagctttgtaatgtagtttaaaatcaggaagtatgatgcctacagctttgttcttttttctcaaggttgctttggctgggtcttttgtggttccataaaatttttagaatgtttttcatctctataaaatttccattggagttttgattgctatgaaaaagtgccattggaatggctgttgccattgcaatttagatttcattcaatccataaattgctttgggaaatgtggacatgttaacaatattaattcatccattccataaacatggaatatatttatttatttgtgtgtttttcaatttatttcatcaatgttttatagctttcagtgtacagatctttcacttccttggttatatttatttctaatttattctttttcatgtggttgtaatttggattgttttcttaattttttgggtagtttcttgttagtgcatagaaatacaacttatttttgtatgttggttttgtgtcctgcaactttactgaattcattgattatttctaacatttttttgagaagtctttaaggttttctatatataagatcatattatctgcaaatagaggcaatttaaattcttttctgatttggatgtcttttatttttcttgtctaattgctctgactcaatagaacttccaatactgtgttaatagaagtgacaacttcatcttgtttctgatcttatacaaaaagttttcagctttccactgttgagaatgatgttagctgtgggcttggcatacatggcctttattgagttgagcacattcccgctatacctaatttgttgagagtttttatcaagaagtgatgttggattttgtctaacgccttttctgcatctgctgaattaatcacaatttttacctttattctgtcaatgtggtgtatcacatttattgatctgtgtatgttgaaccattcttgcatcccagagataaatccaacttgattatggtgaatgatcctttcaatgtactattgaatttggtttgctagtagtaaatttttgcatctatgtttatcagggatattgtcctgtaattttctttttcttatagtagccttgtctaattttgtagttggaagtgtttcttgcttttcaattttttggaaccgtttgaggattgatgttaattcttctttaaaagcttggtagaattgacccatggaacattctggtcctgggcttttcttggttggttggaagattttttttattactgatttaatctccttacttgttattggtctgttcagattttctatttcttcattgattcagtctttgtagattgtatgcttctaggaatttattcatttctttgaggttatccagttggttggtatataattatttataatactctttaatgatcctttgtacttcgtggtatcagttgtaatgtctccttttccattataattttatttatttgagtcctctctttttccttggttagtccagctaaagatttgttgactttatcttttcaaaaaaacaactcttagttttcttgatcttttctattgtctttctaggctctgtttcatttatttctgctgtaatctttattatttgcttccttctgctaactttgggcttagtttattacttttctatttccttgaggtataaagttaggttatttgagatatttcttttttcttaatcaaggcatttttctctctatatttctcttttagaactgcttttgctgaatcccataagttttggtatgcttcgtttccattttcacttgtctaaagatattttgaatttttcttttgatttttttctataatccattggttgttcaggagcatgttgtttaatttccacatatttgtgaattttccaattttccttctattattgatttctagcttcatatctcagtggtcagaaaagatacttgatatgatttcaatcttcttaaatttgttaagacttgtttcgtggcctaaagtatcattcatcctggagaatgttccatgtgcacttgagaaaaatgtacaatctactgctgttgaatggaatgttctgtatatgtctgtgaggtttatttggtctatagtgttattcaagtctgctagttccttactgattttctgtctgatgattctccattgttgaaagtgaggtattgcagtctcttaccattattgtatttcatctatttctcctttcagttctgttaatatttgctcaatatatttaggtgttccaattttgggtgcatatatatttacaattgttatattctcttgatgaattgactcctttatcattatacagtgactctctttttctcttatgatacattttgactgaaagtttatcagggtg

SEQ ID NO: 472636 - DNA, 3961 bp, Homo sapiens
cgcccccctgtccctcttagttttttagtcccttagtccctttcagagacgacccagaggcaggaagcaggcaaggctcagctggtgaagttgggaaaacggagaagctcctatgtctcgttgttgattgaatctcacaccgttacatcttgctcacagatgtcaggactaaatgagggaagcgtggtgccttcctgacgcatctgggcaattaaatagcaatcagcaagtgtagttaaccagggcagcgctctcctcaatggccctgagtgtgtccgtgcatcatctgccgtcggtgctcattcactgagtctccctgtctaatttggggcaaaaagttaattggaacttgatggtggctggatggtgacctgagacagacaggccaggtagaaatgttaaaagggaaatccatgcaggctccttcctggctccccagagcaggttttcctaaagctccccaggccccccacacttgcctacacattcggattccatcagggatccctgaagtaaagggggaagtgcccagagggcagggccagacctctgtccttggtaggagctcgtggttcctgctgctgactcaggccccatgctgtggagggcgtgtgcctaccacctgcattacctcctgggtgctggactctggcgatgtgggtgtccctggccccatgtacctgccctgggctctcctctccacctgggccctgggagccccttgccacaggtgtagaagcctgagacaccgggaaggacatgttccccagggtggccctattccaatggccaacagctggagagggagacctgcccagttccctcatcttgagctgtaacaacctcttgagcccctcctggcacgtgcagagcacacagcaggcaggtgttaggagaattatgtctgctttttatgactcactcactgtagcacttggaacaattccaggtccttgtggttcctgatacgtttgcaaagtcacagatgcagggaatgtttgttcctgtttcagcaagactgaataatattccattgcatgtacacaccacattgggtttattcattcatctgtccatggacacttgtgttgcttccacattttagctatcatgaataatgcggttataaacatgggtgtcaaatatctgttagaggctctgtttttacttcttttgaataagtaacaaaaaacggaatttctggattatatgttatttccatttttaattttttgaggaactatcatactgtttttcatagtatatatataacattttatattcccaccaacagcgcacaagagttccgatttctccacatcctcatcaacacttctcatgttctgctttttagatggtaaccatcctaatgggtgtgagatgtatctcattgaatttgcatttccctaatgattagggatgttgagcatttttatgtgtttattggccatttgtatatcttctttggataaatgtttactcaagtccttagctcatttttgagttaggtttttttgtttttgttgttgtgtttttgttgagttttaggagctctctatattctgtatattgatcctttatcagatatatgattttcaaatattttctcccattctatgagttgtttttttttttactttgttgatactgtcgtttgatgtacaaaattttttatgaagttcaatttgtctattttttttcttttgttgcctgtgcctttggtgtcatatccaagaaatcactgccaaatccaatgttgtgaagcttttcccctgtttccttctaagagttttgtattttcaggtcttacatttaggtcttagaccattttaagctattgtttgtatatggttataggtaagggtccaacttcattctttcgcatgtgaatatccagttttaccaacaccatttgttgaatagaccatcctttccccattggatggtcttggcatccttgtaaaatatcatttcatcatatatgtgagcgtttatttctgggctctctattctatttgtctatatgtctgtctttatgccagtaccacattattttgatgactgtagctttgtaataggttttgaaaacaggaaatgtaagtcctccagctttctcttatttttcaagattattttggctattcagggtccctagagattccattttaattttaggatggggttttctatttctgcagaaagcatcatctagacgctgatagggattatgttgaatctgtaggtcactttgggtagtactgacatcttaacaatgttaagacttcaaatccataaatacgagatgtgttccatttacaattgactcttgaacaacattagagttggggtgctgacctcctatgcagtcaaaaatccatgcataactttttacttcccaaagacttagccactaatacccaactactgagtggaagccttactgataacataaacattcaacgaacacaaattttgtaggtggtatgcattatgcattcttacaataaagtaagctgttagagaaaagaaaatgttactaagaaaatcataaggaagaggaaatgtgtttactattcactaagtagaagaggattatcataaaggtcttcatccttgtcttcatgttgagtaggctgaggagctggaggaagaggagagggtggtcttgctatctcagatatggaagagatggaagaggaggcaagagaagaaagacaggcacacttggtgtaactttatggaaatacgttgtaatttctatctgactcttttgctttttcatgtctttaaaaatgtttctatatggtaccaatccttttcccaccgtatgctttagttttagtgcctgtatcatagaagggctcaggtcttaaaaaagaaaaaaaaaaaaaaaaaacagaagctgtcttgaacaatcagaacccttctgccagatcgtccaatgttaatttgtttcttggcactacttcttctacattatcttctgcatggtctggcactggttcagaagcactcatctccttcaagtcgacttctgttaattcctctggcatgatgtctattagctcttgaatttctccaagtctatatcttgaaaccctttacacctacttttttttttttttgccatatccacaatctcttaatttccctgattgactctcttgtgaatcttgtgatgtcaggcacaacatctggacacaattgtctccagtaagaattcattgttttaggcttgatagttttcacaactttttgtataacaatgttggcctcttcaatggtgcagaccttcatgatgttccctctgttagtattcttttctgtagcattgataatcctttccatagagtactgtgtgtaatgagcctacagatccttatgacctcccgatctagaggctgaaggggaggcactttgtttgggggcagtacaccactccagtgccttcagtgttgaactcctgggattctgggtggccaggggcattgttcaatatcaaaataactttataaggcagtctcctactggcaaggtatttcctgactttagggacaaagcatcaatgaagccaatccaggaaaaaatgttctcattttccagtccttcttgttgtacaaccaaaagactggcagctggtgtttaatgtttcccttcaaggctgggggattggcagctttatagataagggcagacctggtcataaatccaacttgatttgtacaaaacagtagagatggcctatcccttcctgtcttaaatcctcccactcacttctcttccttattaatgaatgtcctttgtggcatttttttttccagaacagggcacttttgtctgcattaaaaattggttcaggcatatattcttactcctcagtgattttcttaatggtgtttgggaacttgtctgctgcttcttggttggcagaaactgcttctcctgttatcttgacattttc

SEQ ID NO: 472637 - DNA, 626 bp, Homo sapiens
ccctttgccctccgtcttctcatctgtgcaatggttgctgtgaggatcccatgacttggcatggagcctgacactgcggagcttatcagaccccagggactcatctcagcctccagggacgggggtggtgtgaacgcacggagaacagtcctgcacgctggccgtcgtggagagactgggaacaagcgattagagccgaccagtttgcagcctagcttaggaggaagcacagaagcagatctagaacattcacagcctgacaatgtgatagaaaagaaaaacccattttctgaggagaaattcaagccggctgcagaaacttgcaaaagtaacgaggaacccgatgtaaatcgcggaacccaatgtaaatcgcagcagagacactggggaaaatgcctccagggcatcttgcaccgtgcatctggaaaagctgcagacactcaatgccagcccgtgaaagcagccaggaggggggctgtaccctgcaaagccacagggatggagctgcccaaggccatgggagcccacttcttgtatcagcatgacctagatgcgagacctggagtcaagggagatcattttggagctttaagatatgactgacctactggatttctgacttgcat

SEQ ID NO: 472638 - DNA, 1951 bp, Homo sapiens
gcaaaggtcaaggccacgttccccagagctggtgagagaccggggccacccagaccccacatggagcctgcagtggggtgtgggcagcaagttctgcctgacagacgccatgcctgccccgcactctgggctggtgcggcacgggcttaggtggagcgcgtgagccttcttcgtggaaagttgctgagctggccaagcgaggctgggtattatctagtgctgtgtgtgggcagggctgggccctgatcctcctggctccgtggcaggcatgggcatagagcttcgggctgggggagtgtttgtgggatgaatagaggatgctggtccagatccatcccatggctgatgctcccatcctggacctggtgggcacgagaggtgctcacacccattatcccctgtggttcttctcaaacacaccgagccatggggcaaagtctccccgattgaacctgggggagtctgacagacccacgtcctcaaccttccttgtgcattaccagatccttggccaagaggacagagcctggaatctgagtccactggcgcaggatgtggaagtaaacatgagccccaggtcttggaaagaagcctggcctacaggcctgaccccagctgaccccaggtccaggccccacgatgcaggctgctttgccctcagagggtttcatatgcagcggctcttagtcacccagaaccttccccaatctcagacccagggggatgagatcactcccctggcacgagcagccccagaagaagagtgcttgcttcagctgctggctgagtggcgagctcagggcctggggacgttggtccttgttggctccaggggatgggctgggtcagctgtagccaccggagagccaagacgtggattcctgggagcatttctgagctgctgccagaagcttctctatgtcactgggagagaatgtggggcagtgtgaggctttgcccctaacggtgagggctccactgaaggaaagagaaaacaccgtgttgctgctcaagttctgaaagggctgggaaatataactaagagtggggaggacatcccctccatgcgaggaggccaggtgggaatgtgcctcaggtgtgctggctgagtgcaccagctcattccagacccagcactggccagacctgccccagccccagggctgagcccaggcagctccccacagtctcctttgggacaaggcaatggcaaagattggtggagctatgctgagcagggctggttattttattcctgctttccatcgtgggttttattaatatgcagccatggtgggccagcagatcagcaggcagctgcctgtttaaggatttgttactcacagatcccatgaggagggggcaggccacgtcacacagggccacaggggaaagcaggggcatccatcaggaggcagagggagccgggggcaatgtgggcagagcctttatagtggtttctgcaggaaggataggctcgtgtggataatttctgtgggctctggggcagagaggctgcccctaggtgtctggcacctagccaggggtgactagggcaggtggatggtggccctggggggagaatctggtagaggaggtcgtggggtgtgggctctgggtgggttggtattaaaggtgggctcccagcacagtcctttactatctgtaggaattggccagccctgggaagggccgtccctccaggatcagcaaggcactagaagtcaaagtgtcagaacacagaaaattaaacttcacggttagtacaattttttctaatctaccagagtgagtgcagagcaagaggaagccatgagtgtgctggggtttgaaccctcttgcagctgctgttatcaggaggaacagggggaagacactgtcttgaaattagagtttgttggctggtcgtgtaggagcctccgggcccctctttgaacctgcatgctaattc

SEQ ID NO: 472639 - DNA, 654 bp, Homo sapiens
aggagctcactctactacccatacatgtgccaagtgcctggaaatctgctctggcaaggaggaaactggtgccgcaacaaggtctttgcaggggatgggaagcgtggctcagacacctactctaggggtgcaggtgcacctcatcctgggtgatatgtccatagaagaagcagagaaaccactgccacaaggagggcaggtgcaccagaggcctgctatgtgtggaacagagagtgtgctactgcaccaggatttctgcacaggaagagaggggcagctcaggctgctaatcctggagaaaaaaatggcttcagaaactctcctcccacttcagacctgtgatggaagacagcccaattccagtgcctactgctgggatgctttccacatttgtcactcaattctggctgtggggtcctgtcccactccagaagatgactatgggaattttgcctgtctacatgatgacaataatccttttgaaactaataagagattttagaccagccaacacttgactcacttatgtgttttgtttttttatgtacattttttactgtcaattgatataatctcatgttcttgcctctttctgcacagcttttacatttttcaggtctaaatggtttggtgttgaggcaaaaaatacaattt

SEQ ID NO: 472640 - DNA, 909 bp, Homo sapiens
ctgggaagagtatttttatgcctcttctactcttaaagtacaatgttttgcaatttcctctttgcgagctctgtgctgctggcaagctgttttcccactgacaagagaaatgcagagctgccactgacagaagtgatcaggaggggcaaggcggctgtcctgcaggcccagcttgaaggcagaaggtgtggggggccacagcagtggcaaaagctgcaggcctgccaattacctctgggagctccattccagagaaatgcagagctgagactggccaaagtgctcaggcaggactcgggtggctattctggggtcctaggccagtgggctttgcctgatgaggagatttgtaattcacagaaggaggtcaaaatactaacattaagaggaatttggaagaggttgattccaaccctcatggatgacttggaggtgttcaaaactttggtgaaggaacgaactgcttatgtggtgaaaatagcaagagaactagaaatagaagtagagcctgaagatgtgaccaaattgctgcagtctcatgatagaacctgaagaaatgaggagttgctgcttatggatgggcaaagaaagaggtttcttgaaatgaaatctactcctggtgaaggtgctgtgagcattcttgaaatgacaacaaagaatttagaagatgccgtaaacctagttgataaagcagtagcaaggtttgagaggactagttctaattttgaagcttctactctgtgtaaaatgctatcaaatgacattccatgcaatagagaaatcttttgtgaagagtcagttcatgtggaaaacttcattgttgtcctatttcaagaacttgacataggtactcctaccttcagcaaccaccaccctgatgagttggcagccatcaacatcaaggcaaga

SEQ ID NO: 472641 - DNA, 555 bp, Homo sapiens
gctgacaatttgacaggcttaaacacaacctaaggtgggcagctggctttgctggggggtctgctcaagtcactgtttgcctcagaatccataaagcctgaaagcaacaatggctaaggctgctgaacagcaaagattgcagcacagccttccctctggaacctccatcccagagaggtttgaaactgctgctggctggaaaacacaagcaggggtggctgttgaccttgatcagaaggttgcaccagtgaagagaaatgggatctgggacctgcttgaaaaagcagtctggctacttctctatagagcttctgcactggcagctgcactgaaggcaataatagctaaggctatgaaacagcaaagatggcagcctacccctccctctgggagcttcatgtcagggagatgtaacactgctacctgtggatggctggattcccaggccagtgggtcttatcctatgaggtatcatggaagtgggacctgcagaccatcactgctcagccccctggtttcagcccccttcctaggggtatatatggggctctaacc

SEQ ID NO: 472642 - DNA, 500 bp, Homo sapiens
tgcgcagtctcctggtaaataatgatttacaggaagcaagccttgtttttcagagccagcaggcaggaacatttaagtctgctgaagctgtgcccacagcagccccttctttcacgttctctgtcccatggagatgggctttttatctataagtcgctgactgaggctgctgcctttctttcagagatgctctgcccagagaggagggatctagagaggcagtctggctttagtggctttgctgagctgtggtgggctctgcccagttcagactttcgggcagctttgttcacactaccaacagaactcacattccctgtgtccactgggacaggtcttgagaatgcccttgtgctcagtccagttcacaaggatttattgaactcctgttatgtgccagagagtgagccaagtcttgggaatacaaaaatgactatgtgagaataggtgagtaggttgttttttcactctattgattgtttcctttgctgtgcagaagc

SEQ ID NO: 472643 - DNA, 594 bp, Homo sapiens
tttaggtgcgtctgcattctcaggggatgcttaagttacggctatgagtatgtctaccatgcagagtcattctcagtatccttcatttaagttattgctctcaagataccggaaaggctggacgcttcggttattagaggattttggagatggaggtgcttttccagaaatccatgtggctcagtatccactggatatgggacgaaagaaaaaaatatctagtgcgctggccattcaggtggattctgaaggaaaaatcaaatatgatggaatcactcgacaaggacagtcaaaagacaaggtcatttatagcaaatacactgtcctggttccaaaggatgttacgaatgcaaatgatccagacttgcaaaggcccgatgaagaagctataaaagagataacagaaaagacaagagtagccttataaaaagctgtaccacagaaggtcaccgcagtcacaccagttcaggcagctgacaaaccggctcctgctcagtatatccgatacacaccatctcagcaggagtggctttcaactctggagttaaacagaggtttgatgaattgttgctgtttgttaataatgaatgggtg

SEQ ID NO: 472644 - DNA, 617 bp, Homo sapiens
atacacttgctaggagcctgatgtttgttgaatgttaaattatttattgagcttctactgtgtggcaggcactgcgcgagggtttgccatgagaaagcctcacgacttgcagaaggtaatgattctcagcttcagcttccttatgtgtgtaatgatctgtgagcaagtcagcaagagaaggtgtgctaggatggaagccacagtccgttgtcacctcatcttggaagtggggtcccatcgcctcagtcacagaggcggggaccatcaggggacatcgaccacagtaggaattgccgtgttccttagcagaggcatagaaaggccaggtgactctgctgaggtcatacaagagatggtggaggagctgggtgacaatcaaggtagtctggctgcagaagctgctctcattgctaccatgctacactgtgctgccccacagttagaatgccaggggatgcatttcctgaacttagaggaccagagggcacaggctcaatcatgaaaggtactggctaggacagggacacttagccttttccttgccactgcaactattgtgaaatacaattagaggaaaagttagcacctacttcatgatggctatctggtgcctttcc

SEQ ID NO: 472645 - DNA, 588 bp, Homo sapiens
agagaatacgtacatgaatgagcatggctgtgttccagtgcactgcgcgagggtttgccatgagaaagcctcacgacttgcagaaggtaatgattctcagcttcagcttccttatgtgtgtaatgatctgtgagcaagtcagcaagagaaggtgtgctaggatggaagccacagtccgttgtcacctcatcttggaagtggggtcccatcgcctcagtcacagaggcggggaccatcaggggacatcgaccacagtaggaattgccgtgttccttagcagaggcatagaaaggccaggtgactctgctgaggtcatacaagagatggtggaggagctgggtgacaatcaaggtagtctggctgcagaagctgctctcattgctaccatgctacactgtgctgccccacagttagaatgccaggggatgcatttcctgaacttagaggaccagagggcacaggctcaatcatgaaaggtactggctaggacagggacacttagccttttccttgccactgcaactattgtgaaatacaattagaggaaaagttagcacctacttcatgatggctatctggtgcctttcc

SEQ ID NO: 472646 - DNA, 3742 bp, Homo sapiens
gctggtgaggattataggagggggaggaacactcgattggtaagggaagagctcctcaagtgagcatgcacacaacgtcagtaaacactgtgcacgcggccctcccaggtgctggcaggccactgtgcatgcagacagcccacgccaaggggagaatcaggggagaagggatgcagcccccgtcggaagcatgccagcataaaaaacccaagtcaaaggaaatcaaggaagcaagaattgaggttgctccagacccatgcggatttgctgctgctgacatactttggtgctgtgacttggatatgttccctagtggttaccctaaggacagtccttcaggtaactgtcattggtgtgggaagccaggccactggaaggcaaactgccccaatgagataaatgggaaaaagcccggcacagcttgcccctttgccacaagctctgccactggaaaagaactgctctgacggccgaaggactggatcccaatccctgatggccttgagctgaaggagacctctgctctggctggcttccaagtcagacattgtcatcagcaagacaaagccaagggcaacagtagaggacacacacaacaacatgcagtacaaaccataaattcctaacagaaggaaaataacttttctctaattcaaaggttataaaggtaaagaggtatttttgttaaggaagattataaagaaaagaaattttatatgagaaaggatcttttgtcgtaaatttgcatcctaaagaaaaataactgattgtttaaaaagagggatgcttaggacaagtgagaaagtccaagcttttcatagatgttctgtgtaagtcatgaaaagatttgtgaaagggaatttataaaagaaatatcaaacaattttgttttgttttgtttatttatttttacaatttttaatttttgtgagtacacagtaggcatatatatgtatggcgtacatgagatattttgatacaagcatacaatgtgtaataatcacatcaggataaatggggtatctatcacttcaaacatttatcctttctttgtgttacaatctaattatagtcttatagttatttttaaatgtacaataaattattgttgactgtagttaccctgttgtgctatcaaatactagatcttattcattctaactaactatattttcatatccaataaccatcccccattctactactccactacccttcccagactctggtaaccatcattctaacacaaatgtgaattacaatgttctaatgtgaatttagaaatgtttcgcttctcagtaattttgtgatatgaacaaacattaccaaaaacacaagattctatttttctagtaaaataccctatggtagaatttcaaatatcatgttggattcttttcgtgtttatttggatgaaaataaggtatgttaattcacgatgtacagagaaacctttaggctgaacttaaaatacgtaaggaggcagctttaggctgaacttgatttaacacagtaaaattgatacaagacataaaacacaaattagggagaaaatgacattccaaattgtttacaagttttcacttagagagtgaaactcttttctcatggatttccttgctgcctgttgcctacgaaccactgtccacaccctaaaatgcaagtttaatcacattgattgttatgtgccagagaatgtggaaaacgtagcactcatttaatcgtcataacaagtgagatgatttcgtttttacagttgagaaaactactgagaacgtgaagaactttccaaagtttcacagttaataaatgagagaaccaaaattcaaatccaatctggctccaaaatataattaaacactacattgcactgcccctttaataactcccagggacttcaaaataaaatccaaactcattagtgtggtaggcaggggccttcgaggatcagcatcctggttctcatttcctacattttccctctccctacactcccaccagactgaacagttgatcctgctcattcacctttatgcctctgcatgtgttgtttgctctctctggaatgtgcattctacctgtcctgccagcctccttttatcttcatggtttatgtgtattgagcaccgatttggtggcaggtgcatcaattatcctgtttactcatcaccacaattttgtaagagagatactcatctctgttttataaaagtagaaactgagccttgagagggtaaataaatttcccatggacttaagtgctaagtcaaaccaggtttgttgtggccaacttttaacccaatcacttaaaaaaatcatcttttttaaaaaattaaggtattacatgcaaaaaatcatccattttaggtgtacagtttgataaattttgataattatatgtaaccatgtaaccaccactattaagatatatgatatccagctcttcatggcatggaaagaaaagatacgtaatatttctcttattctaaaagcttccttgtgctcctttttagttgatcccttcttctgaccctcaagcaaccactgatctgatttctgtcactgcagtaaaatcatacagtatgtagtctttgttctttcgtgtttgacttctttcactcaatgtccttgaaattcatttatattctcttatgtactaatattttgttcctttttactgctgagtggtattcctcagtatgaatatgctataattgttcatttgtatatcaatgagtgagcatttaaattatttccagtgtttggctcttatgaataaaactgctttaatcttcatatacacatctttgtgtggaggtatgttgacatttctcttgagtaaatacctaggagtgaagttgcaaggtcatgtggtaagtctatgtttaacttgacaagactgccatgctatttttcaaagtggctgtactatgtggcattcccatcctgagttttaattctatttttccaatatttataccttttatttctttttcttatctaattatcctggctaggacattcagtacaatgttaaatagaaatggtaagtgcagatatcctgaacttgttcttgattgtagatagaaagcattgacagctgtaggtttttaatacacattcttaggttgaagaaagtcccttatatttctagtttcccaaagattttcatctcaaaagagtgataaatatgtcacgtttttctgcctttattgaaataatcatatgggttttctcctttattctattaatagtgtgaattagacaaattcatttttagatgttaaatcaatcttgcattcccaggataaaaccacttgattacaatgtcttatcatttttatatattatttgattcaatttggtaatatttttgagaactctttcatgtttgtgtttatgaggagtattggtctgatgttctcttgtgatctctttggttttcaaatcagaataacattagcttcataatataccttggaaagtgttccctcctctattttctgaaagtgtttgtgtagaactgatattatcacttccttaagtgttttaaagaattcgtcagtaaagcaatctacacttaggtttttctttgtgggaagattttagattataaattcaatttcttcattgatatattgctgttcaagctttctatttcttctttggtcaattttggtaatctgtgtttttgaaggactttgctaaattcacctaggttgtcaattttattggcatgaaa

SEQ ID NO: 472647 - DNA, 1136 bp, Homo sapiens
ggatgactgttagaaggaaaatgaacaagcagaaaggaatagcatcaacatcaacaaaaaggacaaaaaaggacatccacaccaaaaccccatctgattgcagcccctcgccagcaacagaacaaagctggatggagaatgacttagaagagctgacagaaataggcttcagaaggtcggtaataacaaacttctctgagctaaaggaggatgttcgaatccatcacaagaaagctaaaaaccttggaaaaagattagatgaatggctaactcgaataaacagtgtagagaagaccttaaatgacctgatggagctgaaaaccatggcacgagaactacatgactcatgcacaagcttcaatagccgatccaatcaagcagaagaaaagatgccggatacagttcagtatagctacccccaagtgttacgggcccagagcgaggagagtagcacacttgcgtgggatattgatttcacggaggatgctcttgtgagacttattcactatcatgagaacagcatgggaaagacctcaccctgtgattcaattgcctcccaccaggaccctcccatgacacgtgggaatgatgagatctacaattcaagttgagatttgtgtggggacacagccaaaccatttcaaatatgttactactcttccatttttaaagctatttcagaagcttctttcttcttgatataagtctgtaaattttcttggtacatttttgcatagttattttattatttttgttgctgtcataagtgtgggtctggtgtgaaggttattgaattctgtatgttagtttataacctgatacatttctgcattttcatactgcttgcagtatgaaatataagataacagtcttataatttcttctcttttccaattttcatatctcatttgttattttttatctttttgataacagccgttctgactagggtgaggtaatagctcatagtagttttgatttgcatttccctgattattagtgatattgaccattttttgtcatatacctgttgactatttgtatgtattcttttgagaaacatctcttcaagtctgttgcccattattaatcacattgtttgttattttgttattgcattgagttccttacatatt

SEQ ID NO: 472648 - DNA, 769 bp, Homo sapiens
gtcaccaagctgggccacttggtcaaggacatgaagatcaagtccctggaggagatctgtctcttctctctgcccattaaggaatccgagatcattgactttctcctgggggcctctctcaaggaggaggttttgaagattatgccggcgcagaagcagacccgtgctggccagcgcatcaggttcaaggcatttgttgctattggggactacaatggccacgtcggtctgggtgttaagtgctccaaggaggtggccactgccatccgtggagccatcatcctgaccaagctctccattgtcctcgtgcgcagaggctactgggggaacaagatcggcaagccccacaccgtcccttgcaaggtgacaggctgctgcagctctgtgctggcgtgcctcatccctccacccaggggcactggcatcgtctcggtgcctgtgcccaagaagttgctcatgatggctggtatcgatgactgctacacctcagcccggggctgcactgccaccctgggcaacttcaccaaggccacctttgatgccatctctaagacctacagctacctgacccccgacctctggaaggagactgtattcaccaagtcccccgatcaggaattcaatgaccacctcgtcaagacccacgccagagtctccatgccgcggacccaggctccagctgtggctacaacaaaggtttttatataagaaaaataaagtgaattaagcctgggtttttatttaagaaaaataaagtgaattaagcctg

SEQ ID NO: 472649 - DNA, 638 bp, Homo sapiens
ttcctaggccagggcctggaatgatcctctcccagaccttcacatggctggcttctccgtgtcacccttcaaaccttagatgagtcaaaggtttctcagggaaggcttctctgaccacccagcctggaggaggtgttccagttccttccatctcagcatccccttcacctccaggccaggattccactggagtgaagcagagaagcccagaccgtatggcctgtcttacagttctctaagacttgacatcttcagcctgtactgtctcagccacctgcacccaccatccctactgacaaaccccctgatccccttcaccaagtgtcttcaacaatcagtgccagcagggagaccaccctggatcctgtcattctctgggcttcttatcaccagcaacctgtgcccagccttactaaacaccaggagggagaacaaaggaagaaaacaggaagaaaaacaggtgtgtgggggagggctgagatgtgtgagtaatatcacttagttttagccacctctaattttccatcttgtcatcacatacaatttcttcttccctctcctccccattcccagctgaacaatgatttccaaattagtggctcattctggctttatcatacaataaatctgtgggcagc

SEQ ID NO: 472650 - DNA, 529 bp, Homo sapiens
agcgcctctgctggccgctgcaaccccagtacatctaaatgaagaacccaagagtcagttagatacatgtcgaggatgctggcttcagatttggttacccagggagagcagagtgagaaaaacaaaatcaagaacaaaaccctgagaagcactgacattgttgaggtcaaggaagaaagtaaaaactacaaaggagaaatgagggaccagaactgtaaaggaaaactgaacagtggtaaccaaaaaccagtgaggaagaaatttgaaaatggagtcctaaatgtgaacttattagacaaatttaccaggaacctattttgtctcatacattatgttaaacacaagggggtgaacaagacaaaaccttttggtgcctactgtctggtggggaagacattgctgtacatcaccaaaaaggccatatttttaataactataccttgcttctttctaaaaagacatgtagcttacccaaaaaaatcagtataataggtaaaatacaattcaaaataattaaaatgggaaattt

SEQ ID NO: 472651 - DNA, 9052 bp, Homo sapiens
cggaatgaaatggaagggaatgcaatggaatggaatggaatcaacccgagtgcaggggaatggaatggaatggaatgcaatggaatggaatcatccggaatggaatggaatggaatggaatgcaatcaacctgatgcaatggaatggaatggaatggaatggaatggtaacatcccgaatggaatggaatgcaatggagttgcaatggaatggattcgaatggaatggaatggaatggaatggattcaacaagaatggaatggaaaggaatggaatcaacccgagtgtaatggcatggaatggaacggaatggaatgggatggaatggaatggaatgcaatggaatggaatcaacccgagtgcaatggaatggagaggaatggaatggaatggaatggaaactacccgaatggaatggaatgtaatggagttggaatggaatggaatggaatggaatgcaatggaatggaatcaacccgagagcaatcgaatggaaccgaatggaatggaatgcaatggaatggattcaacttgaatggaatggaaagaatggaatcaacacgagtggaatggcatggattggaatggaatggaaaggaatcaacccgagtacaggggaatggaatggaatggaatgcaatggaatggaatcatccgaagggaatggatggaatagaatggaatggaatggaatcaacgcgagtgcaggggaatggaatggaatggaatgcaatggaatggaatcttccggaatggaatggaatggaatggaatggaatggaatggaataaacccgagtgcaatggaatggagtggaatggaatggaatggaatggaacaacccgaatggaatggaataatcaatccgaatggaatggaatggaatggaacggaatggaattgaatggaatggaatggaatgcaatggaatggaatcaacctgagtgcaatggaatggagaggaatggaatggaatggaatggaaactacccgaatggaatggaatgtaatggagttgcaatcgaatggaatcgaattgaatggaatgcaatggaatggattcaacttgaatggaatggaaagaatggaatcaacacgagtggaagacatggattggaatgcaatggaatggaaacaacccgaaatggaatggaatggaatggaacggaacggaatggaatggaatggaatggaatggaacggaacggaatggaatggaatggaatggaatggaatggaaaggaatggattcttccggaatggaatggaatggaatgcaatggattcaactcgattgcaatggaatggaatagaatggaatggaatggaatggaatggaatggaattaacccgaataaaatggaatggaatgcaatggaacggaacggaacggaacggaacggaatggaatggaatggaatggaatggaatggaatggtatggaatggaatggaatggtacggaatagaatggaatggaaagaattggaatgcaatggattcgaatggaatggaatggaatggaatggaatcaacccgagtgcaggggaatgtaatggaacggaatgtaatggaatggaatcatccggaatggaatgaaatagaatggaatggaatggaatggaatggaatggaatggaaccaactcgattgtgatggaatggaatggaatggaatggaatggaatggaatggaattaacccgaatacaatggaatggaatggaatggaacggaatggagtggaatggaatggaatcaacccgagtgcaggggaatggaatggaatggaatgcaatggaatggaatcatccggaatggaatggaatgcaaagcaatggaatcaactcgattgcaatggaatggaatggaattgattgggatacatttgaatccacccgaaatcaatccgaatgtaatggaatggaatggaacggaatggaatggaatggaatggaatggaatggaatggaatgcaatggaatggaatcaacccgagtgcaatcgaatggaatcgaatggaatggaatgcaatggaatggattcaaattgaatggaatggaaagaatggagtcaacacgagtggaagggcatgcattggaatgcaatggaatggaatcaactcgagtacaggggaatgaaatggaatggaatgcaatggaatggaatcatccaatggaatggaatggaatggaacggaacggaatggaatggaatggaatggaatggaatggaatggaacggaacggaacggaacggaacggaatggaatggaatggaatggaatggaatggaatggaatcaacgcgaaatggaatggaatggaatggaatgggaataacccgaatagaatggaatggaatggaatgcaacggaatggaacggaatggaatggaatggaatggaatggaatggaatggaatggtatggaatggaatggaatggtacggaatagaatggaatggaacgaattgtaatggaatggaattgaatggaatagaatggaatggaatggaatcaacgcgagtgcaggggaatgtaatggaacggaatgcaatggaatggaatcatccggaatggaatggaatggaatggaatggaatggaatcaacccgaaatcaatccgaatgtaatggaatggaatggaacggaatggaatggaatggaatggaatggaatggaatgcaatggaatggaatcaacccgagtgcaatcgaatggaatcgaattgaatggaatgcaatggaatggattcaacttgaatgtaatggaaagaatggaatcaacacgagtggaaggacatggattggaatgcaatggaatggaaacaacccgagtacaggggaatggaatggaatggaatgcaatggaatggaatcatccaatggaatggaatggaatggaacggaacggaatggaatggaatggaatggaatggaatggaacggaacggaatggaatggaatggaatggaatggaatggaaaggaatggattcttccggaatggaatagaatggaatgcaatggattcaactcgattgcaatggaatagaatagaatggaatggaatggaatggaatggaattaacccgaataaaatggaatggaatggaatggaacggaacggaacggaacggaacggattggaatgcaatggaatggaatggtatggaatggaatggaatggggaatgtaatggaacggaatggaatggaatggaatcatccggaatggaatggaatagaatggaatggaatggaatggaatggaatggaacaaactcgattgtgatggaatggaatggaatggaatggaatggaattaacccgaatacaatggaatggaatggaatggaacggaatggagtggaatggaatggaatcaacccgagtgcaggggaatggaatggaatggaaagcaatggaatggaatcatccggaatggaatggaatgcaaagcaatggaatcaactcgattgcaatggaatggaatggaatggaaaggaatacattggaatcaacccgagtggaatggaatggaaaggactgaaatggaaatggaatcaacacgagtggaatggcatggattggaatggaatggaatggaatgaacccgagtacaggggaatggaatggaatggaatgcaatggaatggaatcatccgtaatggaatggaaaggaatggaatggaatggaatagaatggaatggaatcaaatcgattgcaatcaaatggaatggaatggaattaacctgaatagaatggaatggaatggaatggaatggaacggagcggaacggaagggaatggcatggaatggaacggaatggaatggaacggaaaggaatggaatggaatggaatggaatggaatggaatggaatgaacgcgagtgcaggggaatggaatggaatggaatgcaatggaatggaatcttctggaatggaatggaatggaatggaatggaatggaatggaatggaataaacccgagtgcaatggaatggagaggaatggaatggaatggaatggaacaacccgaatggaatggaatgtaatggagaaatcaatccgaatgtactggaatggaatggaacggaatggaatggaatggaatgcaatggaatggaatggaatgcaatggaatggaatcaacccgagtgcaatcgaatggaatcgaatggaatggaatgcaatggaatggattcaacttgaatggaatggaaagaatggaatcaactcgagtggaatggcatggattggaatgcaatggaatggaatcaacccgagtacaggggaatggaatggaatggaatgcaatggaatggaaccatccaatggaatggaatggaatggaacggaacggaatggaatggaatggaatggaatggaatggaacggaacggaatggaatggaatggaatggaatggaatggattggaatcaacgcgagtgcaggggaatggaatgtagtggaatgcaatggaatggaatcttccggaatggaatggaatggaatggaatggaatcaacccgagtgcaatggaatggagtggaatggaatggaatggaatggaatggaattaccccgaacagaatggaatggaatggaacggaatggaacggaatggaatggaatggaatggaatggaatggaatggaatggaatggaatgaatggaatggaatggaatggaatcaacgcgagtgcaggggaatgtaatggaacggaatgcaatggaatggaatcatccggaatggaatggaatggaatggaatggaatggaatggaatggaatcaacccgatagcaatggaatggagtggaatggaatggaatggaatggaacaacccgaatggaatggaatttgaatagaatcaatccgaatgtaatggaatggaatgcaacggaatggaatggaatggaatggaatggaatggaatggaatggaatgcaaaggaatggaatcaacccgactggaatggcatggaatggaatgcaatggaatggaatggaatggaatcaactcgagtggaaaggaatggaatggaatggaaaggaatggaatgaagtcaactcgagtggaatggaatggaatggaatagattggaatggattgcaatggaatggaatgcaatggaatggaatggaatcaatcattccgagtggaatggaagggaataatggaatggaatggaatggaacggaatggaatggaatggaagggaatggaatcaacacgagggcaggggaatggaatggaatggaatgcaatggaatggaatcatccggaatggaatggaatggaatggaatcaactccattgcaatggaatggaatggaatggaatggaatagaatggaatggaattaacccgaatagaagggaatgcaatagaatggaatgcaacggaaccgaatggagtggaatggaatggaatggaatcaaccggagtacaggggaatggaatggaatggaatgcaatggattggagtcatccgtaatggaatggaaaggaatggaatggaatggaatggaatggaatggaatggaatggaatggaatcaactcgatggcagtcgaatggaatggaatggaatcaacccgaatagaatggaatggaatggaatggaacggaacggaatggaatggaatggaatggaatggaacggaacggaatggaatggaatggaatggaatggaatggaacggaacggaatggaatggaatggaatggaatggaattaacgcgaaatggaatggaatggaattgaacggaatggaatggaatggaatggaacggaatggaatggaatggaatggaagaatggaatggaatggaatggaatcaacccgactgcagggcaatggaatggaatggaatgcaatggaatggattcaacttgaatggaatggaaagaatggaatcaacacgagtggaatggcatggattggaatggaatggaatggaatcaaccctagtacatgggaatggaatggaatggaatgcaatggaatggaatcatccgtaatggaatggaaaggaatggaatggaatggaatggaatggaatggaatggaatggaagggaatggaatcaactcgaatgcaaatggaatggaatggaatggaacggaacggaacggaacggaacggaatggcatggaatggaatggaatggaatggaatggaatggaacggaaaggaatggaatggaatggaatggaatggaatggaatggaatgaacgcgtgtgcaggggaatggaatggaatggaatgcaatggaatggaatcttctggaatggaatggaatggaatggaatggaatggaatcaacgcgagtgcaggggaatggaatggaatggaatgcaatggaatggaatcttcaggaatggaatggaatggaatggaatcaactccattgcaatggaatggaatggaatggaatgcaatggaatagaatggaatggaattaacccgaatagaatggaatgcaatagaatggaatgcaacggaaccgaatggagtggaatggaatggaatggaatcaacccgagtacaggggaatggagaggaatggaatggaatggaatggaaactacccgaatggaatggaatgaatggaatggaatggaatggaatggaatcaactcgattgcaatcgaatggaatggaatggaattaacccgaatagaatggaatggaatggaatggaacggaacggaacggaacggcatggaatggaatggaatggaatggaatggaacggaaaggaatggaatggaatggaatggaatggaatggaatggaatggaatggaatggaatcaacgcgagtgcaggggaatggaatgtaatggaatgtaatggaatggaatcttccggaatggaatggaatggaatggaatggaacggaaaggaatggaatagaatggaatggaatggaatggaacggaacggaacggaacggaatggaatggaatggaacggaatggcatggaatcaacgcgagttgcaggggaatgtaatggaacggaatgcaatggaatggaatcatccggaatggaatggaatggaatggaatggaatcaacccgagtgcaatggaatggagtggaatggaatggaatggaatggaacaacccgaatggaatggaatggaatggagagtaagggagttgaatagaatcaatccgaatgtaatggaatggaatgcaacggaatggaatggaatggaatggaatggaatgcaatggaatggaatcaacccgagtacaatggaatggaatggaatggaatggaatggaatggaatggaatggaatggattggaatgccttgaaaccgaatggaatggaaaggaatggaatcaacacgagtggaatggaatggaatggaaaggaatggaatggaatggaatggaacggaatggaatggaatggaatggaatggaatggaatggaatcaacccgactgaaggggaatggaatggaatggaatgcaatggaatggactcaacttgaatggaatggaaagaatggaatcaacaagagtggaatggcatggattgcaatggaatggaatggaatcaacccgagtacaggggaatggaatggaatggaatgcaatggaatggaatcatccaatggaatggaatggaatggaacggaatggaacggaatggaatggaatggaatggaatggaatggaacggaacggaacggaatggaatggaatggaatggaatggaacggaaaggaatggaatggaatggaatggaatggaatggaatggaatggaatcaacgcgagtgcaggggaatggaatggaatggaatgcaatggaatggaatcttgcggaatggaattgaatggaatggaatcaacccgagtgcaatggaatggagtggaatggaatggaatggaatggaacaacccgaatagaatggaatcaatcgaatggaatggaacggaattaacccaaatagaatggaatggaatggaatggaacggaacggaatggaatggaatggaatggaatggaatggaacggaacggaacggaacggaatggaatggaacggaatggaatggaatggaatggaatcaatgcgagtgtaggggaatggaatggaatggaatgcaatggaatggaatcatccggaatggaatggaatggaatggaatggaatggaatggaatggaatagaatgcaatggaatggaatcaacccgagtacaatggaatggaatggaatggaatggaatggaacggattggaatggaatggaatggaatggaatggaattaaatggaatggaaaggaatggaatcaacccgaaatggaatggaatagaatggaatggaattaatccgaatggaatggaatggaatggaatggaacggaatggaacggaaaggaatggaatggaacggaatggaatggaatggaatggaatggtatggaatggaatggaatggtacggaatagaatggaatggaacgaattgtaatggaatggaattgaatggaatggaatggaatggaatggaatggaatcaacttgagtgcaggggaattgcaatggaatggagtggaatggaatggaatggagtggaacaacctgaatggaatggaatggaatggagagtaagggagttgaatagaatcaatccgaacaatggaatggaacgaaatggaatggaatggaatggaatggaatggaatggaatcaacccgagtgcaatcaaatggaatcgaatggaatggaatgcaatggaatggattcaacttgaatggaatggaaagaatggaatcaacacgagtggattggcatggattggaatggattggaatggaatcaaccctattacatgggattggaatggaatggaatgcaatggaatggattcacccgtaatggaatggaaaggaatggaatggaatggaatggattggaatgaattggattggaagggattggaatcacctcgaatgcagtcgattggaatggaatggatttaccccgaatagaatggaatggattgaattggaccggacc

SEQ ID NO: 472652 - DNA, 6812 bp, Homo sapiens
tggaatggaatgcaaagcaatggaatcaactcgattgcaatggaatggaatggaatggaaaggagtacattggaatcaacccaagtggaatggaatggaaaggactggaatggagtggaatggaatggaatgcaatggaatggaatggaatggaatcaacttgattggaatggaatggaatggaatggaatggaatggaatggaatggaatcaacccgactgcaggggaatggaatggaatggaatgcaatggaatggattcaacttgaatggaatggaaagaatggaatcaacacgagtggaatggcatggattggaatggaatggaatggaatcaacccgagtacaggggaatggaatggaatggaatacaatggaatggaatcatccaatggaacggaatggaatggaacggaacggaatggaatggaatggaatggaaaggaacggaaaggaagggaatggaatggaatagaatggaatggaatggaatcaacgcgagtgcaggggaatggaatggaacggaatgcaatggaatggaatcttccggaatggaatggaatggaatggaatggaatggaatggaatggaatggaatacacccgagtgcaatggaatggagtggaatggaacggaatggaatggaacaacccgaatggaatggaatataatggagaaatcaatccgaatgtaatggaatggaatggaacggaatggaatggaatggaatggaatggaatggaatggaatgcaatggaatggaatcaacccgagtgcaatcgaatggaatcgaatggaatggaatggaaaggaatgcaatggaatggaatggaatggaatggaatcaacacgattgcaatcgaatggaatggaatggaattaacccgaatagaatggaatggaatggaatggaacggaacggaatggaatggaatggaatggaatggaatggaacggaacggaacggaacggaatggaatggaatggaatggaatggaatcaacgcgagtgcaggggaatggaatggaatggaatgcaatggaatggaatcttccggaatggaatggaattgaatggaatggaatggaatggtatggaataaacccaagtgcaatggaatggagtggaatggaatggaatggaatggaacaacccgaatggaatggaatgaatggaatggaacggaatggaatggaatggaatggaatggtatggaatggaatggaatggtacggaatagaatggaatggaacgaattgtaatggaatggaattgaatggaatggaatggaatggaatggaatggaatggaatcaacttgagtgcaggggaatgtaatggaacggaatgcaatggaatggaatcatccggaatggaatggaatggaatggaatcaacccgagtgcaatggaatggagtggaatggaatggaatggagtggaacaacctgaatggaatggaatggaatggagatgcaatcaaatggaatcgaatggaatggaatgcaatggaatggattcaacttgaatggaatggaaagaatggaatcaacacgagtggaatgacatggattggaatggaatggaatggaatcaacccgagtacaggggaatggaatggaatggaatgcaatggaatggaatcatccaatggaatggaatggaatggaacggaacggaacggaacggaacggaatggaatggaatggaatggaatggaatggaaaggaacggaaaggaagggaatggaatggaatagaatggaatggaatggaatcaacgcgagtgcaggggaatggaatggaacggaatggaatgcaatggaatggaatcttccggaatggaatggaatggaatggaatggaatggaatcaacccgaaatcaatccgaatgtaatggaatggaatggaacggaatggaattgaatggaatggaatggaatgcaatggaatggaatcaacccgagtgcaatggaatggagaggaatggaatcaacgcgagtgcaggggaatgggatggaatggaatgcaatggaatggaatcttccggaatggaatggaatggaatggaatggaatggaatggaatcaaccctagtgcaatggaatggagtggaatggaatggaatggaatggaacaacccgaatggaatggaatgtaatggagaaatcaatccgaatgtaatggaatggaatggaacggaatggaatggaatggaatggaatggaatggaatgcaatggaatggaatcaacccgagtgcaatcgaatggaatcgaatggaatggaatgcaatggaatggattcaacttgaatggaatggaaagaatggaatcaacacgagtggaatggcatggattggaatggaatggaatggaatcaacccgagtacaggggaatggaatggaatggaatgcaatggaatggaatcatccaatggaatggaatggaatggaacggaatggaacggaatggaatggaatggaatggaatggaatggtatggaatggaatggaatggtacggaatagaatggaatggaacgaaatgtaatggaatggaattgaatggaatggaatggaatggaatggaatcaacgcgagtgcaggggaatgtaatggaacggaatgcaatggaatggaatcatccggaatggaatggaatggaatggaatggaatggaatcaacacgagtgcaatggaatggagtggaatggaatggaatggaatggaacaacccgaatggaatggaatgtaatggagaaatggaatggaacgaaatggaatggaatggaatggaatggaatggaatggaatggaatggaatggaatggaatcgttccgagtggaataggagggaatgtattcgagtggaatggaaaggaatggaatcaaccagagtggaatgtggaatggaatggaaaggactggaatggaatggaatggaatggaatcaactcgattgtaatggaatggaatggaatggaatggaatggaatggaattaacccgaatacaatggaatggaatagaatggaatggagtggaatggaatggaatcaacccgagtgcaggggaatggaatggaatggaatgcaatggaatggaatcatccggaatggaatggaatggaatggaatgcaaaacaatggaatcatctcgattacaatggaatggaatggaatagaatggaatggaattaacacgaatagaatggaatggaatggaattgaatggaacagaaaggaatggaatggaatggagtggaatcaacccaagtgcaggggaatggaatggaatggaattcaatggaatggagaatggaatggaatggaatggaatggaatcaactcgattgcaatcgaatggaatggaatggaattaacccgaatagaatggaatggaatggaatggaacggaacggaatggaatggaatggaatgcaatggaacggaacggaatggaatggaatggaatggaatggaatggaatggaatcaacgcgaaatggaatggaatggaatggaacggaatggaacggaaaggaacggaatggaatggaatggagtggaatggaatggtatggaatggaatggaatgtgcagggaaatgtaatggaacggaatgcaatggaatggaatcatccggaatggaatggaatggaatggaatggaatggaatggaatgcaatggaatggaatcaacccgagtgcaatcgaatggaatcgaattgaatggaatgcaatggaatggattcaacttgaatggaatggaaagaatggaatcaacactagtggaagggcatggattggaatgcaatggaatggaaacaaccagagtacaggggaatggaatggaatggaatgcaatggaatggaatcatccaatggaatggaatggaatggaacggaacggaatggaatggaatggaatggaatggaatggaacggaacggaatggaatggaatggaatggaatgaaatggaatcaatgcgagggcagggaatggaatggaatggaatgcaatggaatggaaacttccggaatggaatggaatagaatggaatggaatggaatggaatggaatcaatccgagtacaggggaatggaatggaaggaatggaatggaatggaatggaatggaatagaatggaatggaatggaatggaaaggaatggaagggaaggaaatggaatgtaatcaacccgagtgcaggggaatggaatggaatggaatgcgatggaatggaatcatccagaatggaatggaatggaatggaatggaatggaatggaatggaatggaatggaatcaacgcgagtgcaggggaatgtaatggaatggaatgcaatggaatggaatcatccggaatggaatggaatggaatggaatggaatggaatcaacccgagtgcaatggaatggagtggaatggaatggaatggaatgaaatggaatggaatgcaatggaatggaatcaacccgagtgcaatcgaatggaatcgaatggaatggaatgcaatggaatggattcaacttgaatggaatggaaagaatggaatcaacacgagtggaatgacatggattggaatggaatggaatggaatcaacgcgagtgcaggggaatgtaatggaacggaatgcaatggaatggaatcatccggaatggaatggaatggaatggaatggaataaacccgagtgcaatggaatggaggagttgaatagaatcaattcgaatgtaatggaatggaatgcaacggaatggaatggaatggaatggaatggaatggaatggaatggaatggaatggaatgcaaaggaatggaatcaacccgagtggaatggcatggaatggaatgcaatggattggaatggaatggaatcaactcgatggaatgcaaggcaatggaatggaatggaaaggaatggaatggaatcaactcgattgcaatggaatggaatggaatggaatggaatgcattggaatggaatgcaattaaccggaatagaatggaatggaatggaatggaacggaatggaatggaatggaagggaatggaatcaacacgagtgcaggggaatggaatggaatggaatgcaatggaatggaatcatccggaatggaatggaatggaatggaatcaactccattgcaatggaatggaatggaatggaatggaatggaatagaatggaatggaattaacccgaatagaatggaatgcaatagaatggaatgcaatggaaccgaatggagtggaatggaatggaatggaatcaacccgagtacagaggaatggaatggaatggaatgcaatggaatggaaatggaatggaatggaatggaacggaacggaatggaatggaatggaatggaatggaatggaacggaacagaatggaatggaatggaatggaatggaatcaacgcgagtgcaggggaatggaatggaatggaatgcaatggaatggaatcttccggaatggaatggaatggaatggaatggaatgaaaggcaatggattaaactcgattgcaatggaatggaatagaatggaatggaatggaatggaatggaatggaatggaatggaatggaatgccttcaaaccgaatggaatggaaaggaatggaatcaacacgagtggaaaggaatggaatggaaaggaatggaatggaatggaatgaatggaatggaatggaatggaaaggaatggaagggaaggaaatggaatgtaatcaacccgagtgcaggggaatggaatggaatggaatgcgatggaatggaatcatccggaatggaatggaatggaatggaatggaatggaatggaatggtatcaacccgagtgcaggggaatgtaatggaacggaatgcaatggaatggaatcatccggaatggaatggaatggaatggaatggaatggaatcaacccgagtgcaatggaatggagtggaatggaatggaatggaatggaacaaccagaatggaatggaatgtaatggagaaatcaatccgaatgtaatggaatggaatgcaacggaatggaatggaatggaatgcaatggaatggaatggaatggaatgcaaaggaatggaatcaacccgagtggaatggcatggaatggaatgcaatggattggaatggaatggaatcaactcgagtggaaaggaatggaatggaatggaatggaaaggaatggaatgaagtcaactcgagtggaatggagtggaaaaatggaatgcaatagaatggaatgcaacggaaccgaatggagtggaatggaatggaatataatcaacccgagtacaggggaatggaatggaatggaatgcaatggaatggagtcatccgtaatggaatggaaagaatggaatggaatggaatggaatggaatggaatggaatggaatcaactcgatggcaatcgaatggaatgcaatggaattaacccgaatagaatggaatggaatggaatggaacggaacggaatggaatggaatggaatggaacggaacggaatggaatggaatggaatggaatggaatggaatcaacgcgagtgcagaggaatggaatggaatggaatgtaatggaatggaatcttccggaatggaatgcaatggaatggaatggaatgaaaggcaatggattaaacccgattgcaatggaatggtagagaatggaatggaatggaatggaatggaatggaatgccttcaaaccgaaaggaatggaaaggaatggaatcaacacgagtggaaaggaatggaatggaaaggaatggaatggaatggaatgtggaataggagggaatgtattc

SEQ ID NO: 472653 - DNA, 850 bp, Homo sapiens
atctacatgacttatcactcttgatgttgtcattgatcacctggaattgctttactgagggatctctgcagtttttccacccctgtgacaagtctctgcctaggcccctaggctttcagcaatattctttgaatatggctcttgctctctgcaagcctgcagaatcagtagatgcttccaagacttatggcttgtatctttttgagtggtggttccatcattctgtgcagcaagtctatgaaggatgccttgtgcccatccctgaaaaaaaatttgccctcttaggcctttgggccttcaatgggggaggccgcctcaaatatctgaaatgcctttatggtcttgctttcattgttttgaggaatagcacctggctcccttctgtttatgctaaaccgtttggcaagtggttgctgaactatacccttggttttctctcccaaatgtgctttttcactctttatggctcttgtgagtatggatgctccataacttacaatagggttgtgtcacaatgaaccagtcataagttgaaaatatcaataaactaatttcaatttgccttctaactagaaacaactgctaataatatggaaacgtaatgaacacaaggcaaggatctttcacagaaactattcccattatgttcatataatattcttttaaaaatactacatttcagagttgtttggtaatggagaaaacaagtcatcataatttcatgtaatcatgctgttcctctgaatagtttgtgagtgtgacaggtcatttttaatccagctagctgtttacattatgttaatgtgaaaaacccaaactccaaatttgcaagctcttggtgctaaagtaa

SEQ ID NO: 472654 - DNA, 644 bp, Homo sapiens
tccttaaactaataataataataatgacaaaaatacctaccttacaaagagagacaagctgcttgtgctccagcagaccaggactaacaaatacaagtcagactcaagaggttgaaaggagagaggatccctcaggcatggaagccatccaggaagggttccatcgacacagggatactcagagtgggatgctgctgaaaagatacccgaaaatgtggaagcaactttggaactgggtaacaggcagaggttggaacagtttggagagctcagaagaagacaggaaaatgtggaaaagtttggaacacttgttgaatggctttgcccaaaatgctgatattgatatgtacaataagaatcagggggtacacgggcaggtttgtagcaaagatacattgtgtaatgctgcagtttggagtacgaataaatctattacccagataattcatgattattatgagtttacagcttgcaactcactcttctcttatcggtaagtataagatacggatttctcttgtagatttttgtcttgtttactgacacatcccaatgctgagcagtccctgacacatatagtaaatttttcatctatatttgttaaatgaataaataagccatattataatataaaagaaagtttc

SEQ ID NO: 472655 - DNA, 818 bp, Homo sapiens
tgtgtgagcaacatggctgtttatttcacctgggtgcagctgttagtctgtagccgaagacctgagagcctctggcaaaatcctggtccacgcgggcagccgattggatggtgtccacccacaccgtgggtgggtcttcctgatgatgggtcttcctctctcagtcctttgactcaaatgttaaatctgttctggcaacacccagatacacccagaacaattactttgcattcttcagtgattaagttgacatttaacattaaccatcacacattctatggtgcacggtgcaagctgttggtggatctaccattctggggtttggagcacagtggccctcttctcacagctccactaggtggtgccccagcagagactctgcatgggcactctgactccatatttcccttccacactaccctagcagaggttcttcatgagagcctagcccctgcagaaaacttctggctgagcatccaggcatttccatacatcttccgaaatccaggccgaggttcccaaacctcaattcttgacttctgtgcatccgcaggcttaatgccatgtggaagctgccaagggcattagatttaagtttttgatccaccttgagttgatttttgtataagaaactgtgattgtttttttctttatgatatctttttatctgagcatttttattcacattctatattgtttattaatttcttttagttggtttttacctttctctggtatctccttgagtagcttaataataaaccttctttttttttatgatactttaagttttagggtacatgtgcacattgtgcagg

SEQ ID NO: 472656 - DNA, 850 bp, Homo sapiens
cccgaatagaatggaatggaatggaatggaacggaatgtaacggaatggaatggaatggaatggaatggaatggaatggaatggcatggaatggaatggaatggtacgcaatagaatggaatggaacgaatggaaatggaatggaattgaatggaatggaatggaatggaatggaatggaatcaacgcgagtgcaggggaatgtaatggaacggaattcaatggaatggaatcatctagaatggaatggaatggaatggaatggaatggaatggaatggaatcaacccgagtgcaatggaatggagtggaatggaatggaatggaatggaatgcaatggcatggaatggaatggaatgcaaaggaatggaatcaacccgagtggaatggcatggaatggaatgcaatggattggaatggaatggaatcaactcgagtggaaaggaatggaatggaatggaaaggaatggaatgaagtcaactcgagtggaatggaatggaatggaatggattggaatggattaaaatggaatgaaatggaatggaatggaatggaatcaatcattccgagtggaatggaagggaatgtaatggagtggaaaaaagggaatggaatcaacccgagtggaatgcaaggcaatggaatggaatggaaaggaatggaatggaatcaactcgattgcaatggaatggaatggaatggaatggaatggaatggaatggaatggcattaaccggaatagaatggaatggaatggaatggaacggaatggaatggaatggaagggaatggaatcaacacgagtgcaggggaatggaatggaatggaatgcaatggaatggaatcatcc

SEQ ID NO: 472657 - DNA, 2058 bp, Homo sapiens
tggaatcaacccgagtgcaataatcaatccgaatgtaatggaatggaatggaacggaatggaattgaatggaatggaatggaatgcaatggaatggaatcaacccgagtgcaatggaatggagaggaatggaatggaatggaatggaaactacccgaatggaatggaatgtaatggagttgcaatcgaatggaatcgaatggaatggaatgaaatggaatggaatcaacttgaatggaatggaaagaatgaaatcaacacgagtggaatggcatggattggaatggaatggaatggaatcaacccgagtacaggggaatggaatagaatggaatgcaatggaatggaatcatccgtaatggaatggaaaggaatggaatggaatggaatggaatggaatggaattaacccgaatacaatggaatggaatggaatggaatggaatggaggggaatggaatggaatcaaccggagtgcaggggaatggaatggaatggaatgcaatggaatggaatcatccggaatggaatggaatggaatggaatgcaaagcaatggaatcaactcgattgcagtggaatggaatggaatggaaaggaatacattggaatcaacccgagtggaatggaatgcaaaggactggaatggagtggaatgtaatggaatgcaatggaatggaatggaatggaatggaacggaacggaatggaatgcaatggaatggaacggaacggaatggaatggaatggaatggaatggaatcaacgcgaaatggaatggaatggaatggaacggaatggaacggaatggaatggaatggaatggaatggaatggtatggaatggaatggaatggtacggaatagaatggaatggaacgaattgtaatggaatggaattgaatggaatggaatggaatggaatggaatcaacgcgagtgcaggggaatgtaatggaacggaatgcaatggaatggaatcatccggaatggaatggaatggaatggaatggaatggaatggaatcaacccgagtgcaatggaatggagtggaatggaatggaatggaatggaacaacccgaatggaatggaatgagggaaagtattcgagtggaatggaaaggaatggaatcaaccagagtggaatggaagggaatggaatggaatggaaactaatagaatggaatcaacccgagtggaatggaatggaaaggactggaatggaatggaatggaatggaatcaactcgttttgcaggggaatggaatggaatggaatgcaatggaatggaatcatccgaaatggaatcgaatggaatggaatgcaaagcaatggaatcaactcgattgcaatggaatggaatggaatggaaaggagtacattggaatcaacccgagtggaatggaatggaaaggactggaatggagtggaatggaatggaatgcaatggaatggaatggaatggaatcaacttgattggaatggaatggaatggaatggaatggaatggaatggaatcaacccgactgcaggggaatggaatggaatggaatgcaatggaatggattcaacttgaatggaatggaaagaatggaatcaacacgagtggaatggcatggattggaatggaatggaatggaatcaacccgagtacaggggaacggaatggaatggaatgcaatggaatggaatcatccaatggaatggaatggaatggaacggaacggaatggaatggaatggaatggaatggaacggaacggaacggaacggaatggaatggaatggaatggaatggaatcaacgcgagtgcaggggaatggaatggaatggaatgcaatggaatggaatcttccggaatggaatggaatggaatggaatggaatggaatcaacccgagtgcaatggaatggagtggaatggaatggaatggaatggaacaacccgaatggaatggaatgtaatggagagtaagggagttgaatagaatcaatccgaatgtaatggaatggaatggaaaggaatggaattgaatggaatggaatggaatgcaatggaatggaa

SEQ ID NO: 472658 - DNA, 801 bp, Homo sapiens
gctggagcacactgaagctggagcacactgaagtggaagatggggctgcagacagagactgggcagcctctgctccagggaggcccgagagccagagagcagattccataagaagaataactcccattcctcatgcatgagaccctctgctaaatgcttcctgtgcaccacctccagaaatcctcccaagccaggacaccagcagtattacaggaactggatgacaaaaagaagagccgatataaccaggaacctactctggccaccccaagtaaggatctaaagtccagcctcctcctccactgccctcaaggcctttcctcatgaaagcagaggttctgaatgctgatttctgttttaaagcccaataactctttaaacatcttctcttccagtgactcagcaaaacctgtggagccgttcttgatgcttctctttgagtcattcctcacatctggtccatctgtatggccagagaactccacctttagaatatatccagaatttgaccactaccaccatctggaagcaagcctcttggatcattgcaagaactccctaagtgatctccccacttctgcccttcccatcaggccacccccacaacacccaacctatcacagccccacaggagagggattctgctggcgtgcaaagcgggagcttgcagctcacatggtgaaagcgggaccaattgagagaatggggtgggggaggtgccacacacttttaaacgaccagatttcgtgagaattcactatcacaaacatagcaccaagcccgggatctgcccccatgacc

SEQ ID NO: 472659 - DNA, 994 bp, Homo sapiens
ctggcagctccaagctgactcatacaagcccagagccctcgcaattcccacacgccacatgcatggctcagctgcacctcctgccagctccaaacctcacggcacagggtacacacttgtgtgtccatatggattaaaccacgtgcacgctggcatccaggctgggacacactggcattcagcctgggaggctctgagcacccaggacgtgggatttgaggcagaggagtcagtgaacagggggaaccagcagatgggcatcagtgagcagctgaacgcagctggagagaaaggagaagctaagcccgagaatggacgccagccccatcaccctctcggcctgaggatgctggatttgctgtggtgctgtcattgtggaaggagacagatcccaggaactttcataccaggaggcctgtgtcaacctgcctctctcctccttctgcagggactatgctggcctcttcaaagtctaggtctttccaaccatcgtttgtggaaagactttatggcaaggagcacgcaagaggcagcagacagggacgtcattcatgtgagaatctgtagtgtctccccatgggaaagcctgctctttggagagggcaggatgaccatagaattgctcagactcggtggcctggcaggtgctgtgagcaaacaggtaaacagcttcaggacaggagccttcaatcccttatcctgctcccaagcattcggggagaggggccctagagagagactggaaagggtacaatgtgctcaaggaatgaaatggcttgtggagggctgcccagagatggtgggtccagttcaaatcagttctgcctctgttcataatcccacccacaccaggcatcagccggagctgacctgcaggccagaaagaaagaaggggccagaaagtttagttccataagggccagatggcctgagcaatgcccatcagtcagacttgtcttggggattgctaagatacaactgtgctgaaagtgtt

SEQ ID NO: 472660 - DNA, 998 bp, Homo sapiens
ttgtcatggctggctgggatctgagctgttcactctttctattagagatcttggttcactcactgtcacgagaacagcatggggggaactgcccccatgattcagttatctccacctggccccgcccttgacacatggggattattacaattcaagaaatgtacctttttatgcctttgccagcagtaccccagagagtccattagaacatcctgcttacaaggcagcaaaccgtgggtacgggattcggtgccggtaaaaaatgttcacaagctgagcatttccaacatccaaaatagtggaagagttaatggggcagctccacaaaggaatagggaagaaggagagacctattttctcaagtttgagaaacagggttacaaagagaatataaaggatcaggatacagggagatttttctgggaggaaagactgtcaacaagtggaatcacccagagtggcgagctggggtgttggagcacagcctgtggcatcttagggggatgtgcattcagagtgccagtggagacctggaacagaacctcattggaaattgagacaacagttgtttttctttaagatcgaaagaggtaaattacagaaaacttggtgctcatacatgaacacatttttgcatacatgtacatgtgtagggtttttctttttggggggagagttcattgtttaacaaatacgggtttgttttatataccttttgtcaagctcttctcatgaatatcttctattttacttcatttttaaaaacttttattaaatgcctttttagcatttgttgctattattcctatgattctgtagtcttttccataattaatttgttgacgaagtgaattttattgatttcctggtactgagaattatctgtaaaagtaaatactgtggcattaatttaaaaactgaattgcatgtcttgtgcatatcactgagatgcattctgcttagacatgatgggaatctacactattaaatgacaacaa

SEQ ID NO: 472661 - DNA, 547 bp, Homo sapiens
actgtcaaagacaagattctaaaatgccaatctggcatacttattctgagaaggaaattccaggaagttgttcaggcattttcccccctgaaacagcactgccagtaagcacttactgtctacatcactcatgtgacaacaatcctctcaccctgccatcagcatctcgtttcgagaaggggatagacagctatgtgctggacgatgctgaagcatctccctcctcctggagcctgcatccctatcactcctctcctgcctcctctcctcccttgaggcctttccagccccacctcaccttatctcatggatctcaggatgctggtgtctgggatccaattctaggaccccggctctcatttgaagaggggctccaaagaattgcagggctggcagcaggtgtcagcggggaagtgaagaggagctactgggaacgccgtgatttatccatcatcaggaagatctgtgggtgatttcacgttgcaaaatgaatttaagttgactgtaggttactacaagataatttcacactaacttacctgcattc

SEQ ID NO: 472662 - DNA, 446 bp, Homo sapiens
aaaactgccgaatccaagatggcaatgaaagcaacctctggtcatcctcactgctcattacatgctaattacaatacattagcatattttccttctaacagtcagaccactctgctgcaggtctgctggagttttctggaggtccactccagaccctgtttgcctgggtatcaccagcagaggctgcagaacagcaaagattgctgcctgttccttcctctggaagcttcatcccagaggggcacccgccaggtgccagccagagctctcctgtatgaggtgtctgtgggtccctactgggaggtgtctcccagtcaggaaacacaggggtcagggacccacttgaggagacagtctgtcccttatcagagtttgaacgctgtgctgctagatctgctgctctcttcagagctgtcaggcagggacatttaaatctgctgaagctg

SEQ ID NO: 472663 - DNA, 622 bp, Homo sapiens
cgcgtatgacagtctccggaagacggttgttgcgcacgtattcggtgaacgcactatggcgacgctggggcgtcttatgagcctgctgtcaccctttgacgtggtgatatggatgacggatggctggccgctgtatgaatcccgcctgaagggaaagctgcacgtaatcagcaagcgatatacgcagcgaattgagcggcataacctgaatctgaggcagcacctggcacggctgggacggaagtcgctgtcgttctcaaaatcggtggagctgcatgacaaaagccggacctggccaccagaggctgaagaggtgtggtggtggcagctgctgcagctcctgctgcctgtggcaggagcaagcacaggaagaagctgggagaagggccagagacccacagagacacgcggctgtgctgcgtcagcctgtgtgggcgctccagtggatttacatcctgcaccaagcacagcatttgatgcacagacaatgctcaagaaagcttctgaaatgaatgaatcaacgcactggcggtggcggcaacatggcatctggtttgaggccgcgtgcctgcaggcaaggagactagatagaagggcactgtgcttgtcttaaagagaccac

SEQ ID NO: 472664 - DNA, 528 bp, Homo sapiens
ttcccccaaccctcggagggaggatatggtcacagtacagaacccacaagttgcaagagaaaaggagcagaagaggaagaagaaggagaagaagaaggagaaggggaaggggaaggggaagaaggaggggaaggggaaggggaagaaggaggggaaggggaaggggaagaaggaggggaaggggaagggggaggagaagggggaggaggaggaagaggagaagaaggacgaggaggaggaagaagatgaggaggaggaagaagaggaggagaaggaggaggagggggaggaagagaaggaggaggaagaagaggaggaggaggagaagaaggaggaggaggaggagaagaagaaggaggaaggggaggaagaggaggaggaggagaagaagaaggaggaaggggaggaagaggaggaggaggagaagaagaaggaggaggagggctattagtagctctattgtggttgattgtttctctgtgtgaagatctgaaatatacaaaacattcaaactttaaatgtttatct

SEQ ID NO: 472665 - DNA, 545 bp, Homo sapiens
atctctgctctcactgccgtaaaacatggcaactgcagttcacttacaccgcttctcaacccggccgcagtcggtaacctcgcgcatacagccgggcagtgacgtcatcgtctgcgcggaaatggacgaacagtggggctatgtcggggctaaatcgcgccagcgctggctgttttacgcgtatgacagtctccggaagacggttgttgcgcacgtattcggtgaacgcactatggcgacgctggggcgtcttatgagcctgctgtcaccctttgacgtggtgatatggatgacggatggctggccgctgtatgaatcccgcctgaagggaaagctgcacgtaatcagcaagcgatatacgcagcgaattgagcggcataacctgaatctgaggcagcacctggcacggctgggacggaagtcgctgtcgttctcaaaatcggtggagctgcatgacaaagtcatcgggcattatctgaacataaaacactatcaataagttggagtcattaccctagatatctatatctatatatatatctaga

SEQ ID NO: 472666 - DNA, 663 bp, Homo sapiens
ggaggatatggtcacagtacagaacccacaagttgcaagagaaaaggagcagaagaggaagaagaaggagaagaagaaggagaaggggaaggggaaggggaagaaggaggggaaggggaaggggaagaaggaggggaaggggaaggggaagaaggaggggaaggggaagggggaggagaagggggaggaggaggaagaggagaagaaggacgaggaggaggaagaagatgaggaggaggaagaagaggaggagaaggaggaggagggggaggaagagaaggaggaggaagaagaggaggaggaggagaagaaggaggaggaggaggagaagaagaaggaggaaggggaggaagaggaggaggaggagaagaagaaggaggaaggggaggaagaggaggaggaggagaagaagaaggaggaggaggggtagggggagggcccgccagggaaggggaatgggccatcaggaggcaccagtgcgtagtaattaggggagtttgaaagtgtttttgttgttgttgttgttgttgttttgctgggcctgagaattaaaccgacataagacagatcaataggaaagaagcatacacattcacttaatacaagttttatgtggcgttggagccttcataaggaaataaagacccaaagatacaactagag

SEQ ID NO: 472667 - DNA, 619 bp, Homo sapiens
ggcagaagggatccaagcaagctgcacacaggatcttctatgatgcaaattcacacagggaggaggcagagcacctgcctggaaaagtgtctcaaactgagtttggaaggatatacaggggttggcccagcaaaatgggtagttaggataaagtcaacctatacagagaaaaaaacacatttccagaagtggaagtgtggggtgggcccgtgcctggaagatgccagtgtatccgtgaggtatgccagaggtcaaatcttaaaactatctggcctgcctttgaccttcatgggaaaacctaaagtgttctgtctccatagagctagatgttcatcaaatccaattacctctcccagctgcaccgctcaccaggaggcagggctctgctggggacaaagagaggcagaggaagcagactgtccccagccccgcttcctgctgcaaattaagccaggcatcgactgtgccgactcaccacctggctgctgccacaacagcagctgcagcctgttagcactgaagagtttctctcccaactattcccattagtgtggccagcgagggggaggatgacgtcagaagccaacataggcctgctgactcccagagttcggcgcct

SEQ ID NO: 472668 - DNA, 775 bp, Homo sapiens
ccgacctgagcctggaatttgaataattcgaagtgactggaaacccacagctctgccaaaaatgttgctaaggttcttggcgttttgaacaaagaattggacaaaatgttcttcaaagaaagaaagaatgaagcaacaaaagaacgaaagcagggatttatcgaaaacgaaagtacaatccacagtgtggcagcacacccgagcagctgggcaagggcccagatacagaatcttcttgggtccaaatgccccctagaaatgctgctgctgcggctgattgggggctacacattgagaaccactgatttagaagaaggagcaatcatcatggctgaaggaccaggttcctgctcacatttccaagtcaatacatcctgtggtctcttctggggccaacctggagagcctgtgggaccaaaagaccatctatcaatgtctatcatgcggctactgtgtactcagtgcccttggaggggtccgggcgatggcactcaggatgaaaccccaggtgaccagacggaggaggggaaaggggttgggaacagaggcatcgattggatagaactgtgtaaacgaatgaggagattgaaggtgacacgcagactctgtccggcaaagtttctgctgctgcctaactccgtggacactatcctgatggggaccggacacctccagaattctctctccaacaaaagattacttcaaggccagaacccgctcccagctgaagactgactacaagattgactgtgattaatttataacctggcaggat

SEQ ID NO: 472669 - DNA, 2200 bp, Homo sapiens
gaagtgaggcacgtgtagacaagactccatctgccctgggcagctttcctgaacccgagggactggtttgccatggatcctcggcttctgtttatctttgctgctcacctagttgtgttttgcagagagaattgggaattgacactttcctttgccaagatctggggaagcgccaacttgggattactttatgtagatatttgtcttggaagttttgaggccattcatagagtgggaattcagactccagatctgaatgagtgtggggaagatgttctagatgctgtggaaataccgagcagccatattctaagcactgtggctgcctctgcttcgggaactttccatggggcaccaggctccctgcacagtgcattctctctgtgccagtcaccaaatgccaatgaatgcttaacggcccggtgtcacccctcctctttctgccctgttatttttctcctcctcacagattttgaaacgtctgtattatacttaccagttaaagatttctaatctgaaaatccaaaacctgaaattttccaataagcatttcctttgagtgtcatgttgacactcaagaagttcagaattttggaacatttggatttcagacttttggattagggatactcagcttgtatttactctgctggccaccatgaaaacctccattaaaaaccccaatggacattgtgctgacagcttctgggttggtgagcacaggggggtgcagggagggtggtgcaccctggggagatatggtggccccgagcagcttcctccagaccttgccctgggaatcccttccatctggctgttcctgagttgtatcctttgtaataaacaggtaacctagaaaacaaactgttttcctgagttctgtgagcccctctaggaaaggatcaaacccgagaaaaaggttgtgagaacctccatttgtagtcaagttagactagtgtcgcgggtagcctgaagaccctctccttgcagttggagtctgaagttaggggcaggcttgtgggactgagtcctgaacctgtgggatctgtgctgacttcagatcgagccagaattaaattgaattgtaagacaccctgctggagaactggtcagtgggggaaaaaaacaaaacccacacatctgagtcaccgaagtgttctgtgttgactgtggtgtcagaattgaagggctctggaagtgtggagagtggagaaaatggtttgtgttttcctattacacacccactctggaggttcttagggtttgcagaccaggaagcagagaaaacccttcacatggaaaccattcctgcccatccctggctcctgggtggtgggaaggcccattgctaatggggccagggtaggcattttgagttcatttagcttagcccttaatggaatcttactcagacagtcctaagcccaccggcaaggcaataaaagttgtccccacccctatcaaacaactcatagcatattaattttgacacaagatacttttctcatctctaacgtgagtacacattcgatttataacaaaaataaacactgtagaaaggtctttgttttaaagtctgaaatatcaaaagtatccttgtttttgaaatgtcacccgcagcaggcccttcctccgcatctggtgcctctttcatctgcgtgtggctgtcagaagcaggccttgtttgaggaattcttatgtagccagcctgggggtgtccagccacccaggccctttgctgcattggccactgatggtgaattaatcctcagacttgtgttactggtgacaaacgatgatgtcacgtgtacatggacacaattttaagggagatcaggcccagcactccctttcatcttcctccagcccttagtgcctcatgggtgtcctcagtggcagtggtactgtccccaagctccaggctatctcctgctgccttttctgtttgctgtgcttctcgctctttcctgcggcaccttctcgtccacatatctcccctgtgctgtcctcccctgaccacacaggcccaagacagaactatacagaaaagagctctgacttcaccaagcccaaccatttgtattgcaaagataaaagcaaaacaacttacttggtttctgagtctaaaatatctttctttagatcaatggttactttacagctttctccaagaacaatggtgttggagccttacttgttt

SEQ ID NO: 472670 - DNA, 785 bp, Homo sapiens
tatatctgattatctgacaaggccaggtttaccccacgatggacttaaaaataagcttgtcttgctaccaggaagattttccaccaggagcctgcataattggcccttcccattccaagatgcagaaggactatgagaatcctgctgcaggactggctgccatgcatcatctgtgggccttcatctgtcaatggaggaaaatccagagcaaaagacatgagctaagtcttgaagaatggatgcaatggatcctccaagctcacaaactgcccacattccaggcagaagcagcagtaggagcaagagcgtggagaggagtgaggagagctgcctggcaacgcaacgcatcgctgtgcataaactttgtttacagccaaggctggagtaaaggaacagatggcaagaaaatcggatttaaagaaaggaaggatgtgcttgcatctgggagctcggtaaatctcttggcttctggtgtgcgtacaagggtgacgtctagctaccccagcagtcgcgtcccagtttgctgttgatttttgcctgtttggatctgtctctgaggatggttaatacatcttattacaagcatttatctcatccctcccacaggaaatgtgttttcccagggatttgtatgttccctaaccttttatggaaagcagtttcttgatcatccatgtgattgtgtatctaaaatttcaagaatatttaagctgttaatcctgcttgtctgtagaagatgggtttatatttctatgatcttggaaatatttacaatgagcatgtat

SEQ ID NO: 472671 - DNA, 1062 bp, Homo sapiens
agggctctgacccaatctgagggcaggtcaggactgagccctccagctccgccacagcagtccttctgcatgtgccaaaatgtgacaccagggatcatggccttggggatgtctgctgtttatttccaagtcagtggcactaaggagcagccagtcccagggcacccaatgcagagcatcctgcttgagctttggggcttccaggtacaccactgcgtgccagggaaccccaggccagacttcatggaacacagcaaggacctgaccctcagcctcttggatcactcctgccactggcatgggaggagccatagcagcaaggagtacctggagctgcacagggagaacttcctcctcatcctcaggtttctggtggcagggtctgcggaaggggcggcaggtgccatgtccggccacgaaggtggcaagaagaagccaccgaaacagcccaagaagcaggccaaggagatggacgaggaagacaaggctttcaagcagaaacaaaaagaggagcagaagaaactcgaggagctaaaagcgaaggccgcggggaaggggcccttggccacaggtggaattaagaaatctggcgaaaagcaagctgttccttgtgcctgaggagatggtgaccctttatttcatccgtatttaaacttctctattccctgccataacatcttttgccccgtatagctggaataaagtgttatcttggagctgttgtacatttaagaataaacttttgtaaaaaaaaaaaaaaaatcttacagtggctcatcatctctttagttgttttcactaagtcattcctaccataactgtgaatttaaaagtaaaaccagctcagaatcttgccagagtctgctctttggtccttgttctaccctaaactttgtatcacctgaaattaaatcaactcctttgaaaaaaaaaaataacatgtttattgaatatttttaatgagccaaggatatgctaagggttttatatacatgagctcatttaatcttcacaatgaccatggtcttgctctgttgcccaggctggagtgcaatggcttga

SEQ ID NO: 472672 - DNA, 646 bp, Homo sapiens
ccaacagagcactactgtgaacatgccaaaatgcgagagctgtgcagctgaacccctcagctgcaggtctgttggagtttgctggaggtccgtccactccagaccctgtttgcctgggtatcaccagcggaggctgcagaacagcaaatattgctgcctgattcttcctctggaagcttcatcccagaggggcacctgcctgtttgaggtgtctgtcagcccctgctgggagatgtttcccagtcaggctacacgggggtcagggacccgcttgaggaggcagcctgtccgttctcagagctcaaatgctgtgctgagagaaccacgctctcttcagagctgtcagacagggatgtttaagtctgcagaaactgtctgctgccttttgttctactatgccctgccaccagaggtggaatctatagaggcagtaggacttgctgagctgcagtgggctccgctcagtttgtgcttcctggcttctttgttaacactgtgagctactcaagcctcaacaatggtggatgtccctcccgctgtcaagctgcagcatcgcaggttgatctcagacttctgtgctagcagtgagcaaggctctttccctgaggcatttggttgtttactcgagagctttcttttttaaggt

SEQ ID NO: 472673 - DNA, 660 bp, Homo sapiens
cggagcacgtgcattcagaaaacttgagttcagtccttttactagcagtgtggcctcaggacaggtcccagaatgcctgtatccaggcctggcgccaggagccagggcttggagtctggaaccttaggaatgtatctggggctctgttctactgcagctcagattgtggatatgcttcagagtattgtaaatcctgcagtcttaaataaattgaaccaatcagcagatattattgtggtaactcaatattgtggtaacattattgtggtaactcaatattgtgataacagtattgtggtaactcaatattgtgataacattattgtggttgaaaacctaacaaaatcagtctggaaagtgacagaagtctcttacagagaagaatgtgagcaagtaaaagagaaatttctccaagaaacagcatttaggacctttaatgtccctattaggccctaaaatttaaaaataaaaatatgtttgtaactttgaattggatcctgcattatataaataatatcttgtacagatttttggttgttggacaatctttgaagactttgtagttgttgctgctgctattctcatgacatttcaattattgtctgatcattcatacttgtaggcttgattttatgggttgctatgatatgtttatgtaaa

SEQ ID NO: 472674 - DNA, 567 bp, Homo sapiens
tccgtggcagaagtatgggtccccagagactctcactcactcaccatttccctgcagtggagaagcctcctctggctccgtgccattcccagggtgctaggaaactcataaatgaaggacctgagagaaccaacaatgggaggacctcatctaatctgaaacgtgggtacctgtgggtccggtcggcaaccaaattacccacaggtttgttgattcaaaaggatttgtcaattaagtctctgctaaataaatacccacagggccagctagtcgaggctgtggctgctactctttacagcaccttccttggtgtctttgaggggcctggacccttagctcagctgacaggcagaatatctgtgtcagtgtctgttattcatccgtcgttgggtcagggtctgcaggatggacccctgcagctggtgccctgtgtgaggaacgctgcaaagggagtgcaacggacctcccaaaaacgaaggtgaaaaaaactgcacggtcagtgagtcactcaacagaaacagtatataaaagtattgaaacagccgcttaaggctagcggagcctcag

SEQ ID NO: 472675 - DNA, 720 bp, Homo sapiens
cacttctctctcctgcagccatatcaacaaggacatgtttgctgccccttccaccataagtgtggccaaggctcagctcagctctcctgggatgtgtgctctaacactggggggattcggacctggcccacagctttgttatatgccccctcaagatgaagtacctgctgcactgacagggccacagcattctcagtccactggcaacaacagtccaatgggggataccaacaaaagtgcttcattggagcatttgctgaggggtccatgcttacgcacatgtgcaccagctgcagcaggggtgcagtgtggcattgagagcagagtcgagtctgctgctatggtgatggccactgagaagcaccctcgttgggcatgcaaagctgccctccaagagggtatggcctggcggggaccccaggagaggccagtcgacaggagagcatctaatcacattggcatatcccacgggcaagacagcccttctctgtgcaggtctgacaatcaataatgaccaaagtcactcagaggcgtgtggtattcacatcaaaaatctattacctaacatataaaactatcaagtatgttgattatgtttttagtatagtggtattgtttatcctgatttaatcttgaagattaaaaataaaaataatgttaacttcagttaactgttcaggcaaattattttcttttttgataaaatgtatttgtgttgct

SEQ ID NO: 472676 - DNA, 602 bp, Homo sapiens
attgtaacccactgtcttttcaaaggccaaaagtcaccaaggatgcaatgggaactggactatgctgttccctttgacaacatgatttcacagagtgcttcctgcgccgatgcagagaactttcgccagattcaaggaggtgcagggtacagatacttcacgggactggaggcagggaagaggcttgtaaatgtgcaggaccaaaagcgagacaaaagcaaaacaaaagcactaatccttctccacaattgtccaataagaaaacagcgcattcagggggcagaaccaatagaaaagttcatactgaaatccatgcaaaatggatacaaagaggaaaaacaaaccacacccaaatggaactaccctaaaacaattaagctgcgaggccctgaatacaacccagcatcatgtcggtactaccgcagcgtcacgttggtactatcgcattcaggaacacagcctgtttctggtcacgggaaaactgcagacaaatccaaaatgaggaatcatcttctaaaaagggagggttatattgttcacaaggttaatataacagtaagaagaaatgctgtgaaaaagtttcagaataaaggacactaaag

SEQ ID NO: 472677 - DNA, 1382 bp, Homo sapiens
gagcgagtgagggctgccagcacgctgtcacctctcactaccttctccctcacttgtggatgtccatggacaatgctacccaccacagagagtatattcaatatgctaccttctccctcacttgtggatgcccatggacaatactacccaccacagagagtatattcaatatgctaccttctccctcacttgaggatgcctgtggacaatactacccaccacagagagtatattcaatatgctgccttctccctcacttgtggatgcccatggacaatatactacccaccacagggaacatattcaatgtgctaccttctccctcacttgtggatgcccgtggacaatactacccaccacagagagtatattcaatatgctaccttctccctcacttgaggatgcctgtggacaatactacccaccacagagagtatattcaatatgctgccttctccctcacttgtggatgcccatggacaatatactacccaccacagggaacatattcaatgtgctaccttctccctcacttgtggatgcccgtggacaatactacccaccacagagagtatattcaatatgctaccttctccctcacttgaggatgcctgtggacaatactacccaccacagagagtatattcaatatgctgccttctccctcacttgtggatgcccatggacaatatactacccaccacagggaacatattcaatgtgctaccttctccctcacttgtggatgcccgtggacaatactacccaccacagagagtatcttcaatatgctgctttctctctcacttgtggatgcccatggacaatactaccaaccacagagagtatattcaatatgctaccttctccctcacttgtggatgcctgtggacaatatactacccaccacagagagtatattcagtatgctgctttctcccacacttgtggatacctgtggacaatactacccaccacagagagtatatctaatatgctaccttctccctcccttgcagatgcctgtggacaatatactacccatcacagagagtatattcaatatgctgccttctacctcacttgcagatgcctgtggacaatatactacccaccacagagagtatattcaatttctgaaagcccaatttgaagaggaggttcatcgagaaatcagtcagccagcatccaaatggatagtcagcaagttaaagaagggtagaaggtttagaaagcagacacagcaaaacagagccaaaggttttcaaccatccctgggaaaggagctgctgatatatctatgggaaacggtaaatgtatgtgttctatatttgagcaaattggtgtagagcaacaaatcccctggctgcccaagactgcag

SEQ ID NO: 472678 - DNA, 858 bp, Homo sapiens
gctccagcacctttaggagaacagaagatcatgtttaaaaaggttgtagcagccatgagggagccatgcaaagaggagaagagcttcccagacaaaggcggtatcatgatgtgagatgccaagttggaaggcctcttgtggaagagtggctaacacttctggagtatgagctgtggaaagaggcagagcaggcaccaactccatcagtgacagaggcctggaccacctctggccgaggaggtgggaaaggggtctggcagtcggtggagccagggacctccaagtcacttccaagtcctgcaaaactacaggagcaaagatcttttcaggggccccatttcctgtcagtgggtgctgcaacaccagcagcagcaggacaaaagagaggagtgcaggctcagaggtttgtgggaaacaggagatctgggagatcaagtttagatttctctggagaccttgcaattatgggcccaggcaagggaaggcttcagcctccccgtgagaggcctcgagctgctccaagtgctggagaagctgtagttcggaagctccctccccgcctgctccagggcacatcagactcagcgagtctggctgtttccaatgttagtcccaataggaagaacaaggcccaatcgggaccttcctgcctctacttgagtgggctggttgattactcagtgcacttttctgttgagagagcataggatttatattaactattcacttttctttcattcattagagtgttttacagtgtattttctatgtgtatgacactgtgctaggcactgcaaagtacagaaaattataacctgttttaatgctgctgataaagacatacctgagactgggcaa

SEQ ID NO: 472679 - DNA, 643 bp, Homo sapiens
gtcctacgttgtctgagatgttctactcaggagccctgccttctgccatgtgaggatgtggcacaaaggtgccatttgggagcagaaactggaccctcaccagacaccagacctgccagagtttaagagcattagaggccacggccatcattatactattgtgcacattactgaaatgcagttcttaattgccactaccatgactgtcctcaccacagttggcatcaccatcaacttcactatcatcataaaggaaaatttggagacagacacatatacagggaagataccaactgaacatgaagatgaccgcctacaagccaaagagaagaggcatggaatggatccttctctcatagccctcagaaggaaccaactctgccagcaccttgattttggatttctggcctccaaaactgcagcaattctgctgtatgctgcatggaccagatcatgcctgacctgcactgtacagattatctttgcaccagatcctctgagctcatctaaaagggatgtgggtgggatggttgaggatgggatggtgaaaaggaaattatgttatatcagcgacaacagatggaaattgatttatgtagcctagggaaggaaagatttgggaagcaaaggaggaggcaatatt

SEQ ID NO: 472680 - DNA, 1345 bp, Homo sapiens
gggaccttgtcatggagaaatctgctgggccctatgacaaaggtgaatacttgacctctgtgcagaagaccctctgtgatatccaggtgctctccctgagccgagttcctgcggccttcctctggctgtgcctccctccactaggtgaagaatcagtggggccacagcaacatactctgcagaggcccatgcattccccagaatttcctgtccaaatagccctgagactacttcgggaacgtgggcaaatctcttctcgagatctgtcttccagagggcgaatcatgctattggtgttcacccttaggcctgagagtaggcaaaggggcagatgtttgcaggagatagaagatatggaaatcagcctgccaaacattcactacttcaacatagacatgtccaaaatgggtctgatcaacaaggaagagccatggcagaatgttaaaccactcagtgtgtctgactagacagcctgaagtactgactggtgggttggtgtggaaattgactcatctctcaactattgccagaataataaggcattaccatgcttgaagtaactttagtggaggacatacacattttcctgtttagtcttgctgccattagacaatccatatggaaaaattactggtacagtcaagaggaagttgtcttcaagactgtgacattgtggccaccaataggagtccactctcagctgaggaattccttaagtcatttgtgatgctggagatgatagcatgtagccatgcaaaatttcacactagtatattgatttatagtgttcactttcctccaatatgaaacagtttatttcttctacacctagctcagcaaggcattctgtggattaccttattagtaattataacaggctttatggctataatttactttaaaaatgctgagcagtattagaacagttataaatcaatatttctttttggttatcttatgccttcctatcttggagaagctttagaatcaattcattaagaaaataatcatgaattaatgagtgtgtcacatcaattaatttgtgcacaggtttaagaaacaaatattgttttcatcctactgatgcttctaagtaatgcagaaaatgaaataaaattatattgaaaaatatcaccattgttacttcatttgactgaatatttgattttaagaatgctctagcatatgtatcattgattatttatttccactctgatagtacttctgtgatcttaatgtttgattttaaactttttcaatccttagagaatatttagtacatatgagggtactgaaaaagagtagaaattttctttgaataatgcatcccttatgtgcacaaaac

SEQ ID NO: 472681 - DNA, 517 bp, Homo sapiens
cctagcaacgaggaggaaaaaaataatgacacgatcgatacatttgctccctggtgggaggggcattggtaagaatagaggagaagtggtccttggactgtacaccaggaccaggccttgtggcctagactgtgaaaagggaaactcaaggaggggctgttctgatgagcagataggagtcatggatatgagccctgatgggaagatggttggactggcctgcctccgttcctactgggccgaggaatggactgaggttggctgcaagtctgactttttggatatagggaaacaactggcttgcagcatgtaccagtctctccttggtcaccagacactgctccatctcacagaggtgtgtagacctgagtcatcaggagactggttaaacccttatctgcatatggtcatggcattgtcagtgaagccaaagttaatcaagaattatactagctgaatgaaatccttagtaaatgtctgaatatttaaagccccatcattgctctttcttattcgt

SEQ ID NO: 472682 - DNA, 7050 bp, Homo sapiens
aggagagctgacacccgccacgtggagtgggggaattttctatactgtcttcttgaaatcaacttagagaaaatgaacacaatagattttaagatcttaattcactaatgtttaatgaatatgtttgatgctgacacaaccaccaacttggtaacaatttctttcattttgcctataggtgttcatgtatttggattatgctctacagctctcattacagatatcatacagctgtccacaggatatcaagcaccttactttctgactgtgtgcaaaccaaactatacctctctgaatgtatcttgcaaagaaaattcctacattgtggaagatatttgctcaggatctgacctcacagttatcaacagtggcagaaagtccttcccttctcaacatgcaacccttgctgcctttgcagctgtgtatgtttcgatgtacttcaattccacattaacggattcctctaagcttctgaaacctctcttggtcttcacatttatcatctgtggaataatctgcgggctaacacggataactcagtataagaaccacccagttgatgtctattgtggctttttaataggaggaggaattgcactgtacttgggcttgtatgctgtggggaatttcctgcccagtgatgagagtatgtttcagcacagagacgccctcaggtctctgacagacctcaatcaagatcccaaccgacttttatctgctaaaaatggtagcagcagtgatggaattgctcatacagaaggcatcctcaaccgaaaccacagagatgctagctctctgacaaatctcaaaagagcaaatgctgatgtggaaatcattactccacggagccccatggggaaggagaacatggttaccttcagcaataccttgccgcgagccaataccccatctgtagaagaccctgtcagaagaaatgcgagcattcatgcctctatggattccgctcgatcaaagcagctcctcacccagtggaagaataagaatgaaagtcgaaagttgtccttgcaagttatagagcctgagcctgggcagtcaccacccagatccatagaaatgaggtcaagctcagagccatcgagggtaggggtgaatggagaccaccatggtcctggcaatcagtacctcaaaatccagcctggcgctgtccccggatgtaacaacagcatgcctggagggccaagagtgtccattcagtcccgtcctgggtcctcacagttggtgcacatccctgaggagactcaggaaaacataagcacctcccccaaaagcagctctgctcgggccaagtggttaaaagctgctgaaaagactgtggcctgtaacagaagcaacagccagccccgaatcatgcaagtcatagccatgtccaagcagcagggtgtcctccaaagcagccccaagaacactgaaggcagcacggtctcctgcactggctccatccgctataaaaccttgacagaccatgagcccagtgggatagtgagggttgaggctcacccagagaacaacaggcccatcatacagatcccgtccactgaaggtgaaggcagtggctcctggaagtggaaagcccctgaaaagggcagccttcgccaaacttacgagctcaacgatctcaacagggactcagaaagctgtgagtctctgaaagacagctttggttctggagatcgcaagagaagcaacattgatagcaatgagcatcaccaccacggaattaccaccatccgcgtcaccccagtagagggcagcgaaattggctcagagacgctgtccatttcttcttcccgcgactccaccctgcggagaaagggcaatatcattctaatccctgaaagaagcaacagccccgaaaacactagaaatatcttctacaaaggaacctcccccacacgggcttataaggattgagtgatgtccattccatcattagggctactcgcaaaagaccatatgttgattctacctgtgttctgttccagcgaattgggaagtctcaccaagctagattgtctaccatcagcccagaactctgtaacttttcagaactgctatactcaaacttgcagatctcacatcaaggagagggaaaagcacaatgcaagaacctaactaacgtgatgatatgaagagttttcttaagacctgtcgtcaaacttaaaaggttttgcagagggcagtatcaaaagaaagtggttttcttcaaatgtatactattttacttcctgaatgtgccaactttggggatttttctttatagtgagctgtgggaacccagaacacacacgttttccctacagcagaggccatgcagtattatatattcattttgcagaatctgcacctacagctcaatacgggtggtgctgattattatagtacatataccatgtaaactctcaaactctatttagctgtgaaatagtggtgtgcaattccttgttaaagaaatgctactttattaagaagatgctggctgctttgtgttagaataggacaccccgcagcttctctgtagtggctctgtcacagtcaaaaaatgaaaaggtttttgtgcgtttcttcaaaattctgctttcttcaacatcaaaaattgtgtagaaatattttcagtgaaagggaataactagtacttttctgcatagtttttcttctgcttactttttatttaagtataggtactgctaatgaatctgttttcttagtgagtaaatttgcataattttataaatattattttagagaatcttttgaaattgttgtgatcatattttgctttctatggcttctccttaacttattgattaattttttgaagttatagatatgttctcctattttaaaagcaaaaataacaattgacattccttgagcaaaatatactgctgtgaatttgcaaacaagaaatctgagccaaaacttgacattgtgggttacattgccagaaatgttggtcaagtttgcccttagatgtctacaactagctggcataggttgccatcttaacaagtaatctaaaagtcccattcggttctacattattaactttttttttctatatcctgatgaccagtaaattagagccacactggttaagtttgactcgtctctaaaacgtttttgttaattggacaccaagaggaagaatctgaaaaaaaaatgcatgttggtaagtaaaagtatctcacggtacaaattaagaatgactttcttcaaaatatctgaataggtgcagttttagtttaacatgcaaacaaccattgttgctacctatcctgaatcaagccttgagcctaaatcaaagcaaaccaataccattgataagaagaagataaaaacaaaatattttggagtgttttccaacttaaagtatgaagacatactcagttcttggaacttagtattaaaccttttttatgccatttcataagaattccgatatatacttgatgattgccaaggggatgaaaggaaacaacagagatggttgatctgatcttagctcactttccaataacagaaggagttgtttacagatgaatagtatcacatcattatcaatttccacatgaaaaaggtggagctttctagaaaaaccaacctctaaggcattaggaatttagctgaaaccagcagaattgaaaactctggcaataaaacatggactcaaccatatcccttctggcaatttccttctcagagaggggagtgggaataaaatgttgccttccccacttctcaccaccaccgccatcatgacgctcatactggcttttgcctgtttgtagaggaaaaggtgggctggttttagtactctgaaggacaaaaacaagcaaacaaaaacccctgctgcagcatttcaggtgcagtatgatatttcctaatctttcctatttcttaacaaaagattttaaagtacttctctagtcattgaagtttttttttctttacataaatattgatatattctttttctactcaaagtgccaaaggctacagtttttaatgacttaacaaattgtaccacattgttaaggacatataatgatagacactagaactcagacctctgcatgtatatttgataacatgtcttttgtaaaacaaaaattacaaaaaaatttgtttacattccactggtaccttaatttaaaataaatcagactaaaaggtggtatctcttcttagtgttctatttatcttatttgctaatgggagcacttcttcctttgttaggctgtgctttactgataaaaccaagtattgaataaagagagttaattatctttttaaagtaaataaaattatgaaaatatatatagtatatataaagtactgtgtttaaaaaaatgttatgcaatgttttccaaactgataaagtttgtaaagtgctataaatgtattttgttaagtacagataaaagctattgtgtgagtatattgtgctaaaatcatagaaataaagattagatttcttcatcaaaattggaatagtttggtttttacttcagagtctgaatagataatagcttggcttgtaggaaaataactgaggaaataagaaaaaatcagaattgattaaattcataattgtttaggaatgggttacaactaagaaagaaaagtttctcaatctatgacatgttttcttattgttagaattttcttttatgcttattaaaggagctcttttatactttacacatatttttgcatatcaatgttacagtgtatgaaaaagaaaatatgaaggacttgactaagagtagttgatgtacttattttcccaaacagtagagacctttatgtcatcatggccattggcgttgcagcttttcttaaaagaatgcttcaccattaactccacgatattctttcaagccattaaggctcattatattaattttactgctgatgatttgtacatctcactggaaggtattagcacaagtttttagaccacaaccagaacttaggatttactcaaatggtcctaaggagtttgttgaatgatatgtgaagttacaaacatccagtaatgccaccaagttcatgtagctgtccaattgcaacaaagttcatacataccaggcaacaacatcacaatcactacctggccaacagccaatgtaagatactattgattgtaggaaacaccctggttttagagaagttaacatgtgaaaaaacaatgtgtatcttatataatgggtgaaatacagtttctctaggtctttaaattaaacttctctaggtcttgattttttcatttctaaaatggagacattcagccatatttcccttctaaaggatgtcctaaagttctcaatttctatggattatcattatgtattttatccaatgagcaaaaactggtaagaaaataggaaataacttgatgatctaaaataactaactaattagtattgccatctttgactacaaggttaatagaagcaagccaactggggctgctgaaagcctacatcaactatttcaccacataacatatcaaaacaggtgacctgtatacgtatacccctagtcctagtacctttctcatgaggcaacagttgagtagattcttggttattatacacctaggaagctatcattaagggccctgctatttctgtcttttataggtcaagtctttacttgatctctatgggtaatttcatattacaggtcaaagggaaaatgaatatgtatgcatgattcagagagtaatgtaattaatataaatgaaaaaatcaaaatgaattaagatgatttaatctaaaaaaacaacaaccatgacttggaaaattgtcaaaggcctgtctgtgattggatatttcatttcctctgcttaaatatgtttctgcctttattctgtaagaagattctaaaatgccctaggatcaaatattcccatttgaagaaagcatatatttcagtaatagtatatagattgcaagtaagatctatttatagaagatccccattgacgatgctttcaagttgaaagaacatttagataagccatttgatatagaagtgacttttatttcacggtcaaaacaattatcagccaaagaaagttcctaattttgtgtatttgtgcaccacagtaaatgacaagtgaaactatagttctgccaccaattctacttcacgaacttgaatgcccttttcatctcctttactcccctaccttaagattctgtcattgcctatgagaaaaatgtatctaaattctaaagttacattttcaaaatggtacaactgaccattagataaatgagtttgaagaagagaaaatatgaaaattgcatttgtataaaatctcattttctatttatcactttgtatgcctggctacttccttataagaatgagagaaaggaagtcaaggataagcctctttgtctttaaaaagatgacataaggccaggcatggtggctcacgcctgcaatcccagcactttgggaggccaaggcaggcggatcacctgaggtcaggagttcaagaccagtctggccaatgtggtgaaaccccgtctctactaaaaatgcaaacattagcggggcatggtgccaggcacctgtaatcccagctactcaggaggctgaggtaggagaatcccttgaacctgggaggcagaggttgcagtgagcagaaatcacgccactgcactccagcctgggcgacagaatgtgactctgtcaaaaaaaaaaaaggaagaagaagaagaaaagaaaaaaaagatgatatagaagtgaccgtcatttataatccacttgattgacccaaactagatccagtgaaacttttccttttatgagtaatgcttttaaggtcaaatctagaatattaacataattctcaaaactcaacagtagaaaaaaacagagtaaattaaaaaagtaaaaatgtaaaataaaaatggacaaaaatatgtacagaagtttcaccaaaaaagcatatacagatggcaaataaacacgtgaatagatattctgcattgttagccatttggaaaatgc

SEQ ID NO: 472683 - DNA, 736 bp, Homo sapiens
gaaatgagatcttggatcccatactgaaaagtaggctgaggagactccttatctcccttccatatcgaagcacccactaacaaacactaccggttgtgtgggaatgatgtgggttccttgcatccagagaggcagatgtgtgaatgcacagaacttgaacattttcaatggaaatcctgtttcagtgcattcgaatgaaaaatggcacccactgaaaaagcagccctctgacattttgcgagacagagtacttcatagcacaaataacctggaaaaaatatgcctgaaaatgcatttgacactattatttaaagtgtcagacttctcagaatttgctgctgcaccccaatgtactaaatatagccaagagggagccccactacttgaaaacccactggacaaccagctgcagcatatgttattgcccaagagcaccgggcacacccctaggtgtggtctgttaaaggtgcttggagagtggagagatccaacggttctcctcacaggaggaggggaaaaggcctaacagcatcagaaatggggtaatgtaattttcaagatgggcacattgcctaacccaacaaaatcacaattctgacattcaggtgagcaattagcagcttctgcctagtgtttgtgcaggtaatatgtgaatgctaaagaaacaagtaaatgtaaggcaatgtttttatatttgctaaacatgttttcttcgaataaattttagatatattta

SEQ ID NO: 472684 - DNA, 893 bp, Homo sapiens
ggcggctgtgggtgcagctttagcagacttaaaagtccctgcctgatggctctgaagagcacagcggacctcccagcatggcgttcgagctctgctaagggtcagactgcctcctcaagtgggtccctgacccccgtgtatccagactcctctgctggtgatacccaggaaaacagggtcaggagtgggcctccagcaaactccagcagatctgcagcagaggggcctgaatgttagaaggaaaactaacaaacagaaaggaatggcatgaccactcaaagaccccatctgaaggtcaccaacatcaaagaacaaaggtagataaatccacaaagatggggagaaaccagcgcaaaaaggctgaaaattccaaaaaccagaatgcctcttttcctccaaaggatcataactcctcgcaagcaacagaacaaaactggacagagaatgagtttgacgaattgacagaagtagccttcagaaggtgggacagccagagagaaagatcagaatattcacaaaaggaagccatcagactaacagtggatctctcttcagaaaccctacaagccagaagagagtggggaccaatattcaacattcttaaagaaaaaaattttcaacgcagaatgccatatccagctaaactaagcttcttaagcgaaagagaaataaaatcctttacagacaagcaaatgctgagagattttgtcatcaccaggtgtgccttacaagagctcctgaaggaagcactaaacatggaaaggaacaactggtaccagccactgcaaaaacataccaaattgtaaagaacaactacactaggaagaaactgcatcaactaatgggcaaaacaaccagttagcatcatgataacaggatcaaattcacacata

SEQ ID NO: 472685 - DNA, 629 bp, Homo sapiens
tgttgctgtgtctgtgtagaaagaaactgtggggcggcctggcagaggggctcctcacttcccagacggcatgggggctgggcagaggcgctccctctcttcttataaggaccaccactacagcctacctccctgccagcccctcccaaagcccatacctggccgctcctgcggggttgtgtacacagtgcagcctctgctacccaacctgggtgttttgcaggggccccatctgagtactttcttggaagcttgggtgtactttggatcctccagtgccactggtgccggacctcaagggactggagatggagccacgggctggtctcaatgccatagggctgtagtgctgctcaggagtgctcaaccaagattcacagccggtgctcatgttggtgaggatccccccactctgagaacactgagagaggactctctcctgcaggtctgctgcagtttgctggaggtcaactccagaccctatttgcctgagtatcaccaggggagcctgcagaacagcaaagattgctgcctgctccttcctctggaagcttcatcccagaagggcaccggctttatgccagccagagctctcctatatgaggtgtctgtcaacccctgttgagagg

SEQ ID NO: 472686 - DNA, 663 bp, Homo sapiens
ggaagctgcagtggagaagaggaggctgagagggcagccatcatgtgcagagccgttggagaaactgctgtcttttgcctacaactagccacaagggattttgaaaaccaggaaaaaactattttaactggagactgttgctatataaacccgctggtgcgccgaactgtccgatttcttggaatttatacatttggactgtttgctacagatatctttgtaaatgctggacaagtagtcacaggaaatctggccccacatttccttgccctgtgtaagcccaattatacagcacttggatgtcagcagtatacacaattcatcagtggggaagaggcctgtactggcaacccagatctcatcatgagagcccgaaaaacctttccatccaaagaagcagctctcagtgtctatgcagctatgtatctgacctcacatcacagaaattcccatgtcttcaacaaccactaagcagcatgagatcaccagtgttgccaaatgacttagtgtactcccagccaaaagcaaagaacattgacgttttggttaatgcatgtgggcttatgatggataaatatactatttgattaggctgtttgaaatattgaaaaatatgtcagaattatatttatgtgtctggggtttcttatgttagcaaacgtc

SEQ ID NO: 472687 - DNA, 730 bp, Homo sapiens
atattgttagaagaatatgtggaatggagataattgtactgccatgtttggaaaaaaaactgcctgctacaatgagtactattgagaaaggtcctgtttatgggccattcctgaactacctattcatacccattgcccattgtaaaatcttcatttttgaatttttattgatttgtatacatgctttgtatattcagaatatattaacctggtctatcatatgtgtggccaatatatttttttttcctgaggacatttcttttaatgtggattccagtggcttcttaacggggatacactgggataggcatccccagcacacatgcttgaattgcgctgtggctaaaatttataggaatattcaattccatagggctcttattacatatttgaaaataaataattcataagttaaaatgagaacattatacttgctttggggtggggaaacaatatcattctgggaggacgttaaagggaagtatttccaagagtaagtaataaaatatatttcttatgtgcgaaaattagacagtgcctagcacctagatcacagtcttgtgctgtccattgctcaatatctgaaaacagttttttaaaataatagttttttcaattttataattctttattatgtgaggggattttttaacatgaagagatgcacaattctatcaaaagctttttctgcatctattgagctgatcatacagtatattagtctgttttc

SEQ ID NO: 472688 - DNA, 668 bp, Homo sapiens
cagtgactatttccaccctctatgtccatgtgtatacattgtttagctcccacttgtttgaacaattacccctccaaagtgcacatacaagttctgagtaacccccatggaagacataatacttcaagcccacttaaaatgcggttttttaaaaatgcccgcgagagtctaccaaatgggactgaagtcatttcaggggctacatttatataccttcggactgatgggaagtaccgagaggcatattttgcatgtggaaaagcccacattcgcctgccattagggactgctacttatgtgtggcagatgaggcagccagaatgcagacaccgactaacaagctggctgagtttaaaaaactcaggaaaagtttctaggtgttctggaagagtaaagtgttccctgacaacaggattgaatctccaggaaggtagaggagaatagtaacctgtattatttggcagcagatgtgattggcatatattaaagcaagttatctacaagtagaaaaatatcgaatgggcttattttgcttgtgaataaagggtagttatgtttttgctcatctacttgctcattcattcaaaacaatgtgcctattctcatttagagaatacagtgaatggtatattttcacctgtaatattctgaattcacaagaaggacac

SEQ ID NO: 472689 - DNA, 925 bp, Homo sapiens
cgtagataggtaaacaagtgttctaagccatacttgtttcgaatgtatttgccatctggactaaatttctgtgaaattgagctgggtgaggaggctccactaaagtctttcctcttagaagtgggcctttgttttggaggacctgggcctatttcacaaggattacttttccctgtgctagacagagctatgaagggatcgctctcatatcttcataatggaaacctggggtggtttctggagcccacagccaacatcatactgaatgggcaaaaacgggacgcattccacttaaaaaccagcacaagacaaggatgccctcttttaccactcttatttaacatagtattggaagtcatggccaaagcaatcaggcaagagaaagaaataaaaggcatccaaataggaagagaggaatccaaacagtccctgtttgcagatgacatgattctgtatctggaaaaccccatagtctctgcccaaaaaatccttgagctgataaacaactttaaaaaagtttcaagatataaaatcagtgtacaaaaatcactagcattcctctgcaccaacaacagccaagccaagagccaaatcaggaatgaaatcccattcacaattgccacaaaaagaatgaaatgcatgggaatacagctaactaaaactctacaatgagaattgaaaaacactgctcaaagaaatcagaggtgacactaacaaatgaaaaacattctgtacttgtgaataggaagaatcaatattgttaaaatggccatgctgcccaaagaaacgtacagattcagtgcattactatcaaactaccagtgacagtcttcacagaactaggaaaaaaaactacttaaaaatccatatggaactaaaaaaaagagccttaatagctaaagtgatcctaagcaaaatgaatgac

SEQ ID NO: 472690 - DNA, 631 bp, Homo sapiens
tcaccatagggtcaatgcagccattcctgttgccagagctagcactctcaatgggtataaagagcatgtgcagaggaagaatgcataacgagacagaacactccggagaaacttacaggtcattcaatgtggctaaatctcaaagtttaaaaagaggaatggagcaaggtatagctgaagtggaagtcaagttcagatcatgttatgctaggcacttccacccttatcctgaatgctttgaaatcaggggcctgcagcacacacgactggcatcaagatcattcacggttggcagtggatcagtggcagtctggggtggaagagcacggaaagccatgctccccagaatccatggatctgataaaactcaggccaaaaatgattccccgactggcctaagcaaaaccataatggaagttaagctgttggcacagagaagcaaacaagcagcaggaatctagatgttcatcttttcctttgtgaagtccatactgtgtgcaagatccatggttaagatgatagagggagtgggcttagatgtacatgtgcaggtttgttatctaagtaaactcatgtcacaggcgtttgatgtacagatcatttagttactcaggtactaagcatagtaccc

SEQ ID NO: 472691 - DNA, 1935 bp, Homo sapiens
ctaagtggaaagctgcctgggaagtccatgctcccacacccaggaaccccaaggaagtgtgggagctatgccgatccacatatttagcacattcaaaggaaactaccatgtgtctagcacctgctatgaggcaggcactgtgtgctcaggatgtaaaggtgggcatcccatcaggagcctggaggtccaggatggcatggcagatgctatgagtggcagacgcgcagcggggaggaaggtgatcaagaagggctttccagaagggttgcttggccagactttaggaaaaggggagttgggcagaggagagggggctgggggaatggaattccaggctgtgggcacatgtgcagaggcacagaagcatgagaagagccggactgaggctgtgaaaagggagagaggtagaggtggcctggagccatgtgccgtgacagatcaagtttccttgcgcatcctctgtgaggtcacatcctctgtgtggacacagtgaagcaatgtcttgcctgtgccccagccgggcagcacagccggttgcatccgagaaggtgcagggggctggcgggctccagaagggaagaggaagtctgtaagagtccccaccacgtgttcccaagtggctctgaggagtcctagaaatagaagtggcaatccaagggtagtgcaaggaccagaggtggaagagggcggcccttgacagcagctgtcagaaagaaaatctcatgtgacttctacaaagaggctgaaagtatagtaagaagggcaggggctagctccattgccatggaggtttgagttcagattttaccacctactgtggatgaccctagcacgtcactcgacgtttctcatagggctggtttgaaagtaaaatgagatgaagctcctggcacctggtctgctctgaaaagatattaatttctttttccacctctaaggggcctgagccagtttttcacaactgactcgccggcccagtgccttaaaggggaggggaaaggactcgggtgctggttggggtgcatatggaagaggctggggggcattgccaggccatacgtttttgctgtgctcagtcacaagggcaaagggctgagggacgaggtctcagagcccagctctttgtcaccttcaggggtcagctctggctaggagctttgggtgcagaaggagggacaaacactgcagccaatcttgctgctatggccccaagcagtgggacaagctgtgaggcagcatccaggccactgaaggaaatcggcgccggtgccagcgtcgtctctcttcgaggaaaagcaagtgtttctctcattgtcttcactcttcaaacctcctctgcactgttccctcctacactgtcagctaaggaccttgccttaaacttcgcttagataaaagaagcaatcagaagggaaccccctcatttcctcccccacatccactgcctgccctgtgtctgtactcacctgccttccctcccacgcgacagcaggaagtgcctcttcttgagcctcttctagtggccatggccaaccctcccgcttgtaccctgcagctcaccctctcctctcctgcacattcttcccgttctactgcatcctgcccaccccaccaacaaatgcacctctgcactgcccatcttacccttgtctctcgatgctccccattcaacgagttgtcaagttactgcctcttcccttcccatttgccacctaacccactccagttggactcattccccctctgctgaaaatgctcttgtccaatgattccctttctatgccaccctcaccttaccccattggcattcaacagcagattccctgctttgttgaagcattgtcctctcctgctgtctgtgaccctgtgctttcccagccatctacctcattgccacttgctcattctgccttctttgctggcccccttcctctg

SEQ ID NO: 472692 - DNA, 522 bp, Homo sapiens
ttcctgaactccatgatttcgatgcttttacttctcataattttgttttatatgtgcatttttattgaattaatctttcattttgataactatatacttaataataaaggacttttggacattgcttttagtgtatcatgtgttaaagctaaatgtcttatttatttattttattatactttaagttctagggtacatgtgcacaaagtgcaggtttgttacatatgtatacatgtaccatgttggtgtgctgcacccattaactcatcatttacattagattatcatatcttcctttacattaatttatcagatttagcctcttcttctgctggtagtattaatctcaaggacaaagtcaaaagtatttataaggattcaaagaggtgctcatagagctattgagaaatttttttttaatttcttcctagcatttagaaatattctactttaaaagaaggtattatgagcaactgtatgcaaatgaattggaaaacctgaaagaaatggataagttcctag

SEQ ID NO: 472693 - DNA, 524 bp, Homo sapiens
atatgattgcttacagtggagagaactggggatctcagagaaggacttatgataagcagttgcatacaacaagatgggaactgtgggaatcataaccagagcagcattgtaacaaaatgcaccaggtcatcagtggctacccggaagcaaatcagcattgatggatggtggtcaatgtctaaaataggaaagcacagccacagaaaacagcaacagggaaaaaaatgctctgaagatcttccagaaagatctatcacatatttacaagaagctgaagtttttggcagtgttcattggtttggtgtggtgtcaaggatgaaaacaatactttataaaatgggtgtgttggcttgtgctacccctccccaaacctcagacagcacagctcgtggctccaaaagagacctcttgcttttgcttgaggagaagaagggcaagagtaataaggactttgtcttgcatcttggatacaagttcagctacagtaagatagggtaccagtcagaattgtgaagcccccactc

SEQ ID NO: 472694 - DNA, 1020 bp, Homo sapiens
cctccttgaagccatgccaacagttacagtcacatctttactgccatttctctctgataactcagatgtctttttgtatgcttctttagaaattgtctgtcgtcgaccacagattccaaaggcaatctttgtttctggatttggacccctctatacttacaaagactctattatggttaactgtgaggaaggttatatcctcagaggcagcagtttaatctattgtgaaacgaataatgagtggtatccttctgttccctcttgcatatccatttgcagttaccctcccagtattgcccatggacactacaaggaagttattttaataactccttatcctgaggctacatatgaatgtgatgaaggatatgttttggctggatttgctacaatctactgcaagtcttttcactggcaacttgcacctcctcaatgtaaagctctgtgtctgaaaccagaaatagtgaatggaaggctgtctgtggataaggatcagtatgttgagtctgaaaatgttaccattgaatgtgattctggctatggtgtggttggtctcaaaagtatcacttgctcagagaagagaacctggtacccagaagtgcccaggtgtgagtgggaggcacctgaaggttgtgagcaagtgctcacaggcagaaaactcatgcagtgtctcccaagcccagaggatgtgaaagtggccctggaggtgtataagctgtctctggagataaaacaacttgaaaaagagagagacaaattgatgaacacccatcagaaattttctgaaaaagaggaaatgaaggacttatttttcccttcaaatcaacatacagaatcttcactcatccaccctactcttccttgagcaccatcactctcataagggtctgggctaggagaactttcttattactgccagagaaaaatgtgtaattattggtaatctagccttttgtagctcaaatgtccagtttcctggacttgaagtgctggttaattaaataattatttaccaaatat

SEQ ID NO: 472695 - DNA, 607 bp, Homo sapiens
gtcatctcacctctactcaatcagccttcagtgcaggacccatggacaccctccatctacaagctctgtcccaccagtccctgctaagtggaaaagtgatttgccttacattacagaagagttcacaggtgccaccaggaaatggaacaagcatacttgactcccttatctgtgccataagactgtgtcatgcaggatttatccatttggcgaatgtgcatctgggtaattctgttgtatcgtgtccagagtgtatccaccatgtgattcttacagccccagtaacaggcaccattgttggctcaaggctttgctgctacaatcaacaccgtgaggaccattcttttccatgtccctataccatcatgggagatctgcctgggcatgaagtggaaagggctcccctgcaacaagatctctgcacaggaagagtggggcagctcaggctgctcatccagcccaggaaaatatcaaaattcaaaattcaaagtacagactaaatgcatatcattttcacaccttcataaagttgaaaaatcaagtcgggacatcattaagttggggactgtctatatttagatgacccattaatcccgtattatatctc

SEQ ID NO: 472696 - DNA, 999 bp, Homo sapiens
ctataccatagtcacctttgcaactatgttcagcacactattgaccatgttctcaggccttcaggcttggactgagagttacatggtcagctgctctgtttctcaggccttcagacttagactgagctattctgctggcttccctcattttacagcttgcaagatggcatactctgggacttctcagcctctaaatgtatttaagctccaccagcatttcacaacctcctacctgaatcttgaggctcccacagggagacttttgtctgtggatgggtgtaaaattcttgttgtcgttggaggatacaagtgggtaactttctattctgccatcttgctgatgtcattcctcttatatagggaccacattttgactgaggtacaaagtggccctgaagaaggcagtaggctgttgtggagtctggaaactccatatgcagagtgactttaattaattaagaatatattttggccttgtagagaaacatttcccaaatacattctcatcatatctatgagatgctgcacaataaaagacttcatggtcaattgagattgagaaatgatacatactacacacttttcttggaaacttaaaatgcacttttaaataggtgctagaggaaagttatttacacttatttaagtacatatatatgtatatgtttatttaatagcaacatgtttattagcctcccaagaattaatagttctcagaatttgctttgggcatttccactataatgtctgcaaactgcgaaacctgtctagactgctagacatgcaagttactgagaaatggtcatggatcatcaaaccctctgaaaaggcttttttgaaggcaaaggatggtatgggccaatcctgtaaatagaaatgaaaggaataaaatgttcggtaaagcatagactggctagaataagctgggttggctgctgtccacgatggagaggtgctgaaacagagatttccccctggtgctattaaaaatggattccc

SEQ ID NO: 472697 - DNA, 740 bp, Homo sapiens
ccagttacccattttttcctgcctcttttccccttttgggtgatgtttaagcctgtctctcttctcctcgcatgcaccttatgaaaaatggctttgccatctgcagctgtcaggaggctgtggacttgggagtacagctcaatgaatatacaaatgtgcagctggaccacagccccttccagaaggacttaaaaggatatgagagctcagatggcaaaaaggaacaactcttcactgtctgtttttgtgcctgttattcctcagcaggccttccagacattttaagccgactgaccattgtgtttttcaagtctgtgatcattgcagctctctcagcactagagggagttcataagtccagatggggtagtttttcaactgtaccaggagaagctgggccaagactggaccccctcaggatctgccgtgggatggcagctggcaagcccatctcattggcccaaagcaggtccctgcacagagggaatatttctaatccctgactgcagcaggagagaaatatattaactacttaattttccttaatggttccttagtgtcagtcttaagtcatagtttttctatggttttaaccaattcagcttattttttcagtttttgtcattaagttacttgcatcattatggtgccccctcttctagtacctactcttaattttcctgaaatacaatggaaaagacattgtaaatgttgggaatacgatagaacatcaaatcagc

SEQ ID NO: 472698 - DNA, 759 bp, Homo sapiens
ctacacagcagtactctgagaaacttctttgcggtggatatttggagggttttgagtcctatggtggtaaaggaaatgtcgtcacatgaaaaatacacagaggcattctgggaaacttttttaacctgcaagtggatattggagccatttgtggcctatggtgtaaaaggaaatatcttaactttaaaactacacagaaacattctgagaagcttctttgtgacctgtttggaaacagtctttttgaagaatctgcaaacggatatttgtgagcactctgaggcctatgcaggaaaagaggtatcttcacagaaaactataaagaaggtttctgagaaactgttttgtgatgtctgcattcatctctcagagaaacagttttgggatgtaggcattcatctcacagagaagctgcaaagggatatttgtgagcactttgaggcttatggtgaaaaactagacagaagcattctgagaaactgcttcgtgatgtgtgcattcaccacacagagttgaacctttgtttttattgagcagtttggaaacagtctttttgtagattctgcaaaggatatttggagcactttgaggcctatcatgaaaaaggaaatatattcacataaaaactagactggaggattctgagaaacttctttgagctgtgtgcattcatctcacagtgttcaataattctttttattgagcggtttggaaacagtctttttgtagaatctgcaaagggatatttgtgaggtcttt

SEQ ID NO: 472699 - DNA, 678 bp, Homo sapiens
tccaagtctacccgcccctcacgttgaaggcaggcagttgcccttcgggcgcgcgatgcagctcgcggatcagttccatggctttttcgcagaacatggcggacgcttcccactcccgcggccttgccaaccaccagctctcacgccaaaatggtatctgggctctcggcgcctcactcctttcgttctagtcctacagcgccaggctctcgcctcggcctccgctccgcgctttggcgccgaacaaagctagccaataggaacgcgcctacggcgcccgaaaagggacatccaccgctcagccgcattccaagaggggcggagtgggaggggtctttccaaggttcatgcaggttacaggtggcacccccgatcagcgacagaatcaggtactctacaaagtggcgcccaaacagggacttcaaggacatgaagaagaaggtctgctggagcagaggaactgaaattgacaaggtgaacggggatcccagggtgagtctgccggtagcggatataagactgcgagaagcagtgaagcgccaaattcctcataccgcagctgcagaaatgctaatcttaactctagcttttgagaacgcaaacacggattataaacatgcactggcaccgagcttgtcaggacgtgggaactgagcttcatcactctgaaatgttagc

SEQ ID NO: 472700 - DNA, 1008 bp, Homo sapiens
caccctgaacccggatccctgccatggacagagggtctgggcaactctgccctttccctggtcttggtctagccccttctccctcctacagcgtgaagcacatctcctgtcccctgctcatcctgcacgctgaggacgacccggtggtgcccttccagcttggcagaaagctctatagcatcgccgcaccagctcgaagcttccgagacttcaaagttcagtttgtgccctttcattcagaccttggctacaggcacaaatacatttacaagagccctgagctgccacggatactgagtcagcagcccggtatcctgaagccccggggggccggcacctgcaatgctcaggagcccagctcgcacctggagagcacctcagatcccagagaacgtggggtccaggttctttctgcaccttcccagcacatgcagaatgactccagtggttccatcgtcccctcctgccctgtgtacctgcttgcctttctcagctgccccacctcccctgggctggcccactcacccacagtggaagtgcccgggatctgcacttcctcccctttcacctacctgtacacctaacctggccttagactgagctttatttaagaataaaatcgtggtggtggtccttttgtctctctgcagcgcgagaagggtcaatgttgcctcctccatgccccagagccgcccacagcccagcctctagccgctttggagccactccatgactcagcctcagactatgaaattttctagtcccagcagctcagaaatttgccaggagtaggaagttttgttcacctgctcgcccctttctccaagttgcagtcccagcatcagcagctgtgggctggcagggagcccagaggtcctcgcggttacactccttcactggggtaccctgagctacctatagcggttctcagatctacaaaacacttttcctacgcaggggagcagctgagtagacattacttctgaggtcagttcatgagaacactgg

SEQ ID NO: 472701 - DNA, 8221 bp, Homo sapiens
ggtccctgagaacggcgcccagtcctgttccctgagaacggccgccaacatgacactctaaggaaatgcttattggagcaactcagactcaggcgtttgaattcgagatgctcaaccagtttgtaattcgctttgaattaattttaacgtggtgtaaggttttcgctggaggctactgcagtttcgctacatcttcaggctctgtctctgattctagtgctcttgttatttccaccatatcagcagttacttcctccacagaagtcttgaattcctcagtgtcatctgtcaaacattcagacacttgcaacgactctagtggcagcagcagtgttcaggaatcctatgtgagggacaaacacgcagaacccagcaggagtgttctagaatcctatgtgagggaaaaactttcagaccctcttagccgtgttctggaatcctataacaagcattcagaccacagcaggagtgttctggaatactatgtgaggaacaaacattcagaccctcgtagcagtgttctggaatcctatgtgagggacaaacattcagaccacagcaggagtgttctggaatcctatgtgagagacaaacattcagaccctcgtaacagtgttctgcaatcctttgtgagggaaaaacattcagaccctcgtagcagagttccggaaacctatgtgaggggcaaacattcagaccacagcagtattctggaatcctatatgaacattcagaccctcgtagcagtgttctgcaatcctatgtcacggaccttcagaccccagccacagtgttctggaatcctgacaaacaaacattcagaccacagcagcagtgttctggaatcctatgtgagggacaaactttcacatcacagcaggagtgttctggaatcctgtgtgagggacaaacattcagaccacagcaacagcgttctggaatcctgtgtgagggacaaatattcagacccttgtagcagtgttctggaatcctatgtgagggacaaacattcagaccccagcaacagtgttctggaatcttatgcgagggacaaacattcagatcctcctagctgtgttctggaatcctatgtcagggacaaatattcagacaccagctgcaatgttctggaatcctatgtgacagaccaacattcagaccatagcagcagtgtcctggaatcctacggcaaaaattgtgatcccagcatcaatgttgtggaatcctatgtgagtgacaaacattcagaccacagcagctgtgttctggaatcctatgtgagggacaaacattcagaccccatcaggagtattctggaatcctatgtgagggacaaacattcagaccctcgtagcagtgttcaggaatcctatgtgagggacaaactttcagaccacagcagctgtgttctggaatcctgtgagaggaacaaacattcagaccacatcaggagtgttctggaatcctctgtgaggggcaaacattcagactccagcaggagtgtccttgaattttatgtgaggaacaaacactcagaccacagcaggagtgttctggaatcctatgtgaggaacaaacattcacaccacagcaggactgatctgggattctatgtgagggactaccattcagacccttgcagcagtgttctggaatcttatgtgagggacaaacattcagaccccagcaggactactctggattccaatgtgagggacaagcatttcaaccgtcgtagcactgttcaggaatcctatgtgagggacaaatattcagaccaaagcagcagtgttctggaatcctttgtgagggacaaacattcagacccttgtagcagtgttctggaatcctttgtgaaggaaaaacactcagatcctcgtagcagtgttcaggaatcctatgggaaacaatcggaccccagtatcaatgttctggaatcctatgtgagggacatacattcagaccacagcaatagtgttctggaatgctatgtgaggtacaaacattcacaccacagcaggactgttctgggatcctattgttcaggaatcctatgggagggacaaacattcagaccacagcagcagtgttctggaatcctttttgatggacaaacatcagaccctcgtagtagtggtctggaatcctatctgagagacaaatattcagaccctcttagcagtgttctggaatcctgtgagagggacaaatattcagaccacagcagtagtgttctggaatcctatgtaagggacaaacagactacacaggagtgttctggaatcctgcttgtggaacaaacattcaaaccacaggaaaaacattcaaaccacaataggagtgttctggaatcctgtgtgagggacgaactttcagagcatagcaggagtgttctgaaatgctatgtgaggaacaaacattcagaaaactgcaggagtgttctgggaacctatgacagggacacgtattcagaccctcgtagcagtgctctagaatcctttgtgaaaaacaaacattcacatcacaacaggagtgttctggaatcctacatgagggacgaacattcagaccacagcaggcgttttctggaatcgcatgtgagggacaaacattcagaacgtggtagcagtgtgctggaatcttatgtgagggacagatatttagaccctcgcagaagtgttctggaatcctatgtgaagggcaaaccttcagaccctcgcagcagtgttctccatggaatcctatgtgagggacaacattcagaccacagcagcggtgttctggaatcctttgtgagggacaatcattcagaccttcgtagcagtgttctggaatcctgtgagagggacagacattcagaccacagcggaagtgttctggaatcctatgtgagggacaaaccgtcagacaacagcaggagtgttatggaatcctgtgtgaggaacaaacattcaaaccacagtaggaatgttctggaatcctttgtgaggaacaaaatttcaaaacctcgtggcagtgttctggaatcctgtgtgaggaacaaacattcagaccacagcaggagtgttctggaatcctatgtgagagacaaacattcagaacctggtagcagtgtgctggaatcttatgtgagggagaaacattcaaaccctcatagccgtgttctggaatcctatctgagaggcaaacattcagaccctcgtagcagtgttctggaatcctgtgagagggacaaacattcagaccacagcaggaatgttttggaatcctctgtgaggcacaaactttcagactccagcaggagtgttcttgaatcctatgtgaggaacaaacattcagaccacagcagcagtgttctggaatcctatgtgagggacaaacattcagactccagcaggagtgttcttggatcctatgtgaggaacaaaaattcagaccacagcaacagtgttctggaatcctatgaacaaacagccagacacagcaggagtgttctggaatcctatgtgagggaaaaacatttagaccacagcgagagtgttctggaatgctatgtgtggaacaaacattcacaccactgcaggattgttctggcatcctacgtgagggacaagcattcagaccctcgtagcagtgttctggaatcctatgtgagggacaaacattcagactacagcagcagtgttgtggaatcctatgtgagggacaaacagtcagaccacagcgggagagttctggaattttctgtgaggaacaaacattcaaaccacagcaggattgttccagaatcctgtgtgagggtcaaaatttcagaaagtcatagcagtgttctggacaaacattcagacgcgaggagcagtgtactgaaatcctatgtaaatgggaaagaatcagaccccatcatcaatgttctggaatcctgtatgagggacatacattcagaccacagcaatagtgttctggaatgctatgtgaggaacaaacattcacaccacagcagaactgttctgggattctatgtgagtgacaaacattcagaccacagcaggagtgttctggaatcctatgtgagggacaaacatgtaaaccccagaagaagtgttctggaattttatgtgagggacaaacattcagaccacagcaggagtgtcctggaatcctatgtgagggacaagcattcagaccctcatagcagtgttcaggaatcctatttgagggacaaacattcagaccacagcagcagtgttctggaatcctttgtgagggacaatcattcagaccctcgtagtagtgttctggaatcctatcggagaaacaaacattcagacacttgtagcagttttctggaattctgtgggagggacaaacattcagaccacagcaggagttttctggactcctatgtgagggagaaaatggcagacaacagcaggagtgttctggaatcctgtgaatcctatgtgagggacaaatattcagaccaaagcagcagtgttctggaatcctatgtgaggaacaaacattcagacccttgtagcagtgttctggaatcctatgtgaaagagaaacattcacaacacagcagcagcgttctgaaatcctatgtgaggggcaaacattcagaccccagcaggagtgttctggaatcctatgggagggacaaacactcagaccccagcaggagtattctggaatcccatttgagggataaacattcagaccaaagcaacagtgttctggaatcctatgtgagtatggataaacattcagaccctggtaacagtgttctggaatcctatctgagagacaaacattcagaccagagaagcagtgttctggaatcctgtgagagggacacacattcagaccacagcgggagtgttgtggaaccctatgtgagggacaaacaatcagaccacaacaatagtgttcaggaatgctatgtgaggaacaaacattcacaccacagcaggactgttctgggatcttatgtgagtgacaagcattcagaccacagcagcagtgttctggaatcctatgtgagggacaagcattcagaccctcgtagcagtgttcaggaatcctatgtgagggacaaacaatcagaccacagcagcagtgttctggaatcctttgtgagggacaaacattcagaccctcgtaggaatgttccagaaacctatgtgagagacaaacattcagaccctcgtagcagtgttctggaatcctgtgagagggacaaacattcagaccacagttggagggttctggaatcctatgtgagggacaaacattcagaccccagcaggagtgttcttgaatcctatgtgagaaagaaacattcacagcactgcaggagtgttctggattcctatgtgaggggcgaacattcagaccacagcagtagtgttctgcaatacaggagtgttctggaatcttgtgtgaagaacaaacattcacacaacagcaggaatgttctggaatcctgtgtgagggacaaacattcacacaacagcaagaatgttctggaatcctgtgtgagggacaaacattcagatccttctagcagtgttctggaatcctttgtgagagacaaagattcagaccccagcagcagtgttctggaatcctatgagaggggtgtcctggaatcctgtgtgacggtcaaacattcagaccacagcagcagtgttctggaatcctatgtgaagaacaaactttcagcccactgtaggagtgttctggaatccaatgtgagggacaaacattcagacgctcgcaacagtgttctggaatcctgtgagagggacaaacattcagaccacagttggagtgttctggaatcctatgtgagggacaaacattcagacaccagcagcagtgttctggaatcatactgtactcaatgctatgtgaggaacaaacattcacaccacagcagtactgttctgggatcctatgtgagtgacaaactttcagaccacagcagctgtcttctggaatcctatgtgagagacaaccattcagaccacagcagtagtgttctggaatgctatgtgaggaacaaacattcacaccacagtagtactgttctgggatcctatgtgagggacaaacattcagaacacaacagcagtgttctggaatactgtgtaagggacaaacattcagaccccaacaggagtattctggaatcctacgtgaggaacaaacattcataccctcggaggagtattcaggaatcctatgtgagggacaagcattcagactacagcaggagtgttctggaattctttgtgaggaacaaacattcagaccgtcgtagcagtgttctggaatcctatttgagggacaaacattcagagcccaggggcagttttctgaaatcctatgttaagggaaaacattcggaccccagcatcaatgttctggaatcctatgtgagggacctacattcaaaccacagcgctagtgttctagaatgctatgtgaagaacaaacattcccaccacagcaggactgttctgggttcctctgtgtgggacaaacattcaaacaacgtcaggggtgttctggaatcctgtttcagggacaaaaattctgaacgtcgtagcagtgttctggaatcctatgtgaggagcaaacattcagaatacagcaggagtgctgtggaatcctatgggagggacaaacattcagacacttgtagcagtgttctagaatcctgtgtgagggacaaacattcagaccgcagcaggagtgttctggaatcctatgtgagggacaaacatttggaccctggcagcagtgttctcactaccagcagcagtgttctggaatcctatgtgagggacaaacattctgaccccagcaggagtgttctggaatgctatgtgagggacaaatattcagaccttcgtagcagtgttcaggaatcctatgtgagggacaaacattcagaccacagcaggagtgttctggaatcctttgtgatggacaaacattcagaccctcgtaccagtgttctggaatcctatgtgagggacaaacattcagacacttgtagcagtgctctggaatcctatgggagggacaaacattcagaacccaccaggagtgttctggaatcttatggatattcagaacccacccgcagtgttctggaattctatgtgacagacatactttcagaccacagcagcagtgttctggaatcctatgtgagggacaaactttcagaccacagcagtagtgttcttgaatactatgtgagggacaaattttcagaccatagcagtagtgttctcaaatcccatgtgagagacagacattcagaacctcgtagcagtgatctcgaatccaatgtgatggacaaacattcagaccccagcagcagtgttctggaatccgatgtgaggggcagacatgcacaccccatccacagtgttctggagtcctatgtgatagacaaacattcagaacacaacaacagtgatctcaaatccaatggatattcagaccccagatgcagtgttctggaatcctatgtgacagacaaagattcagacgacagcagcagtgttctggaatcctatgtgagggacaaactttcagaccaaagcaggagtgttctggaatcctatgtgagggacaaagtttcagaccatagcaggagtgttctggaatcctatgtgagggacaaagtttcagaccatagcagtagtgttctcgaatcctacgtgagggacagacactcagaatctcgtagcaatgatctcgaatcctatgttagggataaacattcagaacctcctgacagtgttctagaatcctatgtgagggaccaatattcataccctcgtagcagggttgtggaatgctatgtgacaaatattcagaccctaatagccatgttctcgaatcctatgtcagagatattcagaccccagcctcagtgttcccgaatcctttgggacagacaaactttcagaccacagcagcagtgttctggaatcctatgtgagggacattcagaccacggcagcagtgttctggaatcctgtgtgagggacaaacattcagaccaccacggcagcagttttctggaatcctatgtgacggacatacagaccctcgtagcagtgttatggaatcctatgtgagggagaaatattcagacctcaggagcagtgttttggtatcttatgtgagcgacaaacac

SEQ ID NO: 472702 - DNA, 1995 bp, Homo sapiens
agtaggcttctgatactttctcatagtcatgagaattcatggttcatctgtccagatcattgatgaccttattgaaaggagccatgaaagtcatgatagatttttctggcaaattaacgtgcttttcccaattaagccttgtgagacacagtctggagagaaacctcatgtccctgatataaccaggaaatcccacagatatcaagagcatcttactcagcatcacaagattcaaactctgctgcaggcttttcaatgtaataaacaagagaaaaccttcaacacagaggtaatattctttatacataagagggctcatataggacagacctttggtaaatataatgaatatgagaaagtctgtaataactcagctgttattgtccaagggataactcaggtaggacagccaacttgctgtagaaagtctgacttcactaaacatcagcaaacacacacaggagagaaaccctgtgaatgtattgaatgtgagaaaccctccattagcaaatcagaccttatgatacagcacaacctcactatccatcagagaattcacacaggggaaaagccctatggatgcaatgaatgtggaaaaacctttcaccgtaagtcattcctcactttacatcagagaactcacacaggggataaaccctacaaatgtattgaatgtggaaaaacttttcacttgaacgtggaaaaacctttagccagaagtcatacctcacaatacatcatagaactcacaccggggaaaatccctatgcatgtgaccattgagaaaaagcatttatctataagtcaagatttactgcccatcagagaacacacacaggggaaaaaccctatgaatgtaatgagtgtggaaaaccctttatcaataagtcgaacctcaggatacatcagagaactcacacaggggaaaaaccctatgaatgcaatgaatgtaggaaaacctttcaccgtaggttgttcctcactgtccatcaaaggactcacatgggaaaaaccctacgaatgcaatgaatgtgagaaaacctttccctataagtcattcctcactgtccagcagagaactcatactggggaaaaaccatatgcatgtaacgaatgtggaaaaacatatagccacaagtcataccttacagtacatcacagaactcacacaggggaaaaaccctatgaatgtaatgaatgtggaaaatccttttactgtaattcattcctaactatacatcagagaactcatgctggcaaaaaaccctatgaatgtaatgaatgtgagaaaacctttatcaataagttaaaccttgggatacacaagagaactcacacaggggaaagaccctatgaatgtaatgaatgtggaaaacctttcatcagaagtcaaatctcagcacccatcagggaactcacacaggggagaaaccttatgtatgtaatgaatgtggaaaaacctttcatcgcaagtcattcctcaccatacaccagagaactcacacgggaaaaaccgtatgaatgtaatgaaagtggaaaaactttttgtcagaaatcataccttattatacatcagagaactcaaactggggaaaaaccctatgaaagtaatgaatgtggaaaatcctttcatcagaaggcaaatctttagaagcatcaaagtattcacatggggtagaaacactatgaatgtagcgaatgtggaaaaaccttcagtcagaagtcagtcctcactgtacatcatagaacccataatggagaaaaaccttacaaatggcacacactgaggcggatggcatctcactgttcatcaagaacaaaaagccttaaattatgccagaaaccactatagcaatgtctgtgtcaagaggctgtctgcatatctaaatgtacatttcacagtacagcaaacactttttttgaactacattatctgtcagattgcctaaggcactgaaatataaaactcctagtgcttgctgtattttcctagct

SEQ ID NO: 472703 - DNA, 462 bp, Homo sapiens
ctgagggcctggtcctggcccatgcagtccttaagtgggtctctgcttcttcacatgaaggaaaaaatatctctccctgaacatgaagtccaatcccagagcagaagtcaccctggaaacagagtccataatgcagtgagggcttgtgtaggacagaagaggaatcacttcctgctctttcctgtgggttctccctctggttgctttgcctcagctccagggactgcctcagacacagacagagcctgcaaaagaggcaggagagtaagcagcggtttggaacagacagttggcggtggcccccagggtgggggctgtgaggaaagtgaaagcagcatcactctctggcatgctgagagcctctcctctaggtttctggggatttcactcataggttccacattaccctgcaaagctgggagaactagggactacggtggccattaaaacttgtgaatgttc

SEQ ID NO: 472704 - DNA, 837 bp, Homo sapiens
cctcttaagaagtcccttgactcccctcctgcctttgtaaggattttggctttgctctgagtgagattttgagctgccaagtccattttaatggactcgctctggctggctgtgttgaaaatcggtaatgggggtcaagggaagaagcagggagaccagaggcagcggtggaagaagctgtgagaaggggtcagattctggatacattttgaaagtagacctaacaggttttgctgatgtttttggtgtggaccatgtggcctgtcctgtgttaatccaacaggacaccagcccagcctgggacttcacagaccgaggcgctgatgtagtaaacacagacaagtgtcactcactggctcagcatgctgggggccatcttcagcccagctgggcaaaaatagaacctgaaaacagatcacaaagttcattctgccggcatgccccttccatagcaggcaatgctacctttgccgcagcaatcctccctcctcagccaggtgtggatgcacccctcaccctccatattgaggccccagatgccctgctcagagtttgtttccccagcaggtccctccatgtgacctacctctctccttgccaattagtgcttttggagacttttcctggaccatctcatgttcctgcccattcagcagcaaaaggagttcatcttattcccttagttatggataaggctcacattcaaaaccccagttagccccatccattatctttgaacccagctcatagattccattatgcaagtattgtatatgcattcggctttgaggaaagtggtgccctttgatctgtataacctttaggtttagcctggtc

SEQ ID NO: 472705 - DNA, 714 bp, Homo sapiens
ctgagagggctggaaaaacttgcaaaatggttctgactcactgttctctaggctttctgctgacctgtgatcacctgctgaatttttctattccagaagttcagtttggttctttcttaaaatggctatttcaactcttgtatcactttattggcttcattggattgggtttcaactttctcctgagtaccactgagtttctttgccatccaggttctgaattctgtatctgtcaattcagccacatttcaatctgggtagggttcattgctggggagccagtgcaaccatttggagagcaaaatggagagccttggaggatggacacctatggtcacattttgctgcagttgtcccccatgcaaaaccttttgggcttagcacaggagtatgagcctggaacaatagctgagtcttggccaatcccagtggccatatttcaaccactcatagactgctaagtgttcatactgtgttcaaataaggcaaacgccaacctttaaccaatccaggtgtttctgtacctcacttccgatttctatatgttactggagaattattatgttcctttggaagtgtcatactttcttgctgtttcatgtttcctgtgtacttatattgacatctgtgcatttggtgtaacagttgcttcttccagtttttgaatttgctttcataggggaggactttttcctgaagatgtatctatggtat

SEQ ID NO: 472706 - DNA, 507 bp, Homo sapiens
agtgccacttctctgaaatctcgctaccattgccacatttcattttcaggacacgaacacaatgcaggttgtaaagcagccatgttatgagaatgagctaacaagcaaaagcaaacatgaggacaatgaaatagaagactggaatgagcctccagagctaccagactctgggctggcactggggagtgtctgcaaagagtcccgtgatgtgatccatcttcaggtctttcagccgtggataccagcaccagctctggtggaggtagcaggggtgggaagtggactctactctccttgggcagggcttgctatgactgctgtgggggatgggggtgtggttccaaggccaatggggttgtgttcccagggggattatggctgcctctgcttcatcatacaggtcatcaaggaagtgggggaaagctggcagtcacaggcctcacactgctcccatgcagcccactgtcctaaagcccggtctcactcccgctgtgccccccaatagca

SEQ ID NO: 472707 - DNA, 591 bp, Homo sapiens
gagtcgcacttatgcaccagcactgtccccattaccagctcccctcggcccgaacgtccactgctgtgaccctggacagctgctggccttctgcggccacagcccgtgccgccgaggacatgccagacaaagacagagggtgtgggctggccggggaggtggggagcagctgcctgcagagggcacagccggcctgtgccctacctcagtggagcctggagtggagcccggcagggaagggcctgcccctggagggaggctcgggacccatccggcacgtgcagcaggggagggtcaaaaacctgagcgggaggctgtggaccccttacccaccgggccctccaggatcctgtgaggggcaggatgtgaatgaaaagcagtcctgggtatggtacaaactggtgggtcccaaagtttctgatttcaggggcagcaaagtttaacaaatgagggaactgctctcagcaagtcaggaatagcaggaaattatctcagcttgataaaaagcatctacaaaatccctctggctcacatcaatttaatggtggaagactgagtgctcttccacagatgaggaatggggcaaggatg

SEQ ID NO: 472708 - DNA, 1954 bp, Homo sapiens
cgcgcacaacgatggagccctactacgaaccggactcagagtttcgcgagccgctcacggacgtggatgcgttcctcgacagtgcgcggtacaacgaagccggtgacctggatctgctcaaggcgtacctggagaagaacccgagcgacgtcgacgcgcgggatgagcagggccgcacggcggtgcacatggcagctgcgaatggccacatgcccatcttggagatgctcttccagttcaacccccaaccaaatgtcccgaatgatgagggcaacacggccctgcactttgctgcgctgaacaaccgcgtcgctgcggcggaggcgctgctggcgcacgggtggagggcggctgagcagaacatcatgggcaagaccgcgctgcagctcatttacgagaagcagtacaacgagatggagacgctgctcatgagccgtgatgagacgctcgatacctacgttccgcccacccaggcttccgtgatggtcgacctctcagccaaggaaggggacgaggacgaggacaacgagcgagaagagaagccgaccgtggaggcgaaggttgcggcagaacgcaagacaccaccggcacccatggcgcctgcaaagaaaattgtgccatcggcgagcgaggcgccagcacctgtggaaatgtctatcggcgagcgtttcttcgaggctctcttcagctttgcggagggcgactacgttgccacgcgacgtttcctctttcaaaactgcaccttggaagcggtgcgcgccaacaagtcgagcggccacaaccgcgtcgccagtcagttcaacctgctcgagttctcgtcgtctgaaatttcaccggagcacggtgtgcgtcactacgcgcattatccgacccaggggccggcgtgcgcctcggcgtggatggctggtactgtctatcgtaactacctcctacatcccgacttctttggcggcacacatgcggcgcctttcatggaaaatgctgatgtggccgaccgtggacagcgaacgaatcgccagctgaacatgctggacgaccttgtcgagtacctcacccgtgcgcgcaacagtggcgacgccacctccgctgcagacgccgccaattctactgcttgcagcgcacctgcgctgctgcgggagcacttcttcacgatttgcaacgggtacttcgttcagaaacggcagatggcctcgctgcccgcgcgattgtatcgcatcgccgccgtcgaggggatctcgatggcagatgtcgaggaggagtcggtgtcgcgcctccacatcggactagtggaagtcgccaccgtgacgctgcttctgcacgacccgcctgtttcccgtgttcgtgagcagcgccaactcaccgatcaagccgagcgaaaagttgtgcgcagatcggatgtagatgtggctgccgaggtggaggtccatgaagtgactcagacgtacaacagtgccttgagcttgcccccaaaggactattgcacgccactggagtggagcggcatcgccactctctcccgcatcatcttacgcggcacgtatgaggccacgctcctggccggcgttcagcacaccctccgtgatttggagcggcaggccagcttggcagacgcgtcttcgccagcgacgccgcccttttcgctaccgcccatctttctcgccaatgtgggcggcggtgtctttaacaacgataaggagtggattgcctctgggatcgcgtcggcggtgcaccgcgtagctgcgctcagcgtaccgctcaacgtgcgactcgtgcacttttgccagatggatgagtactacatgaaatactttccatcgtggcctgtgctggactaaatcgcgcctgcgtcacgccacccgtgtacgtatgacagaagacaggaaacaccacgtagagggtgcggacacatctagttctcgtgtagcgtacttctctatttctcatgggtgcatcc

SEQ ID NO: 472709 - DNA, 4277 bp, Homo sapiens
cccctctctctctcttcctctgcgccctcttcctccgatctccgtagtctacccctctcgtgaaagccgtcatacatgcatctgcgctgaggtggcacgaaaaaggcgcgccgcgatcacgcaccatgaacaactatgtgcttaatgacgagatcggccagggtgccttcagcactatttacaagggccgctatcgcaccaccaccgagttctacgcgattgcttccatcgacaagaagcgacgggagcgcgtcgtgaactgcgttcagctgttacgctccatgcaccactcaaacgtcatagagttccacaactggtatgagaccaacaatcacttgtggatcattacggagtactgcaccggcggagacatgagcacgatcctccgctcgaacattaatctcaccactcaggcggtccaggcgttcggccgtgatgtggcgatgggcctcatgtacatccacagtaagggtgtcgtgtataacgacttgcagactcgcaatctgctgatggactccgcagcaatgctgcgcttccacgactttagcttggcctgtctcttccaagacgcggcgacgcggccactggtggggacgccactgtacatggcccccgagttgttcatggcggatcgcccgctgtactcgatggcatcagacctgtggtccttcggttgtgtgctgcacgagctggcgacaggcaagccgccctttgccgcatccgacctcgagacgctgctgggcgacatactgacgagtccgacgccagcggtgcctggtgcgccggagtcctttcaaacgctcctgtgcggcctgctggaaaaggacccgttgaagcgctacgcgtgggtcgatgttgtccgcagcgagttctgggatgagcccttgccgctgccgagcaacggctttccatctcaggtggcgtgggaggactacaagcgttcgcgttctggacgcggtgcgagtcagtataattggacggactccgatgtgcgtgtggcagtggctcacgccgtgggggcagcgaaatcaaacgcttctacgcacaacgtggaggagagggagcgagcggctgcgacgttgaacgtcgcgaaggagctggacttcactgcaagcgcggcgatgttgctggaacggttaccggagcggacacaggagcgtgctgcgcacgcaacaggccatgtcgcgaccgcgcacggcagcctggtgcacggctgcccatccacggcctcagcggcgtcgaataccttcaacgccaacggctcttcttcaagtgctgtcgcgtcttctcgccgcagtcgtctcagcgaatcgaaaaacaatggcggtgacccacaacggcaccgcgtgagcaagggacgtggcgcgacaagcatccgaacgtctggtagtgccgccatagcgtacgaaggcgggtgcaccgcgtacgcgaccaacaccggcgccaaggaggaccgcccaaccgaggcgagcttgcatctcttcgcgagcgaggcgctgcgccacctcacaatcagcgacctcctcccccatcatacagatcagcacattcgtcctctgagcaacaacagccgcatcgagtacacgcccgagccgtcgtacgacatctccacgctgggctttacggcgctgacggcggcagagatcaacagcctcacgggtaaggaacacacggcgtttttccgctcgctctacctggccctctccaccttgagcagtggttacgataacgtgctcaacaccatgaactacgtcatttcgctctgcggtgacgcggaggtggcgcgcgcctcggttaacagctccgtgatgcggctgtgtgtgaagcacgcgggccgcaaggatgccccagcgggctttcgcacggcggcagcgctcattatggggcttttggtgcgcacaacggcctttatcacgccggaagtggcctcgtcgtctatcctgccagacattatgcagttgtttgaagacgaaacagatgtgccggtgaagcgaaagctgatcgcgtgcatcagtgagtttcttttctacatcgccgtccagcagaagaggcagcgcgccatgtggaacgtgcagccggcgacggtgaagcgcatctacgcctcggcgttggactccgacgacgacgtgctgaagcattatgcggcaaagatgatcgagaacatggcatccactccgcagaaggagatgacgctggagctgtttgccgaccccgtctttgtggagaagctgctggccgtgttcgcgcttccgtcggcggagggtcggagcgaggacatgcgctcagatgcggtgtgcgcggcgcttaagctcgccatggtgaaggacgagctgatcctcgctgtcatgcagtgcaagtggcttccagtgacgtcgtacgcgaccgtgatgcagcgatccactctcacgcacacgatgcagatcctgctaacatttctcaactatgcccttgtgaagggcagcggcggcagcggcagtggccgccgaggctgtgccttgacgtcctcactcagcgtcgaggatgcggaggaggttgtcggcaacgcgttgttcgtgagtgaggacttgctggcgcgcctgagcgaggcgatcgagcaggcgtcagtcgctgtctatggcaaaacgctgctctttgtgatgctcatcggctgcgtcggcgggagcaccatctgccaaatcctcaacagccgcatcgtcgccttcctcgatcgcctcgtccgcgacgcggacttgtacgtgaagcgctgtggcgcagccttgtcggccttccttggctggttcgtgtctgagaagctcgcgagcattgcgcggcgagtgtcttcgacctcgacggcgacgcaccttgccgccattcagcagctgctgagcaactccgccgtgcgcagcggcatcgactttcaaaaggatgtcttccagagcctctcgacctgcattgacaaggccatgcacaacacgatctacggcacctaccgggacgaattcaacaccatcgccgatcgctttgtcgagagccctgaggaggtgctgcggtatgaagagaacatatgcctgtacctcgccacttcttacgcagaaatgctgcgacgcaaggaggcgagcggtcgcttcactgctattcgttttttgacatctgtcatggtgcccatctctgccgaggtgacggcaacgcgcaaggagagcagtggcgccacgtcggctgcgcgccaggtgctgaacgcggtggcaccgaatgttacctctctcttgcaagagacaagcccgatccccacgaacacgattcggcttctcgtgacgtgtggcgagatggctcagagcaagctctctggcctcgtatccgagcagctactgggccacatcatggactacgtgaatgaaagcggggatggcgacggcatctactacccgctctcttttatccacctctgcctgctggtgagccagcgggtagatatcttcaactacgtcgtgcgtcagggactgtgcgcgctggcccttgagacgctcgcgtccgccgccaagagcaggaatgagccgctggtggaaatgtgttgcaacctcttggcggtggtggtgcgtcgcgtggcgggggacccgtcatcacgagtgaaggcgcagtgcgctagctgcgtgcaggaggactccatcggctctgtcttgctgcccatttgcgcagacactgccagcagtattgctctgatggagtccgccgcttccgtgatcgaggactttgtccgtctttcgtcagcggcccgcgacgacctcacctcggcatccgcaatcgcgacgtgggcaggagccttgtccaatgcgcttctgtcttcggcgaggcgcgccgtagctgcgagcctgctggcagctctttccacgtcgtgcgagtccgcctcgcgcgacgtgctccaggaactcaagtgtgattcgcgcctcatgtcagtgctggccaacgccgccgactgcacgcacatgcgtcttgtcgccagcgaggcgaacaggattctgaagaaactctcctagatgtatcaggagaggtgctacagagcacttctttctgcatgcgtgtgtgtgtgtgtgtgtgcccgtgcccgtgcccgtgcctgcgcctgcgcctgcgcctgcgcatctgtcttcggacgtgtttgttgttgttgcctgtacgatttcgtgtgtttttctcaccctttcttttggttgttgtttctttcaatgcctctcgcgcgccaccgttcccgtcgaacagacccgccaaccaacctgtctcgcgcgctctctctctctgttgct

SEQ ID NO: 472710 - DNA, 464 bp, Homo sapiens
gcccagcttctgttttggaaaagtatatatgcatgaacactagtatatgctgggggcaaacacgaatgatagtggtaacctcttatcccactgtgtctccatgaaagctttaaagggaccactgtggaacagaaggagcataaatccagaactcagaagcatcttcttattcttctcctttgttctttggtgcattatgtttgttgtaaaatccctaggcctctcaaccaggttttctcatctgcaagatgaaggcatggaagatgatagcagcttcctgcaatttgaaaagtcccaggcagagccccactcccatgccttgacagtgaagcagaaaattttcctgcctcttttgaatgaacttaacactatgttcacacatcatataaggaaaaaaaaaggaaagaaacccctcacacccactctggtacaccttggtgtttgccattattagaacagcaaac

SEQ ID NO: 472711 - DNA, 965 bp, Homo sapiens
cactctatacttctgtgtgtgggtctttaagtcctctagtgcctatgggttagggtctccatgactgagctggccttggtccactatgttgcccagccacaccagccttctggctgctcctccaatgaggcaggcatctcttgccacaaggcctttgatcttgcatttctctctgcctggaattctactccccagacaattgcacggcttcacccatcacacccttcagtctttgttcaaacgtcttctcaacagagaggacttcctcggccacctgaaagttgttaatgaattccttcacttcacctcaaagaatctccagagtgcaaagctaaaagctgaaggcattgacctttcaagctccaaaaatgctgcaagagcagcttcaaaagagtcagaaaaggctcaatggcggaagaagaaactgaaggatgggaaagagaatgaaaacaggaaggaaggagtaacctcttcaagagctttttggaaagcccaaagctttccagaaacagacctctggatcaatggtagtcctggtggtctaaacatgttcttgaaagaagcaagagaaatcaagattgacgaaggagcaacaaagcttggaaagatatttgtctctgggaagaatcttccaggccctttcaggaagttgaagggagaaggtggtctttctcagagccactgcttgagcgcttatgcatcccatggtgtggtaactggggttgaaaatgggatctcaaaaccaacccaacaggaagggcaggggaaggtctgagttgtcttttggtgcccttgggtcaggtctacctggctcaacctctccaagctcttgataaccagtattacaaggtcaaggagtgatgctatttgcgtcaaactcatgctgtctcacaaatctatttatgtgcacctttaaatgtgggaaatgagaaattccaccttcaaacacacctttccaagcattt

SEQ ID NO: 472712 - DNA, 1022 bp, Homo sapiens
tcctaccttcagaaagggtgaagggcgggctccagcagcggggagaaacaactcacagtcaaggcatttctcaaggtgttatgtgtcgaccatgggcatcagaatcactgtccaagaatcaattggtttatgagaattattgtgcggatgtcgatgagaaagtaaggagagctaagtggtactgggacacaaatgccagtgttaggagtggtcattcactagctgagtggctggcaagtacactctggcctcctggcagccccattcaaatttgtgtctcagcaaattacctcatgacagggaccttttggattactcactgggggtttttatcattcatgcatattcagtctgcaaatgccaatgcagggctatctgtagctcaaatgaaatccccagaatttgcaacagtttctctgtgctgctcttctaagtttctctttctgtctcctcatgggttatcagttctagacaccacgaaaatgggaaagctccaatgacaagaccttgacaacaatcattccttgtgaataacttcattggagttcattctcagggcacagaacaaatgatcctttgtacttcaagcttctgatgttcttgggcatgacagagctcctcagttccctgaaaatatcaataagccttttcttagtgcctgttgttatgatggtgcttagagattctgagacatataatatactacatgtagttcttaccttattaatagcactcacacttttaaaaatacaatttatttacatgtctctctcgtgaatacattatcattgtcttgggtttgtgcattgtatttaatttgattttttgtcctcagttctaagcacagtgcctggcactttgtgtgtgctcaaatgataatgagtaagaggaaagcctattctttacttcctgttgtccaatgtctgaaatcttgtttcataaagtttgttcagtttttaaattatttaaggagggaaagaaacttaggctatttttattccatcttggttggaagtgaaagt

SEQ ID NO: 472713 - DNA, 968 bp, Homo sapiens
cggggatactacagggcacagtaggaagagggagcaaagaagacagcagcaatgggaaaaatgagcaagagttggataatcttcccagcgcagaagctgatgacaaataagatagaaactgatgcccaaatagaagtgaaagagcttgaggcttctcagggaaaaggaagagaaagaagttcagaaaaagagggaatcaactcaagtgatactatggaagcagaattggcaagacttggtggccaattgcaaaagagggtgagggagaagggagttacaaggagccccagacccttggacatcttggtagaagcaggatttacaacagtgaccttgggcagggcggttttgtttggcatcaaggggacagaggccagactgcagacatttgcagaaggcatgggaaatgagggcctgaaactgaggcacacagagacaaagttggttcaaagtcatcagcaaaggggagttctgctagaagaccacagctgtccagaccgcacactaccttttatgacttggcaggatacagactttgaaagaatggttgtgcagggtggggcccaggccctgtaccggctgatcgctgacgacgtgcagggcaagagcctccagggctaagcaattacgccgtgggttaaatcaccatatttcaagaatgtacttgctgagatgcaaatccctctgataaagataacatattaatcttgtcatctatttgcattagtaaggataagttcatataggagctccagaaagcacagttctgttggggcatgattgtaccccatagatgtgtaaaaggaaaatcaatatttgactggatactgaacgtcctcagcattatgctatgagctgcaacagataaaaaagcttaaagtctggtcctggttcttaatattcattcatttactcattcattcattcattcatgctaaggattcactagtaccaggccctgttaggat

SEQ ID NO: 472714 - DNA, 540 bp, Homo sapiens
gcgatagtcgatagtcccatctgggttgccaaaatgtgtccagaattggttccttccagtgggttctttgtctcgctgacttcaagaatgaagctgtggaccctcacagtgagtgttacagttcttaaagttggagtgaagccacagacctttgccgtgagtgttacaactcttaaaggtggtgcgtccggagttgtttattcctcctggtgggttcgtggtttcactgacttcaggaatgaagccgcagaccctcgtgtgaagcgcatgtccgtggaaacaatcattggaccagcagatgtagtagaatctgggccatcaaaggccatcccatgcctttatatacacagaaatgggaagtcagccaaaaagctgtgtaatttcattttaccctttgcttttctcattgaacttggtagttcccgtctaaatgaactgagtgttgagctttgaattcttccatcaatagttctagcaagccagtgtacattgtgattaaaatgtactgaccctccttaaagaaataaaatgcaactaaac

SEQ ID NO: 472715 - DNA, 960 bp, Homo sapiens
gcctccctcccatgcttgccggtgcccaaagtccagaggagactgaggcagcaggggactggtgtgtcagtgctgccccaagcatgtgcacacctggccaggtcatgacagcactctgggtcagtaacaactttgctctaaaattggagctggccctgggaacagggagaggccaggcagtggaaggaggcacttccaagcctgtgggggttagaggcgttcccaggccctcaagagtgcagagatgccagggtctgcagctgcggcttggtggctgcactgtgcccgagaggatgtggcttctggctttacaacttgaaagacggcagggcttctacctgttcttggctcctgccttctctgtggagtgcacagcccaagccatgcctctcccactgcagcccgcctcatggcactccagataggctgctattgccatcatgataacatcaaagtttatatataaaacccagatcatatgtctgctgtattatctaaacattaaaaatcataaataactgattaaaggggtatgccacaagtacctgaaaatcaacaggtttaaactcgtcattttggtgtcttcaaaaattatcctccttcattctccattctgattcacttgttgagaatcgtctataactttctatttatccataatatttaaacattcctagatgctacaattctaatttcttaaaatattcttatcaacatacttcttttttttcccactgcttaagttaggccctattactttttgcaggatttttgttaagtaactatactaaactcacaatttcagctttgtaacaattagcccaattggtattctccaggtataattatctttctgcaaataaacaccaaatatattctctttaatacttacatgaaaacttttcatttgatatgagattaatgtttgttaacagactggccttatgtaaaaaataaacc

SEQ ID NO: 472716 - DNA, 671 bp, Homo sapiens
cacacatattaacataatggcagtgcggatccccaggacctgggtgggtccagaggtgctgacagaggagcctcaatccctagccatcagcactccagaccatgaggagtactgccaaactaccagctactgttcccttaaggcccaagcgctcttaagtcagcttgtaatgaatgctacctggcctcagacttactattcagggcccaaggctctacagttagcaggtgatgaatgctgccaggactggttgctttccttcaagacagcttgtttctatcatgcccaggatatgtctagaaatgtcatctgggaaataagacctggaacaggggcctcacgaccctgtccagtgccttatcctgctgtggctgagcagcctgatgaagtacgggtagaagaggaagtgactttggacagcctacttaagatttctgagcctcagtttccacagtgataaaggatatttgcatcaagtggatgctgtgaggagaaaataatatagaccatgtatagcactgtgtgtgatccataacaaccgttccatcaaagcattttttattattgcacttattgctgttcatccagtagattcttcacctttaatgcagatatcaaacaactaattttttttcttgactagttttgtggctcttgaataatgatattac

SEQ ID NO: 472717 - DNA, 449 bp, Homo sapiens
agcagcactgagtccagtctgtatgtttggagtccgagcacacagataccccttctatcaaagagtatctaaccctcacaccaagcccaatttctctgcgctgtgtggaagcacactatttccgaatggagaacctggtgacccccagaatgtagattcagacttctcagagagattatcagtagccacagcagcacaccacctttccaaagcccctacctgctctccaacttccccatgtcacgatgtgacatctcctttcactcgatttcttagacccagaagcctgaagattcccctttcaatcatacgtgcagtcagcaaacccttccggctccacatatccaacccggcacccctcctcgctggcctactgcgacagcatccttactggtttcatttcttccagccttacccctcttcactccatctcccctttaaataagaaa

SEQ ID NO: 472718 - DNA, 1686 bp, Homo sapiens
gcctctggcaactgcctcaggggaggccatcactcttgcctcaggctggaggaaggtggaaaggctgatggcagcatgggtctgggagaggatgttgccattactggggatgaaaagctgtttcttttggcgaaaaaggttcatcagaacttacaagctcagtgtccccagcttcaacaaggtcatcccacacatccccattccaagtttcaggctcccattctttttcaaccaattctctcactttgtaacagtagacaccttgtgaggctgtgcatgcacctttcattgcaggtcagccactctcatggtaagcgcttgtgttcattttcccagaatttcagctctttttctacaggagataagactctgactcagggcactcttatgtttcttggttttccacctagagtcaaaggtattatgtatagagtcattaaactcatcgcctctcacgagcggtggatcaggagtgtcttatgcctttattttgcataactctctaaacagttcatgccaaggactatcagtgttctccatactattacaggttatctgaatatccagcattcaagttcttaaatatcatgttgtgcttcctgtcagatatgttaaataactatttgttacatgaactaatttttgaattccttaggacaagactttttattacaaaattttaattaatttattcatatattattaaaatgagaaatatgcattaataatttttctttgcaggaggaaatcattgaaaattggagtagcctgaaacagaagatatacaagggtttcacattgttgttttgagtgttacatctatatttaataatatcacataataaatcctgctcattaaatataatgacattaaaagtagaattcagaaaagaaaagaaagcggaatgaatctctaaaatttgttttgatgacaacttatcagaaaccaattgcttagaaatagtttgcatttcatgtattttatttgagcattcatattattttaaaaaatcatcaaagtttttacatttatttaacataattatttaataattgagtaaatgtcaacaaataatactctattcagtttgacatgaaaaatgagtactgaaattatcggtattaatacaagaatttaatagaatggtaaatttgattaaaagccaaagaactgcaaaagttcccttactttatagtgtcattgtacaaataataaagaccttccatgtgatttgcattttgagagataatatggggtgctcaatttttatgactggctgtggagaacaagttaatcaggctctggttgggatgctgggtatttaaataagtgaatgtgaaatgaagacagtttgaaatgggactctattgcatatgataacatgggcaataagggaaaaatgcaaaagttttacataaaaagtattctggttgaagaaaggaagtatcagcttggtaacgtatctttcctaagcaaagtagaagactcagttaccagtgtctctatttatttcaatggacattagtattgaccatgttcaatcctggaagggttggaggtaaggtatggttcaggtatttttcaggtatttttgtccagatattctatccagaaatgccaaccaaatttcaaattatgtgtggtgattatattttgtgaaaatatcttgctagactttcttttcc

SEQ ID NO: 472719 - DNA, 1089 bp, Homo sapiens
tcaatctaaatgtccatcagtgatagactggatgaagaaaatttggtacatatacaccatcatgtcctttgcagggacatggatggagctggaggtgatcatccttggcaaactaaggcaggaagagaaaaccaaagatcacatgctctcacttataagtgggagctaaatgatgagaacacatggacacatagaagggaacaacacacactggggcctactggagaagttcaagatcaaggtgtcagcaagttcggttatctggtgagggctgctttcttgcaatatcctctggaggtgaggaaaactgtgtcttcacatggtagaaggtggaatggcaagctaaccaaaagctataatgatgccgcttttcaagggccttaattccattcatgtgggagaagccctcatggactaatcatctcttaaatgccctacctgctaattctatcacaatgacaacacctgaattttggatgggaccggttcaaaccatagcacaagctatgtgacccaggcaaatacttgaactgtcctttcatcagaataaggagtaatacaaggtttataatctttcattctttttgtactctaggtttctatgattctaacattgctttctattttttttcaactacagatggtccttatgaagtggttacgcctgtcataattcgaaaatactttaagtcaagaattctgttaataccccaataaaacaataataatgtcaaaaaattaacatttcaataattgtaagttgagaactgtctctatacagatattccatcattataagtatttataacctaatataatgtcagctcttctaaagccttagtaatttagcaatatttttatgctaaaaatagaaatgtttgtaattcatcaagtaatgaatagaaaaatttatcttaactagtgatacctgggaaagtaatcttaatcaaacagtgcaacatcagaccaaatcagatacttcaccactgtaatcatgagttcatttatttcagctgtggtgagtgggttttggctatgggcagagcatgttttatgtttatgagcattgagtagtttcagctacttaac

SEQ ID NO: 472720 - DNA, 665 bp, Homo sapiens
atctccactttgttcgtgtaagcttcatccacatccttctcgatgaggacaaattcattctccatctttgcatcttctgtgctgcaggctccacttagtctccagcatcttgttctgctgctccttgttgatgaaggaggcaaacttgttgttgagggtcttgatctgcttcttctcctgggtgcgcatggcctggatgttggggtccacctccaggttaagagggctcagcaggctctggttgacggtgacagtggtgatgcttcccataccacaggacctgccatagcctctgcccaggccacccgggaagctgctgctgaccactcgggagaagctcgaggagctgatgcaggcaccggactcactcttgtaggagcagctgctgaaggcccgggggccggaggtggacaccttgtaggacttctgggtcaccctcatggacatggtggaggcaggagtggaggcaggcaggctgaaccaggcatagattccagaaggagaggagaagctgcttcttgtagtttgtctttcttctagaactgtttcttgccaatccttgtaatattctaccttttagatttctaaaagaaaaactttttcctatattaaaatgtctaaaagaaaccatatatttacaaattataattaaaataatgttattg

SEQ ID NO: 472721 - DNA, 970 bp, Homo sapiens
tattgcctataaaaaggctccacaccgacttctgaacctgtgcaatgcagccttctcagttttctgagagtgtgggctcctccccctttcaagtgccaagcacagatcccattttggcactcctaagctgcaggccacagtcctggggtgcgaggacatgctggctgcttcttcttctgaatgcttgtggttgggttcctggtacagtgtgggatctgaagcgttcccaggctgccaggattcactcaggtgaaacaaagcacctaggctgggcagcagaggctacactgggtatgcattcttatggagtggccaggcaaggaccatgggaggggctggtgaatagacaggtctgcaggacagatgtgcctcagtcctgtgaggaagctggtcctgctttctccctggttgttagctggggccaggacctctcggttggagggaggcagggagccctcgtggatgagatggcagccctggctggcaccttgattgaatccagagatatgctgagtcagaggaaaagctaagcagtaacctttattcctgacacacaatttatgagaaaataaatgtgcaatgttttaagctgaatataggctttgcacacattgagtcaaatatttagaattttataactaaatttgaatttactgttttcacacagttataaagaaatgccttacaatctttctcagaatgtttcattataataacaataatagtttataagaaggaataaagaagtcaagcacacagaaaactttttaacctattagtctctcccattctctttcaaaactcatgaaataactggcttgaatggcagtataattgcttataattgcataataaacttcatttgttatattttttggctctaacttttcctttagtaaagtgtgatttccttcatctcttgagactatttttaaaacataaacttcaattacctgtttttttaaagaac

SEQ ID NO: 472722 - DNA, 465 bp, Homo sapiens
caccatctcttattttgttatcaccgatagaatggagtattactttgctgctgcagtcttaactgtaacactcaccacaaagatctgcggctttgtcctgaagtcagcaagaccacgaacccaccagaaggaagaaactctggatgcatcagaacatctgaaggaacaaactccggacgcaccatctttaagaactgtaacactcactgtgatggtccacggcttcattcttgaagtcagcgagaccaagaacccaccagaaggaaccaattccagacacaatatgaccagaaaccctttaatcatttaccagagccaaagcaaactgggatttaaggttccaattagtgccaaactgctgtatcaagaggatacaacaattataaacaactataaatcccacagtggagagctcagatatatgaagcaaaccttagtagatccaaaaggggagctagagtgaaa

SEQ ID NO: 472723 - DNA, 811 bp, Homo sapiens
aaagaaaggctgcagcagctaacactgggctgccccggtgtgtgatgttccccatcctgtgtccatgtgctctcattgttcaattccaacctatgaaagaagacaggaaaatgtgggaaagtttggaacttcctagagacttgttgaatggctttgaccaaaagcctgatagcaatatggacaataaggtccagactgagatggtctcagatggacatgaagaacttgttgggaactggagcaaaggatgttcagtgaaggctcagatcaatgagtattttgtggttctaaattcaatagaattacttggtcatttgttttataaaaaagaaatttctagtttctattcttaccatactagatcagaagatcttatctttactagatctgtagatgattctggtgcactgtctgtgattgggaacaaatggtcaaataagacagcaaatgatgtgtaaaaggatcactctcttggaatctttgctgatcactgtcagtgaaatagactatgagcaaggatatcagaagccatcatacttctaaacatgtttacgttgttttttctaaaaaataagagaacttgaatatttaaaataattaatgtaacaattgacaaatgcaactttagtacttataactttatattagaatctactctaagtgaaatatatatttgataccttacaaatgtattacacagtgtatacatcaatctttagtttaagctgtgttctgaaagccatttgtgtaaaacagatgtatttttgatgaaataactctatggccaaagattttggggaaataccacaga

SEQ ID NO: 472724 - DNA, 2463 bp, Homo sapiens
cagctatttgcctctttcaaagttggcaggatgaaggtcacatccatattaattgccctgataatgaaaccttcctggaggccacctgtcagaacatctggagctcttgttgttactgcttccaacaaggcccatttccatccctacgctgacttcaaagacccatcttcaaggttgatggaaagtctggaagttcctagagatttggaggactacgaagacaggaagatgtgggaaagtttggaacttcctagacacttgttgaatggtttccaccaaaattctaatactagtgatatggacaataaagtgcaggctgaggtggtctcagatggagatgaggaacttgttgggaactacagcaaaggtgactcttgttatactttagcaaagagactggcagcattttgcccctgccccagagatctgtggaactttgaacttgagagagatgatttagggcatctggtggaagaaatttctaagcagcaaagcattcaatatgtgacttgggtgctggcagagcagaaaggaaatgtggggtcagagccccaacacagagctcccactggggcactgcctgttggagctgtgagaagagggccattgtcctccagatgccagaatggtagatatactgacagtttgcacggtgcatctgggaaagccactggcactcagtgtcagcccatgaaagcagctgggaaggggggtgtatgctgcaaagcctccagggtgtcactgcccaaggccatgggagcctacctcttgtatcagcatgacctggatgtgagacatggagtcaaaggagatcatttcagagctttaagactaggctgctccattgaatttcagacttgcatagggccctatttaatagaacacactttgagaaatgctgacttaggctttgatattcaaacagattcttctcatatggctttcagtactactagcattctgctggagagagtcacatctatactgaaaggtggggcagttcaggctgctgatccaggtgagtgggtgctccacatgtctggagatcttcctgggcatgaagtggagatggcctcaccataccatgatttgtgtccagaaatggtggtgtgggtcaggctgctgaacaaggcaagtgggtgctccaagtgtctggagaatctgcctagacatgaagcagagagacctccttgcacaggatctctgcacaggaatggtgtgggtattctggctgctggaccctgcactgtggtttcagggaagccagctggggcacaaagaagtgacacacgcagaccagttccaagttaccaagctggccctggctgcaactcccatcatataggagatactgtagctgtagcagctcttctcctgccccaggccaatgacaggggaaattacaattccagttcctgctgctgaggcactttccatagttctggctgtggaggcctctattctactccagggcagtgggtgccatgaaaaaaaaattacaatttgcaagtgctaaaagagcaaagcttaaagttagagctatctttttcccctctaaaagtcactgacacaaaagaaaaagatgaacaaagaactgtgaaagtatgcgttggatgggagcttccagaagttatgtgttactttgctaaaaatcacaaaccacaaaaaaagtcttaatgtcacccctattgagaggtcagtgctagtttggcagtcactgaaccttgattttaacatgtatatgtacagagagaaagttaaagctagagaactcgacatagatgtgcaatgtttctaaaatagtttaaagaatcttttgagaatattgttgaaaaaggaataagaatggcagaaaaatatttgttaaggctttatttctatcctaatagactgggaaatacagactttctcataaatataattaactatgtaaatatcaaactgattaaaagagttcactgttattttaataattgtagatgaagtttcatgttccttcagaaatcttgctgattataggaaaatgtatcaatacattgatttatcaaaatatcaaaatttatcaaaattcattaatcaccttttaaagagaaatttttagggatatgttttgaacatttcccatttagaatgacagtattgactgcaatgtgtgtactatgaatatgtttgaatacctagatatgtgttcgctggatatatctgggagaaaagagtctactttatatttattcagaagacatgatcatgtggatttgggaagacgtgggaacatggaaggttatttcttcaacctttttatcttatatgaatcattaatgctttaggattccataatgttcttagcttatgaaggtcattttctagcattatcagatgcaacaacattgctttatgtaggtagaagaaaaaaggaaaaatggtgtttctaaaagtcctgtgtgccacttagtaagtaaagcc

SEQ ID NO: 472725 - DNA, 809 bp, Homo sapiens
agggtccagtttcacagagtggagagagtgaggaggcctgctctgacagctgttacagtacattgagctccatagagacagcgccagggcaagtgggagccggatgagcactgggtgactctgtgcctcactgaggaaaaaaataactaaacatgggcaaaggagatcctaagaagccaagaggcaaaatgttatcatatgcatttcttgtgaaaacttgtcagaaggagcataagaagcttcagtcaacttctcagagttttctaagaagtgctcagagagaggccaggtggaagaccatatctgctaaacagaaaggaaaatctgaagatatggcaaaggcaaacaaggcccgttatgaaagagaaatgaaaatctatatcccccctaaaggggagacaaaaaagaagttcaagtccaatgcacccaagtggcctcctgcagcctcaaaaaagggagtcatcaaggctgaaaaaagcaagaagaagaaggaaggggaggaagatgaagaggatcaggaggaggaggaagatgaaggtgaagaaaatgatgatgaataagttgattctagtgcagtttttttttcttgtctaaaaagcatttaacccccctgtacaaaactcactcattttaaagaaaaaaaaattgaaatataagactttaatgtaaggttttaattatctttaaagtttttatgttttcctttttatcctgtaatttttatttaatattattttatgtcatacttatacatacagatttcaacaaaagaactgtcactgtctgcatttcttttctatgtaattttt

SEQ ID NO: 472726 - DNA, 1036 bp, Homo sapiens
ggtcttttgtggtttgtgatgcgttcatgggtgttggtctggcctcctcaccaagaccacatcctcacaggcaggtccttcacgacccaccgacccaccggaaaagggcagaaccagcattgggcggagtcagggaagtgcccccaccttgcccaaggggcgctctcctagcaggtcttgcacaggcctgagagggctgcccagtggatgccaggactgggctgaacagctgcagtaacctgaggcactgattttatctaacaaataggcctgtccctgactcagcctgctcaggtcaggaggcttgcggaaatgcgccagctgcctaaacagatacgaaagctcttatttcatcaccaaaacatcttctgtaaggcggtgttgagctccgacacgaaaaccaacttggataagatcctcagggctagtgccctttccaccatccaacaccaagctcttgtcagtgtgcctcctgtcacctgggagagctgcactggaaggtgcccatgtgatgtggagccaaccctggcccttgtggatgtgctgactctggccacacagaagctggcgctaaattcctgggggtctgggaaaagggagtacctcactaaggatatcaaagccaaaacttggtcagaaacagatttgactttcacttataatccaaaccaggaattccctggaaataagatcacaaatctagggggaatcctgcttatggatattctgggtgattccaaaaccttagttattggaaactctgattccaaacttgaatgtttcttttccatgcatgctctctcatcctgtgggcaagaatcatgatgaatttactgtttttagagcttattactactctaatgtcaagccaaggtatatttaaaaaaaaaaaaaaaaaggtttgccatcactcatgtgatattctgttctgtcagggacttctgtcaaaccatgattgttggaacagctttgcctctctggaaagcagcttgctagagagacttgcggtagagagggagggtcatggccagatgcc

SEQ ID NO: 472727 - DNA, 592 bp, Homo sapiens
ggtgcctcgagctctctcagagaccacatccaggttccctgtataccagccccaggatgtacacacaccataaacaagagggactgagggctgtgctatgagggctacaaaagatgtgcacatccagacccttgccctcaggaaagtgtccaatgccagctgtgtctgcaacaggctggtggaggtgctgctgagtgtgggaagtctggagtgcggagaaggcgcccagagagacttcctggtgagctcttcagaggaaggagcaagtgcaaaggcgattgcagaagccaagggatcatcttttcctcaacatgcacagccagaagaagaatctcagaagctgcatgaaaggggtcccgatccagatcccaagagagggttcttggatctcacgcaagaaagaattcaggaccatatagggtaccttcctgatgttgccatggcatttgcaaactgtcatggcgctggtgggagtgcagcagtgaggacgaccagaggtcactctcgtcgccattttggtttcggtgggttttggccggctcgtttactgtgacctgttttaacagcaaggtctttatgacttctattttgc

SEQ ID NO: 472728 - DNA, 659 bp, Homo sapiens
aagaatttacctccaacttcttgctatggggatctctcagcccctgcaggaggccctcaggacaacatccatgatgacccaagccagggtgtctttccttatagtccatcgttacaatactgcacagcccttgccccaacaaaccaggggtgctggccggccctgccaagacagcaatctgctgacccggcttccaaagcagcagtcttctgcccttcagcagaggcagcaatgtggtcaaaggcatggattccagggctggccagacctagatttgaatcccagcactgctgctgatgagctgtgtaatcttgggaaagtacttcactccctggaatctcaggttctgcctcagcaaaatgagggtattgctcacctcacattgcacagtcatagtaatgagccctttaagagcctcgacacttctggaaagcagcccgtggagctgcttcagcaccgagtgggtctgagctacaagagggagagacaacttcaaaaaaaattgttttaggggcccccaaaatttcagatgaggacactatgaagattttgagtcttgcaagctgtgtgattaaaatgatcaagtgattaaaatgctgttttaatgctattataaaatggtattttagtttggacacatccttagaaagactccttcc

SEQ ID NO: 472729 - DNA, 710 bp, Homo sapiens
caccatatagctgctgtaggggatgaggaaggggtggcactggcaattcaaaatgctttcctaccctcttcaaaaagaaggaagcagctcacatcctacctcgtccatactccagtcaggaccagctcagaaccgggataaacttttcagtgaagggaaagcccagcagagggaactgcctggtgtccatatggctgcacttcttccagaggagtcaatgctgtgctctgcccttcatgggctgctactctgctgtgccatgttagatccagaaccatggctggaggaagtcctgctcgggagagctgggccagtgctgcccctgaggagcaggggcagagtcacagcaacaacccagccccctaggcctgagcagctgaggtatgcaccagagtcacagaccttagctttatggcagtcagcacctacctatgcctcagagagtgaacatgtgtccaaattcccaggtgccacagtagagtggtgaggtcctgagcacaggaccctggctccacagctgctctgagcatctcctccctgaaacccagtgccactgcagttgcttgtggttcatgtcagacttgataccaagaaggatcccctcagtaaagactccccattttggggaaaacaaacacaggaggaccctaaaagcccttgccatggaggacactaatggcatatgctgctgatgccactgcaacaaactt

SEQ ID NO: 472730 - DNA, 586 bp, Homo sapiens
cgagtatctggatatttcagttaaaggtgctgtattcacgcacctctttcgttcctctctgtgaatgccacagaccgcagctgcttctaatcagccatcttgccatttttccttgaataaactttccttgtattgctgcaagcctttgcttaatttccaatgttctgaaaaatttgactctgaccatttttgtcagtgttctcactgcttgtatagagatgattttccacgatcctcacttatgcttttcactgatacccctccacagattctttcaatggcatttatcttttccttgacatcaactcttatttttccgaacactgaaaaatctaaagccccaaatagtttatacgtgctctgttttcaagaagtgagttttctgagatgtatttctggaaatactgtccctgttgctgctgctcagaaatattataagaaaaccacacttaatattgcaacaacaaaaatttaacccattaactacaaactctcttcatttttcctccttcaagttgctgttttgtgtcttaaactgagccagtcatatttgagcacatatttatttagagtgatagactcattt

SEQ ID NO: 472731 - DNA, 713 bp, Homo sapiens
cggccaggcttctaaacctcttaaaactccccaactctggacacctctactccctccttggcaatggatgatgcaccccttaccatcccattaaaacctaatcacccttacccctctcaacgccagtatcccatcccacagcatgctttaaaaggattaaagcctgttatcactcccctgttacagcatggccttttaaagcctataaactctccttacaattccccattttacctgtccaaaaaccggacaagccttacaggtttagttcaggatctgcaccttatcaaccaaattgttttacctatccacctcatggtgacaaacccatatactctcctatcctcaatacctccctccacagcccattcttctgttctggatctcaaacatgctttctttattattcctttgcacccttcatcccagcctctcttcgctttcacttggactgaccctgacacccatcaggctcagcaaattacctgggctgtactgctacaaggcttcacagacagcccccattacttcagtcaagcccaaatttcttcctcatctgttacctatctcagcataattctcataaaaacacatgtgctctccctgctgatcgtgtctgactaatctcccaaaccccaatcccctctacagaacaacaactcctttcctttcctaggcatggttagtgtggtcagaattcttacccaagagtc

SEQ ID NO: 472732 - DNA, 694 bp, Homo sapiens
cccagcaggccttcgcaacatgaaaaacagcctgggagcaatgggggggggaaaaagatttagtgatgatgacaattttgaactgttctatcacaccctgcgtgtgtatggcatttacaaatctcttactgcttgttcttttcatagctcaatccctggcacagggatggttatttgcatagcacaattgttgttattgtgctgcctcacatattctttctgccctgggcaaacgcgaacaatgatggactatatttatgaaaccagcagcttagaagcacgagcttcagattaccatgagaattgtagtaagattttaaaatacagtttagcaccatctatatggaaagcccatctctcaaagtctcatgcaaataaactggccctttgtgtattcagagagttcctcagtttttttttccatagtttcaatcacttcacatttctcaactttctagatgctgacttcacagacacgcagtgttcatgaagcgttgatatgacaactgcctctaaaagctagaaaataagaaaataaaagtagttttgatttcctttaaggatgggttggggaggggggttggagttagagtaggatagaaagatgattggtgacaaagctgtttatgatttaaggtcttctctttaggctcatcctggatttagggctatcgtaaatccagagcctcatctt

SEQ ID NO: 472733 - DNA, 735 bp, Homo sapiens
tctgcagtggacctccagcaagctgcaacagacctgcagctgagggacctgactgttagaagaaaaactaacaaacagaaaggaatagcatcaacgtcaacaaaaaggacatccacaccaaaacccgatctgtaggtcactaacatcaaagaccaaaagtagataaaaccacaaagatggggagaaaccagagcagaaaagctgaaaattctaaaaaccagagcgtctcttctcctccaaaggattgcagctcctctccagcaacagaacaaagctggatggagaatgactttgacaagctgacagaagaaggcttcagaagccaattcgatcaagtggaaaaaagggtatcagtgattgaagatgaaataaatgaaataaagaaagaagagaagtttagagaaaaaagagtgaaaagaaacgaacaaatcctcaaagaaatatgggtctatgtgaaaagaccaaatctacatctgattggtatacctgaaagtgacggggagaatggaaccaagctggaaaacactcttcaggatattatccaggagaacttccccaacctagcaaggcaagccaacattcaaattcggaaatacagagaacaccacaaaaatactcctcaagaagagcaaccccaagacacataattgtcagattcaccaaggttgaaatgaaggaaaaaatgttaagggcagccagagagaaaggtcgggttacccacaaagggaagcccat

SEQ ID NO: 472734 - DNA, 3615 bp, Homo sapiens
caattttcacctatgctggtttatgacctagttagagaagacatcatagggcattatttagatcactttgccagctgtgtggaggatggatttgagggagacaagactggaggcagtagtccagaagctttgcatcgtccctatggttgtgatgttgaaccccaggcactaaatgaggctatcaggtggagctccaaggagaacttgctcggagccactgagagtgaccctaatctcttcgttgcactttatgattttgtagcaagtggtgataacacactcagcatcactaaagaatgtgaaacactgaactactatcttcatgcagaaagccttgctccaaaaggtgaaaagctacgagtccttggttacaaccagaatggtgagtggagtgaagttcgctctaagaatgggcagggctgggtgccaagcaactacatcaccccagtgaacagcctggaaaaacactcctggtaccatggacctgtgtcacgcagtgcagctgagtatctgctcagcagtctaatcaatggcagcttcctggtgcgagaaagtgagagtagccctgggcagctgtccatctcgctcaggtacgagggacgtgtgtatcactacaggatcaataccactgcagatggcaaggtgtatgtgactgctgagagccgcttcagcaccttggcagagcttgtacaccatcactccacagtggctgatgggctggtgacaacattacactacccagcacccaagtgtaataagcctacagtctatggtgtgtcccccatccacgacaaatgggaaatggagcgaacagatattaccatgaagcacaaacttgggggcggtcagtatggagaggtttacgttggcgtctggaagaaatacagccttacagttgctgtgaaaacattgaagtgccaagcacatcagcaaattgagatgattaaccctagtgccattgctgacaatgcagaggaagataccatggaggtagaagaattcctgaaagaagctgcagtaatgaaggaaatcaagcatcctaatctggtacaacttttaggtgtgtgtactttggagccaccattttacattgtgactgaatacatgccatacgggaatttgctggattacctccgagaatgcaaccgagaagaggtgactgcagttgtgctgctctacatggccactcagatttcttctgcaatggagtacttagagaagaagaatttcatccatagagatcttgcagctcgtaactgcctagtgggagaaaaccatgtggtaaaagtggctgactttggcttaagtagattgatgactggagacacttatactgctcatgctggagccaaatttcctattaagtggacagcaccagagagtcttgcctacaataccttctcaattaaatctgacgtctgggcttttggggtattgttgtgggaaattgctacctatggaatgtcaccatatccaggtattgacctgtctcaggtctatgacctactagaaaaaggatatcgaatggaacagcctgagggatgcccccctaaggtttatgaacttatgagagcatctgaggagcttgggagagccgcctcctcgtcatctgttgttccatacctgccccggctacctatacttccttccaagactcggacactgaagaaacaggtggagaacaaggagaacattgaaggggcacaagatgccacagaaaattctgcttccagtttagcaccaggtatgggtcccttagcagggttcatcagaggtgcacaggcctctagtggatccccagcactgcctcgaaagcaaagagacaagtcacccagcagcctcttggaagatgccaaagagacatgcttcaccagggataggaaggggggcttcttcagctccttcatgaagaagagaaatgctcctacaccccccaaacgcagcagctccttccgagaaatggagaatcagccccataagaaatacgaactcacgggtaacttctcatctgttgcttctctacagcatgctgatgggttctctttcactcctgcccagcaagaggcgaatctggtgccacccaagtgctatggggggagctttgcacagaggaacctctgtaatgacgacggtggtgggggtgggggcagtggcactgctgggggtgggtggtctggcatcacaggcttctttacaccacgcttaatcaaaaagacactgggcttacgagcaggtaaacccacagccagtgatgacacttccaagccttttccaaggtcaaactctacatcttccatgtcctcagggcttccagagcaggataggatggcaatgacccttcccaggaactgccagaggtccaaactccagctggaaaggacagtgtccacctcttctcagccagaagagaatgtggacagggccaatgacatgcttccaaaaaaatcagaggaaagtgctgctccaagcagggagagaccaaaagccaagttattgcccagaggagccacagctcttcctctcagaacaccctctggggatctagccattacagagaaggaccctccaggggtgggagtggctggagtggcagctgcccccaagggtaaagagaagaatggtggggcacgacttgggatggctggagttccagaggatggagagcagccgggctggccttctccagccaaggctgcccccgtcctcccaaccactcacaaccacaaagtgccagtccttatctcacccactctgaaacacactccagctgacgtgcagctcattggcacagactctcaggggaataaattcaagctcttatctgagcatcaggtcacatcctctggagacaaggaccgaccccgacgggtaaaaccaaagtgtgccccacccccaccaccagtgatgagactactgcagcatccgtccatctgctcagaccctacagaagagccaactgccctaactgcaggacagtccacatcagaaacacaggaaggaggaaagaaggcagctctgggcgcagtgcccatcagtgggaaagctgggaggccagtgatgcctccacctcaagtgcctctgcccacatcttccatctcgccagccaaaatggccaatggcacagcaggtactaaagtggctctgagaaaaaccaaacaggccgctgagaaaatctcagcagacaaaatcagcaaagaggccctgctggaatgtgctgacctactgtccagtgcactcacggaacctgtgcccaacagccagctggtagacactggacaccagctgcttgactactgctcaggctatgtggactgcatccctcaaactcgcaacaaatttgccttccgagaggctgtgagcaaactggaactcagcctgcaggagctacaggtttcttcagcagctgctggtgtgcccgggacaaaccctgtccttaataacttattgtcatgtgtacaggaaatcagtgatgtggtgcagaggtagccactgttagcctggtgggaaaatgcacacatttctgaggggagagggaaaaggacttgttttcctgtgttcttgttttcagaaaatgaaagactcatacttgagtgtgtttatgtgaagtacctcaga

SEQ ID NO: 472735 - DNA, 607 bp, Homo sapiens
aaagaaccataaacaagtatctcattgttcctttctagtttctgaatactgattgacaattggcctaatcatggtgatttctcaagatctcaagaaattcctctcaaaacataatggaggccaaatggccacagtgagaaattgctgtcaaaatggaggagagctggtttctctggccctcatctaccagaagcatctctgtcccctggcgttcttgccactcacaatacctggtatggtacttctgaactgtgcagaacagtatctgaggtttactgttgatgacactaaagcaatagacacagatgacatgtatcacaattctgctccaaatatggtgtggtctgaggacagtgctgtgcctggcctttccccttcaacacgccagctgctccctcagagtgaacagggctttgctactctgctcaggtcaaaagtagttggaaaaccagaactctatccaaatgatatagatatcttgactgttaagagttggagacgtttcagaagttctcacatactcctacggatcccagactgaagcaggaatttacaaaggaagtgagctactactggcttgatacaagctaagacagagacacaaacc

SEQ ID NO: 472736 - DNA, 1097 bp, Homo sapiens
aggaggcattgtttattatgtctctcccgaaaacgccctccaccccgctaaactctacatcaacatctgagagcaaaaagttaaaagtgtctgtagccaaggaagggacaagaggacttcctgagctaaaggagaaaaaaaatatggtggatcgttcaaaactccttcctacttcccttcagaatgagttcattcccaaagaagttcttctttctctgacctatgcggccaatgctggtccttgtcctgaaaacttactacctcctaagaaaattaaaaccccaaagccaaagacactaacagatactttgattcctgaagaatttcatattgtgtcaagtacaggagtttcaggtttggagtgttatgatgagaaacctaataaaagagtagaagtggcccagctgaatgatgtgatggatactatgctagagagggctggtgtggaaaatcaggaatatacaggaccaacgaagattgctcggcagatgattgatttctacaaagacttggtaactcagcgagtgatggaccagcgcattttagaagaattgtataatttcaagcatgttattgaagaactgaccagggaactgtgtctagttcgggcacatgatgtgaaattaacaaaggaaacagaaaaagcccacaaggatttggcacaagctcttttaaatgcggaaaagaatgccaaaaaaccagtcttcaagttctgagattctttcttcaacttggtttattctgctattaatacttcattttgaatatatcattcaattctttcctggcttaaggtttctgctgagaaacccattagtctaatgtggattcccttatgtgtaacttgatgtttttctcttgctgtttttagaattctccctttgtctctgacttctgacagtttgactgtaatatgccttagaaaatatctttgtgggttgactgtcccacagtcaaatttgggaatttggcaagttgtttataaaacccatctggaagaatctgaatatgagaataataaaacattttaaaagaagattaataaaaataacttgtacttttagacatcaaaatgtattataaagtcaaagtaactg

SEQ ID NO: 472737 - DNA, 794 bp, Homo sapiens
gagctgctttcttgatttcatcttcagattttgtccccaggttatgagggttgatgtcatcgtgacccttgtcagccttctctccgtctttgcactcaggctcagctggctcatggctcgtaccggagggaccgggcccatgatcctgaatgagaaaaaagaagagtttactggggatgttctactgtcaaaatacgatactctcaagattattaaacatttacaggaaaactgggcagatattgggcttgggatatttaatcggcataaaagtttggagggggagatgccatcagagcgacagtacatggaggaaattatcaaaaacatacaaaaactctacaaagaatatgaaataagaataaatggggacaatggtggagagagcgtgtttaaatctgttaacgttgagctggctgccaaagatggtgacaccagtgaactccctggagacttgttgaatggctttgaacaagatgctaataatgatatggacaatgaaatccaggctaaggtggtctcagatggagatgaggaacttcttgggaactggagcaaaggtgactcttgttatattttagcaaagggactggcagcattttgccccatcctagagatttgtggaactttgaacttgagagagatgatttagggtatctggcagaataaatttctaagcaacaaagcattcaagaggtgacttgagtgctgttaaaggcattcagttttaaaagggaaacagagcataaaagtttgtaaaatttgcagcctgacaatgcgatagaaaagaaaat

SEQ ID NO: 472738 - DNA, 1465 bp, Homo sapiens
ttatatctcactgacaccagccaggtgcagagaggatgtggcgggcagcggggcggactgctagaggcacatcacctgccgctgggctcatatgtgacaccctgtgagctcagggatgtgggggactggctgcctccagtagtagccagcatggacggcagaggaacatacacagccattgcttctggatgccagatctggcgcattctgcatccaaataacatttcatacaggaaccgttgccccacaccagggcaggaccaaacttccttaaagccacattttctgtggatacgtgcttacctgggcctggagaactggctgggattgagcagagtatacaccatcacgactccgggttggtgggcccagcgaggtgaggattctcatgtgagtcttggagagaatgctcatgtgattaacatcccggctgatgcagatgagtgtaccagtgatggaaacatgtgcttgtatcatgatgaaatgcagattagaggccctggagccaacccaaggaaatcagcccaaaactgtttcatctctgtcagttttaatctgatagaaagaaagcatgctttaatgcagcgagaaaaatatgaatgcctgatataaccaagtggcactctatcttccattgagatgttatgaaaatactcacattgtggtatagtagaaagtatactggagtataacttaaaatacctgaattaaaatttcatcttggtcactaacttatgctgtgagatctctcccagggtcttaagtttctgtatctgtaaaatgaatgttctgggttagaccaagggttttcaatagaattctccttcacaattcaaataaaaataatatttacacactctcgtgagcagccccagggttgtacacaattacccatgtactatatatatagctcagtccctttccttctgctcaagtaagcatatcagaagcacatgagtgagactgacattttaagataaccttgaatcctattctaattcatttaaaacattaaaaaagcaaataatttggaatattgggtacatcactaataattcttaaaaggtgatttgctacacaattcccaaaaagtatgttacaaaacttgattcaattatctctaaacgattttaactgtcccttgtgatacagatattattctatatctctatgagttaatcaaggtaccagtaaagtccaaagcatcgagtctttagctatttggaataaaattacaaggagtacatttttgtaggtaggcctcactttggtgggtattctcatttccccttagaaaattgtggcaatagtaacttcttgattcttatgttgatgtgctaagcagaaccgtgtttctaaaatgaagtaataacatgtcacttaaaataagatggaatactttttaaaaattcaacacatatagtacttgactaaaacagtagtgagtcatgttttgagatatctc

SEQ ID NO: 472739 - DNA, 705 bp, Homo sapiens
gtgacatccactcagaggtccctttctctcaggaagctcgtgttccctcatcagagcagtacgaggtaggtgaggaggagtgggggcggggcggggtggggcgggggggcgggcagggctgcaggccaaggggttgcctgcggatgctctgggcctctgtcctgctggtgctgagctccctggtgtctcttgctggttatgtctacctggactggatcctgttctttgtgctctatgatttctgtcttgtttgcataaccacctatgccatcaacgtgggcctgatgtggctcagtttccagaaggtccaagaaccccagggcaaggctaagagcattatacatttgctgctgcatgcagaatacacaggagaggagggaagagaagggggagaaacagtgagtggaagagctgagaccggcttacactgtgggcaaatcaaagctctcttctccctccatgacctacttctccctgccttactggaggccttatgtgaggattatacaaaagactacatggaaagcatttggcaaagtgtcttgtactgagaaatcaaacattcaataaatgtcagctacttttgaggaggtggatgatatttttctctgtattcttaacagtaccatttcattccagctgctctgatgagagatctgtagctactctgtagattcatgtcacacctttgatgggtcaaatgaa

SEQ ID NO: 472740 - DNA, 579 bp, Homo sapiens
ccagaagaagagagttcagaaaggttcttggtcataggtgaaggggagtgtgcctgccaagttccttgtaataacttcacacgcagagtattttctgaaatggatctgctagagtcatctcatggaatcttctcattcttctggagtctcctcattttacagacgctgaaggaaaaacaccagctgaggaagaatgaagaactgcctgttctaagttattctccttctgtggtcattcgagcaccaggaagaccagggtacacgtcgaggctccaagctggaatgaatatggccttcaacatactctttatcatacagaagcttgtgttcagggcttggattttgaagtcagacagacctggattaaaaaccaattcaactacctattacatatgtgacctagaagacttaaaagcaggtctgtttttaaatacaccacatattgaactttccccactatgggaggcaggccaagtagtgggttttgaaggttttaaaggctcactggcccttcaaaaaatggctgttgtggacatatggttttagaagcttttaaaaaagccttgtgggcttattttt

SEQ ID NO: 472741 - DNA, 729 bp, Homo sapiens
tacattctagcagggagggtggcattggacaagtagccaggaacatgatgggaagaaattcgtttctaccaaaaatggattttgctggagatcttatcagggagacagaagaggaagtggaggctttggggctgacaaacggtacaccggaaaggagaggggagagcctgccaggagggggtcggcaaagccagttccctcaaagcattgtcctttccttcctccaacaggatgccaggagccccacagaaaagggactcatttgtcttccttcccagcacaataacctgttgctggcctttctcttgggccttgctcagagcaacaggatacagtctttgccaggggagaaggaaggaaggaaggaaggaggggagggaaatgacaggagctcaggatctccagtccctagcctgggccccggagagacccagcactgtgaggccaggacccagactagagctgtccaggtccagtcggcctggtatgaggaacaatttcgttttacagaaaaccttaatcagatgtaagctgagtaaccgttagaagctgagctatcatttctgagcatatctgagtggcctctctccaacttttatcttaatctcatttagaaaagaaaaataaattgggtcaatttagaactgtaccttctttcctttttttattcattgttaaaaagaagaaaagaaggtatgcattggagtttgtttgtttgccatggaaaaa

SEQ ID NO: 472742 - DNA, 950 bp, Homo sapiens
ctaaaaacctctctatgggtccctgaccttgggtctcctgactgggggacaactcccagcacgggtcgagagacacatgatacaggagagctccggctggcatctagcacaagtccctctgggacgaagcttccagaggaaggaacaggctgcaatctttggggttctgcagcctcccctggtgatatccaggtaagcagggtctagagtggacctccagcaaactcgagcagacctgtagcagaggggtctgcctgactgttagaaggaaaactaacaaacagaaaggaatagcatcaacatcaccaaaaagaacgaccacatgaaaaccccatctgaaggtaaccaacatcaaagaccaaaggtagataaatgcgcgaagatgaggaaaaaccagcataaaaaggctgaaaattccaaaaacaagaatgcctcttctcctccaaaggatcacaactcgttgccagcaagggaacaaaacttgacagagaatgggtttgacgaattggcagaagtaggcttcagaaggagggcaataacaaactcctccaagctaaagaagcatgttctaacccaatgcaaggaagctaagaaccttaaaaaaaggttagagaaattgctaactagaataaccagttcagagaagaacataaatgacctgatggagctgaaaaacacagcacgagaacttcatgaagcatacacaactatcagtagccgaatcgatcaagtggaagaaagattatcagaaatgaatgatcaacttaatgaaataaagtgtgaagacaagattagagaaaaaagaatgaaaaggaatgaacaaagcctccaagaaatatgggactatgtgaaaagaccaagcctacctttggttggtgtacctgaaagtgatggggagagtggaaccaaattcagagccgaattctactagaggtacaaagaagagctgg

SEQ ID NO: 472743 - DNA, 793 bp, Homo sapiens
tgtgaggtgggctgctcagggagctacatgagcaaacagagccgtccactggtgaacaaggccatccctggctggcctgtctgtcactcacaataagccaggacttatctctttaggtatgtctgtgggagcccagaattatgcaccctcccagctcagtttcaatggtctccattgcattcagcgagcatataacctgtgggagtccagctgccctgaccttgaggtcagtgtcctgaaactcccatggtccaagattcacagactttggacctgctggggaaaacagcactgggggaaaatatctcaggcaggatgccaggaggaaacagatggcatgctaaggttggctaatgttggggctgtggctttccaattagagggatgtgccaattcctggtgtgccagctctccctctgactctgccgagtctccactgtcctatcagtgtagtccttacatgccagccttggaggcacagaagagagcaagaagggtagaaggtggatgtgaaggggcagtggaagatggtgagctcaaaagcaagcccagcagggcctcagagctgtttaattacacgaaaatgaaccacagaggcagcacactgaattaaaaggctcctgtggcagtttgtatattgtgggtgaatgacaatgggaaggtgtaatcaatttccatttcctgtcccttgctccctagcaacttcccacactcaatgactggcttgcaaatttgttttgctttgtggcagatgatatggatgctgagaggtgcgcccctgcccccaagtgtc

SEQ ID NO: 472744 - DNA, 4860 bp, Homo sapiens
agaggagactgagggtcagagcagcgaggggctggctccaaggcacacaggaagaggctgagggcagccctaggcaggtagccagatggagatagagttggaggagaagttggtccactgcccgctgactgggccaccctggcacccccctcgaggggagctgggctttcttctccaccttgctctatgggcctcctcctgtgggtctgaggcctttgccctccacacggggatggaatggggtgtggtgcaggactccttgtaggaggggcagtggctggctgtggggagaagtccttaggaagccccctgttctgagcatgctcctctgttcaaaatcccacagctacagtccctgagtgtcagcttgcttcgtgtccactctgtcttcatctccaggaaataaatgctctttgaggagtcttgtatctcctcagtgtctcttaaatccactcacttcttgccctccctcctggcactgccctgggccaagcttctggtcctgcttcggacactgaagggatctttctgaaatgctgactcacgctgctgtccttcagcatcgggctcctcattgctcccaagggcctctggcttccctagcatgccctagcaggccctccctgcctggactttagagcctcccccagctcctcagcttcatctttatcacaccccatccctggccctgccagactagactgcataaagaaaatgtggtacatgtacatcatggagtactatgcaaccataaaaaggaatgagatcatgtcccttggagggacatggatggagctagaagccattatcctcagcaaactaatacaggaacagaaaaccaaacaccacatgttctcacttcagcatgaaaacagactaatacagtatattggtaccagaagtggggtgctgctgaaaagatacctgaaaatgtggaagcgactttggaactgggtaaccggcagaggttggaacagtttggagggctcagaagaaaacaggaaaatgtgggacagtttggaacttcctagagatttgttgaatggctttgaccaaaatgccgacaatgatatggaccatgaaatccaggctgaggtggtctcagatggagatgagggacttgttgggaactggagcaaagtcactctagctgtgattaaaagatgccaaggtgtagctcgggctgtggcttcagaggtgcaagccccaagccttggcagcttccatgtggtgttgagcctgtgggtgtacagaagtcaagaattcaggtttgggaacctctgcctagatgtcagaggatgtatgaaaacacctggatgttcaggtagaagtttgctgcagggaccccagaatggtagacccatcgacagcttgcaccgtgtacctggaaaagctgcagacactcaatgccagcctgtgaaagcagccaggaggaaagctgtactctgcaaagccacaggggtagagctgcccaataccatgggaacccacctcttgcatcagcatgacctggatgtgagacatggagtcaaaggagatcattttgaagctttaagatttgactgccccattggattttggacttgcatggggcctcaggctacacaaataaatgatcaatgcacagaaaaacaaggccctctgaggtgtttgcccaagaccacttatgtgtcaaacagacttattagatgtgaagggaatgattatttgcacaaagtgaaatgaacatgtgcaataatactgtaaaatgtttattagtctagagtgtgctgaatgttcctaaaatatatcaggttctcagcttgcatttaatgtactgttataaatgatatcacatccttccaagccgattttccgcttaacgctaagcttctttgctggggaaatcgtgttttcagatcccaagtatgaaaacattgtggggttaaactctcccttctactccctaacccccaccccaatcagttacctccctataaaacttgtcctgagtctggctgggagggatagggcagttggtcaggccagatggtggttggaaaaggaaaagggggtcaatgagttattgtggtggggatattaggctggaagtccagtgattcagatttcaggatctactcactaatctcctgctgtgtgaccttggggtagtcccttcctctctccgagccttaataatctcagtcagaaaatgggaataatgtctaaagagactcccagagctgaacgcttacatattctaaatcccagcttgctaagtcatgagtctgaaagataaaaagagattctggaagtgaacaaataaagtgctacagaaacattcttatttttttctatgattctggccaattcttacttaacctttgaggccctgaccaactgtcccctcctctgggaagccttctctgacccgctaaccagctggtcagtctgtcatctttgctctaacagtgcaaaatccttgtgtcccttattgccccgccagctcatggtatcaccacatctctctgtgtgaacaggctcttccttctgttcagtggggaaagctctacaggaaggagaaagtggcttcattctctgtgctgcttagaccagcaggactctcctccctcagtgagtcgtctgcctccatgaatgcagccgctgagctggccagcttcctggcatgcatgtccagctgtcagcttgctctgaactgaggtccccaaaagatccccagacctgggtcaggcacagagctggtactcaggaaatgattcgtggatgctggatggggaggagccgagctagtgtgacccttggagcttatcccccacccaccccgcatgttaaagatgggagttttatcccagagtagggaagggattggctagggggctactcaggcctcttggagaagggtcagagagagtgtttcctataacatgtcaactctccacccaagaaggaggggtagaggagcccagccagatcccatgtccttggcccagaacgggggtgggaggtattggtagtgggcagttcttggcatcagctgagagcacagggctggctttggaggttgtggaggtggttggggatatggggggtttccagtttcctggctgagtcacgtccctctcctttcccctgcccccagaggtttgctcaaaggccccctggagggtgatcttctgtgagctcaactgatggtctggggatcttttggggatctcagttcagagcaagccgacagctggatgcgcatgccaggaagctggccagctcagtggctgcattcatggaggaagacgactcgttgagggaggagagtcctgctggtctaagcagagtggagaatgaagcccctttctccttccttcacagctttccccagaaatgactgaaagcaatctacatggaaatatatactaaaacgtgggaaaataaagttagaagtaagcattcaaggcaaagattaaaaagtttaggagggtagggtggattctggagtgaggcttctaagcagggatcctgccctaagagtttagtaaagtagtccttggaacacggaaagaagtgttcctgttcaagttgaaccccgggcccgagggatgggcagcagaattagcacccccatgttgcagatgcagatgcagaaacaaggctcagagaggctgtccaccttgcctctcctcaccacccaccaaggtcacataaattcaccagggacctggtggttcctggtccaggggtgagcttctgcaggttgaatgtacctgcagtacatggagtacatgtacctgcagtaaatatctagctcagtacatggactggggcctgccacaagggcctgctcaagtgttcctgcctgggctgaggtcttctgtggcccctccaggggcacactcaccttcctccaacctgccctgtgcctgaggctgacccgtgtgtcctatcagtgggctctgtggagtcaggcctccagctgggtttggtcactgtgaggtctttacatgggcaactacttttcagctttaaggtctcagcctgactaatgttttctcagaaagactttcccagagagaggggtcacctctagccaaaggtgtccccctcaccctggttgttctcaatcccatagccctagattagtttcttccttgtatctgtcagtgtttgcaatgtttgtctggctttctcctctggaatgcaagctccgtaagagccggggtttttatctgtcttgtttacttctgtatcccccaagcctaggacactgtctagcacacagtaggcacttactataaatgtttattgaatttgtaaatgagacagattcaatatgcaaaccagggagtagcataaatgaatgaatgaatgtatatattggcaagtaactcatctgaattaatggatgaatgaattgggcaaatgtgtgacaaatgaatgaacacattgacacagacatgcacctggggagaatgccatgtgaaggcgaaggcagggattggggtgatgcctctacaagcccaggactcagaagattgccggcaagtccccagaagctaggggagaggcatggaacagattcttcctcacagccctcagaaggaacccaccatacccatacctggattgtgggcttctagcctccaaaactgtgggacaatctgtttctgtttgtgaagccacccagtctgtattacttcttatggcagcccgagcaaatgaataaagtatgtctaggctttaggcttctagagctttagaggtgatgacctaccatgtacaggctttggagaggcagcacagtgtggtcgcaagagagtgggctggcagctggggacagtcccagctctgccactgacttgctgggct

SEQ ID NO: 472745 - DNA, 5360 bp, Homo sapiens
aggaggttcccagcagccttggtgagcactggctcctggcagctgataggtaccagccagactggggtgggtggagggggtgccaggaacgccactcatgcccttccgtctgtctgcgagggcccccagaccctttttcttggcaggcaaactaggagcacacccaatattccatcccagaatgaagcctgggtccttgagagggcagctgtccactctttgtctctggatgggactggactgctcctgtgtgctgtgggcttgcccatctccaggccttctcctaggctggccccctcccagcagagcttccaggcccatcctgatcctcagtgactgacaactttcaagatggcagttgctccagtagcccaggacctgagtgagcccccatcaactcttaatggccatgtgcggaagcgcaggccgaacagagtcaggatcggaagcacagagcagtggcctggggcagttcctggggcagaggaggaaaggaagtggagaggtcctgactaccagcaaggggagcccatccccctttccctggaggctcaggcacctgtgtgggtctccaggcttcccaggccccactaccacctcttcagcaaatcaacacttccaagcgtggagacaagttcagcatttgggattccctataccaaggggagaggcttggagagtctaaagtttctagagctctctgctgttaagagtctgtgcttccagacgtctcaggcagttggatgcacggatctgcagatcctgttattctaagaccaagtgactagggcccacagtaaccccttccacctcaggatgctggtggtggaacagatagagtccccggttttggccttgcccgtgctggctatgccgtgtgttaatgtggcccagcgtgtgagttcatctcagcaggttccctgagcgcggcagatgccgcctttgccgactcaccaccaaaggtgccttgagtcctctggggagtgtgggtgcttagagggccaggtctcatgtggggacggtatgagcttcagccctttccaagtcttggagtccggaagccaccaggaaccaaaaggatctttgcaaatcattgttttgcagcagtttcttctccagggcagccaaaatctggctgggtttcctctcgctggtatgtgtcctggttgccaccccctcactgacattgtactggaaatgtcttttcttctccaaacttgcctcccgtgcagggtgggctggcctggttgaaataaagcatgacgtacagagacctccagcaacctgtgctggctctgtgtagccctaaggttctgggtttccaaggtcccgtgattctagattttacttatctaatatcttgtgattctagattccaggacctgaaaaattcatgatgctacagtttgtaggattctctgactctagactgtcctgtactttcaagtctccagggtcccacatagggcctgacaccttgtaaatgtttaatgtttgcctgtatgattctctgagttgattacttggaaattctacgcatttccaaatttccaggactccccagatctgtagttggtcatttcatttagcatcaacagggaccaatctttccattttccaattgattgttgcagagacagcttaaaagaggttacaatgagtcagtgtttggggagtgggaatttggagttgggggggtggcatgtaacatagatggcccagttttttagctcatttcctctatttagaggtgggtggttgggtggagtcttgggggtcagcttttattggggcaggcttgtatacttgatagggtatggagggagtcaggattgatggcccagcatgcatctcaggacagcctgtgtctcaggcagggaggagctctaacaagtcacaggctggagccagcacaggtcttgggagatcctctaggtagttgctgtgcccccttgggactcttgtgaaggagatgggagctttctgggtctttagcccctcacaggttggactctctgggcatttgaggacaaaaggactttcagtgcttcccctgaagaaaaaacacgagtggcttctaggctatccttctactcctttttaaaataaattttcaacttttgtgggtacatagtaggtatttatatatttatggggcatatgagatattttgatatgtcttttattcttatgcaccaaagtttatctactgaacctcccctcccttggctcccaccagttgtcccagctccactctgccagccatttcccctcgccagccctgccagagaaacttatgtccactcagagcctctacaactctttatttttccatttcctttgactttgatcattttctgccttttattattttttctatagtttctctaccaagctctgaagtccctgaatgaataagctgtcattcattcactcacttactcattcacgcattcattcattcattccactggacgtccaaaatgccaggtcttttcctacactgtgatgacaccaagatgaataagacaggtccttgtttctaaggatttcaattctcaattaaaaagttgaataaaaaagccagtgattcttagccttttggggtatttgtccccttagagaatttgataaatgttttcaccagtgaagatatgcacaaaaaatattgtctactactcgggatgtttccagatcttcagaagccatgggtaccagggttaacagagatgaggagagcacctaataagtgtcggttcctgcagaaggtgccttgtttgtattgcctctaaatcatcacatccaccagtctctcccgctacccactgcagactgacacattggtggctcgggatgagcaaacataggcatgtatgaggggcacagctccccctggccatgcagccagtgcccagcagaagatttgtggtatctgggaaaaaaagaaaggaaaaactattaggtcttgaatgtaaaaccacgggacttttaaaaaaagtgtttatttttctgcaaaaaacccgtgaagttggtattgttactatttcacaaatggcaacactgaggctagagaatgtaagtcatgaagattccacagcagccaagtggtacagctgggacctgaacctaggtgtagccagattcccatacctgtgctttagagttctgttatttagtgtctctcaagtgacacttgagagacattaaatatgcaagttactcaacctttctgagccttggttttctgatatataaaatggatactgcagagtttttctgaggatccaatgagaagataggtgtaaagcaacttagagtagggcctgtaaatcgttactgtgtaagagtttgctctaataaaagtaattattagtgctacattctaacagacttgtgcttgacaacatggtattgagggacagatgaagaaggacattggtctttgtcctcaggttgtgcatagtctggttgcacagacaagccccacctatttggtcattaagtccttcattcacacatgtgtaccccctccccagcatgtgccaggcctcaggtcattgcagggctcccagagtgcccctctgcctggctaattcctccatctttcagcactgactcaggtgccatgtcctccaagaagattttcccaacccgggcttcacccccaacccccatctccaagctcctggtgctcccctctcccagtcttgtggtcatctactcctccgtcattcccatgccgggtggggactccggtgcctcaccctgaccctagcacatgctcagggagtttttgctgaacttctgtgactctcattttttcccctcaaggcagcattttgtttgtgagacttacacatattgctgtatgtaactgcggtttattattttcatttctgtataatatgcgattgtatgaatatgctacaatgtattaattcattctactgtcattggacatttaagttgttactggtttggaactgttacaaatactattgttatgaatgttcttgagcatgttttttgcttcacatgtccatgtatttatgctggacataaatacctgcctatgagtgaaatttctgagtaatagggcatgtatattctcaggtttagcagataatgccaaacagtgtcccaaagtggttataccaatttgagctcccacaagcaatacataagagttctaattcaaatcctctccaacactcattactattagttttgtttgttataaattttagccattttgatgggtgtgtactattctcattgtggttttaatttgcattttcctgaggaccaataaggttgaataccttttcatatatttattgaccatttggatttcctcttctgtgagttggcttttgaaatctctttttaactttttaattggttcacccttttcttgttggctactagaattctttaaatattctgaatcaatttctttgtcagttatacatgttgcagatatcttcttccactctttagcttgcctttttgctctcttaatcaagtcttataatgaacagaagttctggattttaatgtaatccaattcattaaagctttctatttatgactagaacttttgtgtcctctttaagaaatctttccctatgcctagttcatgatgatattcttctatgttgtctttattgcttcttgtttcactttagatctataatttgtttttaattgattttgtatggtgtgaggaaggaatcggttttaatcccctccctccctgcatattatacacatttgactgagtaccattcgtgaaaaagttcattctttctctaatgatctgtggtgtcatctttctctttaaagaagcccccatataagcacgagtctttctgaactttgttctgttgatctatttccctatccttgtggccaattagcaaaataatttctgtagggtactgtctctttgtaatacatttttgtatccacagaataagtcttctaatcttactattcttcctgaagtgaatcttggatgtttttagctctttgcattctatgtaattttagaatcagcttgtgaactttcataaagcaattgctgggaattttattaaaattccattgactctatagatcaaattgaggagaactgatatctttgcaacactgagtttttaatacgtgaatttgttatgtccttccatagggtttctttaatttctctcaacaatgttttatagtttttgatgtagagattgtacatgcctttaattagatttatttataggtaataaacattgtttagtactataatatctgtcacctttgaagtgtttggtaaagagatacagaaataaaattgaattttagattat

SEQ ID NO: 472746 - DNA, 1126 bp, Homo sapiens
gtcttccaccatgattgtgaggcctccccagccacgtggaactgcgagtccattaaacggaggtggcagtgatggtgatggtgatggtgatggaggtgatggtgatggccatgttggtggaagtgatggtggtggtagtgatggtggtgatggtgatggtggtggtcatgttggtagtgatggtgttggtgatggaggtaatggtggtggtcatgttggtggaagtggtggtggtggtagtgatggtgatggtgatggaggtggtggtggtggaagtggtgatggtggtggtgatggtgatggtggtggcagtgataatagtgatggtgatggtggtggtgcatgtggctatcgcagcagttgtaatggtgatggtgatggagatgatggtggtggttgtggtggtggaagtggtggtggtggtagtgatggtggtggtggtgataatggtgacggaggtgatggtggtggtggtggtggtggtagaagtggtggtggtggtagtgatggtggtggtggtgataatggtgacggaggtgatggtggcggtggtggtggtagaagtggtggtggtggtagtgatggtggtggtggtgataatggtgacggaggtgatggtggcggtggtggtggtagaagtggtggtggtggtagtgatggtggtggtggtgataatggtgatggaggtgatggtggtggtggtgttgtaagtggtggtggtgttggtagtgatggtgatggtggtggcagtggtgatagcgggagttgtgttggtgatggtggtggtggtggtggtggtaatggtggtggtggtgatggtgatgaaggtggtgatggtggtggcagttattatggtgatattgatggtggtggccatgacgggggtggtggcagtgatggtgatggtgatggaggtgatggtggtggtcgtgttggtggaagtggtggtggtgatggtggttttagaagcagacccaaactggtttctccagcctcctggcaattctgtaagccaaccaagtatgtgcgcacctgttaattatgtatgtatgtatgtatgtatgtatgtatagctttaaaagtacactttattgaggtacaagtcaatgaattttgaaaaatgtgt

SEQ ID NO: 472747 - DNA, 696 bp, Homo sapiens
aagctgagggtcgaagagcacttgtcaggcctgtgaggggtattcagacatcctatggggaactgctgtgtctgggtggaaccagagattctgcctgctttagcagcctttaccagctgctcctctttggaggctgttagaacgcaggacgtcagaaatgaaagtgccccaggtcttcagctggacagctcagctctgccatgaacagcgcaaagatggcaatgggctgcgagagcccactgagtcccagggtccccactgcccggcagtccggggacagaactgcaggggcccccaggtgggtagccaggatgaggtgggcagctcaagctcagaggctctgtccagcttggaaattcttgggtggaaaggagatctgctgtgcagagtgggccatttgttccaggcatggctgagccaggagaagtggcagctgccagcaggatctgcacgtggctccagatctgttgtttttggagagtggattcatgagagcggaggtgagtctccctttgccctgactttactgctggcctatccttataaattcaccagcccagaggagaacaggatgggagaccctggtcaacgttcatttcttcactcattcattctttcattcactcagcaaacttaaagcctattacatgctaccaaagacacagcgatgattaagtggtgccccacctctgaggc

SEQ ID NO: 472748 - DNA, 1629 bp, Homo sapiens
catctggcataattttttttccaagatggccaaccacactggaaggttggatttcatcctcatgggactcttcagacaatccaaacatccagctctacttagtgtggtcatctttgtggttttcctgaaggcgttgtctggaaatgctgtcctgatccttctgatacactgtgacgcccacctccacagccccatgtactttttcatcagtcaattgtctctcatggacatggcgtacatttctgtcactgtgcccaagatgctcctggaccaggtcatgggtgtgaataaggtctcagcccctgagtgtgggatgcagatgttcctctatctgacactagcaggttcggaatttttccttctagccaccatggcctatgaccgctacgtggccatctgccatcctctccgttaccctgtcctcatgaaccatagggtctgtcttttcctggcatcgggctgctggttcctgggctcagtggatggcttcatgctcactcccatcaccatgagcttccccttctgcagatcctgggagattcatcatttcttctgtgaagtccctgctgtaacgatcctgtcctgctcagacacctcactctatgagaccctcatgtacctatgctgtgtcctcatgctcctcatccctgtgacgatcatttcaagctcctatttactcatcctcctcaccgtccacaggatgaactcagcagagggccggaaaaaggcctttgccacctgctcctcccacctgactgtggtcatcctcttctatggggctgccgtctacacctacatgctccccagctcctaccacacccctgagaaggacatgatggtatctgtcttctataccatcctcactccggtgctgaaccctttaatctatagtcttaggaataaggatgtcatgggggctctgaagaaaatgttaactgtgagattcgtcctttaggaaattataaagtaggaaatttggatataaagatttattttccttttctctacccatcagatacttaggattttatccctgttattccttagactctcatacaatgatgcctcatctcatattcatctcattttgaggaattctttcactgtgtggaaactctattttatagtctttgtccatccaaaattcttttacaattgtgttatactaatgtaacatttttggaagttgataactgttctctaattttgtgaaaaaatattcttaacctcaggaaatacttaatatttagagacaaaaaggtcatgaggtgttcaaatgatgagagggaaagagggagggagatagagaggggcaatgaaacaaactgagttcaatgttgctgccacacatgagtatgggtaaagggtatataggtattaattgtactattgttttttaatgatttttgtgaagttgaaatcatttacaaataattaaataccaggcttttctccctttttgaaaatattctcctttctgcttggtggcagtgtgacatcttagaaatcatgctcatttcattatatctaatcattaccgagaaaatccagtcatcgccccttctttattgagggctacatttttctgcatggtccaattctgatggcgtctagtggatttatctctcc

SEQ ID NO: 472749 - DNA, 1385 bp, Homo sapiens
tcagttaaggcaggaacaggccattttcacttcttttgtggtggaatgtcatctgttaaggcaggaaccggccatctggatgtgtccaagcttcatcatccaccgatgcccaattcaaccaccgtgatggaatttctcctcatgaggttttctgatgtgtggacactacagattttacattctgcatccttctttatgttgtatttggtaactctaatgggaaacatcctcattgtgaccgtcaccacctgtgacagcagccttcacatgcccatgtacttcttcctcaggaatctgtctatcttggatgcctgctacatttctgttacagtccctacctcatgtgtcaattccctactggacagcaccaccatttctaaggcgggatgtgtagctcaggtcttcctcgtggttttttttgtatatgtggagcttctgtttctcaccattatggctcatgaccgctatgtggctgtctgccagccacttcactaccctgtgatcgtgaactctcgaatctgcatccagatgacactggcctccctactcagtggtcttgtctatgcaggcatgcacactggcagcacattccagctgcccttctgtcggtccaacgttattcatcaattcttctgtgacatcccctctctgctgaagctctcttgctctgacaccttcagcaatgaggtcatgattgttgtctctgctctgggggtaggtggcggctgtttcatctttatcatcaggtcttacattcacatcttttcgaccgtgctcgggtttccaagaggagcagacagaacaaaggccttttccacctgcatccctcacatcctggtggtgtcagtcttcctcagttcatgctcttctgtgtacctcaggccacctgcgatacctgcagccacccaggatctgatcctttctggtttttattccataatgcctcccctctttaaccctattatttacagtcttagaaataagcaaataaaggtggccatcaagaaaatcatgaagagaattttttattcagaaaatgtgtaagaaacccgagaggctcaccctaggctgttttgtgatattcatgttttcaggaataagttgtaataattgattgtggttattagataaaattggtgtaaatttaataaataaggctactaaaatgcatcatgtatcaaaatcgatatttcctttcaaaagtttttgaataattttaatatgccattgggtaaaaaaatctggtgttatgaagaagacaattctaatagtacatgttttcaagttaatgactcactaaaaaaaatcataaagcctaaaatattatctttaaaagtattttgtgttaaagttctgttctatattcatccactcttcaacttttg

SEQ ID NO: 472750 - DNA, 2346 bp, Homo sapiens
acctacacctcgctcccgtgctggatgattcctgccctcaaactgtcccgagttcttcaactttgggactcgaactggcttccttgctcctcagcttcagaggaccgactgtgggaccttgtaacaggcatattcatcatggcatgggagaatcagaccttcaactctgacttcctcctcctgggaatcttcaatcatagccccacccacaccttcctcttctttctggtcctggccatcttttcagtggccttcatgggaaactccatcatggttctcctcatctacctggatacccagctccacacccccatgtacttcctcctcagccaactgtccctcatggacctcatgctcatctgcaccactgtacccaagatggccttcaactacttgtctggcagcaagtccatttctatggctggctgtgccacacaaattttcttctatatatcattgcttggctccgaatgctttctgttggctgttatgtcttatgaccgctacactgccatttgccaccctctaagatacaccaatctcatgagacccaaaatttgtggacttatgactgccttctcctggatcctgggctctacagatggaatcattgatgctgtagcgacattttccttctcctactgtgggtctcgggaaatagcccacttctgctgtgacttcccttccctactaatcctctcatgcaatgacacatcaatatttgaagaggttattttcatctgctgtatagtaatgcttgttttccctgttgcaatcatcatcacttcctatgctcgagttattctggctgtcattcacatgggatctggagagggacgtcgcaaagcttttactacttgttcctctcacctcatggtggtgggaatgtactatggagcaggtttgttcatgtgcattcagcccacatctcatcattctcctatgcaggacaagatggtgtctgtattctacaccatcgtcactcccatgctgaatcctctcatttatagcctccgcaacaaggaagtgaccagagcattaatgaaaatcttaggaaagggcaagtctggagattgagttacctcataaatttcatgttttgctgtctgctaacgtcttctttttattgtctctctttttctattaagtcctaaaaatatcactaattgtgtgcattgctcaacatattgatgggtaccagtataatttatttcagataaactattttagattttttaatattcaattcagttatgactacaatataaggcattttcaataaagacattccatttttatttttaaatttcattatcattttgggaaacacatagtgtttggttacattaataagttctttaatggtgatttctgagattttagtgcagcgatcaaccaagcagtgttcgctgtacctaatgtgtagtcttttagccctctccagtccccaacatttcttccaagtccccaagtccagtgtatcatttttatgccttggtgtttcatagcttagctggcacatatgagtgagaatatacgatgtttggatttccatgcctgtgtgacttcactttgtataatagtctccaattccaaccaggttgctgcaaatgctattaattaattcatttttatggaagaatagtatcccatggtatgtatataccaccttttatttatccactcattgactgatgatcatttaggctgattccatctatttgcaattgcaaattgtgttgatataaacatgcaacatatgatcatgtgatttttctgtttaattctgtttatgtggggtatatcacattgattgacttaggaacatgaattattcttagatttggacatttaacacagttcaaaacttcttggcggatttttcattatttaaaattcttttttctttgtcttggatggattggtataattcaaaaacatcgtcttcatctctgagggtctttcgtctgcttgttcaattctattggtgagactttcccatgcattttgcatttctctcagtgttttcttgatttccttgaagttgttattgttttttattcatgctatttcactgaagaattttcctttcatattcatattctgcattatgtttttgatttctttaagttggacttcacctttctctgatgcctccttgattagcttaataaccttctgaatttttttttctggcaattcagagatttttatcttcgtttggattcattgccggcgagctgctgtgatcttctgggggtattaatgaaccttgctttgttatattatcagaattgtttttctggttccttctcatttaagtagactatttcagaaggaaaatcc

SEQ ID NO: 472751 - DNA, 1443 bp, Homo sapiens
gcgaggcccccgtgttggtgcgtttggcttgtgctgacacttcagtcttcgaaaacgccatgtacatctgctgtgtgttaatgctcctggtccccttttccctcatcctgtcctcctatggtctcatcctcgctgctgttctgctcatgcgctctacagaagcccgcaagaaggcctttgccacctgctcttcacatgtggctgtggtgggactcttttatggagctggcatttttacctatatgagacccaaatcccacaggtccactaaccacgataaggttgtgtcagccttctatactatgttcacccctttactaaatcccctcatctacagtgtgaggaacagtgaggtcaaggaagccctgaaacggtggctggggacgtgtgtaaacctaaaacaccagcaaaatgaggcccacagaatgggtgaaaattacacaagtacatgtagtcgtggaaatttcattactcataccaggttcatgcaccatcagagaaattattttagaacacgttgagttacaaatgcttgaatgttattggtgtatagaaatgctattgatttttgtctgtttattttgtattctgaaactttgctgaagttatcagttctaggagccttttggctgtgtctttggggttttctaggtatagaaccatatcatcaaagaagaaagataatttgacttcttctttttttaaaacattttacctcccccaactagtgtgagtgatgatggagaggtcgtattactctccatcatcactagcatttggcatttgaatatttttaattttaatccttctagttgtggtatctctatgtcattttaaaatattgcattacctggagaataatgaagttcagcaccttcttagatgcttacctgtcattgatatatgttattttaagaagagtatctttatatattttgccaaaatatttttgtttttatttatttcattcagtttaaatttttttatttattctgggcaaaaatattttgtcaaacatctgtactataaatattttttcctcccttttggctagcctgtttattattttaatggtatgttttgcacagcagagatttttatttttgtaaagtccaatgtataatttttttcatagaattagtgggcttttcttatgtattttctctacaaaaaaaatacgcttcaagaattaaagggtagcgtcttattttttagtgctttatagatttattatttatattagtccatagatcaattgagagagattagtggtttttcaagtgtatcattatttaggcaaaacatgttatctacatattaatttttctatagtatatctaagcaaatttttatggaatcaaacataaacatcttgcatagattttcatatatttatttttatgcattttgttatttggtttaatcaaaatgtttatttaaaaa

SEQ ID NO: 472752 - DNA, 1428 bp, Homo sapiens
actaggtaaaaagcatacacatcatggcaagggagaattcgaccttcaactccgacttcatcctcctgggaatcttcaatcacagccccacccacaccttcctcttctttctggtcctggccatcttttcagtggccttcatgggaaactctgtcatggttctcctcatctacctggacacccagctccacacccccatgtacctcctcctcagccaactgtccctcatggacctcatgctcatctgcaccaccgtacccaagatggccttcaactacctgtctggcagcaagtccatttctatggctggttgtgccacacaaattttcttctatacatcactgcttggctctgagtgctttcttttggctgttatggcttatgaccgctacactgccatttgccaccctctaagatacaccaatctcatgagccctaaaatttgtggacttatgactgccttttcctggatcctgggctctacggatggaattattgatgttgtagcaacattttccttctcctactgtgggtctcgggaaatagcccacttcttctgtgacttcccctccctactaatcctctcatgcagtgacacatcaatatttgaaaagattcttttcatctgctgtatagtaatgattgttttccctgttgcaatcatcattgcttcctatgctcgagttatcctggctgtcattcacatgggatctggagagggtcgtcgcaaagcttttactacttgttcctctcacctcttggtggtgggaatgtactatggagcagctttgttcatgtacatacggcccacatctgatcgctccccaacacaggacaagatggtgtctgtattctacaccatcctcactcccatgttgaatcccctcatctacagcctccgcaacaaggaggtgaccagagcattcatgaagatcttaggaaagggcaagtctggagagtgagttacctaataaacttcatgttttgctgtgtgctaaatcctttttttaaatggtcctatttttccattaagccttgaaaatgggattcattgtgtacataaatctgcaatgacatatttatgtgcacctatataatttatttcagataaactattataactatttattattttatattcatttctgctatgaccacaatgttttttttcttgtcttgaatgaactgggttaatttgaaagccttgtcttcaagctccgaggttctttcttctgctcgttggattttattggtgagaatttccagtgcatttcacatttctctaagtgtgtccttgatttttagaagttgtgagtgtttttatttatgctgtttatttcactgaagaatttttcttttattttctgtatcatgatttttatttctttacattagacttcacttttctttggtgcctctttgattagc

SEQ ID NO: 472753 - DNA, 1007 bp, Homo sapiens
caccatgtaaagggagcacccagtgggtcaaagaaatctgaacagcaacatagtttaccaaaatgagaagggaccaggaaaacaattctggtaacgtgacaaaacaagattcattaatacccccagaagatcacagcagctcaccacaaatggatccaaaccaagacaaaatctctgaattgccagaaaaaaatcagaatgaaatagatagcataaacaatgtcataacttctggaaatcaaggaaacactgaaagaaatgcaaaatgcactgagattgaagacaaggttttcaagtcaacccaatccatccaaggcaaagaaaagataattttaagtaatgaacaaagcctccaagaagtttgggactatgttaaatatccaaacataagaataattggtgttcctgtggaagaagagaaatctaagagtttggaaaatatattcaagggaataattgaagaagacttccctggccttgctagagccctagacatccaaatgcaagcagcacaaacatcacccaggaaattcattgcaaaaagatcattgcacatagccaacatgttaactgaagtcaagatgaatgaaaaaattgtaaaagctgtgagacaaaagcatcaggtaacctatgaagaaaaacctaccagattaacagcagatttctcagcagaaaccctacaagctagaagggactggggtcctgttttcagcctctttaaacaaaacaattatcagcaaataattctgtattcagtgaaacgaagcctcacaaatgaaggaaaggcatcctcttttctaggcaaagagaagctgagagaattcaccactaccaagccagcactacaagaactgctaaaaggagttctaaaccttgaaacaaattcttggaatacaccaaaatagaacttccttaaagcataaatatcacaggacctatataacaataacagaatgaaaataaacaaaggtattcaggcaacaaatagcacaatgtatagaatagta

SEQ ID NO: 472754 - DNA, 1301 bp, Homo sapiens
actaggtaaaaagcacattcatcatggcatgggagaatcagaccttcaactccgacttcatcctccttggaatcttcaatcacagcccaccacacacgttcctcttctttctggtcctgggcatctttttagtggccttcatgggaaactctgtcatggttctcctcatctacctggacacccagctccacacccccatgtacttcctcctcagccaactgtccctcatggacctcatgctcatctgcaccaccgtacccaagatggccttcaactacctgtctggcagcaagtccatttctatggctggttgtgtcacacaaattttcttctatatatcactgtctggctctgaatgttttcttttggctgttatggcttatgaccgctatattgctatttgccaccctctaagatataccaatctcatgaatcctaaaatttgtggacttatggctaccttctcctggatcctgggctctacagatggaatcattgatgctgtagccacattttccttctccttttgtgggtctcgggaaatagcccacttcttctgtgaattcccttccctactaatcctctcatgcaatgacacatcaatatttgaagaggttattttcatctgctgtatagtaatgcttgttttccctgttgcaatcatcattgcttcctatgctcgagttattctggctgtcattcacatgggatctggagagggtcgttgcaaagctttcacgacctgttcctctcacctcatggtggtgggaatgtactatggagcagctttgttcatgtacatacggcccacatctgatcactccccaacgcaggacaagatggtgtctgtattctacaccatcctcactcccatgctgaatcccctcatctacagcctccgcaacaaggaggtgactagagcattcatgaagatcttaggaaagggcaagtctgagagtgagttacctcataaactttatgttttgctgtttgctaaattcttctttctaatatccatctttttctatgatgtcaaaatactagcattgattatgtacattgcctaacatatttatgggcacctatacaatttatttcaggttttttagtttatgtgcagaaaggtgttcacagtagccttgaataatcttttgtgtttctgcggtaccgattgtaataccgcctgtttcatttctaattgagcttatttggatcctctctcttctttcttcgttaatcttgataattgcctattaatgttatttgtcttttcaaagaaccagctttttgtttcacttacc

SEQ ID NO: 472755 - DNA, 1426 bp, Homo sapiens
atattcatcatggcatgggagaatcagaccttcaactctgacttcatcctcctgggaatcttcaatcacagccccacccacaccttcctcttctttctggtcctggccatcttttcagtggccttcatgggaaactctgtcatggttctcctcatctacctggacacccagctccacacccccatgtacttcctcctcagtcaactgttcctcatggacctcatgctcatctgctctaccgtacccaagatggccttcaactacttgtctggcagcaagtccatttctatggctggttgtgccacacaaattttcttctatgtatcactgcttggctccgaatgctttctgttggctgttatgtcttatgaccgctatattgccatttgccaccctctaagatacaccaatctcatgagacccaaaatttgtggacttatgactgccttctcctggatcctgggctctatggatgcaatcattgatgctgtagcgacattttccttctcctactgtgggtctcgggaaatagcccacttcttctgtgacttcccttccctactaatcctctcatgcaatgacacatcaatatttgaaaaggttcttttcatctgctgtatagtaatgattgtttttcctgttgcaatcatcatcgcttcctatgctcgagttattctggctgtcattcacatgggatctggagagggtcgtcgcaaagcttttactacctgttcctctcacctcatggtggtgggaatgtactatggagcaggtttgttcatgtacatacggcccacatctgatcgctcccctatgcaggacaagctggtgtctgtattctacaccatcctcactcccatgctgaatcccctcatctacagcctccgcaacaaggaggtgaccagagcactcaggaaagtgttaggaaagggcaagtgtggagagcagctggtgaccagggctgacaacttgccccagaccatgggcctgtcttttgagaaagcaaacaggctcacaagttctgagcgtctcagggagcctgcatcagtgatccagttccttcaaagggtctctggattctctcagctttcctggtatgttcctgtagtagttcttggtgcaaacattcacaatgtgagtttccacacgctactctgtccatctgagtgggagctgaaagctagtcctccctcctatccatcatctaaatcaagatgttaaagttccatgttttttcagtattataaactgcattgtatgcagccaggtagcaaagaaatcttcttttccaaaggtataaactcaaaattttattgaacgtcttgaaattcactttgaaataaaagttaatacaacgatttttacatatttagtcagtgtttcttcttgatttttttatttttggtggctcttggaagatactgcc

SEQ ID NO: 472756 - DNA, 504 bp, Homo sapiens
gagttaatgggtgcagcacatcaacatggcacatgtatacatatccaggccccacttctggaggtctgctatagtttgctgggggcccattccaggccctgttggcctgggtatcaccagtggaggccataaaacagcaaaggttgctgcctgctgcttcctcaaagcttcgtcccagaggagcaccagcttgttgccagccagagctctcctgtatgaggtgtctgtcgacccctattgggaggtctctcccagtcaggaggcatctggtgctctgtcccaggacgatgacagttctgtctgtaagcccctgaatggagcttctggatttcctgcagagatgccctgccctgtgccgttggagtctgaaaaatttcctgcaactcagcaccagctccaacagccaccccgttttgtgttcgaaacccagggccctggcagtgtaggctcacaaggaaatatcttattctgtggattgcaaaaatccacggaaagagcgtagta

SEQ ID NO: 472757 - DNA, 1109 bp, Homo sapiens
catctcaagcagtaacagtaactgcggtagtgaccgtctcaagtagcaattgtacagagctatggagcagagcaattattccgtgtatgccgactttatccttctgggtttgttcagcaacgcccgtttcccctggcttctctttgccctcattctcctggtctttttgacctccatagccagcaacgtggtcaagatcattctcatccacatagactcccgcctccacacccccatgtacttcctgctcagccagctctccctcagggacatcctgtatatttccaccattgtgcccaaaatgctggtcgaccaggtgatgagccagagagccatttcctttgctggatgcactgcccaacacttcctctacttgaccttagcaggggctgagttcttcctcctaggactcatgtcctatgatcgctacgtagccatctgcaaccctctgcactatcctgtcctcatgagccgcaagatctgctggttgattgtggcggcagcctggctgggagggtctatcgatggtttcttgctcacccccgtcaccatgcagttccccttctgtgcctctcgggagatcaaccacttcttctgcgaggtgcctgcccttctgaagctctcctgcacggacacatcagcctacgagacagccatgtatgtctgctgtattatgatgctcctcatccctttctctgtcatctcgggctcttacacaagaattctcattactgtttataggatgagcgaggcagaggggaggggaaaggctgtggccacctgctcctcacacatggtggttgtcagcctcttctatggggctgccatgtacacatacgtgctgcctcattcttaccacacccctgagcaggacaaagctgtatctgccttctacaccatccttactcccatgctcaatccactcatttacagccttaggaacaaggatgtcacaggggccctacagaaggttgtggggaggtgtgtgtcctcaggaaaggtaaccactttctaaagaaatttcatatgctgctagagacttgaaatgaaggatacaagactttatcattgcccttgaatttaaatattctctgcctggaaacaagtga

SEQ ID NO: 472758 - DNA, 818 bp, Homo sapiens
aacctacacctggaagatttcacgtcagaggaaggaattacgatggtgtctgaggaggggaggcctctggatgcagggtttactgtaaaactgaaggacagcaaggctgatgctcacaatgtagacctgactcatcataatgggctcttcttcaaaggaaatgagagccagattgtctccttggcagcaatggaaaacaaatgctatccacagaatggctcaattctcaaagcactggattgcaatgatgccctgttgacagcactgttcaaaagtcgacctgttgttgctggaacctccaagaatacagtgtttgatctcagccaggatcctgtcttggaagaggagagggaatcccaaaaactacttgtgaagaagatcccattgttcaatcaaatcctcgtcactgtagcaatccatgcatgccattgcagttggcattctgacacgtgtacacagtgttttcatctcttccctggagttgcagccaaagcctgagattcctttcgacacgaccctgaaaaaactctgggtttgtgctcccctctgctctgcaataacataccagctctgtgatgtggccaatgtttacctagttggtgggaggactttttaatatcaaaaggaaaacatttcttctgcattccacataggtaagatgtggtttgctgttgtgcagggataaggatttggggtggggaagggatgaagaaaagaaaaacaatccccccacccatgtttttttttgaaattttcagggctaaagtgatgggtcagagtaggtgagcaaaaaaaaaaaaaaaatcatcaagcaatgc

SEQ ID NO: 472759 - DNA, 788 bp, Homo sapiens
aactgccagggcaccgagccgccatggggcgatactccggaagaagcttccgtttaatcctcatgtgcgtcgttagcatcctcctctttgtgatggaactagtgatcgcttacgttggcaactccctctccttggcctccgatgcttttgccgtcctttcccactttgtgtccatgatcataggtttttttggtgtaagggccagtaacataaaacagcacaagaagagcacttacggctttcttcgggcagatgttgtgggagcatttgggaacaccatttttgcggtggcgctgatgttcagcatcctggttgaagccatcaaaaggtacatcaatccccagaagacagaggagccgatactggttctcagtgctggaattatcggtctgttcttcaatgttcttaactatgtcatcttcttggactgctgttactgcgcagcacccaagccccagggagacatggaagcagggaatgaaaaagtgtcttcaggcacgcagagaggaagtaaaggcactaatcgtagccacagagagagcgattggaaagacggtggatgtggcagtcttctttaagtgattcactgttgtttacccatatgtgacatggctatgtttgaattaaaaaaaaagttaatgtctccataaaatatgtttaaaagtactgggctacataaccaacttacaaagagcacagtatcagacaatcagcatggctgttatggacctcagaaatactgaaagacaaggttatgttttacaaggctaaggacaatgaatagggct

SEQ ID NO: 472760 - DNA, 729 bp, Homo sapiens
gagggttcccttttctccacatcctcaccagcatttcttatagcctgtcttttaagtaaaagtcattttaactgagaatatggatatccagttttcccagcaccatttattgaagagactgtcttccccaatatatgttcttggcatcattgtcgaaaatgagttctctctagatcttagaggaaaggctttcagtttttccccattcaatataatatctgctatgggcctgccattcacggcttttatcatgttgaggcacactgtggccatcacacctagaattgccctggctctgactggaagccagcacaacactgggtctttccaaaggcctgatgttggtgagttcccccaggccctgggcgggtccagagatgctgtctggcagccaggaatcagagtcaaaaaccttagaaatttacctggtcatatgctgccccattccattggctctaagtccagcatagcaccaggacttgcctaagattttcagtctttatgtcctagactgcctttcaggttcacttgggaccctagtacgcttcagcctgttgtgttgccattacaattcttggttggggttactagtgtttgtttttaatctttaacgatactgtccctttctttggctgtttgtgaaatctcatccaggaatctgatgcaaagaagcacgaggaccttcattttcactccagtggttgtggtgactgtggtgagtctggggga

SEQ ID NO: 472761 - DNA, 1557 bp, Homo sapiens
gctagcagaagacaagaaaaactaagacctgagaagaacaggagatagagacatgaaaaagcctccaaaaaagcacttccaactcccagtgctggctgctgctcctcccacaaggatctcaaaaggcttagacagcaggcaaccgcagccagtgctggttgcctctccccctggggagttggctggggtcttcaaggtcagcaacgttgcatcctctaactcttctcccacagtcacataccctctgaccagaaccaggaaaggctctcaatttttaagcactagtgtgattgtggccacctggaaacatccagggaacttctgcatacttcatagattttctttcactctaaaatgtgtacatggcaaagaaataaagagtacttcaaaacatgaccctaagaaacccagttatctgccatcactgtttttggagaagataaaaattattttggtaccattctaatctcaagctagtgtttctcaaggacagaaagtacatatagaaccataggtgaatgtgaatctgggaaatgtagtttcaaaacctccaacccgtgttaaaaaataaaaagagagagagagaaagaatagaaaaatagagagataaatactcattactgtaaaaaaagcatatccctagcaattgaaataaattgaaatcactaatgtgaaatataagtcaagcctcaaactataaatttaataaatgatatttatttcagttatgtttgcaatataaaatgtttcaggtgttaagtggttaacgtgctgcaaatttttaaaatatcagtatagacagtgtgtgtgcgtgtatatatatatatatatacgcacacacacagtgtgtgtgtgtgtgtgcgtgtgtgtgtgcttatcagtttcttttaaataacttctatttgtgaagctttgtttttgagaactatacttccttgagaaattgtggcataaacaatgctatgagtttaccaaaccatttcattttcctagacatagaactaagctgtagttttgaaccacattgcatcttggtgggctaatgtctttaattctcaagattagaaggtaagcaagatgcattatttcttatctgaattacatttagtaaatgaaagtgatatttgcatattgtttttacctttcatgacaagttacagacccatttgttcatatagggcagtttcaaaagggaggagggctgcttaacctgaatttgactttaaatgaaagaacaataaaagtttttattcttaaatcattactagttgagaaatttacctgataccacaaggtagcttattcttttctgattatagtagaaatactttcagatttttaagcaatatatagtacagaaatatgttgattggtaacaaatatatctaacacttgtcatttcacacattctatatttttctctttactttctatttcgtgcatgacattgtgctaagcaccaatgtaccatattagaaactgacctctcagaaattacacatttttgtaattacctaatataacattgccctggtgctgtggcattaggtattttac

SEQ ID NO: 472762 - DNA, 700 bp, Homo sapiens
tttaatttatgttaaagtggatccaaagatgctatctgggaaccaggacctggattcagaaactttaggaatctacctggcactttattctactgtggctgagctggcatccaagacacaagacaaagttcttcccactcttccctcaccaactccccaggcagaggaatctccttgtgttcaccactaccacctgcccacggggagcaccgccagggcactgccaatttcacttcagatccaagggctcttcagccagcttagatgctgtccaagagcaatggcccgaatcagagacctcacgagtccacctgatgccctgtccctctttggccaagctgacacccaagctcaagacaaagtccccttcatttctccccttgcttttctcaaggagaagggaccactccctgtagccatgatggctgtgaatgaagccagcatgtctcatactatcactcaagacccacagcctgtaccacctgtaattcaatgactttttatagattactgacattgtgccaagcattatgtcatacatagggtggagacagggaaagtagtgataaaaagagattagactcttctgatgagaaaccataatcactagaggtaaaaagatacacataattaaaaagtaataattctgtaagaaaggtataaacaatgttctgtgggaacacagagaagcaataattat

SEQ ID NO: 472763 - DNA, 921 bp, Homo sapiens
ctgacgcattataaaaaagcatgaccttccatcaaaatccaaggaatgcgtgctctttatttgaagacgatgaaaacactgagggaggagtcgttcatctgcttggactcggtaaggaagttgtgcaaatgtgcatgataatggatggccttgatgaagatggctttgctgtacgtgttgctgcttatgaggttgatggtagtgctgggtgcatctcttgtaatgaagctgacctgatggtgtctatgtttggtgtccactcacctccagaggctgagaggccaactgaggagaaggccactgtgattcactctgcgatgcatgcaaaatcgggaactgtctcctttggaccagttttgaatttttgtccagcctgtgtcatgctgcttccaggtctgcacagagatgctgggtctgcatgtgggtatcactcacattccaagtgtggagctttgcaggctgtatcagccatggcacactcttccctgggggcaggcctttcacccccttcactgtccctgggatctggatcagcagcagcccccagaaccgtggcagcagccagagcccccgccttgctgaccactgcccctgtcacaggagttggacctctggcgccggcatcggtggtggcgcctgtggtggttcaggaagcagccgccctcggagctagggccacagcccccagagcttggggcacagccagaggaagctggaggcagacactgtactgggttctttgggggacacttgggtgaggggcacttggtgaacactctaatatttttgcaagcctttggtaaatctccagagttttgcaaaagttgattttcacaatttttcattttcaaggtgtttttaatggaagagcagatttttggagatccttgctcaatcattcccaaccttgtcttcttaagt

SEQ ID NO: 472764 - DNA, 948 bp, Homo sapiens
gctgctgctgcaacagctctgcagccaaggggtcacacaagaagattcggaggtgaacatgggctgtgcactggagtggcactgtggagggccctttgaaggcattggcattgctggtggttttttggaaagaaaaagccaaggctgtagaagccccctgggatggctggatccacagcaggacatggaagagaaactgctcagggtggagggagtcataatggaacatttccacaaggtcagggaaagctgtggctcagaactgatgtttcctcagaggacacgaatacaaaagatgcagggaacaggatcttgtccaggcatgggtcccttggagccaagcctgggccctataaaagacacatccagcttcagcacctcatctgctctgactccccagggacgtgtctgtgctcctgcgtgtgaccagggtgagtggcaacctgggataccagaggggtatgagcaaggcagagggatggggaggatggaggtaggctggagaaagagttgtgtgcttgtgttctgccatactgaggaggaatgggactcagtctgcctcgaatctgttgaggctgtgaggcctaccggaggtcgtataggtggggaaagctaactgtgcacatcttttccaattctgtgttcagtgacttcatgttggtaacttcaaaactgctgtgttgggcatatttacaccatggaaactggcaaatacttcaagccaggctcttttatctggaggtttcattgcaaaatctttttccagaggacctcctggtgtgtcctgcaacacgcagctggtccttagggcttgtattaagggaatcggtacttcatggagtgtgaatactctattcaggcttgtgaggatagagtaatctcagcttcccctgaaaggaagaatacgaagctcattcggttggttttttaatgtatgtgcttttattt

SEQ ID NO: 472765 - DNA, 768 bp, Homo sapiens
tgctttaggcttctttctttgctcctttttcatggctcatccgaggcccagccccaggatccatacaaagtgtgttcctgctgctggcttctcatctgctctgcttcctaagggacgtatctgttgctgcgtctgaacccacggtgagtgtttctataggaatccagagggggacgctagcgggatgaagatggagatggagagtaattctggaagtcgaacagtgaagcgtggagtttatcgaaattccaccaagatgtcctgccagcagaaccaacagcagtgccagccccctcccaagtgtcctatccccaagtatcccccaaaatgtccctcaaagtgtgcatcctcatgcccacctccaatctcttcctgctgtggctccagctctgggggctgtggttgctgcagctctgagggaggtggctgctgcctgagccaccacagacaccataggtcccactgccacagacccaagagctccaattgctatggcagtggcagtggccagcagtctgggggttctggctgctgctctggagggggctgtttgcgtctcatcaacttcaggccttggatttgcattattttagctttatgtcaatatttatatttctcagattattgaaaaattttctgatgtgctttgcaacagtaaatttactttcaagtaattttctagtcccagtttgatggtggtttttattccacttttcttcacttttacctaaatcccaatccttttcctagatagaaagatagatttat

SEQ ID NO: 472766 - DNA, 503 bp, Homo sapiens
ggtgacgcgaccctgagtgcctggagccgtctcctgattgttcatcaccttccctgggatgtggtgtggctgtgatgagaccctgagtgtccagatctatctaccaattgctcgtagtgggatccctgccttcctccactgcttgaccccgggtgtccatgaatggtgtcctgaccctcttgggacgttgagtgcctggagctgtctcgtgcctgcttgtggtgggatccttgtcttcctccagtgctggtcccggtccgtccatgggcggactcagactgttcatgagtgctcacctggtagaggaaagaccctgaacgtccagaccttcctgctgaccggccacgtgtggactcttggtggctctgctgatggggcccagcctgtccgtgggctgacactgactgtgtgtctgagtcttctgaatgtccctcactgtcactggcctgactaccactggaccctcggtgtccactgtctctgactgcagatgaagcttgtcc

SEQ ID NO: 472767 - DNA, 698 bp, Homo sapiens
tgatgggtgcagcaaaccaccatggcacgtaggccaatcttggctccactgggtggaaaagttgagctcagttgccagctgtctccaccacaaagcgcagaacacatggaaatacgctggttccagagtcactacacacgacctgtttacctgtataaggatggtaaagacctgtatggagaaactatctccaagtatgtggagcggacagagctcctgaaagaagccattggagaaggtaaagtgaccctcaggatccttaatgtcagtgctgatgatgacgggcagtaccactgcttcttcaaagacagaaatgtctatgaagagtccatcacagaagtgaaggtcacagatagctcttcagagattagcagtcaggaacatttcaaacttgacctttgccaagctgagtgtgcccagttattcaactgtttctcatgggcataatttgagtttctgaaaatctcttcaactttatctaaaagaaacagaggtatgtggattaaaaggatgggaatgtcctgaaaatatctcatttcctaaacgcccattctctgctactttaaaacatataatacattgttattgaccctactctgtagttgagcaatagaacttatatttttatttacgagcacgtgcgtgcccattaagctacctctcttaattcccccttgaatcccctcatcccagcctct

SEQ ID NO: 472768 - DNA, 483 bp, Homo sapiens
accaaggctcgggctcatgggcctggatcaagcataaggcatcttccctgtggatgccctggtagagtatgaaggattcccccagcctgggaaccttccctgtgcactcttcactaagcactgcatccctaagccgtgggccacttcagttcttccacagcctccacacttccagcaggggcaggccaatcccaaaccaactactcccaactacccccacctgcatactccaccaggacatccacagagaagagtcagccttctgctgttcaggcccaagagccagagccttcttaggagcatcctactcaagtcaaaacattcctgctccctacaactcctcctccctcctcgaaccacagctcctggacgccagacttaacagttctcaagtgggaaggaatccgaccctggtccacagtgccccaactgaggggtatgcctcccagctctccacgtttccctgccaacgctcctgaaccc

SEQ ID NO: 472769 - DNA, 801 bp, Homo sapiens
tctgggccttcagctggcatgactccaacagctcgttttaaggatggaaaacaggttgagagcgggcatagggaaggggcccactggaactgcatggcaagttaaggaacagatcttttctgaacacctccactgggccaggtcctgggaggggaaacacagctgtaagactttgagttgggaaactgtttttgttgtccttgttgcaaaagggcacttcataattcaatttgcatttgctaataagcctgaaactaaacctggccatgggagatctgagcctacgggagggaatgggggtgtggaggatgctaacgagtcgggaactgaaaataaatcttgccaacaccactattttctcaggacggcccagaggctcagaagtgcagagcagatgctgggcatcaggcagaatggatctgagttgtggcttttggtcctgcttgaccaaggcagcaaatgatttatgaccagatgagggtccagacagtgaactgtgaattcagaggagggtgaggacacagtggtctggagatatctggagaggctttggggaggagttaggaaaatatatataaagtctgggaaactgaaggtttgcttggagagttaatgatgaggccagtttgaatcaagtataatattcttgtaggagagtggttcttgactgggggctattttgcctctgaggagacatgggacacttggtaacgtctgaagatgtttttcattgtcataactggagggagaggtgttactggcatgtagaggatagaggaaagggatgctgctgggcatcct

SEQ ID NO: 472770 - DNA, 609 bp, Homo sapiens
aacactcaacatgatgacttgttggcagagaggagctacccactccaaggtcccctctgagctattctgttactcaataaagctcctgttcaccttgcttaccctccacttgtctgtgtacctcatttttcctggacacaagataagaactcggaacctgttgaatgccacggctgtgactccctctttggggccctgcagttcctggagtctccaagcctccatcacatttcctggtgccagccatggaagttgcttgtgttgtgcctggtccagccacagccacacagagagccatctgtgctggcacttggagctgcctgcctcactgcagcagctggcatgtctgagtgtgtgcagtggtcggactccatgctcactcactcacacactccttgccactccacgcctggcttgcccttggcaggcataggatccaagccaaattcacctttcttgtctcccttattcaagtcattaaaaaaccttttcatctttttcatctgaatggttttatacataggaggcttttacaatgcaagaaaaggatctgttcaattgctgagcatagacaatcctttacctgcatatttcctggttccaagaaat

SEQ ID NO: 472771 - DNA, 1276 bp, Homo sapiens
tctgaggtgtagtaaaacaagattgaccaagtgttgaagatggccaaataggaacagctccagtctacagctcccagcatgagtgacgcagaagagggatgatttctgcatttccaactgaggtaccgggttcatctcagtagggcttgttggacagtgggtatagcccacggagcccaagggaagccgtgacagacggtacctggaaaatcgggacattcccaccctaatactgcccttttccaacggtcttagcaaatggcacaccaggagattatatcccgtgcctggctcggagggtcccatgcctgcggaggcttgctcactgctagcacagcagtctgagatagaactgcaaggaggcagtgaggctgggagaggggcgtccgccattgctgaggcttgagtaggtaaacaaagcggccgggaagctcgaactgggtggagcccactgcagctcaaggaggcctgcctgcctctgtagactccacctctggcggcagggcatagctgaacaaaaggtagcaggaacttctgcagacttaaacgtccctgtctgacagctttgaagagagtagtggttctcccagcacgcggtttgagatctgagaacggacagactgcctcctcaagtgggtccctgacccccgagtagcctaattgggagacacctcccagtaggggctgactgacatcttatacagccgggtgcccctctgagatgaagcttccagagaaaggatcaggcagcaacatttgccgttctgcaatatttgctgttctgcagcctccactggtgatacccaggcaaacagggtctggagtggacctccagcaaactccaacagacctgcagctgagggtcctgactgttagaaggaaaactaacagaaaggacatccacaccaataccccatctgtatgtcaccatcatcaaagaccaaaggtagataaaaccacaaagatggggagaaaccagagcagaaaagctgaaaattctaaaaatcagagtgcctcttctcctccaaaggaacgcagctcctcaccagcaacagaacaaagctggacggagaatgactttgacgagttgagagaagaaggcttcagacgatcggtaataacaaactctgagctaaaggaggatgttcgaacccatcgcaaagaagctaaaaaccttgaaaaaagattagacgaatggctaactagaataaacagcatagagaagaccttaaacgacctgatggagctgaaaaccatggcataagaactatgtgac

SEQ ID NO: 472772 - DNA, 724 bp, Homo sapiens
ctcggagaaaggagaaaggtgtcacacaatggatggagtatgccagtcacatggtgtggcctcgtgcaaagaggggccctgtgtagacgactgtcctcttgtacctctctgggtcaggtccctggctgcttctcatggccgtgacccaaaaggggaggatctgcatcccaggcccacatgggggcgtggacgataccggtgctcagagtgggccactcctggattgaagagagatggcatttggggcagtgtgagcctgaaagagaaactgtctcctaggaaaagaaggcaattgggccacgactcagacaggatgtgcagaaaggaggggaggaataagaacgaggatcccaagcaacccctcgtccactgtgccggcccggggtcatctctgcagcaggaagctgactggtacttcctcactccccatatggaggagtcgcactggtcagcttttccaagtcacctatccaggcccccagcctttcatgtaccccctacttccctcatcaaatctctgtgcccagaacgccatcttccctttcacagagaactcaacccacccactggactccaagcttctggcctctgtggtgaaccccagggaggtgaagccctctttcctccctgctcctagagcctgggacccttccaagatataacactctcacattgtttcatacctcttgtgtgtatgtgtctgtttacacccttgattgaactt

SEQ ID NO: 472773 - DNA, 1857 bp, Homo sapiens
ccttcctcgcccactccagtgacactatgcacccccaccgtgacccgagaggcctctggctcctgctgccgtccttgtccctgctgctttttgaggtggccagagctggccgagccgtggttagctgtcctgccgcctgcttgtgcgccagcaacatcctcagctgctccaagcagcagctgcccaatgtgccccattccttgcccagttacacagcactactggacctcagtcacaacaacctgagccgcctgcgggccgagtggacccccacgcgcctgacccaactgcactccctgctgctgagccacaaccacctgaacttcatctcctctgaggccttttccccggtacccaacctgcgctacctggacctctcctccaaccagctgcgtacactggatgagttcctgttcagtgacctgcaagtactggaggtgctgctgctctacaataaccacatcatggcggtggaccggtgcgccttcgatgacatggcccagctgcagaaactctacttgagccagaaccagatctctcgcttccctctggaactggtcaaggaaggagccaagctacccaaactaacgctcctggatctctcttctaacaagctgaagaacttgccattgcctgacctgcagaagctgccggcctggatcaagaatgggctgtacctacataacaaccccctgaactgcgactgtgagctctaccagctgttttcacactggcagtatcggcagctgagctccgtgatggactttcaagaggatctgtactgcatgaactccaagaagctgcacaatgtcttcaacctgagtttcctcaactgtggcgagtacaaggagcgtgcctgggaggcccacctgggtgacaccttgatcatcaagtgtgacaccaagcagcaagggatgaccaaggtgtgggtgacaccaagtaatgaacgggtgctagatgaggtgaccaatggcacagtgagtgtgtctaaggatggcagtcttcttttccagcaggtgcaggtcgaggacggtggtgtgtatacctgctatgccatgggagagactttcaatgagacactgtctgtggaattgaaagtgcacaatttcaccttgcacggacaccatgacaccctcaacacagcctataccaccctagtgggctgtatccttagtgtggtcctggtcctcatatacctatacctcaccccttgccgctgctggtgccggggtgtagagaagccttccagccatcaaggagacagcctcagctcttccatgcttagtaccacacccaaccatgatcctatggctggtggggacaaagatgatggttttgaccggcgggtggctttcctggaacctgctggacctgggcagggtcaaaacggcaagctcaagccaggcaacaccctgccagtgcctgaggccacaggcaagggccaacggaggatgtcggatccagaatcagtcagctcggtcttctctgatacgcccattgtggtgtgagcaggatgggttggtggggagattctgccccaggagaggtaatgcacccctgaaggatatgaggggatggaagagagggctggctgcccaagggaatggattcctcctgacctcaagggaattggtcccaggagccacactggggaaaagctgtagtatcttctttgtttagcaagtcaaacttcacagctggggaagttgaaaacctttggaaaatgagtcaggaaaaggctgagacctcaatcgctgtgctgctatagcttgagtgtagccacagacaggacaaaaatgaatgactgtggctgtggtccaaaaaagatttgacttatggacattgaaatttgaattt

SEQ ID NO: 472774 - DNA, 873 bp, Homo sapiens
cttttctcctggcaccctgtattcatggccttggcggcctccaagccagacatgaggcttactggctctctcctatgttcacagttctgcctctgcatggctgaagccatcctactcttctcacctgaacactccctgttcttcttctgctcccgaaaagcacggatccggctccactgggcagggcagaccctagccatcctctgtgcagctctgggcctgggcttcatcatctccagcaggacccgcagtgagctgcctcatctggtgtcctggcacagctgggtgggagccctgacactgctggccactgctgtccaggcactgtgtgggctctgcctcctttgtccccgggcagccagggtctcaagggtggctcgcctcaagctctaccatctgacatgtggactggtggtctacctgatggctacagtaacggtgcttctgggcatgtactcagtatggttccaggcccagatcaaaggtgcggcctggtacctgtgcctggcactgcccgtctatccagccctggtgatcatgcaccagatttccagatcctacttgccgaggaagaaaatggaaatctctttggtccaagagggggctgagtttggtgccagctggcaaatgagggctggactctcttccctccagagaccaccccgctccttgctgcagctgaaagtagttccccaggctgccctcggtgccagtgctgagaggctccttctacctgccgcagggccccccaaaagcaaactatgaccaagtgagggagcggtgggagatgaaaaactatataaatgcagagtatgggagtgctctgacatcaacagctgtcatttcactgactgccaaggttgacttgtctga

SEQ ID NO: 472775 - DNA, 920 bp, Homo sapiens
ggggatagataagtcaaagtggtagtataagaaagttaagttctcacctgctgtgaaaagtacagaatttgatgagaaagtaaaattgcttcctcactgtcctcaccggattcacagggggaaatgattcagaggcttttgcctttacctcctagagcatgttcttgcaactgttgggctagtcttatctggccaaactctgttactaacagaatgtctagttattttgcaggcacagagttaagaagtggcaagttaacacagccagagcatgcacagaagaaaacttcgacctcaaataacacctagaaccaaagtccctaccgcagaactaaaagattgggatgtggctggaactcaagcacctaaacactttcaaaaggctttgccttccagtgtctacttggccttccagtgtcagacagcttcttgcacctgacccactcagctgaggacacagatgtcaaaaaaaaaatcataaatacagaattccagaaaattttaccaatatgttatatttgctgtggttgctttatagatttttaaaaattattggtccagtaacaggtctgaaatttaacccttctcctgcttttgaagcattttttagccaagggcttcaactgcagacaatcagaactgttcagatcctggggccccactgtacatccttccccctaaatccctgggtgccaaaggtaggtgccagtcagcacccaccccctcacccccagcaactggaggcccatgtcagcttcagcataaaaatctccttatgcccaagggctccttgttcaccagtagttcaccatcctgactgcacattagaaatccctggggggcttttaaaaatatcaatactgctatactacccacagattctgatagaattgggctgctgtaggacccaggcatgatac

SEQ ID NO: 472776 - DNA, 987 bp, Homo sapiens
gtgaggtgaatgagggaccagccttggaagaaaaatttaggagggacaccaacaaacttaacaagaaaggtgcagttgagtgatgcagaactctgcccagcatctcttgggtggaaagggactgtgatggagtaccaggggtcttcgttctcggacccaaagcacctttcacaccttccaggctttgcagatcctggttcctatgctggaagaatatcttctcatcctccacccccgaccttgttcaatggtcttcatgcagctatcctggatgctcaaaatcaacattgctctatctgtgaagttttacccaaattctccccacctggatccccagtagagttaaccactgctctgaatgcagcagtgcacaatggtgctatggcctatgccttcatgaagtttataactcagagccccaagtcctgtgtagataaaccttcatggagctctagtctagtgggagagattgacacactcaatggtaattatactacagcattgaatgtaagaaaagaaatatgctgggattgctttgatgaggagcacctaagccagcagagtggggagttggggagtaaggtgagagtggctctttctcgaaagcaaagctgtttgtgctccagtgagtctggtgtcaatggcgaagtggcccttgccccgaccactgggacaagctggtatcactgccaactttgcagaggccctggcatcccctcagggatctggacagctggaccccacctcctgctggccctattacttgctgcatcgaccaccattgctggggcaggcgacagtggtaatttcctacaagtggaatttactggtttaaagggcactctggtttacaccaacaccagcagcctctgcggctttgcaaagggttgtcaatagttacctaaaataattcagaagatgttctcctgtggctgttcttttaaatggtgtgtaagagaacacaatcaaggcttagaattgcttgaa

SEQ ID NO: 472777 - DNA, 914 bp, Homo sapiens
catgtattcattcagccacatggagcaagaagtgaataagtctcacaaggtctgatgcttttataaaggggggtttccctgcatatgccctcttgcttgctgccatgtattaagatgtgcttttgcttctcctttgccttctgccatgattgtgaggcctctccagtcatgtggaactgtgaatccattaaacctctttcctttataaattacccagtctcagaagaaattcctaagtggaagaggcttcaagaggaaacagagcatgaaaattcagaaaaggtacagcctgatgatgcaatagaaaagaaaaacacattttctgaggagaaatccaatccagctgcagaaatttgcataagtaatgaagggccaaatgttaatcaccaagacaatggggaaaatgtcttcagggaatgtcagaggtcttcacctcagcccctctcatcacaggcctggaggtctaggagagaaaaatggtttcatgggcggggtccagggccttgctgctttgtgcagtcttgggacttggtaccctgtgtcccatctggggctaaaaggggccaacatagagctcaggccattgcttcagagggtgcaagccccaagcctcggcagcttccacgtggtgttgagcctgcaggtgcacagaagtcaggaattgtggtttaggaacctctgcctagatttcagagatgtatggaaatacctggatattcaggcagaagtttgctgcaggagcagggccctcatggagaacctctgctagagtagtgcagaaaggaaatgtggggtcagagccccacagggtccccagcggggcactgcctagtggagctgtgagaaggccaacatcctccagaccccagaatggtaggtccaccgacagcttgcactgtgtgcccaggaaagtc

SEQ ID NO: 472778 - DNA, 546 bp, Homo sapiens
tgctccccatggtaatgaccagagattgatgtcttcttggaaaagaagtcactcacctatgaatatcctgaagtggaaattagtactgccttttcctgggacctatgttcccctccgagccacgcgagggcagcaacgcgcgcactctgaggaacacccccttcctcaggactcgtccgcctgtgctcggtggtttctcccagaatcctccaaggcgcgggagggggcggagagcttaaaaggagggagagcggcctgggtcctgggtgttgtgtgcggagctgtggcgtcgcgtgtgaggcgcgtgcaggccccgccgggccgacccgaaatgaaaagctctcctcctgcgaagccccctcggggcgctgtgcagcgaggccccttaggcggcggccacgctgtggtccccgaggtcccggagctggccctgcggggcccggcgctcagaagtgatgaattgatcagatagacgaggccgggctttttgagtagatgtatccaaacttgcttagcctttcacctctggagaactggagtcaattc

SEQ ID NO: 472779 - DNA, 891 bp, Homo sapiens
cagacctgagagaatagaagcacttctgatgattgacaagctggcaacccgagctctaatcagagattacaaagatggcattcttcatgaaaatgaaaccagtcgtgaggatgagaatgagtcaccttttcctgatattccaaaagtttctgaacttattaccaaagaagatgtagacttcctgccctacatgagctggcagggggagcaccaaggagccatcaggaaccaaatagctagttttggttttgctgctcctcccagacagtttgatgcatctcaattcagccaaggccctgtgcctggcagttgtgctgactgtatcccacagttggcgtcttgtcccacaggacctccccagaacccctcttctgcaccctactgtggcattgctctttcagggagctcattgagctccacacagtctgctccactgcaacctgttggaggccgtacgaccaggccttctactggcacctaccctgagctggattctccccagcttcatttctctcttcctacagaccctgatcccatcagaggttttgggtcttatcatccctctgcttcctctccttttcattttcagctttccgcagcccctttgactgccaataacctctgccttacctgagcctctttacagtcagtcctggactaccccagtagatctctgtcttctggacgaatcagtaggcagtcttgaaggaagtcaatgtcctgactatggttttcaaagttgttctgaaacagaaagtcatgagctatgagaagtactgctttttacaaataaaatgtgatacaacagacaacagtatcccgtgctttctggaggtaatagaggaggatgaaacagtgtgcacacagcactggcaggatgctgtgccttgg

SEQ ID NO: 472780 - DNA, 5971 bp, Homo sapiens
acagtgttctaaaatcctttgtgatggacaaaaattcagaccgtcatagccgttttctggaatccaaggtgagggacaaacactcagaacccagcagcagtgttctggaatcctatgtgagggacaaacactcagatccagcagaagtgttctggaatactctggaaaaacattcagaccctcgaagcagtgttctggaatcctatgtgaggtacaaacactcagaacccagaaacagtttccttgaatcctatgtgagggagaaacactcagaacccagcagcagtgttctggaatcccatgtgagtgtcaaacattcagaacccagcagcattgttctggaatcctatttgagcgacaaacattcagaacttcgtacctgtgttctggaatgctatgtgagggacaaacactcagaaccaagcagcagtgttctggaatcctatgtgagggagaaacactcggaacccagcagcagtgttctggaatcctatgggcaaacaaacagaacccagcaggagagttctggaatcctatgtgagggacaaacactcagaacccagcagcagttttctggaattctttgtgagggacaacattcagaaaatcatagaagtgttctggaaaccagtgttctggaatcctatatgagggacaaacagtcagaacccagcaacagtgctctggaatcctttgtgagagacaaacattcagacactcagcagtgttctggaatcctatgtgagggaaaaacattcagaccgtcgtgcattgttctggaattctatatatggcacaaacactcagaactcagcagcagtgctctggaaccctatgtgagggaaaaacactcagaacccagcaggattgttctggaatgctatgtgtgggacaaacactcagaacccagtagcagagttctggaatcctatgtgagggacaaacactcagaacacagcagctgtgttctggaatcctttgtgatgcacaaagtttcagaacctcacagcagtgttctggaatccagtgttctggaatcctatgtgatggacaaacactcagaacccagcagcaatattccggagtcctttgtgatggacaaacattccgaccctcgtagcagtgttctgcaatcctatgtgagggataaacactcagaagccagcagctgtgttctggaatcccataaacactcagaaccctgcagcagttttgtagattccactgtgagatacaaacattcagaccctcgtagaagtgttctggaatcctatgtgagggaaaaactctcagaaacctgcagcagtgcactggagtcccttgtgagggacaaacaaacacaactgagcagcagtgttctggattcctttgagaggcaaaaatattcagaccctcgtagcagtgttctggaatcctatgtgagggacaaacactcagaacccaccagcagtattctggaatcctatgtgggggacaaacacaacccagccacagtgttctggaatcctctggacaaacattcagacaatcataacagtgttctggaatcctatgtgagggacaaacactcagaacgcagcagcagtgttctggaatcctatgtgagggacaaacactcagaacgcagcagcagtgttctggaatcctatgtgaggaacaaacacttagaacccagcagcactgttctggaatcctatgtgagggacaaacactcggaaagccgcagcagtgttctggaatcctatgtgagggtcaaacactcagaaacctgcagcagtgctctggattcctttgtgagggacaaacaaacagaacccagcagcagagttctggaatcctatgtaagggacactcagaacccagcagcagcattctggaaacctttccctgttctggaattctctgtgagggtcaaacattcagaacctcgtagcaatgttctgaaatactatgtgaggtacaaagcctcagaactcagcagtagtgttctggaatcctacgtgagtgacaaacactcagaaaccagcagcagtgttctagaatcctttggacaaacagaaaccagcagcagtgttctggaagcctttgtgagtgaagaacattcagaccctcgtagcagtgttctggaatcctacgtgcgggacaatcactcagaagccagcagcactgttctggaatcctatgtgaatgacaaatattcagaacccagaatcaagacaaatattgagtctcaaaccagtgttctggaatcctatgtaagggacaagcattcagagcctcgtagcagtgctctggaatcctatatgaggtacaaacacgaagaacccagcagcactgttctggaaccctatgtgagggacaaacactcagaacccagcaacagtgatctggaatcctatgtgagggacaaacactcagaacccagccacagtgttctggaatcctatgtgatagacgaacactcagaacccagcatcagtgttctggaatcctttgtaagggacaagcaatcaggacacagcagctctgttctggaatcctatgtgagcgacaaaccttcagaacttcttagcagtgttctggaatttgttttggcatcctatgtgagggacaaacatacagaacccggaagcagtgttctagaatcctttgtgagggacaaacactcagaaaccagtagcagtgttctagaatcctttgtgagggacaaatattcagaacctcgtagcagtgatctggaatcctatgtaaaacattcagaccctcatagcagtgttctggaatcctatatgagggacaaacactcagaacccagcagcagtgttctggaatcttttgggagggaaaaacattcacaccctcgtaacagtgttttggaatcctatgtgagtgaaaaatattcagaccctcgtagcattgttctggaatccaatatgagggacaaacactcagaatccagtaacagtgttctggaaccctccgtgagggataaacattcagaccctcatagcagtgttctggaatcctatgtgagggacaaacactcagaacccagcagcagtgttctagaatcctttgtgagggacaaacattcagaccctcttagcagtgttctggaatcctatgtgagggacagacattcagaacccagcattagtgttctggaatcctatgtgaggaactcacattcagacccttgtaccagtgttctggaatcctctgtgggggacaacaattcagaggcttgtagcagtgttctggaatcctttgtgaaggacacatgttcagacgacagcaggagtgttcttgagtcctatgtgggggacaaacacgcagaacacagcagcagtgtcctggaatcatatagggacaagcactcagaatccagcagcactgttcgggaattctatgtgagggacaaacccagagaacgcagcagcagtgttctggaatcctttgtgagggacaaacattcagacactcagagcagtgttctggaatcctatgtgagggacaaacactcagaaccctgcagcagtgttctggaatcctatctgagggacaagcattcagaccctcataacactgttctggaatgctctgtgagtgacaaacattcagatcctcgaagcagtgttctggaatcctatgtgaggtacaaaccctcagaactcagcagcagtgttctggaattctatgagagggaaaaaccctcagagcctagcagcagtgttctggaatgcagcagtgttctggaatcctatgtgaggtacaaacatgcagacccttggagcagtgttctggaatgctatgtgaaggacaaacagtcagaacccaatagcagtgttctggaatccaattatgtgagggacaaacattcagaacccagcagcagtgttctggaatccttggtgaggaacaaactttcagaacctctgagcagtgttcgggaatcctacgtttgggacaaacactcagaacccagcagctgtgttctgcaatcctatgtgagggacaaacactcagaacccacaagcggtgctctggaatctttggacaaacactcagaacccagcagcagtgttctggaatccaatgtgaaggacaaacactcagaacccagcagcagtgttctggaatattatgtgagggacaaacactcagaacccaaacccagcagcagtggtctggaatcctctgtgaagaacaaacactcagaacccagcagcagtggtctggaatcttctgtgaagaacaaacactcagaacccagcagcagtgatctggaatcctatgtgagggacagacattcagaacccagcagcagtgttctggaatccaatgaatcatatgtgagggaaaaacattcagaaccctgcagcagtgatctggaatcctgtgtgagagacaagcattcagaccctggtagcaccggtctggaatgctctgtgagggacaaacattcagaccctcgtagcagtgttctggaatcctatgtgaggaataaaccctcggaactcagcagcagtgttctggaattctatgtgacagacaaaccgtcagaaccaagcagcagcattctggaattctatgtgagggacaatcactcagaaaccagcagcagcgttctggaattctatgtgagggacaatcactcagaaaccagcagcagtgttctggtattcgatatgagggacacacactcagaacccagcagaagtgttctggaatcctatgtgagagaaatacactcacaaaccagcagcagtgttctggattcctatgtgagggacaaacattcagaccctcggagcagagttctggaatcctttgtgaaggacaaacactcagaacccagtagcagtgttctggaatgctatgtgtgtgacaagcattcgggtactcattgcagtgatacagaatcctttgtgagggacaaacattcagaccctcgtagctgtgttctggaatcctatgtgagggacaaacattcaaaccctcggaacagagttctggaatcttttgtgaagggcaaacactcagaacccagtagcagtgttctggaatactatgtgtgtgacaagcattcaggtactcgttgcagtgataaggaatcctttatgagggacaaacattcagaccctcatagcggtgttctggaatcctatgaatcctatgtgagggacaaacattcagagcctcggagcagtgttctggaatcctatgtgaaggaccaacagtcagaacccagtagcagtgttctggaatcctatgtgaaggacaagcattcagacactcttagcattgatacagaatgctttctgagggaaaaacatgcagaccctcatagcagtgttctgaaatcctatgtgagggacaaacactcagaagccagcagctgtgttctggaatcctttaacccacaagcggtgctctggaatctttgtgagggacaagcattcctacattttagcagtgttccggaatctcatgtgatagagaaacgctcagaacccagcagcagagttctagaattctacgtgaaggacaaaccttcagaacccagcagcagtgttctcatactcaatgacagggacaatccctcagatcccagcagcagttttccggaatcctatgtgagggacaacactcagaacccaacagcagtgttctggaatccaatccttgtagctgttttctggaatcctatatgtggaaccaacactcagaacctaggagcagtggtctggaatcctctgtgagggacaaacactcagacccttgaagcagtgttctggaatcctgtgtgaaggacaagcattcagatccagcagcagtgctctggaatcctttgttatggacaaaccttcacaagctcatagcagttttctggaatcctgtgtgagggacaaacactcagaaaccagcagcagtgctctggaatcctttgttatggacaagccttcacaag

SEQ ID NO: 472781 - DNA, 1384 bp, Homo sapiens
tggagaaaactagatttttataccacaaagtaaatttctgacggaatatagattaaattttttaatatacaaaatgatagaagcaccagaagagaacataaatgcctatttacacaggactgctctacactgggcctgcgccaatggccgtgcagaagtagtaacacttctggtagatagaaagtgccagcttgacatccttgatggcgaaaacaggacaactctgatgaaggctgtgcaatgccagagggaggtttgtgcaaatattctcatagattctggtgctgatccaaatattgtagatgtgtatggcaacacagctgttcattatgctcttataagcacagccctcatgcttgccatgtgtcatggatcatcagagatagttggcatggttcttcaggaaaatgttgacatctgtgctgaagatacgtgtggaatgattgcagaacgttatgctgttgcttgtggatttaatccggaagaacccgatccagcatctcaaattgaaaagtcagatgagcggactcccacacctaaagccagcacatgggatcccctataccattttgccctgctcagtgcctctgacccttcccctcgggcagctgctgccaccccagatcccaccccagatccttctcctgctcaagctgttcctcctccttacaactctaattcttgggagttatcatcccatgagcctgtcccctgtcaacctaaatacctctccctaaaggggttccagcatgagccctctatgtccccttataacacctcaatattgccagtcaagaaatcagatgggccataccggctggtacaggaccttagagctattaaccgaatagtccaaactacccaccccattgtcctcgatccttacaccattctcagcaagattccatataataatcaatggtttactgtgattgaggcaaaaagatgcaatgggtattcagtaattgatggagaaactcttgaagaaattgaggcaggaaaattgtctaagaattggactgcccaaacgtgtgagctatttgcactcagccaagccttaaaggacttgcagaaccaggaaggagccatctataccaattctaagtatacttttgatgtggttgatatttctggtatccaagaagaaatctcccaagatcatacctaactttttgtaactaaagcagcatacatacacagggagtgggaaaatgtctagactggttttttaattgtgatattaaggggtcgattttagatctttccagctttctgttattggcatttagtgctataaatttccctcttaacactacttcaactgtgtctcagagattctgttctaatttgtacatgtacaaattagagtacaacatggaaggtt

SEQ ID NO: 472782 - DNA, 756 bp, Homo sapiens
ctgctgctgtgtctgaaggtttgttcctcacacaggactccagaaaaatcctgctctggactgaatgtttgtccctcatattggattccagaacgctgctgcagttgtctgaatggttgaccctcacatagaattccagaacatccctgctttggtctgggtgattccagaacacggctatgaggggatgaatgattgtccttcacatgggattccagtatactgctggagggttctgagagtttctccctcacatacgattcgagaacactgctacaaggctctgaatgattgtacctcacatggaattccagagaactcttgctctcatctgaatgtttgtccctcagatagcattccagaacactgctactgggttctgagtgtttgtccctcacataagattccagatcactcctgctgtggcccgaatgtttgttcctcacatagtattccagaacactcctgctgtggtctgaatgtttctccctcatataggattatagaacattaccgctgtggtctgatggttgaccctcacataggattccagaacactcttgctgggttctgggtgtttgtgcctcacatgggattccagaacaatccccctgtggtctgaatgattgtccctcacataggattctggaacactgctgcagggctctgagtatttccccctcacataggattacagaacattgctactggggtctgaatgtttgtccctcacaaaggattcgagaacactgctac

SEQ ID NO: 472783 - DNA, 1865 bp, Homo sapiens
tctgtgttctgaatgttcttcctcacataggattctggaacaatgatacgagggattccaaaacattcctgctgtggtctgagtgtttgtcccacaaataggattccagaatacttctactgtggtctgaaagtttgttcctcacgtaggattccagagcactgctacgaggataggattcgagaacactgctacaagggtctcaattattctcccacacatgggattccagaacactcctgctgtggtctgaatgtttgtccctcacttaagattccagaacactgttgttgggttcggaatgtttgttcctcacgtacgattccagaagactgctatgtgggtctaaatgtttttcccttacctaggattccagaacactgtttcgagggtctgattccagaacactgctgctcagttgtgagtgtttctccctcacataggattccagaacactactgctgtggtctgaatgtttgtccctcacataggattccagaacactgctacgagtgtctgaattattctccctcacataggattccagaagattcctgctgtggtctgaatgtttgtccctcacttgggattctaggacactgctgttgggttctgagtgtttgtcccttatgtaagattccagaacactgttccgtgggtttaaatgtttatccctcacataggattgcagaatactgctgtgaggttctgaatgtttgtcccgcacaatggactccagaaatctccttctgtgttctgaatgttctgcacgtttgtccctcaaataggattccagaacactgctgctgtgttcaaaatgtttgttcctcgcataggactccagaactcacctgctatggtctgaacgattgtccctcatataggaatccagaacattactgccttgaacactgctacaagggtctgaattattctccatcatataggattccagaacactcctgttgtcgtctgaatgtttatccctcactgaggattccagaacactgctgttgggttctgagtgtttgtccctcatgtacgattccagaaccctgccacgtgggtctaaatgtttgtccctcacacaggactccagaacaatgctacgaggaatactgctgttgggttctgagtgtttgtccctcatttacgattccagaccactgctacgtgtctctaaatgtttgtccctcagataggattcccgaacaccgctacgagggtctgaatgtttgtcccacagttaggtttccagaacaccccagctatcgtctgaatgattggccttcatataagattctggaaaactgctgctggtttctgagaggttctctctcacataggatttcagaacactgctgctggggtctgaaagtttgtccctcacataggattccagagcactgctacgaggttctgaattattctccctcacataggattccagaacactcctgccatcatctgaatgtccctcacttaggattccagaacactgctgttgtgattccagaacactgctatgaaggtctgaatgtttgcccctcacataggattccagaacactgctacgggtgtcttaattattccccatcccatcggattccagaacactccacctgttgtctgaatgtttgtccctcacttactattcgagaacactgttgttgggttctgtgtatttctcacttacatactagtccagaacactgctacgtgggtctaaatgtttttctctcacataggattccagaacactgctacgagggattccagatcactgctgcttggttctgagtgtttctccctcagataggattccagaacactgtggctgtggcctgaatgtttgtccctcactt

SEQ ID NO: 472784 - DNA, 599 bp, Homo sapiens
aggcacactgtgcaaatattgggaaaattcgaatgccggccaactaatgcaggtgggtgagggacatgttgtactccacagatgcagaggcggtggtggtggaggagcataagctggcagtcagcaggacaggccaggggtctgctggtggcagcagggccccgggtactaccacaggaggcaccccctgtgtgcaggtccacgggttcccagtaccattgcctctcaccaagcatgttaaaaattccaaggggttccggtctcagacgtgggcccaggcaagaggtgcatggcctgtggtccttgcaaaggttggcacctgggtccccaacaggcataggagcacagctttggccagaagagattggcaatttcagccatgggacatttcaggtggcaactggagctgtggccaccctggtgacactgaatcaggctcgctgtgcccttcacacagacacccaattactaagatgaggggctttgcactaaatatttgttcactaagttaaagtccactgtttgcatccaattatttttgttattgttttgcaaacctaaaagtctgtatcaatatctcatggctagatttctgaagc

SEQ ID NO: 472785 - DNA, 1024 bp, Homo sapiens
cagcagcagtgttctgggatcccatgtgatgggcaaacattcagacattcccagcagtgttctggaatcctatgtgtgggacaaacactcagaccccagcagcagtgttctggaatcctatgtgaggtacaaacattcagaccctggaatcagtgttctggaatcctatggaaaaactttcagaccacagcagccatgttctggagtcctatgtgacagacattcagaccctcgtagcagtgttctggaatcttatgtgagggacacgcattcagaccacagcaggagggttctggaatcctatgtgagggacaaatattcagaccctcatagcagtgttctggagtcttatgtgagggacaaacattcagaccccggcagcagtgttctggaatcctatgtgagggacaaacattcagaccccagcagcagtgttctagaatcctatgtaatggacaaacattcagaacctcgtagcagtgttctggaatcctatgtgaaggacagacatttagaccctcgcagcaatgttctggaatcctatgtgagggagaaacattcagaccctcgcagcagtgttctggaatcctatgtgagggacaaacattcagaccccagcagcagtgttctggaatcctatgtgagggacaaacattcagaccacggcagcagtgttctggagtcctatgtaatggacaaatattcagaacctcgtagcagtgatctggaatcctatgtgagggacaaactttctgaccccagcagcagtgttctggaatcctatgtgagggacaaactttctgaccctcgtatgtgttctagtattctatgtgagggacagacattcagatcccagcatcagtgttctggaatcctgtgtgagggacaaacattcagaccccaggagcagcgttctgaaatcctaagttaagggtaaacattcagaccccagcatcaatgttctggaatcctttgtgagggacaaacattcagaccctcgtagcagtgttctggaatactgtgt

SEQ ID NO: 472786 - DNA, 697 bp, Homo sapiens
gggtgaagtgactgaaggctgtagatgaaaaggttcagcatgggggtgaccacagcatacatcactgacaccaccacaccattcctggggggtggtgacacagctgaagtcaggtacatgccaatgcctgttccatcaaatcagcaaacaactgccagctgggaatccaacgggctaaggaaaaaggacaccaagacgaagaagacacagagtcaggagcatgtcttccatgcatgcaaaaaggacaaagaaagacatccgtgtcaggcagccctcataagagatgactctgctatgcgactgcatgttcacaatcatcttgggaaccatggccaaggtgaaaccgatgtcagctcagcagagtttggagaggaagaagcacatgggggtgtggagcggggagtcagagctgacagccaggatgctgagcaggttcctcagcaccgtgaccatatacatggacagggacagggacagcaaagcgaggaccggctgcagttctggatcctctgagagtcccaggaggaggaattctcagacacctgtgagattccgtggctctgtgtgacttggacaccttgagaagtaaagaggattggaaaaataaaagataaaaaccagcccttaatgctggatgcaagcaattcacaaggaacattttcacacttgtggaccatacaccgccagcaatgtttct

SEQ ID NO: 472787 - DNA, 1688 bp, Homo sapiens
gttcagtgactaaaagtgcctaccatgagcagctggaacccactccctgagagcttcaagatgcatgggtacctcttgtacctgtttgtaattacagccaaggaccagcaggcagcattactgcatccacatggggcttttactggaaccagtaagtctctgccagcccctcacaggctcctgggatgccactcgttctgggtctgtggacagacaaccaggacacttgctcagtgcccacccactccttgtggcccacagcccatcactcaaccccagccccaccatcccctgcttcctaagccgttcctcatgccagaagaaaaggcaatgcctttgtcccacagcctctgccttgtgtcatgtcatgtggggggagctgtcagtgggggagagagcagccctggaagagaggcccacctgcttctgtctgacttcagggcagcctctcagggcaagaacccagagcagatggaggcctcacagaagcctgtggcagggctctgggcttggtggctgaacatctccctctctgctgccagccatggggcccagaaccacccattcaagagggtcaccaccacattgcagagccagggctggaacaaggacctgtggataatgagggaactgctctgcaataaccggcctgagcagctgcttcaagaaacagccacaatcaaggcacctatagcccctgatcagggcagcccagcaccactgatggtagaggggggctacctccgatcaagctgtgtctccacagctgacccgtggagccaggaggtgatttacaacttctgcaaggcagtcagctccgtcagctgtatgcccttcaacattcacttcaactcaaacatcccaccagaaagcagtggggactggcgaatgcagcagccctgcaaagtggaacagagcatcctgggagcccaacatggaggaggaggttgccgtcctgggagcctgagggagctcttcccttgcctgctggcagagcccaacgtggaggaggaggttgccgccctgggagcctgagggagctcttcccttgcctgctggcagagcccaacatggaggaggaagttgccgccctgagagcctgagggagctgtgtctgtctggggcttctgcctggggttttgcaaagagctacttatgaatatagtctctccagattccttgtttcaaaggaagtgagcatgagctagcaagtgtagcaaccccacagctgataaacaactttgtcttggttttaaaccatcacatcttcatttcacattggaataaagtaagtgaaacctgctaccccagccttgcccgtgtgttctgtaacccagtctcctttggttgtgagggctgttgtcagaaatgttataagaaaagattatgcataaatgaaatcaaatgtaaaattatgcttataatgtcacttgagtgaaagtgaaaacggttcacatggctaacaccacttcttaagatacgggcaccatgtaaagctgagaatggattgggtttagttactattgtgcctcctcctcacccgagaggcccatttttcctggttgattcattaagtgtattagtgctgtcagtcgcctttggacaactcaaatgacaagtggctgttgtttcataaagaaaatgaaggctttagatgtgaaaccctccttttctcttctgcttctctt

SEQ ID NO: 472788 - DNA, 1279 bp, Homo sapiens
tctcctcttaatgaaaacatctcaattcatttttaaggatgagaaaatcacagagactgatagtgaaccagaagaaggtgaaattacagactctcagaccgagggtagttatgatgaaggcattaccagtaaaggcaatgcaactgcaaaagatactgaggaggcagatgaggaaaaagtgtggccctcatatatgagagtaattgtcattagatcacctgtgttacagacaggatcattcttcatcattactgctgtaaaatctgctacaattggaagagaaaatgacatggagcatactcttcgaatccctgaagttagcagtcaaaatggaacaattgttaatgtaaaatggattgttcagctgaaaactaaatgtgacccttatgaacctgagcatggagataaagtgaaaattggagacactgtgttatcttattacattcaccctggcagtaatagctgtgttggatgtgaaccagggcatgttagagctcaccttttccttgataaaaaagatgaatcattgaatacagactacaaagatgataagatactggagaatccaaaatgtaaagatagagctggaaaacatagggagcagattggaaatgaaggaaatttccaaagagatgatgctcctgcatctgttcattctgaaattactgatggcgacaaaggtcagaagatgttgaaaaagatctccggcaaacacatgcaggattggagacagacaaaccgtcttcaattaaagagactcaccttctccaaaacaagaacaacaacaacaagaacaacaactgggacaaagcacaggagaggtttgctgaaaactttcaacaacaacaacaacaacaacaactgggacaaagcacaggagaggtttgctgaaaactttccagaaactaaacttcaaaaagatgacctaggaaccattccttgggtaaaagggactgaggagtgaaggttaatcacaaaagaaaactcaagcttttttataaatagagtttggaaactcttattgcagaatgtctctccccaaaaaagtcagtggcacaagaaagctgtgtcacagtttaccccttcctgattcagaaatgtgtaataaagtgtggtttgcagcttttaaaaaacactttttaaactaattattagtgactgaattaagttatacaaatctgaatttgttgatatatactatacattcagcatttgtatttggtttgtttcatagctaatcaaatgtttatacatgaacaaatgagtacagtattgaaat

SEQ ID NO: 472789 - DNA, 2609 bp, Homo sapiens
cactctgcctttggacatgtgagagagcgcacctttcacttgagcttcaacatgggaaagggaaatgaagaccccgatctccactgttcctccatccagtgctccactgaccagccccctttccaacagatctcctttacagaaaagggctcagatgagaagaaaccattcaaaggaaaaggcaagaccgccttctcccattccagtgagaagcacacacaaaggcaagcaggatcagatcccaatccaaacaaggagaattctgaggaaaccaagctcaaggccgggaacagcactgctggatcagaaccagagtccagctcatatcaggaaaactgcaggaaaagaaaaatcagttccaaggatatctgccaagacagagcagggaactgtccagaagaggagtgcaacttgacgttgaataaaaaatcaagatcctccactgctgtgcacaacagtgaaatccaggagacctgtgatgcccaccataggggaagttccagggcttgcactgggcgcagcaagcggcataggtctcgggccctagaagtccaaacaccgtcacttcgaaaaagcttggtgacctctgtgcgagctatgtcggaggctgtttatcaagacctagcccaggtgtgggcacagcagatccattctccactgacctgtgagcagctgacactgctcactcggctccgggggcctctgtgtgcccaggtgcagaccttgtattccatggccactcaggcagcttatgtcttccctgctgagagctggcttgtcccagccacactgcctggtcctggggattcagccctggatagagaagcccatcccttccctgggcaggagataactgagcctgtcagtggatcagatgaggctaagctgggagcaccctgaccctattcagcagagatgcagctctgggaatgagaacaaggacctgcttcttctcagattcttccagacgaccagcagtgacaattttagatgcactgtgttaataaatgacagaacctgaagaagtcataggaaagaaacttgagcggtatactcagaatggtgagccctgaattttgcagaccgctaaggctatagacaaattttatatttcatgttagacatttgataccttttggatgtctgatgacagtcgtgcatttctatataatcagaaaaatattaggttgcaatcgtgaattttcatattttagattgtagaaaagtaaatataaaattatatgctctttttttttttgagacagtcttgctatgtcactcaggctggagtgcagtggcacaatcttagctcactgcaacctctgcttcctgggttcaaacaattctcatgcctcagcctcccaagtagctgggactacaggcatgtaccgccatgcctggctaatgtttttttcttgtattgttagtagagttttgtcacgttggccaggttggcctcggactcaagtgatccaccagcctccacctcccgacgtggtggggttacaggcatgagccgctttaccaagaaattgcttctcttttaattcggaaaaggttgtaggctcttccagcctgaacccatggagtactaacatccacaaaccattaatagcactccctgtgggaaaatgtttatacatttttacagtttgcatagtaaaattactatgcaagctgtttacttttaatatttctacataaaatttaagtcaagatatattaaatggtaaatgattgtacttatttattcatctgcctcatgttttatttcattttaaacatcctgaatttatattttattgtatttcatacatttcaattgattgtactgtattgcaggatatggagatttcatcacatactacaatacagtgtattttgttatatttgacgtatattctacttgtattttgtactgagatcatacaatctttcattatctaagtgtattaatgacttgtttggttgctttataattttcattttatgtaataatgaaataaacattaatgttgtttggaattttaaatttctttcatatggaatttgtatttaataaagatgtgaaaaagagaatgtcttatcttcacttctgcatcatcctaaccctgacctccccacagcccacagctcttgtcatagtctgggaatagtgttctatcactacaggaaatggggccaatttaatggtaatacacagatataagttggagatatagagattttattctcgaccactgcagtataaaagaatcacagtaacgcgagtcacacaatttttgggttgacactgcttatgagttatgcttacactatgctgtagaataactctgaaataaatttatgtctattaaacaaatgcacacacataaataacatgtctaaataacaatatacatatcttaatgaaaatgaactttattgctaaaaatgttaacacagatacacacaatgggatcatataatgttgaaaaatagagatggggagaggaacagaaacagagagaaagggaggaatggagcgagaaaaggacagatggacagagggatattggaaaggagaaagtagggagggggaggaagggacgtggggggggaggaacgcc

SEQ ID NO: 472790 - DNA, 627 bp, Homo sapiens
atagtgttggaccacacggggttcagaagaagacagaaaaatgttaggaagtttggaacttcttagagacttgcagaattgttttgaggaaaatgctgatagtgacatggacaatgaagaccaggctgaggtggcctcatatggcgatgaagaacttgttgggaactggagtaaaggtgactcttgctatgcaaagagactgacggcattttgcccctgcctgagaaatcttagcaaagtgttcaagaggaagcaaagcataaaagttttaaaaattttgcagcttgatgatgagatagaaaaggacaacccattttctggagagaaattcaagccagctgcagaaatttgcataagtaacgaggagctgaatattaatcaccaagacaatgggaaaatgtcttcagggcatgtcagagaccttcacggctactcaaaccatcataggccaggaggcctaggaggaaaaaacggtttcatgggcccggtgcagggacttgcagctctgtgcagtctcagggcttggtgccctgtgtcccaatcatggcttaagggccaatgtacagctcaggctatggcttcagagggtacaagccccaagccttggcagcttacatgaggtgttgg

SEQ ID NO: 472791 - DNA, 1290 bp, Homo sapiens
ggtagtgtcgcccgcagggacgccgacatgctggaggttcatgtcagcatgggctctggcagccacgtgggccagcaggagggtcccgctgcacagctgtccgtgcctggggctgactgcggcagaaatctggggaagtctggagaggagctgggagacacaggagagtccctgaaggctgggggtgaagaggtgaaagaaatgggggagggttgcagtaaggtccctggtgaggagcttcctcttaagtctgagtttctgagaggggagaaggagaagctgggtgaggctagcatggattttggggagtccgggctgggggaccgttcattagaagagccagacaagaccccactgttcttagatgcagacatgattaggaaacctgcagctcccagggacccctaccaattttctaacccccagaatgaaggagttttttgagactttattttgccgctagcattttgtttttgttttgttttgtttttaagttctggggtatatgggcaggaggtgcagatttgttacatagctcccactgtaagtgagaacgtggtgtttggttttctcttccgggattagtttgctgaggataatgacttcacatcgctagtgttttcttaaatgtattcatcttatttatgaactctttgtgtgtatttttttctaggttttgatcttttttcttctgttatatgtattaacaagaaatttactttcaatctgttgattgacatttgttttcatggtgatatgttttagaaagtaatatttcttaataagatgaattatattgctaaattttgttgtactagattgtttagtagttggtctgccttttactagacatgttgttctctgtacctcagtgtcctcatccataacatagcaatataatagtgcccattttgtagtgtgacatgagaattaaatgaagtaatacacatgaaagacttagaacacacaaaccctcaatgcatataagctaccactgttattaccactttcttgaaatggaagttaatttattttcactcttgtgtttcataaatttaacgaatgttacaagttttcctctgagtatgattttaagctattttcctctgttttggatatgtacttcttttgcttttatttatttccaaatggtatgtgactattattttgatttcctctttaatccaagcctgcatttaaagagtgtcctcgggttcctttcaatcttgaggtgaataaataacttacagaacactctttatgtccttttgtgaatttaattgcattatg

SEQ ID NO: 472792 - DNA, 533 bp, Homo sapiens
ttctgcgatgctgggagcgcgagcgggctcgggggttgctaggcagctgctgcctgcacacagagggcgactgcagcttgggcgcccaggcggcggagcatggtctgggtgtcgtctggaatgcgtgcgcgccaggcttgagggccccctggtggtgccacctgcctcgctgctgggcgcctccctgcccctgcgcctgcgccggcgctgggcctttgcgagggctgagctgagttctcctcagcacagacccggagagcatcgcgagggcgaagctgagttctcctctgcacagacttcggagatacagcgaaggcggagcagcgttctcagcacagacccgggcgggcgggccgggagcaccgcgagggcggagctgcgttctgctcagcacagaccttgggggcactgcctcgctttggtgagagatgagaatgcagttttattcccctacatgtggctcgccaattatcccaaaatcatgtgttgaaaagggtgtcctttccccactttatgtttttgtttactttgtc

SEQ ID NO: 472793 - DNA, 844 bp, Homo sapiens
ctgcctgctgcaaatccaagtcggaagtctactggggtccattgggagtaacgaggagccgaatgttgatcaccaggaccaaaggggaaaatgtctccaggacatgtcagagaccttcatggcagcccctcccatcacatgcccagaggcctaggaggaagaaattatttcctgggctgggcctaggctctgtgcagccttgggacttggtgccctgcatcccagcacgtgtgattgaaaggggccaaggtacagctcagaccattgcttcagaaggtacaagccccaagccttggcaacttccacatggtgttaggcctgcgggtgcacagaggtcaagaattgaggtttgggagcctccacctacatttcaaaggatgtatggaaatgcctgggtgtccaggcagaagtctgctacatggacgaagccctcatggagaacacctgctagggcagtgcaaaggcgaaatgtggagttggagcccccacatggagttcccactggggaactgcctagtggagctgtgagaagaggaccaccatcttccagaccccagaatgggagatccactgacagcttgtaccatgcacctcgaattgctgcagactcgcaatgccagcctgggaaagcagctgggaggggaactgtacactgcaaagccacagggttggagctgcccaatactatgggagcccccctctggcatcagcttgacccaaatgtgagacatggaatcaaagaagataattttggagctctaagatttaatgactgccctgttgaatttcaaaattgcatggggcctccggcccctttgttttggccaatttctcccatttaaaa

SEQ ID NO: 472794 - DNA, 1384 bp, Homo sapiens
gagaaaagtcactcaaccatggggtgcttgctgctcccaccccagctgcctaagccaccaggggccggggcacaggtggaagaaggtggcctcagtcctgggccctgatgcctagaagggcatggtcagtgccctccaggcagccttgcctgatcgttggggctcgggaccagctcccactctgctccactctctgctggctggactggccacccctctgtctgtggaattcacttggtgccagtgcccttcctggaggatgatggccggcccccatgctcctcgtcaccaggtcctgctctttttacctccattcatcgccactgctattaaagagtcgccctcttgctagattacagttggcttgacaagtcagttgactgttctgatggaagcttcttcttgggcagggccccagggccttggtgggacccgggccctgggtgggggcacagaggtgggacacaatgatggctttatggagcaggccctgcccgcccctgtggcactgtggggagggggctcacctgtccctaggccagggctcagcacggcagcggtaaacctggctggccttgacacttcctggaatctctcagtgaccacgtttctttttgcaccaaatagctatggttcttgctgttcgtttctctccctgccctcctttaagaaggagagttcgtgggaattagacactcagggttgggggagggtaaccttggctcctggtgggaggagtctgcgtccttctctgggcccagggcctatggggcagcaacagcatctcctctattctcagagcatccagggacagggtcacaccatgggtgtgtggtacaccaggtcgtccacctggctgaaggcctgggctggtgacaagtgctgtggtgctgttcaggccagcagaaaagagggaggcacatttctgtcagcagacgggatggggtatggctcacacctgctgggctggaggctgtgctccacccagggcctcaggctgtgtctttgacaacaataatcaccctatgggcaaggtctgcgtgctgagcccttgtcagtcacatctcttataatccaacagcagctctgtgggcctctccttacagatggggaggctgagccccagggacatgaggccacttgccaaggtcacagagccagtgggtgctcagctgaggccgcgaggctgggagaggcacccctcaggattttacttccccagcagggctaggccctgggcaaagagaatcagatggataactttgaaatgctggctccagggccagccagagtctgtagggggcctcttgtagggggcctgggcaccaagtttgaaatgctttcaaatccatcaatttgctttgttttctcatcttggggtcac

SEQ ID NO: 472795 - DNA, 1379 bp, Homo sapiens
tgttgcttgatgcccccacgaggatctgtgtctgtgatcatgaaggcgatgcccttggctcccagagaatggcattcaactgctaagatcgatgaggctaatttacacctgggatctagctatcacacaggtgaacagagctgcactcattcagatgtctaccttcggagaacctttagaggccctaccgctgtggttcccaccacactgtggctgcataaaggaatcactggggccaaatcactggggccggtcatagtcagctcaggctaccataagaaaatatcacagactgggaggcttaagcaatgcctatttctcatggttctggagtctgggaaatccaagatcaaagtgctggcagatttggtgtccggcaggggcttgctttctggctggcagacagctgccttcttgatgtgtcttcgtatggaagatagaaaactctgtctctcttcctcttcttataaggacactaatcctatcagggggtctccatcctcaaaacttcatctaaatctaatcacttccctgcatccaaacaccaccacattcaggattgcggcttcaacatatgaattctgaggggcacacaaacattcagctcacagcatgaccccagtgctagggcagtgacattagaacccctggaggcagagcccagatatctggacttattagcagctctccactgtcttccctgagaggtgaggtccttctcagggaatgaagacatttcctgagagaaacgtgggaagtgagattcaaagggaaaaagacagacactgggtgggtgggaggaagaggcatattaacacaaagcgactgtgatacagttggctatggccataaaacaatgaccaaattacccttttggtgtttaggattgctaacagtcatgggcctaatactcctgaagcctgaggtcacctgaaagttcctgaacctcttcccagattttgcagcatggcaaaacaggttttgctgcaggatgggttatgggagcggggggagaagaagagggaaaatgtatgaggcaaagatggtcttgctaaacagatgaaacttcacaggtagcagtcctgctctcaaggaggaaaaatatagacggtagtctgaggaaaatgtttctctgtcagaccttgaaaggtgtcaagctctcagctaatctttcgtagatgcagaccaggagggttgtggggtggcataagagaaatcctgtttgcaccggctgtttacttcactttacttcctccgcaggtgcaaatatcccccacaaaagacagcttttcaggagttttcttgtgtctgcaggaggtccttaatcttctcttttcaagcatttctctatttttatgtatttaagtggttataaattt

SEQ ID NO: 472796 - DNA, 1075 bp, Homo sapiens
gcgttcttagcaaagttgaaggccagtgatgaacaggactgccagaagggcttgcattttgcaccctgagtgtcctccaaaccctgcgtggactccaagcttcctggacatttctgaaacaggccttaaagaggagagagatgagtacacagatgaagccccacattgctataaaagtcaatgtcttgaactgagttggaatccacatcaacatgcccttcccatccccagaagaaagcagagaacgtgctgtcagggccctagactggcaaggaaatacttgcgacttcgggatggtttctctgtaatatctgagaagggatcatcccccagacaggatgagaggaaggaggtgccgctgtgggtcagcaaagaccagggaggaaggaaggcccaggaaagagaccgcagcccatgccccccactgtccaggatggcctcggacaggaggggagaaagtatttcaaagctgcaaggcactgcacgtataggtgatgatgttttcagttgtttcataaccagaatatttttaaaataaataatacttcagaaacattcaaaagccatttggtagcatgcttaagatggaaaggtttgtaactgaatatctaaatgagaccattgccctgaagatcttcttttatttctttcaacagtgtacttttctacgaacaagccttgcattgattttatgtaatttatttctaagtattttattctctttgttgctgtggtaaattaaattgcattcttagttgcatttttggattattcattactagtgtataggaatacaatggattgtttttcaatttctgatcatggcaaaacacacataacataaaatttaccattataaccattttaagtgtgcctttcagtgatattaagtgcattcatgttgtgcatccatcaccatcaagtatctccatatatcttttcatcttgtaaaacaaactctatacccattaaacaataactccctatttcaccctctcctgaacccttgtcaaccaccattctattttctaaagttgaatagtattccatagtattccattgtgtgtgattgtgc

SEQ ID NO: 472797 - DNA, 506 bp, Homo sapiens
acatcacacaccgggccctgtctgggggtgtatttggttcacagttctgcaagccgtgtaagaatggtgccaagcatgcttggcttctggggagggctcggggagcttttagttgtggcaggaggaaggagagccagcgtgtcagatggcaagatgatcagccaggacgcatggcgaggaggaactgtccagtatgacagtaaggtcagcttggatgtctgcaatgagcccacactgatcagctctatccaggcccaccctgggtatagctttacctcaagttttcaacaggtgaggtttattgaaacatgtgaacacaggtctacggcctacagaaacagatgtgggtgcaagtctgtcatactactattgtctgtggaaacagaagagggcacaggtttacagtccatggaaacatgtggatgcaggtctaaaacctgcagaaaaagatttaagcacaagtctacaaaaatagatatgggcaaaggtctataatctatgaaaac

SEQ ID NO: 472798 - DNA, 902 bp, Homo sapiens
tcccaggatcaatgcagctgcctggatcatggaactcggatctcaggatctattctcgaccctagttatatcagtttccttccctgcagggactaattctgagacaagagatggagaagaagaacttgttgggaactggagcaaaggttactcttgttatgttttaacaaagagactgggtgcattttgcccctgccctagagttttgtggaagtttgaacttgagagagatgatttagggtatctggcagaagaaatttctaagcagcaaagcattcaagagggcagtgcagaagggggtcagagccccagcacagagcctagtggagctgtgagaagagggccaccatcctccaaaccccagaatggtagatccaccaacagcttgcaccgtgagcctggaaaagccacagacactcaacgccagcctgtgaaagccgccaggaggggggctataccttgcaaagccacaggagtggagttgcccaaggcaatgggagcccacctcttgcatcagcgtgacctggatatgagacatggagtcaaaggagataattttggagctttaagatttgactgccctgctggattttggacttgcatgggacgagacttttggtctgtggacttttgagttaatgctgaaataagttaggactttgggggattgttgggaaggcctgattggttttgtaatgtgaggacatgagatttgggaggggccaggggtggaaagttattggtgtgatgttagatcattaattggaagtgttttaaactttttgtggtaagcatttagcactataaattttgctcttaatactgcttttgctgcctccctgagattttgatgtgttgtgtctgtttttatttatttcaaaggagattttcatttctgcctt

SEQ ID NO: 472799 - DNA, 531 bp, Homo sapiens
tttaaagacctgcctcagcagtccaggaatgaaggaaggtggcttggaccaggtggaggtggtggtggcagtgaagaacaaaggagagattcatatgttcaggaggcccaactcagaccctctccttccaggaaccctctgcagccatcacaacccttggtgcctgctcttgcctctgaactatgtgagagattccaggttcacttctttgcaactcacctcagccccgagagctggaacagtctgggtgcagggcacggtcctgcctgggcctcgctttcctcctttgtcaaacgaagaggaaggaccaattttgcttaatgtttgcctagctgtgcagttggttcttctcatgacaagtgtgcactttgaaggccctgtggagactcgtgtgcccttctctcttaatctaccttttgaaggcgtgcccagttccgtcatagctgtatctccttgtgcatattatttgggttaacattctaagcactggggaatatcttttttcttccattttataagtaaaatgaaaaa

SEQ ID NO: 472800 - DNA, 556 bp, Homo sapiens
ggaaaacagtaaaaccacactctgtattttaatcttctgaagacaaggataatgactgcatcatctctcagccacttgcagaagtctccccagaacgtggtcctgcagacatcacaggtgcctgcttatctcaccttgtgtgtccaccatgagactgtgaattcctccaaagcagaggctgttttcacctgctgtgtgtccccagcttcaccagtggggtccagaacagaggagatattcagctccatcggatgtctgaccacccttggttttcggctcgtgtttaagggtacagcactgaaatctgccaggaagctctgggcactgcagggcagaaagtcctgcaaaactgcatggggtctggagtgggaactgtgggcacttctcctgggtgacaccattgctgttggaatgaaactgattcaactgacccatcaacaattttttaaaaaataaatatagaaattgacacttctgctcacaggcatgttccagctcataccctatgccccttccttatttggaaatgttattgcttccttaaacctttttagca

SEQ ID NO: 472801 - DNA, 853 bp, Homo sapiens
cagtgacctggaagatcagggagaggcagtgtttccaatctcaaaggaaagaatgagggagaaacagagggacccagaggacagatccaggatatctagcacatggatagcaagagctccagaaggggaagaaggaacagatggggaagaggccagaagaagggtgtttctggatgccaaggattcaaaggagagatgttcagatgtgtccggagtttcttccttccggtgggttcgtggtctcactgacttcaggagtgaagctgcagaccttcgcagtgggtttgtggtctcgctgacttcaggaatgaagctgcagaccttctcagtgagtgttacagctcataaaggtggagctacaacattctttgctatgacctgctgctcctcctggggagagcctctgcagaagatagctgtcatcctctctgacatagctgtcctacaatggggcactagcagcccaggatcctatgatcctatgatcctgtgtgatctcctacacagtaagcacttgactagagttggatttaatcaggggtgggctcctgatgggaaaatttctttgtccttacctggcatatgttatgggttgaactgtgtccccctcctaaatccatgtgaggcccctgaacatttctgaatgtgatcttattagaagatagggtcattgcagatgttagtagtaaagttgtataatacagttgtgtaattagtaaaattgtggtgctgcccaggtgcctaaaagtgagcctgaggtcatgagggtggatgctaatccaggatggctggcatgtttataagaagtggatacgacccacaaacatgcttaaggggaagatgatgtgaagac

SEQ ID NO: 472802 - DNA, 497 bp, Homo sapiens
gtttgatcacagccgtcaaaagcatgtggaaactcccagatcatttttttaaattagagcctttaaccaaggaagtaagccaaccactggagttcccaagtcccatgggaatttgccaataccaaacactcaggctcagttcaccctcaggacacccccatcccaaagtggaaaatcctagagatgacattttaagtttacaagctttatctcatggtgactgcaaaacaaatctccccccaacagcctgctccccgaaccccggggaagtgttgagaaactgtcttgggaggagcagagcagaagaagtaaaagaacgtgaaagaagaagtcctgagaagttctggcctcacacattttcacctggaaaagtgtggcccgaggttgctgaggagccacagctgcacatttggtctgaagtggtccccactgtggtgcccacaagatttgaaagcagcgaacacaatccttcattaaatgagaggcacctgtagtag

SEQ ID NO: 472803 - DNA, 766 bp, Homo sapiens
agagagttcatgcttaatggggacagagcttcggtgtggggacagtaagaaagacctggaaacagagtgtggtgatggccgcacaacaatctccagaaaagatgttgggtggcaggttccctgggaaagatggcatggagattccacagagcaccaacagcagcaagttgccctctactgagagcagcagctcagcaaggagcaggcctttggccacacgaaatgaggggtcatgacaggcagtgtggagagggagacaggtgtgacccaggactgcaaagagagtcctggtgggcagcatggaaaggggacaggtgtgacccaggactgcaaagagagtcctggtgagcagtgtggagagggggacagagtccaaggcccagccccaccacagacagcgatcagcagggctctcccaaagaaggcagattctagcaccacagcagaacagatgcagtgtgattggaaagtgccaaagacgagcgaggaagatgaaagggaaagtgtgcctctgctgttcttcactcgtgctggtcgaatggaggaatcggaaggcatccaggcatgtcttcatgtaaaggagcacaaacacacccttcagctgcattttcctctaagacagaggtcttcggggagtacagcagaaatatcttgctttagaacctgtcagtaaacacttgggccatgggaacacattgctatggcctctgcagcaccttggaaggggcccttgaaagtcagtggcatgaagtcactaccttccatg

SEQ ID NO: 472804 - DNA, 398 bp, Homo sapiens
ccgtgttgtagtaattatgtctccagccagtacccaatgtgacaagattagcagagagcacggttattcatcatcagaactgggccgcacgcgtgtatatttagaagtgcctgacatccttccagggctgcattctcctgcattatcatatcaattggagccctgctcctgtgcagctgagcacctactctgtgttagacactggaagtacagaagtgaggatgtgcacctgccaccgctaaccaagaactgtgggaacacagaggtggggtccccacctacgcctacagcacgggaatgccaggaaggctgtgtggaggagcagaggggcccgagcatgtggactgggccccggtgtccctgaacgccctgatgagcatcgcgtctcacacttaaac

SEQ ID NO: 472805 - DNA, 751 bp, Homo sapiens
tgccaacagctggtccttcccagctctgccctgcaagcagcagtgtggcccaggtggatcttccaagtcccccctagctgcctggtcattcctccttagcctcagacctgccatcattcctggctagaaaagaggcttggtggcaaaccagaatgtctgccctggagagctgggcatcaaacctcacagggcagaaaagctcattggaagccccagagcacacagccagcagggctatctgtcagcctctcctcctcctctcctccacctgccacggcatttctctggggaaaaggctttccctccgggtcatctccattaactcacaggatggagtggggattagatcccagctgacggaacccaggctcctcttcggtcctgccctgacagcccaggggaagcctcacatgctgacagagaacaaccacagccatgacaaggaccacaatgtctgccactgcctatcctcctattcccgctgctcctcagagcacaatgcaccacttcctttgtgccaggtgagagcccacccttggcccaaattcacgagttggtgagaggcccaatcagcttccagcccgaagcgctgagctgggagccaggaaaaggactgagtagacttgaatttgagtttagacaaataaagaattgtgacatctatagagcagagatagaacagacaatagaaaaacaagagaggaaaatcaataaaaccaaaagttggcttctagaaaatatcaacaaaatc

SEQ ID NO: 472806 - DNA, 680 bp, Homo sapiens
gtagcagccggagcatctgcatggttttttggtttccttgtccccaggtcccacggaggcggtgcaatgggcccacatgtatgtcatgcaggcagtggtggtcatggtgtgctcgccctgacctacttagatgccacggagactgctcagcctctggagactgatcggcctctagagactgatcgtataggtgctccctggtgccgactggcgctggtgcagtctgctggtgcaggcccctgggaagagtctgcccagctgatgtgggtctttcctttggtgatcctgcatcccctccatgccagtccatattccttccgtttccatggctgtactgagcatagtattgtgtccggaatttactccttctggtgggttcttcgtcttgctgacttcaagagtgaagccacgggccctcatggagtgaagccacagaccttcgtggacctttgctgcgagtattacagagtggtgattggtccccactcgacccaggaagtccagctggcttcacctctcagtatccaataggtagtttttcaacccttactctcttccttccctctccactctagtagttcccagtggctattgttgctatctttatgtccataagtaccctatgtttagctcccatgtatagcctttgtatgtatgtctcattaaaaaaaacttccagc

SEQ ID NO: 472807 - DNA, 620 bp, Homo sapiens
ctgttctctttttttccagccatgtcctgggtctctcaggcccttccttcttattgctttttccctcaggaggatgtctctactttaacagaactgacaagaaacagtgaaccaccctcattcctacttccctccaggcggaaccactgggagggcgctggcccactgggcgaaggctgcctctacttgggatgccagaagagagtgcggctctttgcagcatccacgtctggtttggatggctgctgcagcttcaagcctgggctgctggatgacaatggcgatgatgctgatgaagaccctggggattgcactgggaatagaacagatgcggtttctgaccccacggagaattctgctgggggagcaagatcctgtgggttccgcattgccttgtcaagactggactttctccgagagcccgtggaactgctgacctgttccaagcagggcatgagcaaggacggcggaggcagtggggatctgtacttcaacctgcactgggtggtagtgagccgtggaccctcgcggtgagcgttacagctcttaaggtggcgcgtctggagtttgttccttctgatgttcggatgtgttctgagtttcttccttcgggtgggctc

SEQ ID NO: 472808 - DNA, 1002 bp, Homo sapiens
ggtcaagaagatttctagatgctaggcctgaagacccttcagctggagcaggcagcggcaagtgacagctcttcctggtttgcagcttggaggtcccaaatccaagattgggatgtgtagggcaggccagccatgtcccagtccatgtaagctgccagaacagaaagccacagatggggaggccagtgaactacagagattcctttctcacggttgtagaggctggaagttcgagacccaggaatgtgctcgcagatcccgcccttcgtgggcactgggtgtcattgacttctggggaaagctgtttccacgggcagcattaccagtgcaaatgaaggctctggagtcctggttggaaccccaactccacttcctaccatctgcagcacagcaactgtctgagctctctggttgttcaaataagcctgtggacctccctcaagtgatcctccgggaattgaattgggccactcaagcaagggccccagcacagtccctggacactcccagaatgttactccccccagctggagggctcccaccctggcaacgagggctctccaagaagccatgagcacactcccaccacccaatccccacaatatacaagttggcaaaacaaggcaaggaggctccaatagaaagggacattcaccagctcctgcccccatctgaaactgtccccgcctttcctctctgaatttgggccgtcacttctcacatgcctgacatttgacaggcttgtctccccaccccagtctcagagcaccacccagcccagcgtctttcagggagtcagtccagtgtggccacactgggagcagcatgtagacggtgcatgctgggcaaggcagggaggggtggccagggcttggccactcccctgtgctcacagagtgacactcagtcccccagccttcccttaatgctaggcactgaggccctctgcactgtcccccttgccgcctttgtgattagtgggatgaagcaagccagcccctc

SEQ ID NO: 472809 - DNA, 640 bp, Homo sapiens
tgcactcgggtgcatgggaatgcgtgctggggaggcctttcccagcccagcagggggcacgtcctgtctcacaggccctcccaaggaacggtggggcggggccctcgggcgagtgtggccaggctttcctgatccagcagggtgctggtctggcctgccttatagaatgatcactctggccattgtggtgcgggagatgctctgtgtggagggtggaagcatggaaatgcgttcggaggcggaagatgagggcgggtgtggaccagctggcagcaggacagtgctgaagaaggggttggatctgggtatatggtattggaagggcagagcccccagctttgctgatggaggaatgagtgtggaccacagagcttccgtggaggcaggaggtggcagagcgctgcgaggcggctgttccagggcatgggggtagtagtggcaatgcaagtcctgcctgccccagttgccaagagtgagtggggagacaggaggggtctccttccaagcccatggttttgagaggcaaggacacactgaaaccaccagagtctgtctctagcctggagctgtcccctgagccccagagctggcatctaacttggatgtctccgggcatctctgacatcacctgccctcatcc

SEQ ID NO: 472810 - DNA, 726 bp, Homo sapiens
ggagggctgggggccgtggggagtttgagcacaggcgagaagcggacggttggcccaggggtgagtggggaaggccagagggagcagaggcccagtcctggctgtgtatgctgatggggagtgagggaagaggaaggccaaaaggctctgggtttggatctcagcccctggaagaacgaaatggcttcactgagaggagattcctgggacccaccaccaacacccaagatcctgttttcttccttctggaaattgtgtggtttttggagctcctcctgggccttggagtcactgacagcaggtttgtgtgctgggaggacacaacgggagagctgcttcatctttctgagctgccgcagtgggataagctctggagaaccttcaccgccggccattccagcaccaggggttcttgtttctgccagccccaggtcccacaccttgtcttacctgagatgatgcctgaggaggacaggtaccagccacagctgactgagtgcatgaagaccaaaggccttcctggaaggggccactgaggggcagggtccacccagggacagggtccacccagggaccggctcattgggcttcaggtcacagtaagatggagagggcgctgagttcacatcacattcaatctcagcaaatgcttatctctactgaaaattccacaagagcattcgtgttctgcactttcccataatcagcttagtgttttgcagccac

SEQ ID NO: 472811 - DNA, 702 bp, Homo sapiens
cattggcatacaagtgtctatggagagaatgttccaggcagaggaggcagcgagtgcaagggccctagggcagagtgggacactgaagtggcgaatggaggtcaccgtggagggacagggtcagagatgcctgggccccgtgagcctttgtgaggacttgggctttccccctgagacaggcaggagccttgctgagattgtaggaacggagtggggagacagttgggaggactatgctgagggtgatgggagtgtgagctgtgagggtgatgggaagtggccagatcctggatgtattttgaagggagagctggcagagtttccaggaagaaatgtgacaattgcttcatggaagttaatttgtgaatggcactcagctgctttggatccacaacatcattgcccagtgagcaaagcagaggacttccacactggctgggtgcttgggcccggagaagaacgtgtctggaacatggggtacctctttgtgctagtacatggtaaaaacgaatggaaggatacaacaatccaatataggtcatggcttagatccttcaggaatgaaggtttgggtcaccttgccagggtcccctgctttggtgctgtgagcagctgagataatttttggtggcctccttgacccttgcatcccagccttccaacaggtgaaagctttgcattcccctcgttaaagccatttcc

SEQ ID NO: 472812 - DNA, 977 bp, Homo sapiens
cccactctgctccatgggctctgctccctggcctcccattcctgctcgccctccagctttttgtgtctgtgtcgcccactcctcccaccatcagtctccatctggatgcaggcttctgggcttccgttcacgcagagttttgggcagcagctcccccagcagccctgcctgccacctcttctggggaagagggttcagatggaaggggcctggaggatgaggataagccacgagggagagggaggggctgatggcttagggaggacttctacaggtgaagctgtcctgggtgctaagagaacaggcagcggccctctgtggcaggaagaactctgttcgtctaagacagaaaccgtgtttctcctgtctgggaaacagccttctctgatgctgcctcctcctccagacactgccaggcatggggcatatttggagctggagctggcagggtggcagagatacctcctgcaagaagccagaagagcaaagaaggccgtgtgtgtaaagagcccagtgctggttcccgaactctgtgggccctcgtcttatctccccggccagcccatccatcacgtgacctccagcactgtggcctgtgtgtgccaggccctccaaggagctcagctcatcagcaagtcccactggttctgctttcacatgtacccccaatctgtccacgtctccctacttattgcctgggtcccccatgagatcaaggagccctgcagagtgggactgggccccacttcctcttgggtccacgtaattatcgatgcttcccaggttctgcccttcagcctcgacctctccctgggccctcggcctggttacctgactgtccacttgagagctcagcagggatgtccagcagaatgtgactgtatttggagataggggcttttttttgtgtgtgatcacaaagaggccacattttttttaattgacaactcaatctctacatacatacagtactgcac

SEQ ID NO: 472813 - DNA, 661 bp, Homo sapiens
atgctcagcattacttcccagagaccctctaggatgagccaccatgcccagtcaggcacactggctgctgcagcagggtaggcagctccgggtgcaggcatgggcactggctctctgtgaggttgtggctggaccaggcacaccacaagcagcttccacggctgccactggggaacacagtagcacctggaagcttggagaatccaggaactacagggctccaaagagggagtcacagccctacttccaggaactcctagtctgggctccccaaagggctgcagctcttctcaccttctcacctgcaatgtgtccccaggaaacaaaagtgaactgcaaggtgacttgtctttactcctacatcctggaagctgtcttgattcttaaaattccaactcatcagcacctcctcatgcataaaaactaagtttgtgtgattgatgcatggtgattggtcagctgacatgagcttgcctccttcctttccactgggtcagtcagcaggtcacaggtcacatcagaggccctgtggcaggtcccatagctgctggggagaagcatctgaatattcctgtcccgagtgtcacaagaaggtctgcagatgtctgataagcagccaaggaaggggaatcagagtgaaggaaaggcaaggattaaaaaa

SEQ ID NO: 472814 - DNA, 676 bp, Homo sapiens
gagccttcgttgcacattgccctggattagttttctgtgctgtgtaacaaatcgccaggacacagcagcttaaagaaacacctatttttttgctcctccttcttgtcagcggcactcatgcaaagcattgtgctgtatataaatgactcgattattgctggtctgcttcttcagcattcaggcatacatggccctctttttactgacatatggagcaactggctcccagttccgaggtggtggaggcagggcactgcccccagcatggcgtccttcacgcatgactggcagatggtgccatttctgggccatcctggcagctccccactgcaggagcccctgcgcaaaatcctgaagagcaggggctgtgggcacctggactggcactgcctcctggtgctcgtctcctggtacccatctcctggcacccacctcctggtgcccatctccgtcccccgccaccccgtgccaccccccagtgtggagcgcagcctggtccgcagaggccgtccgctaaccactcccgaggacacggctgctctccacacggttccgtgactgtcctacaggggtctgccacttcgtgttgcacaagtgggtgtgtgagtgtgtgaatgtgatcgtgtgtgtatgagtgtgggcatgaggtgtaggtgtgaatgtggacatgaggtgt

SEQ ID NO: 472815 - DNA, 816 bp, Homo sapiens
cagccctcagagtgggctcagcagatcatcctggtcttcttgaggccctcgctagaagcacatgctggagctatgctggtacagcctgcagaacccctggcttctgctagccttcttcgtggggctcccagcccctggaccacagctgactggagtagatgcttggaaaaagcttggtggccgcagctgggtattcctttacagcaacacgaagtggattggccgtcggttttggggtcagtggaccacgtcaagtctaacctgtttgactcagtccactcccttctggaggggcccttgccctgtcagtctgcaaaccaccaggcttcttgctgctccacctgtgtccctgctcagcatgcctggcggccgtgggaccctgagtgtccagggcactgatgccaatggggagatcacagccgatttcaccagaaagcagggcatcctgacaacagagcccaggcttccccatggcaccagcgcccagctgatggccctgatgttattttggtggcttaacatcgatcatggtgaaaatatttacaccacggaaagtggcaaatactgcatagtggggccctatggcttggagagctggtggtttaacatcttccagcactccgtggttacaactgtgttcactacattagagtttaaaactgataaatttgcaaaacacgggaagacagaagcacacgttttgtcagccatcagggtgaggctgcgttatgcatcaagagcctctgaaagccccctggatacctctgtgagaaaatgcatgagaaaggcaaatcagggctccgtgttactgtgaaa

SEQ ID NO: 472816 - DNA, 1076 bp, Homo sapiens
tggttcacggaacgagggactatggagttggatgaatgggagagaattggcagagattttaaaaacgcgtataaggatggagcaaaaattccagtctcagtttggtcaatgtgggcgctaataaaagcagctcttgagccatttcaaacagatgatgaggcagattcagatgaagaagaggaggatgagtgtaaaaatctaacttcagattctgaatgtgaggaacagaaaatggagaaaattaaagaaaagaaagggaaactgaaaaaagtatgttttactagcccgtcggttccaactgctgaattaagtgaaaggccacctcctttctctccccttaatgggccagaagatgaattagctacaaaacttactgctcctgtagttgcaacattaaaacctggagcaattggtggtgctatacaaaattctattcaaaaggctagagccgagggagaccttgaagcatggcaatttcccttaatgggagtcagacctgattggggtcgattagaaaatcaagcagtaatggaggatgttgccattgttcagctttctgtccgacaaggacctaaagaatcatatattgattttattgctcggctccaagaggctgtgtataaagccgtaactgataaaacacctcaagatgctgtaatacagcttcttgcatatgacgatgctaatgcagagtgtcaaactgctattagacccctgagagggaagactcatttaactgaatatattaaggcttgtgatggcattggaggtaacttacataaggctactcttttagctcaggctatggctggattaagagtagaaaagaatatgccccgtttctcaggctcttgctttaattgtgggcaatttggacacacaaaaaaggaacgtagaaaaggaaataaaaaggcaagagctaccatcaatcaacagaaaagtcccagtgtatgtccccattgtgaaaaaggccatcactgggcaagtcagtgtcattctacatttagcaaagatggactgcttttgggaaatgggaagagggagctgccttgagcccctcaacaaactcaggcata

SEQ ID NO: 472817 - DNA, 1501 bp, Homo sapiens
ttttttttttccaacatccacatctgtatagtgcgcggtcggaaggagaaccttcagggctattctgcagtgtcagtacaggatgtgagagcagaaacaacagggtatagaagctcctcgagctagcatgaggttacatcctgatgaacccatctgtcccatgggtcctgactcagacatcctggagcttgtccaggatgtgattaacagggtaacagatgtctttgcaaagcactggagagctgatccacacctaacgagtgtcacatcaaaggcaccatgtggatctcttgttgtgggtcttgcaacccctttaagaagggaagtccacttgaccgcccttccaaactgcttttttgttttcccagaggagacagatgattccagcccccagcctttgaatgacccaagcgagctagagttgaccagagacaagctgccccaaccaagccttgcccaagctgaagatttctatcctcatgatggcctgactattcttccaaggtctaacttcaactacaactcaaaccattttccaccctccatgcaggcacatgtgttattctgaggaaccatcccaaaatgtttcctagtggtggagactcagggaggattatgtaaaagaaaacagacaccagattgggaaggatggtggagatgacaagtgagaatcagaatctctggggcatttgaaactgacccttttaatttcttcatatgcaaaacgagaataccaatacctgtttcatggggtttttgtaataaaaaaataaaatgatccatgtgcatagcaatttacacatactcattgttagtcaattattacattattattaaaaaaattaaatttacaattcatacttctaccaggaatgtataagattatctatctcattgccctcagcagtgctgagcataattattttaaaatatattttaaattgtatttaaattaccaaaatatctattaaatttatttaaattatttaagtgattttaaatattttctaattcaataagtgaaaagtagtagtccagtattttaattttcttttatttgattactgttggaattgagatttttttcaaatatttattagccattgatatttggatatttgtgtgtgtgtgtgtgtttcagaaagagagagggagaaagagagatcaggatctatatttatttttacaggtgtctttgttttgtaattatttttctttttgagcatgggggaagaggttgctcattttgatagtaaagatactatccctagactgaccatgtcttattcctactgaactagttttgtctccctctggtcgatgtatatttctaaaggcttccgtgccatctgattaatgatctattttagagttttctccaagagcactgttaaacttataggcctgtggtccccgagctttatctttttttcatgttaaaaaaatctgaaaacgttagacagtctcttctctttagggcaacatgaaatctccataatta

SEQ ID NO: 472818 - DNA, 2113 bp, Homo sapiens
ggccgaataggaacagctctggtctacagctcccagcgtgagccacgcagaagacagatgatttctgcatttccatctgaggtactggcttcatctcactagggagtgccagacagagggagcaggacagtgggtgcagtgcactgtgtgcaagccaaagcagggtgagtcattgcctcacgcgggaagcgcaaggggtcagggagttccctttcctagtcaaagaaaggagtgacagacggcacctggaaaatcgggtcactcccaccctaatagtgcgcttttccaataggcttaaaaaacggcacaccaggagattatatcccgcacctggctccgagggtcctatgccatggagtcttgctgattgctagcacagcagtctgagatcaaactgcaaggcggcagccaggctgggggaggggcgcctgccattgcccaggcttgattaggtaaacaaagcagcagggaagctctaactgggtggagcccaccacagctcaaggaggccttcctgcctctgtaggctccacctctgggggcaggacacagacaaacacaaagacagcagtaacctctgcagacttaaatgtccctgtctgacagctttgaagagagcagtgaaaatttgcagcctgacaatgtgatagaaaagaaaaacccattttctgaggagaaattcaagctggctgcagaactttgcataagtaacgaggagctgaatgttaatccccaagacaatggggaaaatatctccagggcatatcagagtgcagtgcagaatgaaaatatggagtcaaggcccaaacatggagtccctcctggggcactgcctaatggagctgtgagaagagggccaccctccttcaggacccagaatggtacatccactgacgtcttgcaccgtgtgcccagaaaagctgcagacactcaatgccagcccatgaaagaagctgggagggaggctgtaccctgtaaagccacagaggtggagcttcccaagaccatgggaacccacctcttgcatcagtgtgacctggatgtgagacatggagtcaaagatcattttggagatttaagatttgactaccccactggatttcagacttgcatgagactggataatttcaactaatctcttttcagtttaattgattctttcttctgcttgtccaaatttgcagttgaaaccttctagtgagtttttcacttcaggtttgtttgtgttgtttgctataggctatacctctttgttttagcaacttttctaaatgatttttgtaaagtctgtgtttttcttcctgtatgtttttttaaattactattccttcagcttgcctttagctgatgtcttgacaaaagttttcttaaatgctatctgccaacagagaaagagaggattggggtggggggagagagggagagtgggagagagggagagagggagagtgggagagagggagagagagagaaggaggaaggagaaggaaaaagaagaggaagaagaggaagacgaaggaggaggaggagaagaagaacaagaagaagagaagaaggaggaggaggaggagaaaaagaaaggagaggagaggagagggagagagaatattcacagagaatattctctttgaagagatttggttctgtgctggggtactcttggggcagtgctgcattgcttagcctggctgtttacaactctgtcttaggcttcactttctgcttgtgctgagattggagatcagccaaaggtgaagccttagggcttaagatatattgcatatttatttgttttgatttatattgactatattcccccctggaatacaatcttcatgagaatgagaatttttttttccactgatacatttccaatccctagaacagtgcctgacacacagtatatgctccataaatgtttgtggagttaaagaacagatttggatatattttgtaggaattgaccaaatagactttcttttgttattatgtaggcactgaataattctagtacttgcttctaagcaatacattaacatttgtcttgtgctttcatcttctaatcagttcaaatattattttctcaatatctatgatatgtcaggtgctatgt

SEQ ID NO: 472819 - DNA, 473 bp, Homo sapiens
catgggtgggagtgatgtcgaaggcagcaagttcacagagagtaggctctgtagatggcctctgtgacactttccaaaacctgctgggctgctcagaaaattattacttggctctgcccaggttcaagggatctaggagatgtagtctccagggtgtccaggaaggtgagaacttggtgttgatgagtgctagtgacgtgtaccacagtgtgtgtccatcacctgaggccatgcttctctctgctgctgaagagggcatctcagactatattgatgtgtggcatagaaccatcacactgaatggggctttggtagtctccagaagtaaatggtattcccaacctatcactgatctcccaagcaatgctgtccagggcaccagtgctgactgcacaatccagatttctgggaagagaaagcagtccaagacgctggcatgctgtggggtttaggccatatgaatattaacacct

SEQ ID NO: 472820 - DNA, 1419 bp, Homo sapiens
atgaataggaaacaaatcttcattgtagtaagcgcctgacagtccattgagcggatgatggtgccattgtctgtgataaagaagaccgaggagcggccaggggaaggaagttctgttttagacacgtcaattgagatgcctgtgagacatccaaatggatgtgtcaatggggctgcactgaaggcaggcctcgcttattcctgggtccctcccgtgtttctgctcgctgaagaaagttctgggatacatgtgcagaacgtgcaaaataatcaaggtttgctgccagttatgcgcaatggtatagtcgctgtgggaaacattttgatggttcctaaaaaggggacttttaatcctgcagaagatgctggttacaagagaggttctactaggcagaaaaatctgcctggaagatgtgtccgtagatgccccttattttgtcttgctcaaggtgatgggaaggaggatgaagagggaagggagacaagagccttcagatgacctgacacccttctgtagtcatttaatcactttgggagagtggggagaagcgtttgcagggtggatggattgttggataagtgagttggtgaatagatgagtggatagatgaatgtatggattggtggatagatggatgggtggattggtgagtggaaagatgaatggagggagatatgggtggatggattgatggatggatggatggaaggagggaggaagggaaggaggtggtgggaatgaatgacacaggaagggagaagcagcaggctgaagtggctctttagggagacacatacctccacaggaagagcagtctagattgttttagcacattccacttaaggattgcagtgtgacagcagagaaaatcctctccagtcaagtaattgcatccatttcatcttcccagccctcctctagatgggaggtggaggtgtgtgtaccaatctcttaattcagaaatgagacaagaggaggaaaaaggagttccggaggacagtggggaccccagccagagcctggggacttggctgccttggaaccagaacctggcccctcagaggagttgcagaatttcgatagaggagtggcaggaggtgtactggctgaagaggaggcccaagggaagagaacgttgccctcattggtctggaatcagcaggtacctcatggctggaggtgtattttcagactcctttggcatctggtgaggcctgtggattcattctcagaatcacatttttaaatgcacataataaaatacatagaattgcaaaggaagttaattatattgaaatacagttatcaaaaatataaataaaacaagtatgtggtacagtcatatgtgtgcttctttattaagtcattacaaagcaagatctatttggaggtctaataactgtcatatgcttgaaaaaa

SEQ ID NO: 472821 - DNA, 647 bp, Homo sapiens
acaaagaaggatgtggagtgttgatcaaagtatcaagtggagaagccagaaataattgacagaaatatggggaacccctggcctttattacatcctcatccaggaaagaaaaacttcctgtccacagcagcacctgagtggatcatggtctatgtaagaacattctatgatgtttccacagtgacaaaattactcagtgacgcatttctcagaacatatccatgtcatttagtgacacatgactgtggtacaatgtggcaggatttggtagcagacaggccagtgaagggatcctacaaagataccaaaggctgtgccagtaacaatgcaaatgcaggagtaaaaaggaggaaaaaagcattggaggaagatgcaggctacagaccttcaagcctagggcaaatctgttcaatctttgtcattctatgtggttttcttaggcacctctctgttatctcaaaagtcagcccaattttcagtcaatccaatattgacttactgtttaatcccttatttgaaagaaaactttttctctctgaaagtccattaagtcactgaccctgagaagccttcctgaatctttttggcatttggtcttctctgtcttcttggctcccattgccctccatataaactcaaatggtcaa

SEQ ID NO: 472822 - DNA, 551 bp, Homo sapiens
acccatttgcttttttttttttttttttgagacagaatcccatacacccattccatctgctcagccttgagcccgtgggagaatgtaccatgactagggtcagaggctgtcctatgcccttaaaggaaaacatgagggtgtgcaaatgtataaggagaaaagcaggggagaacagaattgggttacaaaaaagaaataaagagaagaaaggggaaagggaaaaccacttaagtcaacattgctcatctctcctccaccttcccagccccagagcccagcagggctcacttggacaatgcaatgtccttctcatcaaattccctgctcccacactccccagctgcaacccaagctccagccagggtctgcaggaatcttttaaagcatacatcaggttgtgcagatgtgtccctcccctgcttaccatcctccttggcttcctctacattgaaaataaatccaaaattcatgctcactctaaaaaaatccctatctgacttggtttctgcctctctagacactccagccatgctattctgctttttgtaccc

SEQ ID NO: 472823 - DNA, 540 bp, Homo sapiens
tgagctgagcttagtgtcttcgtctagaagataatgggagataggccccttaaccacagacccaagtcagacatccttgactacaattttgtctctcagttctcaattccacatcaagggcttttgaacttcatatgtgcttccaaaatgaaaagcaaatctgaaagttaccttggaatacagccttctcatatcctcagcccagaacactgtgcagtactttaccattcacctcaagcaaaggtacagctgaagctgtgtgaaggtcgaaagcttagtcatttgataaaaaggagaggctcaaaaagggcctggaagtgggacattctggtttgggaaactgggctccagagaaaatgttctcaaaatgtggtccccagaccaagagcatcagcatcatttggggacttcttaagaaattcgaattcttggactccactttggatctactaaattagcaaggctctgtggttgggagctagcaatctgtgtttcgacaatcccttcagacaattgcgatacatgctcaagtttgagaac

SEQ ID NO: 472824 - DNA, 721 bp, Homo sapiens
tgcctgcctagacctgtgcaccatgtctggcaccaacagagacccaggcagtatggcccaccacaccctgtctgccactttgcattctttcccggattttcctctttcagaacctgtcactcggttcctgcttcaccctgtggtggtaagggctgagtcctcctgggtagcactgtcttcaatttcaggcagaagtgctaatggtgaaatctccgagccctttgaggaggttatggggccactaaatcatttcgtgaattatctagtcactgcttccagccctctaggaacccactcttatctcctggccctccagcgggctgctccactgacctgtggctggctgcctggcccaaagagggctcgacatccaccttccccagacgggatgcgggctccttccggaggccagagcttcttaagtgtaaagtgcacacacaggtcactggataaacatcttttggcaacttgtaagataattgtggatggtttttgaagtattccaaacagcaaagtctttctaacatgtattttggtgcttctattttgtcagtgtctggattatggcttagatgggctgatgagtggcccatcagagctgtaaggcgtgcatgggtgaggggtgacggagggagaagagcactccaaggaggcattggggacttcattgctggtccctggtgtgaggtcactggcttctgcatttcagaactcctgggct

SEQ ID NO: 472825 - DNA, 998 bp, Homo sapiens
tccaacaagactgagggtgcccagggcaggcaccagcccaatgccatcaccatcacagagccccagaatagaatccatgaaactgcaaatgattctacagatggagccccaaatgaccaccactagcacctgctatcgaggacccctagactgacccaccaatctgttcttgcaccatgacactgaagactcccctcctgaggaaggctcaactgcagagccccttctacaccccagctcagcaggaatttgaggagcagcaggcttttgagaagagccgcaagttccttcggcagctggagatttgctttgcagagaacccctcacaccaccagaagattatcaaggtcctccaaggctgtgcagactgccttccccaggagatcaccgaggacacctttgacccagaagatcatccctgtgggtctgtgacagcaaatcctacaagagcaaggagccccatgaagccacccagaacaggactgtcaggaccaccagaaagagagatgcctatttcaggaattgacacctcagagacttctcccaaagcccctagagggggtttggctaaagacagtggaacacagggcaagggtccagagggggaacagcagccaaaggccacagaagctacggtgtgtgccaataacagcaaggtcagctccactggggaaaaggttgtcctgtggacaagggaagctgaccgtgtgatcctcaccatgtgccaggagcaaggggcacagccacagaccttcagcatcatctcccagcagctgggaaataagacccctgctgaggtttcccaccattttcgagaactcatgcagctcttccacactgcctgtgaagccagctctgaggatgaggatgatgcaaccagtaccagcaatgcagaccagctgtctgaccatggggaccttctgtctgaagaggagctggatgaatgagactctgggaatcatctacacaggaccaaacccaacaggcgccctggcacc

SEQ ID NO: 472826 - DNA, 534 bp, Homo sapiens
aaaccataccagacagcttgccaagaatttctgcataggctgactgtctgtatttcctcatgattgtggccatgttccctctcaattctctgaagttgctgttcctctcccacttgagtgcggctgcagatcttggtctgagggcagcaagggcagtaccacggcagtggtactggcagaggggcttctgggagctccacttcagagaaatgcagagctgctgctactcagaatgttcagccagggaacaagggcagcaggaaaactgctgctgtggctgtagaggagggacttttggttgcctctgggagcccatccccagggaatctcagaaccacttccacctgagggtagttagggcagtaccactgcagctgcaatggcagatgggttgtgagttgactctgggatttcctcttcagagaaatgcaaagccacctccaactgacatgttcaggtgggggcagggtagttgtactggagtcccagacccatccagtgagaagtggggatggggacctatatgaacagtca

SEQ ID NO: 472827 - DNA, 484 bp, Homo sapiens
aggggcataagggtgtttggagggtattgggtttctgctgagagatctgctgttagtctgatggacttccctttttttccttctaacagtcaggcctctctgctgcaggtctactggagtttgctggaggtccacgccagaccgtttgcccggatatcaccagcggaagctacagaacagcaaagattgttgcctgtcccttcctctggaagttttgccccagagggtcacccaccagatgccagccagagctctcctggtgtacaagaaacacagtaccagcatcttctcccggtgaggcttcaggaagcttccaatcatggcagagggcaaagtgggagccagtgggagccagtatttcacacggtgagagagcaagagcgaggagaggagaggagagagagagcacacgagagggaaagggaggaggtgccaagctcttttaaacaaccagatcttctgtgaactcatagagtgagaactc

SEQ ID NO: 472828 - DNA, 623 bp, Homo sapiens
gatcagcgtccgagctaaactccggtcgcagtgtgggacccactaccactcttttgtggtgtatgtgtgtgtgtgttgcggaagggggtccccctcactatggtccttcttccagcctcaaagcagatagctctcttacctttctccgggtaccgatgcgcatcactgagcatcttgctctccagtcaaactgtcagcacccttgcttcatctttgtctgtggccaccattaccgcacttcctgtagtaggaaactggctgaaaaagaaaggatgtttgtcacggaggaccctgatgtgggacgttctaaaatttaaggttttcaaacagggtgtgtttgaaacagacagcgccctgagaagtggaggcgctctctgggcctggcgcaggtctttgttccagcgcagcaccccttctccaaaggcactggcaaagtctattccgcacacacagttacactgtcagaaatctgcggatcttagatttgtctccagacaaggctggagaagagagctcactaccagacaaatggcaattggcatgttgccttcctatgagcactttgagatcccacagcccctggctagtgcaaaaggaacctcgccctccactccttgctgaca

SEQ ID NO: 472829 - DNA, 561 bp, Homo sapiens
tttgagccaggatgagccaggagaaggaatttcacaagacaatatcatcaattaaggcaggaataggccattttcacttcttttgtggtggaatgtcatcagttgaggcgggaactggccatctggatgttcaacaacttgttcagtatacaaatgtgaaagtaatgcacttattcaatgctagtgaaagtgccaatggacatggtggaagccctggaacgaggtctttggagggactgggaagtgagaagggaagttgggcattagattacatgattatcattagatgcattataaaaagagttagcaagcttcccaaatcgatatggcacatacaaaccaattctgttgattttgcaatggtggtggtgatggccaatcagagtggagttagcagacaagagtgtgtgagggactgaagtgctgggacacttccccacggatgtcccccatttctgcatattttttaagcagaggcactgactgcctttgtttcagactatcatttcaggggtcgttcgtagcgagcatctttggaaggtactgataatgcttccctct

SEQ ID NO: 472830 - DNA, 732 bp, Homo sapiens
tgaggagtgcctaaagtttgtgtggtaactgacatacaccaggtccctggcagaatgcttggacaggggcagcagtgcctgtgctggagtcctgctactggacagatggggttgctttcagtggcagcagttgtaggcaggtggctggaaagcatgcacttccctcatgttttgaatctagcagtggaagcccatagcagcagtggctgcaggcaggttaactgccaagggcttaagctttggtactggtggcagcagccagccacagcagtggctgcaggcaggaggtatcaacagggcttcagggatgtggagacaagttctgctgctgccagaaaaagaggacaccccaagagcgcattcttcaatcttgcacaggaaggaattcaaggcgagttgtggggtgcagtgagaagaggtagtttattgaaagctactcagttacagacaaaggcatcctcgtctttgtcttaagtttttcttagataggggtcttatctatgtaaaagctaaactaagctgtatctacatgcaagtgggctgacggcatgacaaaatttattattcttttgatttaaagaaagctatcattgttttcttttagtgcataaatacttcaaagcataactataattatcttgaaagcacatactgttacgggtattaggacatctgggctttctgttgttgtaggaatgcatccttgcaggatgaggactgggtagcaaggct

SEQ ID NO: 472831 - DNA, 577 bp, Homo sapiens
ccctgtgtctcagctgctccagccatggctggaaggcgccaacgtagagctcggtttgaggcttcagagggtgcaagcctcaagccatggcagcttccacatgattttgagcctgcaggtgaacagaagtcaagaattgggttttgggaacctttgcctagatttcagaagatgtatggaaacacctggatgcccaggcagaagtttgctgcaggagtagggctctcacagagaacctctgctagagcagtacagaagggaaatgaggggttggagcccccacacagagtccctgctggggcactgcctagtagagctgtgagaagagagccagcgttctccagaccccagaatggcccctttttcctgcagtgtgcatttattctttaccctacaagaaaacagaatgtgaccagatggttgttactaggaaagaattatcctgaaaagaaactagatgccagtttctgattcttaattctcactctgtaacttatgggttaaaggccctgaattttaagcttcattctttttggagggataagtgtgaccacgagttctccttttctccaaagac

SEQ ID NO: 472832 - DNA, 877 bp, Homo sapiens
gagttaatgggtgcagcacaccagcatggcacatgtatgcatatgtaagaaacctgcacgttgtgcacactcaggcccctcttctgccggtctgctggagcttgctgggggtccactccagaccctgtttgcctgggtatcaccagcaggggctacagaacagcaaagattgctgctgttccttcctctggaagcttcatcccagaggggcacccgccagatgccagccagagctctcctgtatgaggtgtctgtcagcccctgctgggaggtgtctcccagtcaggagacatggggagccggcaggcagggatgtttaagtctgctgaagctgcgcccacagccgccccttcccacaggtgctctgtcccaaggagatgggggttttatctataagcccctgactggggctgtttccactgtgagaagaaaacggcctactcaagcctcagtaatggtggacaaccctcccaccaccaagcttgagcatcccaggtggacttcagactgctgtgctgacagcgagagtttcaagccagtggatcttagcttgctgggcccctggggtctaaatattatgttaacctcatagaagggatttgacagatttctatctctttctagtctctaaaccagtttaaataacataagaagtttctcaaatcttcaagcaatgttttgcagtttttagtgtataagtcttttgcctactttgttaagtttattcctattttattctttttgatgctattataaatgggattgttttcttaatctccttttcaaattcatcattgttagtgtatagaaatgcaactggtttttatgtatttattttgtttcctgtaactgctgaattcagctattggttctaacc

SEQ ID NO: 472833 - DNA, 711 bp, Homo sapiens
ctctggggatagtgtagcagcatttctcaaaatgtgttccttcatttcatgggtgtttggtaatccagttgctgaaggacatggacagaacacagaattggtatcaggatttgcccacagcagcaacagcagtagcagcaacagaaacagcagcagcagaagcagcatcaggaaagcatattattttcacagcctgacccactctggttcatctactgggctgagagctgaaggagggatggtagttaccccaggcaaaattccagagacttttagtgacaagatcttcaatgaagatgagctggtccatactctttgcatggagttctcttggtatcaacatattcaaagaaaatggaagaaggcagaactgggcagagggaagaaattgagctatgatgcaatttcagctgatttctcagacaaccctatagggaatttggaagcaaggatcacctttccagagttgggatagaattataccagactatgtttagaagtttttaacacttatgaagtcacaatgaccagtgtagcggactgtggtggaataagtaatttttattttcttctttataattttccaaattttatgaaacaagtatttctgtgggttggatgtttatccccaacaaatcttgtgttgaaatttaatccccagtgtggtggtgttaggaggtgtgacctagtggaaagtgtttgggttatcac

SEQ ID NO: 472834 - DNA, 713 bp, Homo sapiens
agcgtggcacagagcagggcaatgttatgttatcttcactcttctgcttctctccagtagcagagagacaatgttgtttctggtttccatctttaataaacagaagagaattattaggaattaatgactggataaatgtccccttcatgaatgcagtattctctagagaaggccaggttggcacagagggctcagggagagacccacaagagctactcttccacaagccccaaatctctaaatctgaacccttggaccaaaccacgggttacagagatacttgcaatggtacatgcacttatgatcagtttcaaaccactgaccagctacaaatctggccctttgtcaactaccagggcaaagaagatttaccaaaaccagagtctgagaaaacaaatgggacagtgagcaaagaaccttggaacactactggcaaaaggaagagaaggaacttcacgtttgttgagaacctacaatgtatcatgaattgggtacacagatgattgaatgaggaaattgtccttcagttcttaccttacttggacaatatgaagattagttgtaaaagtgttcagagtcctgcatagcaagttcttgtctcagctcttactcaggctatgaatgcgcttggtgagtgtttactggaccaattagctcctttccttgctaaaaaggctgtgtttttctggagtgcctaatctatttgtagagct

SEQ ID NO: 472835 - DNA, 507 bp, Homo sapiens
cagcatgctgtcacctctcactaacaggatggcctttggggcactgaggtggaggtgggacagggtcagcggctgtgttcacgttgtcttcgctaccattacctccaaccaagcagctggaaatgcagcatctgagagatcatccaataaacattcactgaatatctgtttgattccaggcactgtgcctgacactggtccttcagaaagtattccagaagaaggcattgaaatcatgggacatgagagctccatgcatgttattgccgctgaagaccttccagtgggacaagatgcagaggtggaagacagtaatattgataatcttgaccctgtggaaaaatccatgggaaaatcagccttggtacatttgttggttcagcaaattcttatgcaacaccgtctggtgttctgtactggcagtgaagatacagtgatgagcacagtgcaatttctgcccatacagaacaaagaagcaagggaagagagacataaatgaacatttgc

SEQ ID NO: 472836 - DNA, 577 bp, Homo sapiens
tctctctctggggtggagccaccagtgggaggggtggccactgtatctgcagcttagctgacagccgttcctgcctgctggctctggaaagtctgggtgaggatgtgtggaaacacctggatgttcaggcagaagtttgctgcaggggtggggcttttatggagaacctgtgctagggcagtacggaaggaaaatgtggggtcagagcccccacacagagtccctaatagggcaccacctagtggacctgtgagaagaaaggcaccatcctcaagactccagaatggtagattcactgacagcttgcactgtgtgcctggaaaagccacagacactcaacaccagcctgtgaaagcagctgggaggaagcctgtaccctgcaaagccacaggggtggagctgcccaagaccatgggaacccacctcttgcatcagcatgacccagatgtgagacatggagtcaaagaagatcattttggagctttaagatttgaatgccctgctggatttcggacttccatggggactgtaggccctttgttttggccaatttttcccatttgaaatggccgtgttt

SEQ ID NO: 472837 - DNA, 888 bp, Homo sapiens
acgccactgaggtgtgggctggtttgtttcatacaaatggaaaaatgatacgctgggccctgtggatctgggttttgctattgggaataataagggctcatttcatggttgtggtgaagcttaggttcagggccaaacaaacaccctgttatctgcttcacacctccttctgcaaaacgccctgttacaggtgccagtctctgcagggggccacggggagcagctctaacccagggactgcggctccagagacatggaggaaagcaggaggtagatgtcatcacacccacttcactgatgagaacaccgagcccctgagattcaacaacttgtccaaacttgcacagctggaggacggtagagccaggacagggcccagggtggtccggcttgaaaacccaggccccatctgctgtaccaagctgaaaggacaggtcagacaagaagttggaagaattttcttgaagaattcgacacactgggggctccccagcgaaagagcacagccagatcaccctatagtgacaatgtgtcaacagcccctcccatacactctgagctaccagggcagctcccaatatgagcagccgctgatgccccctctgcactctttcaatgcagatgctctcttggtcttaggcagagatttcatgtgtgtgcaggcaatgtcaaccacattaccaaactgccaaatggcagaggcatcaccaactgtcagaagcatcctgatttcagagacatgaaaatgtggggaaaatgtgtgttttagaatcagtgaaatacactggctccccaaaactgtgaatcctgtctttttcttaaggtcaaaatttggggacattcttttggttctgtacacaggtttgtacatagcatgtttgtacacaa

SEQ ID NO: 472838 - DNA, 667 bp, Homo sapiens
gggaccctcctcccacctctcagccagagacaggcagctgataatgaggacagatcacagagagcctggcagagccccctgcttctgtcagggatggccctggtcatggctttcatcttccacaagcatgtggaacatccgtggccccgtgggaagaaacttgaacgctgggcaaggagagggagctcaggggtcttcgtttctcagttctgtgaccaccacgcagcacctactgggtaccaggcctccggggctgtgtgcaggagtggaggaagagtaagattccaagagaatgatcccagagaggtccctgctgagaaaagaaggcagcagggagccggccagggccaccctgccacaaaggccaagaccaaggactgctgggtcaacctaatagcgcctgtctctgtagaaggcagctgtcttaaattggagggagctccagcaagcggcaatgccatccgtcgtggggaagagaaggagaccctgctggatggcgttgatgagctgagggagagaaaagggtggtgatgccagggtgtggggctgatccccgagtgggacccgtttcctcatccgtcaaatggggctcagaatgtgacccttgaggagagccgtgaggacagagtaaaataacagggcacaggtccctgcacaggaatctgtt

SEQ ID NO: 472839 - DNA, 1110 bp, Homo sapiens
ttttatgtccttgagaacagaatgcatgtgatgattatatttttcaaagatagccacaacatcatatcttacctcacaagttattctacaaacttaccactctctcatcaagaagtggagtctaattcttctcccattgctggcatttgcctatttctattaatagaacgcagaagaattgacgctataagatttctgaggttaggtcactggctgatctactatagagatgacatcacattaattggaccagatgagaaaactgaggcacaaacaggtcaagaaacttgctcggtagcacataccaacagcaagagcagatgtgcttgtaagaaacaaagatcttgttttcatacaaatgcgctcaaaataaaacacaaaggaagaaaaatacccagagcacataatgcaaagaacaagaattgcttctaaatagaatgttttacaaagttttccataaagcctcagctgctcctcaagccacaaccggcttgaacatggatggcagacatgaaattacagtattcacaaaattagtattcagtttgcagaatctctctttccaaagccttcaggcatactttatgcatgcacaattacagaagcagcctgactctttgatcattctctggtattatcccttcatttcacataggaagaaacaaggacaagagcaatgaagtcacccaatcagagtaaaacagtcaggaaaatcacatggagagtgaaaatatcagaaagtcgctaatgttgggcttagaactgatcaaagagttttgtgtacgatagactgcctaatggtaccaggcctgacagcctgcagtgtccccctcacatcaagaatgacctctgaaggcaatatttccaaagacttgcggcttaacaggattgttaagcaagtgattagactttgctttactgtgaaagaattttggtttataaagagttgaagcttctcacaaacactggtgccaatctaggtcaacaggagtaagtgagaccattgttccatatcccgcttaaaaagagaacactacttcaaagacaagaacaacatcacctgacaaaaataaaagaagttatcggttttaaaacattgtgcttatgtgt

SEQ ID NO: 472840 - DNA, 642 bp, Homo sapiens
gctgctaaagcagcgttcttatgccatgaagctgagagatgactgggttcttcatgacttaaaagaactgtggctggaaatttggattaagttgcagcactctttcatggagaacctgtacgataatcctggtgaggatgcccccatacaatccaaacaggagcctgacttggaagaaaagaaaaggtcaaaaataaatggcacgtccagagactgggaaagagctagaaagacgacaaaatattacgtgatgatatctattaaatatatccaagttgaagtctacacccttgctactgaaagtgtggcacaagaactagcaacatcagcaccagatgggaacttcttggctttcccacatggcccaaaagttcatattacacctttaaacatccaagattttaatgctgatttttttcaatgtttcaaactatagactaattacctgagtatcttaaagacaaacagctctgcctattttttcaataaaaatgttattttgtatgtttaaaaaacatttatatgattttttaaaataacttttttgtgtatgtgatgaatttttaatattttcaaaacagagggaataggtgatttatagttacctattatagtgtttataatagtaaatgttgcattatc

SEQ ID NO: 472841 - DNA, 519 bp, Homo sapiens
tttgttagaagagaggtgatttctttgaactgccttcttcctatgccagccagttgctttctttggattagtcttccagttcacaaattaaaggttgtgactgagttcttcattttctgcattcttgttggtgagtttctaatgtccatcatttctcctggagatctgtggaactttgaacttgagagagatgatttaggacatctggtggaagaagtttgtaagcatcgaagcattaaagaggaagtagaacacaaaagtttggaaagtttgcagcctggcagtgtgatagaaaagaaaaacctattttctggggagaaattcaagccagctgcagaaatttgcttaagtaacaaggagctgaatgttaatcaccaagacaatggagaaaacatcctcagggcatgtcagagacagtcttggcagcccctcccattacaggccaggagctctagaaggaaacatggtttcattgaccgggcccagggccccttgctgtgtgcagcctaggtcttggtg

SEQ ID NO: 472842 - DNA, 2232 bp, Homo sapiens
tagtgttgagcctgcagatgtacagaagacaaaaattgaggtttggagacctctaactggatttcagagtatgtatggaaatgcctggatgtccaggcagaagtttgctgcaggggtggagccctcatgtagaacctctgccagagtagtgtggaagagaaatgtggggttggtgctgcctagtggagctgtgagaagagggccaccatcctctagactgcagaatggtaggtccactgacagttttccctgtgtgcctggaaaagccacagacaatgccagttgtgaaggcagctgggaaggaggttgtaccatgcaaagccacaggggtggagctgcccaaggccatgggagcccacctcctgcatcagtgtgggaactgaacaatgagaacacatggacacaggaaggggaacatcacactctggggactgttgcggggtggggggaggggggagggatagctttaggagatatacctaatgctaaatgacaagttaatgggtgcagcacaccaacatggcacatgtatacatatgtaactaaccttcacattgtgcacatgtaccctaaaacttaaagtataataataataaaataaaacaaacaaacaaaaaaaagcaacctatcatacattaatgattgaactttaaatatagtaatatgtttttcaaggaaataattactagatggtatttaagacaattcatacattgttgtgttattttattaaaatgatcacatttttataatttaaaaaaaaaaagaatctccaagggctggtagtggaattctgctctatataagttcagtgatactgcacttggagagtaatagggagcagtgagtggaagcactgccaagcatatacatcttctttctccacagtcaggtgtttttggtttttgatgtctctatttttggcaaagccacctcttaacatttttttttctgtatcttgatttcagtttggtttagtttacaatctacatagtcattgtgcttgtgttttttctgcttcttggttttacagtctgttaaggaatagaacctattgatgtcacaatgtcagttacctacttctctgatgtttcggtcagttatgtttgcttgagtgtttcaggacacctgcttcctgatgttaacatacttggcagcagacctttctcaagcttactcttatttccaattattgcttcttaatacagaaagtatcagtggggtttattcactcactctttcattctttcaatcattcgtgtattagttcagtactgacagtatcaaaagaatgtttgctctacttttatgaggtttttgtctataagattagaattaatcagcatcatttattgaacaatgctacttttccaccaatttttaaattctatggttatttatattcaaagtcctagtcttctttctattatagtctgaccatctgacactattttaacactattcaaattatgcgcttttaatgtatatttaaatatttctccttatcttaggattttcatcttcaagaaaatctttagcaattcatttggttccttgggaaaacatgctgctggtacttttatttggagtgcattttatttacaatattcttttagagaatttatgtcttttcaatattgatcaatctcatggaagaatatgtcatggcattccacttactcaagtatacttttttatctctcaagaaattcttgccattttcatcatatcagatctacaaaattcctttaaacttatatgtagttattatgcattatattcactgttacaaatattatgttccaacttttatattccttatttcacttaactgtctaaatttattggctatggggaataaaaaatagtaaagctaaaaatgatcacctttatatcattgctgactttaatgggaatgtacctatagttaaaataataagtatgatattacctgtgaatttggaacagccatttttaatcatgattatgaattatacttttatgcatattttaaattttctttttaaatcaaagttttttttacttttagcattttaaatatatctaataaatactttttatgtattactataattgagagatagctcatgaaatcaagatattttagaaaaattcagaattttcctaaccgtaatagtcagagatttggaaagcccaactcttaattttatttttctttgcttattccttcttttcttctattgcagacag

SEQ ID NO: 472843 - DNA, 574 bp, Homo sapiens
ataccatctcatgctagcagctgtgcacatgttactggagcagtctgcacagagcatgcaggaaccagagtgggcaaaaaaaggacctgtcatccaaatatcggcaatctttgctctgattgctgattgctgtttctggtcacaaagatggacgcaaagaggaggaatttcagaagaagatatggttattatgggtgatgacagctgcatgcatgttatttctcctaaagaccttttagtgagagaagatgtggatgtggaagaaagtgatattgatgatcctgacacgctgtgcaatgagatgaaaaatacaacagagactagccagaaagagaataaggagcattgtcccaaccgtctgctgagaaagaaatgcattcttcccagctacggcattcagtcagaagttctgcttcacttaaaaaatgagaagccttataagaatgtcactctaacccctaatgaagagagcaaagaagaacagtgacacgataactttttctgaacccctcagagaactgaagtcacaaaaaaatagatgaactgaattccaaaggggccataaacaccttca

SEQ ID NO: 472844 - DNA, 2531 bp, Homo sapiens
tgctctctctctcctgccaccatgtgaagaaggtgcctgcttcccctttgccttctgccatgattaaggcttttcaggtatttgaagaggctttggtgttttggtccaagtttttggtcactagagccatatctgcattagggagtacccaaagccccgtaaagctgtggttcttgaagacttgtaagggtatcaccttggtggtcttggataagattcaaaagaatgatctggattgccagaaagatgagctggtgtcatccaccaccagctcaggcccacagggagtaccaccagggcattgccaatgtgcacataaggctcaagtgtctcatcgggatgtgggctccctgttgcccctggtaggcccagaaaagccatctaagagtcaaggcctgaaattaaggaccctcagagcccacttggtgcccttccccactatggccaagcaagtacctaaggtgtcacacgaccccaagtccactggctccattgccagcacagcactagaactttcctaggagtttcagtctttgtggcctagactgcctttcaagtttatttggaaccccagagccgtttagccctctgtagcaaggcttgccgaaactgaagttccaaccagtgggatggcaatttctctgtggctagggctggtctaaattctccctccatggacatcaactgagttcttcctggtgttggcagcactgagttccaatgcaaaatcccaccactgtgtggtccctccctaaagcacacagattctctatctgggtcactcattcactactgtgggatgggtgaggggtagtgttggcaaatcaagactgtctaccctcttcaatggtctttagtgcctctttcagtgatatgaaattaaaaacagaagggtatattagcaaagtatttttggtgttgtagtttgggctttcatccagaagatagcatttattagtaatgaccagtagatatggttatactcaactgcatggctcctttatatttcctagtatttgtagccatgaactatagtgtgttgggaagagagttcacctcctcaccaggtccattcttgggcctttgaggagcctctgctactgatttgtgcacattgattttgtttccttaaactttactgaatttatttatcatatctactagtttatcagttacaaaaattaattagttacagttggtgttcttttccgtgagacttttctttcatttataactggttttcatttcctttctaatttaaaggagcatatttaacattccatcttaaggcaatgtgatagccatgaggtctttgtgtgataatggtaaaaaggaagttaatctataatggaagtcaacagtagataaggaaggagtattccttggtacccttccatcatttacaacgtttcacaaaacaattcaggtgaattcagatcatagtaatttttagcaaaatattgtaaaataatatagagtatgactaattttaataaaaatttttaaaattatatatatatgttttctatgtatatatctacatctatttccagctgccaacatgtaaagaaacaattctaagatccattttaggaaatattgattatagatattaacggatggtagagtttgttatgtattattaaattgtactttatcttttccactttttctatttaggttgttgcaaagtaatcttattgtatttttcgtgacattcaattatttatttgcaccaagaaatattgttcaggacttgaagactgagtaaatgtgcgtgagctacacaaaatatattttgttattagtaaatcatctattataaaactgagaagtctcaaaagtaggtaatgggaaaaaagtgtttccattgtttgctttcttatttcaaatatctttatgaaaaattcagcattttaataataaagagcaataattaaagatgactgttatttattattttggtagacagaaaggatggtttcatttatatttgttcaattattttctttaactcttattctatatataggccagttgtattttttgttttgttaattagctgcctattaagttttcttgcataattatattcagtttgtatgaactagttataaatcaaatatatttctttttatttataaaatagcagggtgttgctttgctcatctatcttttcattagttaaattttgatgtgttaaagtttggcatttgatgtagtttaattgacatcattttgaggaggtggggaatgaagagatttttctctatgagcatacagcttagaaagtcatcattccaacttaacacttgattaatattcaatcacttttttaatgttattttaaaatcatgttttctttgaagactttctgaactttgaaatacaatttttaatttagaaatcattggtatttttctttttgttttaatttttacactttattaaacatcattttataaacacagaatatacattaaaaagcataataacaattttactatggttatttctgtcattaatgggtc

SEQ ID NO: 472845 - DNA, 1538 bp, Homo sapiens
cagccagaagtgctgtatcaaggctaaggggcaacaggagcctgcctgcacccctcagcaaattcagggaaaactaggactgttgggccagcagccctatcagatgtggctcacctgtccaccagtggcaggggttggtggggatgcttgtcctgctttctgggagcttcctaggacaataggagtctacccactggttgagttcccacagaagtggaactgctgggccaaaagctccagcaggcattgcctacctggctgccagtggcagtgtcaggcagcgtcgtgtgccctgctgtctgggtgtttcctgggacaacagaaagctgccccctctagatcagtccaaacagaagccagactgctgggccagaagccccagcaagtgttgcctgccttgcaggcaccttctgtctcctctgctcttggtgggatccaagatatgaaacagaaacaagaacattatgtcagccctcaggtagcacccaaacaggttagaacaaagaaacaattatttttcaataaaccctgctctgctccttccagaaccagaggccagggttccatgctgagaacaccggttaacatcttcaggactgcagcaaagccatggagagaagagtatgctcagcgtgaaactaagagacagcttacagagaatgacaccctgcaggtagcagctgctgctgacacccaacgggcagaatatagagaagtaatttatgttggaccacattcagagtcattctgggctgcatgcagcccatgggccatgggttggacaagcttgttttgtaacaacacagtggaaaaatggaacccttacattgataccatcaagaatgatgctccagccatggctgaaagggtccaatgtagagcttgggctgtggcttcagagggtgcaagccccagtccttggcagcttccacgtggtgttgagcctacaagtaaacagaagtcaagaactggggcttgggaacctttgcctagatttgagaacatgtatggaaatgcctggatgtccaggcagaagtttgctgcaggggcaggatccactggaagcttgcactgtttgcctggcaaagtcacagacactcgatgccagcccatgaaaggagctgagagagaggctgtaccctgcaaagccacatgggtgaagctgcccaagaccatgggaacctacctcttgcatcagcgtgacctggatggtggccattcggacaagctggaaagcatagcctccagccagaagccagaaatagatacttcgagggaggagcaaagggaacaggaatttatgctgagttgggtgggaattgaacaatgagaacacatggacacaggaaggggaacatcacactctggggactgttgtggggtggggggaggggggaggggggagggatagcattaggagatatacctaatgctaaatgacgagttaatgggtgcagcacaccagcatggcacatgtatacatatgtaactaacctgcacattgtgcacatgtaccctaaaacttaaagtataataat

SEQ ID NO: 472846 - DNA, 649 bp, Homo sapiens
ggtgtcatgcagtggccgctgatatccatatgcagaagaatgaaactagaccctgtctcttgccatacacagaaatcaaatcaaaatggattaaagacttaaatataagacttcgaacaatgaaactactacaagaaaacattggtgaaaatccccaggacattggtctgggcaaagatttcttgagcaataccctacaagcaaaggcaagcgaagcaaacatggataaacaggaacacatcatgttaaaaagcttctacccagcaaaggaaataatcaaagtaaacagacaagtcacagaatgggagaaaatacttgcaaactacacatctgataagaaaaacccctggaatacaaccaattcactcaacagacatcagacatcaggctatgaagaactatgctacttgagtgatgggaacaatttagggaagtcccataaggagtcttcagctaaaaccttgagatagcttttgggaaatggcatatggcagactctctaagaggagaagttgaaaagtgactcaagtttgtgagacagagtactaagagagaaagacaagtgattctaaaattcttatggcaatacaaagggtcagggatagtacagacaagctttaaaaagaacagagttggaaaacttacacta

SEQ ID NO: 472847 - DNA, 657 bp, Homo sapiens
gaatgcaggcacactctgaggtactggggttaggacttcagcatatgaattttcagggacacagttcagtctatgacatatccctttttaatctcagtggggtcccacagggagctgatctcacatcaccacttggaagcgatgagcctgtacaagttggtgctgcagggaaagtgctcatggacatagagggaggagctaaacttccacctcactcaccctcaagggtcagtgtgagtcacagccctacttctgtggggctgctgtcagtcatctcccaatctaaggcgaaaggtaccatagtcagtaacctaatcacgggagtaaaattcgtcatcttaaagttcctggggatatgcaagtggctgaggagcaaacctagaaggctggaaagcttcctagaagccctcaactttgagaaactactcacacccttaagccctgggattgtttgtgcctgaacactctgaccttttttttttccttaaacctttccaaactttcagcagagtgttgtccagtcacacatgcagccttttctctaagcaaactttcagcagctatttatgacatttaacatcttttgccatctggagaaggtgatagttttcaaaaccattctgccctggttccttttgtttagctgttttcccctca

SEQ ID NO: 472848 - DNA, 1776 bp, Homo sapiens
gtccaggacagctttgaatgtggcccaacacaatttctgctgggaatattgtcagcagacagccccttcaaggattgcctcaggttcagaaagcctgcttgctcatggttatgtcccttccctgggagaaattgccacagccactccaacctttagcaaccaccaccctggtcagtgagcagccaaccattgaagctctaacagtggaaaccacagtcactcaactacaacatttaaatacagtgggaataattggattccgaggtggcaggggccaagtggcagcagtcaactgtcaaaagcgagatatccagccttttaccagggtaactgtgcattggggaaagagaaatgatcagacatttcaagcactagtggacactggccttgagctgacattgattcccggggacccaaaacatcattgtgatcctccagttaaagtaggggcttatggacatcaggtaattaatggagttttagctcagattcaaattacagtaggtccagtgggtccctggactcaccctgtggtcattttcacagtgcctaaatgcataattgacatagacatacttaggtggcagaactcccacactggctccctgactggtaggatgaaggctattatggtgggaagggccaaatggaagccgttagagctgcctctgcctagaaaaacagtaaaccagaaaccatatcacacccctgtagggactgcagaaattagtgccaccatgaaggacttgaaagatgcaggggtggtgattccaaccacaaccctgttcaactctcctatttggtctgtgcagaagacaggtggatcttggagaatgacagtggattattgtatgcttaaccaagttgtgtctgcagttgaagctattatcatcaagtcaccatgcaacctgaactgggtgctttctgacccatctagccatagagtgggtcatgcacagcagcattccatcatcaaatggaagtggtacatacatgatcgggctcaagcaggtcctaaaggcacaagtaagttacatgaggaagtgaggcaaatgcccatggtctccactcctgctaccctgctttctctcctgcagcctgcaccaatggcctcatggggagtttcctatgatcagtggacagaggaagagaagactacggcctggttcacagacggttcttcacgatatgctagcaccacccgaaactggacagctgcagcactacagtccctttctaggatatccctgaaggacagctgtgaagggaaatcttcccagtgggcagagcttccagcagtgcacctggttgtgcactttgcacggaaggagaaatggccagatgtgtgactatatactgattcatgaactgtagccaatggtttggctggattgtcaggaacttggaagaggcatgatcggaaaattggtgacaaagaaatttgggaaagagagagataataaatttcctgaaggcagaaagggtatggtattcattgttataaatcctgaacctagcatgtgtctgattaatatatagtaaatgctatatgattgttgaattaatgtctcctttcttaagatagatatctttttagtcttatgttataaattaagtcataatatattaagaatgaaagtttatatagttatgttctaatgattgatgtcactatttttatctttctaacagctgttaatcaacatagatttattcttctatcatttcatgttaaaatcatactttttaaatatcagtgattatatcttacatatc

SEQ ID NO: 472849 - DNA, 619 bp, Homo sapiens
tgtaggcctctgtaggtgattgattgatccctctaatctttatgaagcaattcctgtactgtcttgctgtcatatacgagttatacgttataaacgatggcacagaaacagtccttaagtcaaactgttattgtgacaccaagttttctaaaaattttatgcaaaacgttggtggcaagcacttttcacagaatgctgacctgaatctgttacaccacttcccatttttttgtgacctggccaatgcaatatttggtttagggaggcccttcttgctaaaggactataattcttattatcaccaatttctgatattagtattatttagaatatggcagaatggtataggctcaggaccaaaaattatgaaagaaaaagaaaagaccaaggaaaaatgggatggatgcaaaacctatcggtggtgcatggaatcacaattgccaagtctgcaaatcccattccaattttcaattccattcccagcaccataaatcttagaggaagctctaatttgtcctgctatggaccgtccctcaaccaatcacttgggaaagaagtttccgactggctgtccctgggttacacatctacggttgtggagggattagagggggagaga

SEQ ID NO: 472850 - DNA, 513 bp, Homo sapiens
agcattgggagataaacctaatgctagatgacgagttatctctaccccagctctgagtcctgtgaatccttttctacagacccatctaacctctcccctccttcccaggctgctccttgcaaggccacagcaagtccctcagcctctgctcccccaccctataatccttctatcacttccactcctcacacccggtctggcttacagtttcgttccgcgactagccctcccccacctgcccgacaatttcctcttaaagaggaggctggagctaaaagcacagtcaaggttaatgctccttttttatttatccgacctctcccaaatcagttagcgtttaggctctttttcatcaaatataaaaacccagctcagttcatggctcatttggcaacaacccttagacgttttaccaccctagacccagagaggccagaacgctgtcttattttcaatatgcattttattatccaatctgcttctgacattagaaaaagctcccaaaattagatt

SEQ ID NO: 472851 - DNA, 1188 bp, Homo sapiens
agcagcgggaggaggcggcggcggcggctagcgaggagacagagctgggtcctgcagtaggactcccgggagccaccattatggtgaagaggaagagctccgagggccaggagcaggacggcggccgcggcatccccctgcccatccagaccttcctgtggcggcaaaccagtgcatttttgaggcccaaactggggaagcaatatgaagcttcttgtgtgtcctttgagcgagtgttggtagaaaacaagctgcatggcctctctccagctctctctgaagccatccagagcatttccagatgggaactggtgcaagctgctttgcctcatgtcctccactgcactgcaaccctgctttcaaaccgaaacaagctaggccaccaggataaattgggtgttgctgagacaaagctccttcacactctacactggatgcttctggaggccccccaggactgcaacaatgagcggtttgggggtacagaccgaggctccagctggggtggaagcagcagtgctttcatccaccaggttgaaaaccagggttctccagggcagccttgccaaagcagctctaatgacgaagaagagaacaaccgaagaaagatcttccagaactccatggctactgtggagctcttcgtgtttctgtttgctcccctggtacacaggatcaaggaatctgacctcaccttccgtctggccagtgggcttgttatatggcagcccatgtgggaacacagacagcccggagtctctggctttaccgcactggtgaagcccatcaggaacatcattacaggagatgttccagaagaaggcattgttatcataaaagatgacaattccatgtgtgttattgcccctgaagaccttcctttgggacaagacatgaaggtggaagacagtgatacagatgatcttgatgccggctaagagaagttctcctatcaacagtcaaagccggacctgtgaatcaccaaatcaagatgcaagacacttagagggctgctcataacatagaatctggtttccccaaaacaaattattcaagaaagaaagggagcatcaaaaatggatgcttttataacctaatcttctataacctaatcttctataacctaatcttttataacctaatcttttataacctaatcttttacaacctaatctctgaaatgacata

SEQ ID NO: 472852 - DNA, 447 bp, Homo sapiens
gggttttgtttacttttaactacaaattatgttccaagatggccgaataggaacagctccagtctacagctcccagcatgagcgacgcagaagacgggtgatttctgcatttccaactgaggaacacagctccttgccagcaatggaacaaagctggatggagaatgactttgacaagttaagaggagaaggcttcagacgatcaaacttctccgagctaaaggaggaagttcgaacccatcgcaaagaagctaaaaaccttgaagaaagattagacgaatggctaactagaataaccagtgtaaagaagtccttaaatgagctgatggagctgaaaaccatggcacgaggactacgtgatgaatgcacaagcttcagtagccaattcaatcaactggaagaaaaggtatcagtgattgaagatcgaatgaatgaaatgaagtgaga

SEQ ID NO: 472853 - DNA, 1389 bp, Homo sapiens
gcctgcgttggatctgatggaaggactgtgtaagtaggtcggatctgcttctaacccagccttgagagacatcacctgtcttcttgtgcaggaacattccctctcctctcacgtgtcctgagcaggatatcgcatgatctgctccttggcgcagataacagagccaccactccccaggctctgtgtgtctttaggggcgtggggagtgtgggccccaggcagcagcgcacgtgctcagtgacccacagcagctgatccatggggtgtggggtggatcctcagaacaggaaggtggcagaatcgtgtttcaaagtgggacttgaagatgcttggcaggagactcgtccagatggaggggcagtggggaaaagctttattgcctttaggacttctgtgtctcccttgccttacaacgtacccaacattcaatccagtgtcctggtggtggcagatgtggaagccgagtctggagatgtcaaggggcttggcccaggtcacacagcccgccatagtagggctgcccttggagcttcatttcccaactggaagccaaaccctgtgccgcctctgcttgtgcagatcctagaaccagagaagaagcggggcaagttgtcctgtttctcttctcccaacctgacaaacattcctaccaggggtgacttctgttctgactcataaagatatttctgaataatagcactggtcactttatctctggaatgtatccggcttttaaaaaaacaaaaaaccaaaaaactggtggcagggaagtaccctcttcttgcccgcccccctcccccacccccaccagggcactgattccactcagtctcctaggggcctcgtgggggtggccagaaaggcctcatttgcatatgctttctcacaagtcttgcctacacttcaatgtaactctaaatgtgttctaaggaaataaaaaggttttgttgtcattgtttgcttcttgttttttattaaattgagggtaacatacataaagtaaaatgaagaaaatgctgtaatcctaagggcagagcctgtggatgaactttaacatacccacagatgtgtaataccccactcagatagagattgttgttttaaaactatgattatgattgcctctagagtgatatttcttgtcttcatttcttctccattggcatatagcccattcatgaaatgggaatcatgttgggtgaaggcttatgtgtcacatctgagaagactttagctgggagggttgctcttggaatttcaaggaggttgtgtaaagccacaggagagaaagtcatacttgcttcttccccaggtgtggatccctgttcatcagtgggtatagccttttctctgctccacacctgagagatacaatacatgcctcagtgg

SEQ ID NO: 472854 - DNA, 1836 bp, Homo sapiens
ggcatctgccttctctctaccacctgaattgcttgcagagcctctgacttaagtccttgaccactctggcatgcaataatttagagcctgaagatctgagttcaatccctggtgcttcaatccctggtgctgggttcaatctccgatgtgcttgtcagatatccttcgggagtttaacagaaacctcacaggctacgccgtgggcacgggtgatgccaatgacacgaatgcattcctcaatcaagctgttcccggagcaaaggctgaggatcttatgagccaagtccaaactctgatgcagaagatgaaagatgatcataatctgtattctgcagccaactttgttcaccatctccgcaatgccttggacgtcctgcatagagaggtgggtggggggcttccacaagctggtaacagctcaagcatggaggtgccattgccgctgcagcccctttgggtggcacccatggagttgtgtgatgtacggcctgtaaggccctacgaggtgcccagagtcctggtcaacctcgtggacttcctgaaccccactatcatgcggcaggtgttcctgggaaacccagacaagtgcccagtgcagcaggccagcgttttgtgtaactgcgttctgaccctgcgggagaactcccaagagctagccaggctggaggccttcagccgagcctaccggagcagcatgcgcgagctggtggggtcaggccgctatgacacgcaggaggacttctctgtggtgctgcagcccttcttccagaacatccagctccctgtcctggcggccatgccctttgcctggcacttccactctgaacagaagagatctgtgagtggaccaggaagctactcccagagaagcaaagcgactggcccaaaaccccacggctggcaactggcagagccagaagtgggagccaagccccctgaaatcgagttctgagctttccccactgcaggattctgccagggaatgttcacttccatggaaacaaactactacacccgtgtctctcttttcttccctgatcagcttgaaccacttggaagcaaaacagagaccctggacctgagagcagagatgcccatcacctgtcccactcagtatgtacacttaatatgtcaattaaaaataataaaagcaaaactaataaagtggccacaaagaggctttacctgggagctttttagaaatgcagagtcctgggcaccaccccaaacctgctgaatcagaatctgcagcttaagatcttcaggggatttggatgcactgattttgggtgtggtgcatggttcttcccttgtgacggatgagcacgtttcaattccaaccaggatctgttaatctacatggaatatgcttatctctggttcaccaactatctgagatatatctcatgtgctgatggctgaataactttttacgttgcattttctgtgagtatttgtcatctgcacacaagcatgctcttgagttcattaaacctttaaacagaagaaatccatcagaatgatgaattgagcaatcccttgggaaaaaaccaaattccataggattaagcaaataatatttaaaagaagttccatttttgctctctcatgataggaatatttcaacaagtcttatcttcatcatctgactgaacagatgagatgagttttcatagcatctggcagtcagactcctggacagtcaatctgctggtcaagccctactccatactcagtatgcatatatttgagactttgggaagatactcaattttcccccagatttctggtactaatcatttctatgccctctgcttcccatcccactcctttccc

SEQ ID NO: 472855 - DNA, 989 bp, Homo sapiens
atatcatgctgcctcttccccagagggcttaggaaacaggagaaactgcctacaggaaatatgcttcaccttcctccacagacacaggcttctaggagaaccaagctccatggaaacggagagagagagtgtgtatatggcatttcttttagggccactccagttctcattagaagctgatgaaccacagcatattttcatgatcattcgcactggggcaagcaagctgccatgttgtgggcaactttacagagaggcccacgtagcgtggtgattcgtagaaacactgctcttgtaggtgcccaggtgaaagttgaaaagggcagtaagcaagagttggcagactctctgggttgcatgagggccatcgggagcatcctgattcctgagaagaaaaagctcattcagaaggaggagccatggacagcaaaggacagacaacagttatacataactatcaacaacacctccatctccacctacattttactactgctgcctctaccccttctgcagctccaccacctccagcttgcattcatacagtgctttggcagttttaatactgctgtcacttcagcctatgaagtaggcaccattatcaccatttgaaagaagtataagggcccgagaaactaagtcctacgtctgaggtctcacagctggccttgcctctgctggcctgtttcctcttgcctgtgcctaacagagatgctgggatgaaggcccctcagctgccagtgttcatgaaaactcatcactgcaactgggctgcaaaagttcagaagaacatatatttgccctttgattagttttaagatggtccctacctgggtatattgtttttttctctctagtggaagtaaaaacaatcacttgtaatttgtcaaatgttgattttttttttcaacaataatcctatgggatatcattagccccattttatatgtgctcagaaggtttaagacatttacttgtgactctaagtc

SEQ ID NO: 472856 - DNA, 942 bp, Homo sapiens
ctgcgcttttccaacagtcttagcaaatggcacaccaggagattatatcccgtgcatggctcagagggtcctatgcccacggaaccttgctcattgctagcacagtagtctgagatcgaactggaacgtggcagcaaggctaggggaggggcaccctccattgctgagaattgagtaggtaaacaaagcggccaggaagctcgaactgggtggagcccaccgcagctcaaagaggcctgcctgcctctgtagactccacctctgggggcagggcatagctaagcaaaaggctgcagaaacctctgcagaattaaatgtccctgtctgacagcttggaagagaggagtggttctcccagcatgcagcttgagatctgagaacagacaggttgcctcctcaagtgggtccctaaccccagagtagcctaactgggaggcaccccccagtaggggcaaactgacacctcacatggcagggtacccctctgagacgaaactttcagaggaacaatcaggcagcaacatctgctgttcaccaatatttgctgttctgcagcctccgctgctgatacccaggcaaacagggtctggagtggacctccagcaaactccaacagacctgcagctgagggtcctgactattagaaggaaaactaacaaacagaaaggacatccacaccaaaaccccatctgtacatcaccatcatcaaagaccaaagcaatggaacaaagctggacggagaatgactttgaagagttgacagaaaaaggctacagacgatcaaacttctccaagctaaaggcggaggttcaaacccaatgcaaagaagttaaaaaccttgaaaaaagattagatgaatggctaactagaataaccaatgcagagaagtccttaaaggacctgatggagctgaaaaccatggcatgagaactatgtgatgaa

SEQ ID NO: 472857 - DNA, 569 bp, Homo sapiens
gacttaaagttccacatggctggggaggcctcagaatcatggtgggagtcaaatggtgcttcttacatggtggcagcaagagaaaatgaggaagaagcaaaagcggaaacccctgataaactcttcagatcttgctctcttgctctctgtggcagcaatgctgttgcagaaccagtgaggagggacatcatcttcatatgcaagtctggatttcgaggccacaccatatccaaccagtgtggtcacagtcatcactcaccactggacagtatagcctgtgctgtgctgctgcagccctctgagtggacattggggaatgccagcaggagtttctgggatgtgaagatatgggagcagtcattcccagggccgaatgcagtcttgtacagcggcactcacaaaatactgccctactgcagtcattcagttctcaaagagggaatttcatccaatttttaatataaccgtgctatgtcttgattaggtatttgtaagtcaaccatcatctttctttcagttttgtgcatcatctttcatattcagttttatgcatatgtaaatgcctatac

SEQ ID NO: 472858 - DNA, 747 bp, Homo sapiens
ggccagttcatccatcttttttttttttcatggattgcgtttctggttttttttttaatttagtttgactttcctcaacatgttaagacaccagcccttgatctgcaatgactctcctaaggagtcagaaccccagttccatggaaaacttcctctaatttcttccttccgctgggttcgtggtctcactggctcaggagtgaagctgcagaccttcccggtgagtgttacaactcttaaggcagcgcgtctggagttgttcgttcctcccggtgggtttgtggtctcgctggcttcacgagtgaagctgcagaccttcgtggagcccagctggcttcatccagtgcttcttgcatgggggccgcgggtggagctgcctgcgagtcctccgctgtgtgcctgtactcctcagcccttgggtggtcaatgggactgggctcatcggggaggctttgggtgcacaggagcccacaggcccggcgagaaattgagcacagcagctgctggcccaggtgctaagctcctcaatgcccggggccggctccgctggctgctccgagtgcggggcccgccgagcccacgcccatccagaattcgcactggcccacaagccgcatgggcagccctggttcccacccgcgcctctcccttcgcacctcctggcaagctgagggagccggctccagccttggccagcccagaaaggggctcctacagtgctgcggtgggctgaagttctcctcaagc

SEQ ID NO: 472859 - DNA, 1006 bp, Homo sapiens
tacaggaagcatggcatcagcatctgctcctggggaggcctcaggaagcttctactcctggcagaaggtgaagggggagcagctctgcgtgggaatcctgcttcagggccagcggcccctccctgcccctccatcttccctggtacagcacgtggccctgggcctgcgggattttcatgctcgaccaactgccatgggccctaagccctcctggttcaggcctcggtgtggggcagcccacaaagcccaaagtaaatcagaagtccccatcgtcatctgtaaagcctatggattggttttctcacatggcaaagggaactttgcagatgtgatcagcaagaaggtggctgcctacaagccaggaagagagccctcaccagaacctgacagtgctggtcccttcatcctggacttccagcctccagagctgtgagaaataagccactcagtctatgatattttgttatggcagctcgagcagatgaatacagatgttaagaagctcagaacgcacagtaaagggtgatactacttgtccagattatgtagaagggtgttttaaaatttccaactatttgaggactttgcagatatcttcttggttttgatttctagtttaattctgctgtggtcaattaacttattttctattatgtaaattcctttgaatgtattgaatattacttattctattttatatctattactgggttatttttatttcattttaaatttatttataatacttataaatattcatcacagtctaacttcaaatactatcatatggcttcatttgtacagttaatgaatgtagtttggtgtcattatttttaaaaactctgagcaaccatccttacaaatactgtttctgccctgttctctccctcttcaccttctgggatttcacttccatccatgttaggactgtttcatattgtcccataggtcttcaattctgttccatttttcacttgtttttctctttgtgttgctgtttgaataa

SEQ ID NO: 472860 - DNA, 783 bp, Homo sapiens
aagctagtggcgaggtgtttgaaaaggcagctttcctggacctttctcatggactcaagctgcccctccaccttccaccatctccactgctcccattctgcactctgctcgccaacacccctccccagtagctgcacaggagactccaagctcctgtctgctgtccccatgggtgttcttctcacactaaccagtgctccctcccttcctagctcctttctcattagcgtagcacttgctttatctctgctagcaggttttaagggtcttatgaacaggactcctaacttgcacttttttctcctgcagagctcagtaccatgcactgcacatagtagggagcttaaaaatagcttgttgaatgaaagatctgaacaaagacttggaacaaaagcatcacctaggcaggggcatggtcctttagtaagttgtgtctgcctcttccagacaactccttggcctattaacactaccaccaataatcagtgagttgattgtttgcatttgtgtagtgttccccactgcccagcaaaccctctcacttggtccttacaataatccttctcatctaaatgttaaccaaacacaggggtgaaagctcctgtccccgcagcaagttgaccagtcttaggcaggctccgtgcacctggccctcattattcttgcttctcccttttgtggcatctataccttgcctcatgcctgtggggcatcttagacaggggagagctgcctgcctcactatggtcccaactccagtgatatcagacctgtgctttttat

SEQ ID NO: 472861 - DNA, 792 bp, Homo sapiens
gagacagtccttaatctttttggctcatagacccctttgagaacctgctgaaagtattggtattggaccctgtccaataccacagaaaacatttacctatgcatttgcaacactcaatttcttataccacaccagatgtattctcagattccagcaaacccatctgtggatcaccactgatggttctgtggactcagggaaacactttccttagagtttctgcttctcaagaattaactggaaatagctcagcatccctaccctgtctccagcccacttccctggatgcaggacagccaccagaagtggacatctatgcccagcagagaggtgggacagtgcacgtgccatggaggtgccacacatgtggaacacttctgggagaacccaccaaagcctggggagctggggactcacccaggcaagggcacctgcaccaagccaaccaaataatccatccaatagttcaacttatttatggaacccaccgactcttccatgaagatgaaaaagcagctgaggaaaaatgggccctgaatgcagggttagattcccgataattcactgaaaataagtaaaaccaacagtgcaagaaattcttcatcagatgcagatccttaatcttggacttgctagccttcagaattgtgagccaaataaacttctattacttgtaaattacccaggctgtgatattctgttatattaacacaaaacactaagacctcacatcaacagatatctatggtatttccaatattttgctactgctgacaatgctgctatgaacgt

SEQ ID NO: 472862 - DNA, 1792 bp, Homo sapiens
ctgcagctgagagtggaggagagagggctccatctctctctaaatgagcagcttcaaatacatgctagcagcagtgaacactgacatgagtgtggaagattttcaaaatgagttaaacatgaagggtgccatctatgctgttgccaatgttcggaacacagtgactatagacacagttgtgcatgcctcgcacagcctctggcttgagactatgttcagtgatgatgatgaacaaggtggtaactttgaaggattctatatgtcagaggcctccatgtcaagaggagctacaatcagaccaaatacagatcacaagattctgaactttgagcctaatgctgtgattagattagacttcgggatgactccggaggttgcaatcaaggtattggcaggaactgtcttctcatctgaactcttaatcgaaggaatatatgcttccaatctcactcccctggttggtaggtttcaattctttgagggctattggcctgttctctgtcatgtgggcagctcatcaaatggcagctgtcttcccttggagcaatccggagagcaatagagtgggtgcctcagataaagccaaagtttctgcctttatttttattaacttatttaaagcaaaggatttgagatctttttactactatccctttttgacatcccaaatgggttaatgcctgcatcatgtctcccagcccaatcgaagtttaacacagaatatgatggatcaagaaatgtaggtgaagtggagagtagcaaaaacaatatggtgagaaaattgtggcttcactctagactagcaactaaccgtcctggctaatttactgaactgccttattaattcaactgggttttcaattgattctctataattttctgattatacaattatattatctagaaataatgaaaattttgtatgcaattttccagatttagtgtttctaaattattttttctatcttgtttcactggagctaacagactctttctaatgaaagcccctcactcaccaacctgttttttcatgttggctagaaggaaaagcagtgtgatactgtgaagtcagatttctgttctctatttctgactccattcctcatttgtttggaaaccgttggcaaaagtgggcaagagataatatggaataataaagtttgttataaaggaatacctgagaaaatcaaggacagaggaagtacagcatttaagtgaggataaaaacataagtggccaaatggaggaaaaatgtgtcttattctttccacagattacaaaggcgaaatgagtactgaggaatttaggtattcaggtatctgctgaattatctgagctaaatagcactcaaagctaaattctgtacttcttgattatttaatttctcagaagttagagttagaaacttgatatctgctactttgaacctaatttggggctagtcaattaattaaatattctagaacttggaacagaatgactaccacccttgaagatctcatgcagtcctggaaaaagaatggtgaacaaagggaagtgccttaattttgggaaagcaaattccaagtaagagctaaaataggcatactcttgtagcctgaaagcataaaaggaaacagtctccaaagcttgagagttttcaagagtaaaattccaaatataaaagtaaaagattcatatgactcaaaagagatggaagcaaatatggtgttgctcatcttcgtagagccttatgagattttaaatatttataaaaggtgaaggagatgcataactaagaactaatgtaaaa

SEQ ID NO: 472863 - DNA, 923 bp, Homo sapiens
agctgctggcagaaagcactctagcaaggactctggctttgactgaccagcaagcagctgctctctgccactctcccctcccagctggggttgggatgcatgacacaaaggtcccacacagctgactggatggtgttttccaccatgtaccaccagagcctaccccttccccagccaaagggctttactctatcagagacaatctctggctgcagctcagaaagaacgagagggatgggtaatgtagaaatctggataaatattctagttctgagcagttatcctggaaatcctgccaggaagactcagttccacagtttcaccttagcattcagctataataagaagtccatacaactccctgagacacatttttatctaaaactcaattccaagctttgggtcaaagccctagaaaggaaaactggatctgagggatccagaggcaaatggtcacagaggttaaaagccacagccaaggcctctgagggagctcagactgctgtttcccatcggcaggaagcagttgagattggttttcgtccttatctttattctaatggcagttagatgtacttttttagagaggggaatgagacaaccaggagaaggaaagaaagaatttaaatgtgtgatcatcttcactttaagattctcagcaactctaaacttgtgatctgggggaattcctcaagctgcgttggtggggaagtatctcttcttgatgctctttttttgcacatttagagttaataatttgtccatgtttttgtcaattgtacttatgtgtctagaaatctcagggaagtcatctactccttaaagaagagtcattttctcttttctttttctttttctctggtacattgcacaacatctacaatgttagcagggggtctttaatccacagtgccactagcaaa

SEQ ID NO: 472864 - DNA, 538 bp, Homo sapiens
tcttatttttgactttatgaatttaaaaaccctgccagtattttctctatataaatacttctttaaaatgcagacgcttgggtataatctgatcaaaatttccaatttagaaataatgtcacaatttttttctatatatgccatattgaaagggatcaagcaagcagagctctctttcctgcctaaaactcttcacaccaatttatttccatttgcttttcagacaactggaaggaatggcttgtccgtgaattttcaattcaatgtccaacaaaaatatcaacagccacaacgaaatatgttcatgctccaagacaaaacttactcctccatatccaaaaactttgtcttcctgccattctcttttccaagagcactaagcaccgactgaagaaggttgactaatatctactcatctccaacagttgtaatttggcttctagattaataatacttagacatcaagtaaatttctgcataaataaaaactatgaacttaagcaacatttaaacctttatcagaatagcaaagaaatat

SEQ ID NO: 472865 - DNA, 1672 bp, Homo sapiens
ggcacagggcgcgggagtggcaggcagctccacctgcagcccccctcagggattgtaaacgcaccaatcagcgccctgtcaaaacagaccactcggctctacgaatcagcaggatgtgggtggggccagctgtaacactcaccgcgaaggtccgcagcttcactcctgaagccagcgagaccacgagcctactgggaggaacgaacaactcccgacgcgccgccttaagagctgtaacactcaccgcgaaggtctgcagcttcactcctgagccagcgagaccacgaacccaccagaaggaaaaaactccgaacacatctgaacatcagaagcaacaaactccggacacgccgcctttaagaactgtaacactcactgcgagggtccgcggcttcattcttgaagtgaacactgtgctggctgtgtggcacaaactcctgattggtcagactgaaatttccttgcggaagaaagaggagtatgtttttattgaatcctattatttcttaactcctaggacagacttctgcacagtaagggcctatcaaatatacctattaggataattatattagcttttcagaagacagttaccaggactgtgtgatttgtgcttttctatatttttccctttgtgcttagcttaaatctatttggcaatgttggtagtgactttcttgaatacttttctttcctttgaaaactacaatgaatctttttctgcaaagacagatcttaaaaaggtcagccatttttagccattcatgcagaagtacatctcacattgacatcaaaatggaaaatattttaattatttcttgtttcacaaataaaaataataatcattggactgagaaaggtataaacaatttctggtaaacttttgctgagaaagctgtgagaaatgaaactatcagggtaaaacttataatacctgcttagatttcagacataaagtaaatttcccagtcatcattttaaaacagctgtgaagttcattataaataatgttataaattatatgcgataatctttttttttttgcaattgtcagtgtgtttatctcttgtgatccttctttttttccaaaattctattagccctaaggaaatgtttacattttgtcagaagctgttgagactaaagtttgtggctttttaacatatacaatgttagcattattctttgttcactgaacatccatagctctccctgtgacaggctgtcaagaaatatgtctctgaaaagacaggttagctcctcaaagacaatcactgatgcaattctaaacgatgttctacaccccaccagagtgccccttactgttctcgtgtgcagtgatgtgatgtctgaactatttgtttgctctgccataagatagcattagcagatgtaatgtgaacagatcactcatttgcagaaatatttatggtagtgctttcaaaggatcattcaatctgcaagttgcaattggtgaagcatgtagcaaggactgtttctaaaaccatgtaggctaaaatgtcatactacaaggcagttaaaatggttaatatgtgtatgtccagagattagaaaacacatgctgtcatatttgagcagattcaatacacgtgcattttcagtaaagcagaagtaatcatcttatgttgaaagggctaggttaaattgcttt

SEQ ID NO: 472866 - DNA, 1913 bp, Homo sapiens
agtgagttctcatgagatctggttatataacgatgtggcacctcattcctctctcagccttgctcctgctcctgccgtatgaaacatttcattgctgttttcctactgcactggacttctttttaatgcaaatatctgaagccttcttgaagtttccccctgaaaatggacttctttttcttctacattaccaagcagcaacaaagatagctgaaaatgtaaagcaggttcagaaacccaccaagagctttgtaccctctgtgggtgaaaactacaggcactcaacaccagcacagcccatgagggcagctgcgggaactgaaaactgcaaagccacaggtgcagacctgcccaaggccttgggagcccagccctcatgcccttgtgccctggatgtgggacaaggattaaaaaaggatgactttggagctgtacgttttaataactggcctgctgggttttggattttcatgggatctgctgcaacaaagatagctgacagtgtagaagcaggttccaaattgggtagtggcgagaggttagagagtttggagagcttggaagaagacaggaagatgagggaaagtttggaccattgcagagacttgttaaatagttcagcaaagctcaagagttgtctggcctacatcgaacagcctgtgctcctatgtgtgatgaaagaaatgaccataagttggaacttatatttaaatgagaagcagagctttaacatttggaaaatttgtaatctggacaagtggtcaaaaagaaaagctgattttcagggggaaaatcaagaaggcttcggatatttgcataaaaaggagcccaatgctaataattcaagacaatgggaaaaaggccttgaaggcatttcagagacctttgtagcagcccttgctgtcactggccctggggtttaggagaaaagaatattttcctggcccagcctcatggctccactgctgtgtgcagcctcaggacactgctgcctccatccctgcagctccttttccagctccagccatggatgaaagatgtacaggtacagcttgcatcactgcttcagaggatgcaagctccaagccttggtggcttctacgtagtgttaagccagcaggtacataaagcacaggactagaagcttcagagcctttgtctggactccagaggatatatcagaaagcctgagtgtctagccagaagcttttccaagagtcagagcctcatggtaaacctctactcaggcagtacacaaggaaagtatagggttggagtccccatacagggaggcaccattttccagacctcagtttcatagacccaccagctgcttgcccccttagtgttgaaaagctacaggcactcaacgccagcctagccaatgaggtcagctgtagggggaagattttgcaatgccacatgtgcagagctgcccaaggccttgggattccagccatcacaccaacctgtgctctggatgtggacatagattccaaaaagatgacttggagctgtatgatggaatgactggcctgctgggtttttgacttgcagggggttttaaagtctcatctggtacctaaaaacttctttctggcaaatttcttctttttggcttggaatgcttacccaatgcctgtacaatcattgtaccttggaagtggttaacttgctttgtatttcagaggctcagggcagaaggtatggcagccttgtcccagaagagacttcgggctttggacatttgagtaaatgctgggatgagttaagatttgggggactctagggaaggcatcattgcgttttgtaatgtgagaaagacatgaaccttgggggaccagggacagaataatatgttttggctctgtgtctctaccaaaactcatgtggaattttaatgggaaatgtta

SEQ ID NO: 472867 - DNA, 1774 bp, Homo sapiens
aaaccacaagaggtcaggcagatatcatgtgtgccgaagtcccaaccccctaatcacatggttggtttttctggtgtgacttgccctatcttgagctatctcattagcaacaactatgataacttagaagattttgacctgaacaaatggaaagatggggttgtcatgaactgtgctgaggaaggaaacagcaggcttggggagcctgggagtgtatttggatatgctcagtttgatgtgattttttttttctgtcacctaagcagagatgcaagtagacagttggtgttcagggacaggtcctggttggaggatgaaaacttcaagaaagagatgggattcacattagagagatatttgaggctgcaagtcctgagaccttgtggcactggaggaaagaagcgctctccatctggctctttgggcagctcatctctgtcctccaagtagaaacaaaaatggagctgctgtggcccatgtctaggggctttgttttccttactccccttttccttttctctctctttgttttgcaatgcctccagcacataccacctgcatgctcttcatcagtctgattcctttccccagtcccattctccttcctgccttgtgtctctttttttcattcaccttcctttgatttaaatcccaatctgaaattcttctttcctcccctccttctcccaatctttatttttcaactctttgtctctcatgtggcctctacctctatttttccactgtccctttgcccaaatgcttcttagccttggcttggaacattatatcacccgagaagttttaaaaacatcccaatgaccaaactgaaccctagacaaattaaatcaggatctctgggaatggaacttcggtagaaatgtttctaaaaagatcccctgttgatttccatgtatatcccaggttgagaaccattgcctggctttttgattgaacatgtttgttgtgcaaagccaactttatattgctgtggctatctctaggtggcttaactgatgtttccgtttttcatttagtggaaagcattttccttgtgtcagttcccagtgtgggtcctgtgacctttgttcttcctcaaggccataaagagtccaggtcaaaaatgaaggagaggtgaggacaggagtagcatggggaactgggatgggatctaagctaccctaaatgcagagagacagtaaaggcacagccaaggactggagcttccagtttctagacacccaagtggaaagctggcttgggttggggtcaggctatgtggaaagggtaagtgcccctgatccaggcagctctgcttacattggcttccagaacatcagcttcccagcctgggcagcaagaacagtgctagcttctaaacttctgcaaaccctttcttctgagcttctccctggctctggatttcaccacctcattctctgtcaggcatgttgggatgatgcactggggactctggagcaggctgttccttgacagtctcttcactgaacacagagtaaggaatttacttcatgtaggggacacctcagaagcaaatcaaacacctgctcagtggactctaaaatttctagcacttgtcaagtagagaaggaagcagcagatccagaagcactcttggaagccctgcctcacattctgcagtttttaccaggcttaacctggaatgagccctgctaaacactgtaaagccataggcatttggcatgtagtctcaccattgtataatatatgtgttcatggaccatttataaat

SEQ ID NO: 472868 - DNA, 1124 bp, Homo sapiens
atgaatacgtttgtaaaacgacagctcagcatctcaatttaactctaacaaaattcaatttcactcaaggaatggtctccctttggcctctgctaccctgccctgatgtctctcttatttaaatgtgtgcagctgcaatcttctgctgctcagccgactgaacacccctcagggattcttaatggggagcaaggcactgctggattcattaaatcccactgccaaatagcatccgtcctcacccaggaatgctcgagcagggatgcttctggggccatcaatgagatgttcatttgggctttgccaagaagcaccaggccactgagcagactaatgggccgcatgaatggctcactccacatcctcgttcccacacatacggctttgatcatggctttcctccatgcctgggatgtctactcatctcctcttactccagcctacccacatccacttcatttacctctttctgatgccaccttctccctgaagccacatcaacctaacctttgtcatgatcaacttgcagaactacaatatgcacatccaacagcctaacggtgataggcacagggtctggtgtcgggctgtctgaggtcatgtcccagctctaccatttatcttatgtgaccttgggaatgtttctttcctgagcactcattgactgtacctcaatttctccaacagtaaaataaggcaaacagtacctatatcacatgtatcttataaagagtaaatgaatatgtaaagcactttgtatgatatctgacatgtgctaggtcgttattggtgtataaagacactactgatttttgcatgtttttatcctgcaactttattgaatttgtttatcatttctaagttttttggtgaagtctttaggctttcctatatgtaagaccatgttgtctgcaaagagggacaatttgattgcctttttttcagtgtatatgctttttcttttatctaattactctgtacattgaggtgcattgttaggttgtttatttgaaatctgtctactttttaaatgtaagcacttattaccataaacttccctcttaccactgtttttgcagtatcccataggttttgtatattgtgtttctattttcattcattac

SEQ ID NO: 472869 - DNA, 601 bp, Homo sapiens
gacgattcggatggtagtacgagtcataaactcaaattccaacagcatccagccagcgccgctaggttaggctctccccgaccgagctggtctcggcagcccttgttgaaggaatacttatggcaatggtgatcaccgctatggtagctaccattaaattactcgttgtgattggttgtcccgctttcctcaggttttcttctgccatctgtgacagcttcttggtctgtccccagaaacacacagtgatttctcttactgtgaaccagattgaattcctggaggacacaatgagaagtcagcagtttgcaaccaaaagagtgtcctctctagaatctgaccaggctgacacagcaatctacaacttccagcctccagaactgtttatacacctgcagagagtaaagacagacactctggaagataagaatagcatcaaacagtataaaatgaggttgctgatcttaagaaatggacactatagttggagagacagggtttacaccaatggaaagagaaataacaccgaacaataattcaagtggtgttgcaaaaccttgtatgattagttaaataccaaattattagtcagggaaggctt

SEQ ID NO: 472870 - DNA, 726 bp, Homo sapiens
actcattgaggagccggttatcaatgctgctcaacggatcatcgtggggccgcctctgctgctcatacctggattccacgggttggctgtgctcagctacagctgcagccgcagccagtggagaaaaggaaaatagaactggagggaggtgtcaaaggggagtcttcttcactaattcctcatttgcccatatcattccttcaccttctccttatgtaaccagtagagcaaagacacccgagtggttgatgcccaggctttctggggtggcaggctccacagaacacagtctgattgccattgttctaaggaaaggaggtgacaagtccaaacaaattgttgatgttcctcttccaaaggccctcttacgttcttgggatatatccaaaacgtcggccagcctgctgcatgacaagtgtggccatggatccgggtggggcacgtgctggtgggtgtctgccgtgcacactcacagtttgaccagaagggattatgggggcggcaccaccctctgctctgttacctgacgccaccagtcttgggggctgcagccggttgaggtccacccccatgctggttctgcagttggtagcttcaggggctgaggtccgctcctgggtctgtttctaaggagctgtgtgaggttggtcaagggtagacatgcttactgtccatgataaaaacagtgtctccctctggagtgaagggcagacacacttactgccc

SEQ ID NO: 472871 - DNA, 1417 bp, Homo sapiens
cataaaccaccagcccatgtgcatctaacctctaccaaagaatggaactttccctgcaaagcaggtggtaggaggagccctgggactgtcccacggagattgggggatgcctgaagaaaggaacgctgtgctcatccccacttgggcggtggctggagaagccgacttactgttccccagtctatctgagcagaggaaaggacagttggtgccggctgatgaaaagccagagaggggcaccgctagcagcagcaatcttccccagtttctcgcagcagggacacctgagcttcctgagaatcggggactattcagcaccttgggccctcgccacgggaggctgggaggtggatggcatggctgggcagcccccgatggggaagagggcgagcaggagtctgaggactgggtaatgaggggatgcagccaaacctatggggtttggacacacacagggcacccacacagctaccaagcccagggaggacacacacagcagagccagtgcaccatcagcttcaaattcctctggaattacctcctgctagggcacaggctgggtggccagagagtttctctgaaggccggtgctgcatctcagtgttgggttgttcctgtgacgcatgtcacagaagatgcctctcccctccttcttgtccctcccctggtggaaatgtcagagacaaaatgggtcttcatcagctttaaacctcggtttctactaattaaagtaacagggacagcaggatttgctcctcctccaccaccccacccctgccccccagcagcttaaggctctcgtttcccaagtgagaagttccctgggggcctctgggcctttcccttagtggcagctgctcctcccaccccacccccatttttcttgtgagcaattgcaatcatatgagctctacgagttgcatgctgtttttcttgcacattattttaattaaaagaaacaagtttaaagcagttaggacacttgctcagagcagaactcactcttcaatcaataatgatgtatagcataccccttgccaagcatcgtattaggctcagaattaatattcaccgaggtctagctttaagtcgggcataggctagactccttcattgtcagcccttttaattctcaaaacagtcccatgagctagaaaccatgacatccatttaaaatgtaattttaaaaaattcctaaagtaatacatattcatggtactttttaaaaatcaagctgtatagaagtatataaagtgaaaaataaggtttctctcctttatcccaattctatgttccatagaataaatgatccatttctgttaataaaattcacatgtttactcattgttagtgggatgtcattgcttctagactttctcagcagacaaagctgggaaagatatgtatgtgttaataa

SEQ ID NO: 472872 - DNA, 534 bp, Homo sapiens
ggacagctgctgactttggagtcgctttagaggaagaaaagaagggctggtcactgcagaaacgacgtaacaatgtccaactcggattaccttcccgactacccactcaactcagatttagtgaagagattaaagtctgccctggatgccaaagatgaggagagagtgagggatttaatctgcactgaaatcacgcctgtggacgctgtgatagaactggccaatgacgactggatgaaagacccctcggctcagctgcccaccggcatgctgctagaagattgccctggggggggtttaggggaggttgtcatcacaagcagtgattggactgggagtgctgagctgtacatcttgcattcaccctttaggcccaccgtgcccaagcacccccccgaggctgatctctgcaaactgcatcagtcccacttgccctctggctcctgttgggtgccactaatgataggagttggaggaaagtgagggtagggcaagtgcttccccggccctccctgccagatcgctgctgggttt

SEQ ID NO: 472873 - DNA, 767 bp, Homo sapiens
gaggccacatcgtttctcggaatgcttataagtctcttcatttgccccttgctgcaatctagcaaactgcatactatctggaaagagcctttccagtgccaatcaaatgtgcctgccaacaaccccaccactccccctgcctgctgggcgaagcccacactgctctcttcaggacccaggacacatcatgatccagctcctgggggctcaccgggttcacctcctgaggcgccgcctctccatgcttcaattctgcctgaccagtttgatacaagaaccacaacagaggttattaataacaaaaccatccccacctgctccagcaacagctcctggatcctaagaatatccctttggctttccaggttcccagaatacgcttgaaatttccatcaatctgtttaggtataagcagcattttggaacgtatgtatggcaatgcccatgagaaggtgaggagaggagaggcctgggctggctgggagctactcagtgataacaatcgtggggacctctcagacctgaccccaggacccaggcccatccttgaaacactatcatttcaatccctcctatcaacgtcaccagtggaagaaatggcccagtggggaaagcttactgtttgtcatttcattgccttctctgtatcaatgccaccagtggaagaagaaatagctcagtagggaaagcatccctgaagcctttgcaggtctatgtctgggacccagccttggctgagccttttactccaaggcaagattttgtga

SEQ ID NO: 472874 - DNA, 682 bp, Homo sapiens
gcagtgttggaggtggggcctgtctttgattaaggagagaaccagatgcaaattttgccaacatgcaggggaagtctgtggtcctactctgtgcccagccgggagacgtggagggagggggacgagggcctggcccagccccgttcccgacccggaatgcaatccataagtctcaccctgagaaaaccacctttgtgatcatggcatctcctctgccaggaacacctgtgaaggaggcagtggagggcaggggtttgagccctggctgcgtgctgctactgtcagctctgtgtcccatcttggagcggggctggacttacatcttcccacacgctttgatgctccatcattttctggggtcaaaccagaaatgtgctcctcaaagaggagagaagagcaaagtagtgcttccttggaaaaagatcacatgggacttcatgactgtttcacagattcgtattccaggtaaggagaggctgaaggagagagacccctgagcacagccttttatccagaccaagcatccagcccaaaaagtcacctgtggcagatgccaaacaagttcaggtccacgtctgtgtgtgcttctctgccttcctacctgctgtccaacaggcccagccccagcctgccctgacatcttccagaatccaaacctgccagaatccacagcctgccccct

SEQ ID NO: 472875 - DNA, 1089 bp, Homo sapiens
tgggggtcgcaaggtgctcagtgggggagtttttgagccaggatgagccaggaaaaagactttcacaagatccattcctgtgcttttgtgattgaacaagaggagaaaaagaaaacagaagctcataaagaaggagatggagtgaagagggctgataagattctgggggttaccaaagatcctggaaccattgctggtctcaatgtagttagaattatcaatgagccaactgctgcttctattgcttatggcacagacaaaaagtttggagctgaaagacatgtgctcatctatgacttaagagatgaaatttttgatgtgtctgtccttactcttgaggatgaaatctttgagatcaaatctacagctggagacacccacttaggtgaagaagattttgacaaccaaatgatcaaccattttattgctgagttcaaatacaagcataaggacagtagagcagatatttatacctccattacccatgcccaatttgaagaactgaatgctgtcctgttccgtggcacccaggaccccatagagatagcccttcaggacaccaaactagacaagttgcagatccatgttattgtcctgcagacccagaccttcactacctaccctgacaaccaacctgatgtcctcattcaagtttatgaaggtgagagtgccataaccaaggataacaatttgcttgttatccagggcaagtttgagctcacaggcatacttcctgctccctttgctgttcctcaaattaaagtcacttgtgatattgatgtcaatagcagcctcaatatctctgctgtagaaactgtatcaggacccgaatgggccagtgcctaagctggagtgtggctgcactgttttgcagaaggataaaattatgttaagaaagagccagtcataagatttcctagtggatctgatactaaggtacatctaagtgcatctctaacaaagtagcaattaagcatattccccttcacaaccactcacacagagatattcccatttttgcagaatagctttaaagaacaaaaacttagaatatcaaagaaatatttacataattgtaaagtaggttgt

SEQ ID NO: 472876 - DNA, 609 bp, Homo sapiens
cagccatgttgctcacacaaagcctgtttggtctcttcacacggacctgggaatgaggatgatggcccagggcacattcttctttacagaggaggctgggcaagagcttgggatacagaaagctgtcacactggccctctgcccttgtgaaaaggcagagggtccattgagctggttaacacttaagctgtctgaggatggcaaggctaagaaagcattagccccagtgttacaacactggggccacaagcacccacacctagacactactgcagccctggagcccaaaactctcaccctggctcctgcatctgcctgtctctgtgctccccctcctgccaggggtttgagcagcagcagcagcagcagtggtgaccgattacaggcgagccacacccctgtcacatgtcctgcaaggaggatgagggaactctcctgtttcaccaggacctgttatttttttactttttagttccttcatacctagtttattgacagtttttaacatgaatgggtgttgaattttaacaaaagcattttctgcatctatttagatagttacgtggatttgtttttagttctgtttatgtgatgaatcacacttctgat

SEQ ID NO: 472877 - DNA, 572 bp, Homo sapiens
ctcagcacacgagttcacagacggaatgaagaaagagaccaggagtgtctcttctgacttcttcctttacaaggacagaaactccaagagaatgttctttgcccagccagggttgactgggcccagaacttccagatgcttctgtatctttgcactgtgccacactgccccagtgccacaaaatgcctcgtggacggccacaacatggaatgtgaggccacagcgagggcagcccctcacccagcacagagacctggtcacctgccgtcacaggacacccacaggcctcatgcacaagggtactgggctgacttgtcttctaagaaatgcggaagaagaaaaagcacaaggaaaggtgcttgttacctctgggcacccccgagaggggcatctccagcatctgcattccagtgagaagaagagagaaggaggtgtcagggccccaggagtgggaaacggaatcaccttcccagaccaaggtacttaagccaggtgctctgggaagctctcaggtcacaaaagcaagactgaatgtttagatttcatagccaagacttgtattgtgatcacac

SEQ ID NO: 472878 - DNA, 842 bp, Homo sapiens
aagccaaagcctaacctagaccaaggtcctaattctcttcaattatatgaagctgcgagaggtgaggaagctgcataagaaaagttggaagggaagctacctggaagacactcagatgtatggcaatattactcctgactgggatcggtatctgaccaaccgaaaaaactcctatagcaaaaatgatagaaggaaccagaagtttaaggaagctaagcggttcttcaacagcattcagaaggaccccagcgagtttgcctggcgtgatcctgagttgcctgaggtcattcacatccttcagcaccagttcccatctgttcaggcaaatgcagcagcctacctgcagcacctgtggtttggtgacaacaacgtgaagatgaaggtgtgtaggttatggggaatcaagcttctggtttaccttttgggccacagagttttggaagttcagaagaatgcttgtgatgcccttcgaaatctctttttcggcaagtctacaggtgaaaataaaataacaatgaaggatgttgaagctcggaagcaaatgcgggcctgtgaggggctggtggactcgctgttgcatgtaacctacacgtgtatgaacacatccgattacgacagcaagatggagaattgcgtgtgcaccctgaggaacctgtcctattggctggagctgcaggtgccccaggcccagttactgggactgaacgaatgggatgacttactagaaaaagtttcccagcgaagactctgagccaacctgctgggggaagaaaaaagaaaaagaaaaagaggactccacaagaagatcaataggatgaagtcggtcctatcccagcactgtc

SEQ ID NO: 472879 - DNA, 622 bp, Homo sapiens
acccctcaacaggccccagtatgtgatgttcccttccctgtgtccctgtgttctccttgttcaactcccacttatgactctgcttcttgtcagatcagctgcagcattggattctcatagaagcacggaccctattgtgaactgtgatgctctgctgcaggtctgctggagtttgctggaggtccactccagaccctgtttgcctgggtatcaccagtgtaggctgcagaacagcagagattgctgcctgtttcttcctccagaagctttgtcccataggggcacctgccagatgccagccagagctctcctgtatgaggtgtctgttgacccctgctgggaggtatctcccagtcagaaggcacagggagctggcaggcaggaaggtttacatctgctgaagctgcacccacagcccctccttccttcaggtgctctgtcccagggagttggcaaggctctcagtcagagtccatttcttacctactcccatcaggaagctattttaattcccttttaaagtaaagtaagtggagtataaataactttgtcattgccttacatgattgcacagatgcccacactagattagaataaaggaaaacctgagcgccttcaaaat

SEQ ID NO: 472880 - DNA, 873 bp, Homo sapiens
ttgcaagttgctcagtgggcaggagtgggggtcgcaaggtgctcagtgggggagctttttgagccaggatgagccaggaaaaggactttcacaaggtaattttcaggtattctgttataagcaacagaaaacagactaagacaagtagtattgctggggactgtgattatgtttcatggaattcaggagataaagataatgaacttgaattattaagtgcctgtctttctacctgctacaacacgtacttcaaaacagaagaaatttttataaagaataagtctataaccacatggaaagcaatactcaataccatcaatggatctgacattgaggaagttatacggaatacatgtgtagcactcttagaggtgggaactgtgtgggaaatctccaggcccttgtatgtgaaaaaaattgtcttccatgaaactggtccatccctggtgccaaaaaggttggggatcgctgttggtacagacatgaccaatgtaaagaaaaaaaatcagtaaatagtatgaatacctaaatagacagaacttaagagtaatgtatggagatgaaataatgaaccaagtgaaaaaattttcaggaatgttattcaaaagtgtgaaaagaatatataaaaacaacaaaaatgaggcattgagggaaaaccaggtccctaagatgtgaaaatacagaatgtggagagaatgaaacaaaatacatactaaaagaaactttctcagagtagaagaaatatacttttctttaaattgacatcaaagacttaatgggcaaaatggaaaagaccagtagcaaaacaggttaaaatgtttgaaaattaaggagaaagttgtaaaagcatctggaagtaaaactttacaaaat

SEQ ID NO: 472881 - DNA, 795 bp, Homo sapiens
agcaaggttcatacatacacaaacaatgctgatacaatgtgcagcccatcatagaaaagatgtggatgcaagatgcagaaaatttatctatagacatccttcagtttctacgtcagtgatgaagtgtagaggaagaaggaaagaagagacagaaaggagggatgggtgcaggatgacttgcaaaattaaaatgcacaataccaagtgcaagcaaagaaggaaccagtataaactcttatgtattgttgatggagccagtgatgaaaactggtgcagcaggggtgggggaatcttcaatacctgctgcaatactctggggctgtttctcctgattgaaaatagttctgggtccatgccaaatttgaaagaaagaaaaaaaagagcacccaagtgcatttgtacaccagaaatcgtgaccgtgctatgccattatgaggaattaacaaagcatgtttaactaactctcttgatgatcatattttttgaattttaaatcaactttattaagacatcatctaaatacaataaaaaagagctcattttaagtgtacagttcagaaagttctgataaatgtagttgcccatggagtccatctaccgtcaaggcttatttctgagctgtacttctgaattggttctgtaatacaattgactattgctttacaagacgtctaaatatggtaattcttccagtaatgaatatttacttcatttatagtcaatatatttgataaatctaggttcatttttctgcatatggaaaactttttatttcaaagatagcatatgtgagtt

SEQ ID NO: 472882 - DNA, 1270 bp, Homo sapiens
gatgcactgctgacgtgctgcggacgacgagtggctgccaccgggcaggaagggtggtgacctttaacccagggaagccccaaccaaaagcgcaccttgacttgggtaaaactgaaggagctccatcgtctcagtctcctctctcgatggcatgagaaagtgtgagcacaatgattttctgacagatttattttattatgagagaaagattggagactcgtcctccttaataactgtgctgacaagtgacaacttcactccattacttttcaatgggaacattactcacacaatattgaaaatggagaaacattttcacgtgcttttcaaatctgagatgatatatgaaatgaacagactttgtggtgtccactgctacaatgaaaagctaatggaatccagaagaggctgctaccaaattaaggaggaggacaaggagaacagttcccatgatggaaactcagatctagcacttcaaagggtgctactctcctgggcagctgtgctcattaggaaacatgcttctcagatggtgataagagctgatgcttattgaacacctactacgtgccaagcactgtgcacttgtttcccccttaggttggtggatgcctagaatgagatgacagggaataaatcaagcaacaaatatgaagttgcagaagaatataaaacgtaaggttaaccctttgggctagaaggaaaatagagatatttatcaattctttgtcaagggctcatttttctttttaattaattcttaatactgtatagtaagagctacacaatagccttaaattcttttctccacatcacagttgatgagaaaagctggctcctgaggttcctagttttaaaatgaatttcaaagcacacagtgataacattaaaaaaatttttttttaattaacaaaaaatatttaagagtactttgggaattttacaaattctaaatttctaaatttggaaatccatcttcattattctggttaattaaaccagaataattaacaaaacaaactttaaaaaaattaacatcttcctgtaacaaggcagctcatctgtccccccagccaatccattctcagagcagaatttcagattccacttgaaatgggaagaaatagctcattgccctgctgtaaacaccttagaacatgaactgtgaaccaccaaactcaatatctgatcacacactctgagataaaagagactgaaacttcggtaagacttcattgcaaaaataaaacaaaaatttcctgacaacttt

SEQ ID NO: 472883 - DNA, 565 bp, Homo sapiens
caccatcacaccatcccactgtaccatgatgcctacagaatttcacattgcaggagcctcattaatttctttagcaaactttgctgtgttccttcactgttccaggttcctagatgctggcaatgccaggatggatgaattactttccttggcccggagagcctcaccgtctagaaagagatacagacgtgcaaataattgcaagagattcctccaggcagctgagtgcaccttctgcatacctttgatatctaatattcaagtcatatcccagcccttgctccccacaagcagacagaaccaagaattcttcaacctcttctgtcctgagaccctgcctggggctctcctgattctctcagccaccaagctcacctcccagtctgtactttgggcttttcctctctctgcaggtatgaagtggtctactctgttgccgcatcttgtcttgggctctattaggggctgaaccatgtcccccacaatcaatcctgagtacctctgaatgtaaccatatttggagataagatctttaacgaggtgattaagtcaaaatgaggccttt

SEQ ID NO: 472884 - DNA, 1013 bp, Homo sapiens
gttcaccttctgctgtgcagcccagttcctaacaggccatggaccagtcttgtccaaggcccagggaagaggaaattcagccacagaaagaaatagcagggatgtgtggatgcagaggagagatcgtgtggggacatagcgagaaggcagccacgtgcaagtcaagagatgaggaatttcctcatgaatacttctactcagggacaggatttgaaggaaatgagacaaacacagccagcccttggtgggggccgtcctctgtctttcttcaggcccaagcccttccttcctcatttccagatctgtctgtcttagagcagagaatgtgtggattcagcacaagtctccccagagacatgcaaatgcaaaaaagaaatgagtatttcgacagaacacgtcaagtcaatgaagatggcgtgaggatgtttgaaggattaggaggacagtggagctttgtggggtctggaggccagaagttcgagatcaacgtgccagcagggccggtttctggtgaggcctttcctcctggcttgcagaccaccgccttctcatcctgtcctcacgtggacctggcatttcctgtaaagaaggagaggattggagaggagaagggaactggacaagcccacgcagctggcatatggtggagcagggacacgtctgtcttactcaacattattttgcctctcttctaccttgccaggagttatctgctggagatccccatatttctctactttgaggaggacagaggtgctctggagggtgccaaggtgttagccatcaaaaactctgagacagcttcctagcgtctgcagcagaagttcttattccttgaaagaaattcaatcaaaccagcttaagccactaaaaaagggcaggcaatatggcaactttctgaaatttccacttgaaattgctgtgaaactgaacctgttctaaaaaataaagtttatttatgcaagaaagatgccaaggctggaaaaaaaaaataaagtctactttaaaaaggg

SEQ ID NO: 472885 - DNA, 1284 bp, Homo sapiens
cagcaggtgttcgacaatggcagcatctacaaccctgaagggcttgacatcacagaggaaactgcattctcactttctggagagtgtctgcgatgtttccagggtctgtttgcagattggctacccaactgttgcatcagtaccccattctatcatcaatgggtacaaacgagtcctggctttgtctgtggagattgattacaccttcccacttgctgaaaaggtcaaggccttcttggttaatccatctgcctttgtggctgctgcccctgtggacactgctgccatgactgctcctgctgctgctgctaccccaactaaggttgaagccaaggaagaagctatgtttgaatctcagagtgaagatgagttgactccttttgacatgagcatccaggagttggataatccaggggcaaaacgaattctagagcttgaccggtttaaggagcagcagggacaaaaacgtttccaagacctgatgggcatggatctgactactcactcagtgaagtgcttgctctctgtgggcatttataatccgatccagaaggctctcaagcctcctccaataaagccctatcgagaaatagatgaatcagtgaaaaccaagacctggatatttaatgaagaggagttggatgatcagaaaattcaggtgcctcctgcaggcttccagctggtctttttatgttatgctgataataaagggaaggtgccctttgctaaaaaagtcatggcaaccccagagcagggggacaaggtgaaggctattgttcagaagctccgattcaaatacagaagtgacagctttgagaactctgtgctgcagcagtgttccaggaacctggaggccttggccttggatttgatggagcctgaacaagcagtggacctgacattgcctgaggttgaagcaatgaataaaagactgggctccccactggtggataagtttaaggaacttctctacccaccagattacaatcctgaagggaaagttagcaacataaaacacaataatgaaggtttcagaagcaaaaggcccaaggtggagtattcagaagaggagctgaagacccacataagcaacagcatgctgggcaagtttgccgtgcccatgctgaaagagacctgctggggactaatttagcccttcccttaaagtgtaacctttctgtgatctcatctaaatattcagagtatatagaatggtctcttcactctgattggttagaatttaaatgcttccccagcactgtgtatcctccaggatctccagtc

SEQ ID NO: 472886 - DNA, 841 bp, Homo sapiens
gcaaaataagcaggtcttgacgcgcagatttgttcactcaatttcccttttctaaagcccttatgctcccaacagttcactcagtgcctatgccccatggtgggaagattaacaaaaagctcaattcaggtgtcctgggttgtagctcttcaggcagtggtgttgtggtgatgtttaacaaccggtttgctgaaaaaaaaatcattattcttcaccatctaaatctggtttgccatgaaaaccagttctgggaggaggaagaccttcagtatgtccccccttctgctgagccccaggcctcatgtccccatatcccccaaaaggaaaaagtgcaaccttcaacccatggaaagtcctctatactcaaaagcacagtccctttagcgctgagccttcttccagttcacaggcctttcacaacagtagggaaagcagcagcaaagtgccatgatggcctggaaacagcaggatttacagggaaggcaaaaataggggaggaggattccacagctggaatacgccaagcagagactagagtgttgcagagcctgcacctgctcacctcttttccaggtgggaatgttggaagagaagtggaaagggcttttgacccatttgatgatttgaacgtgaaaatgaatcctactttctgctttgagaaagatgtaggggatctagatttagttcattgatgaagtgtgttcaaagatgtagacagagtccaagaagcaatggcatgaatccaatgtggcttgataagacatcaaggggctttgggtcagaagctcttttatctgaaatctgcctgatagtgtgaaatataaattggaattgagatcca

SEQ ID NO: 472887 - DNA, 711 bp, Homo sapiens
ccacttcaggccctattcatctggttcgttcttgtgcctggagatgtcactcaaggaggagaacagcaaagatgaggaacaggacctgtttaatgaagtactttgtcccttggtggaggggtgtgctttgctgggtgggaaacccactcctctgggctgcctggattcctcagaactaccaggaggaaaggctaagtctgctggtccagagactgtggcaactcctccccctaggggctcaggcccaggagatccgggttctgtccctgagcctctggctggagttactggagtccctgcagggaagccctgcccagtgaggaaggatgagtcaggtggcatgggtttgcgagtgggatcttctgatctgtgggccgcccagttctgtggaaaaagcactgtttccccagctggctaccatgcccactcaccacctcccttggctgtgggctggggactccactgccctgtgtggctctcagaaattcagcagatgccagctgctatgcttcctgtacagcctgcagaactatgagccaattaaacctcttttcttataaattactcagtttcagctgatgatcttgctttctgttaacacttcactgaaaaaaagaagcaactagaagagaaccttcacaacttctcaccactaattctactcacttacctgcatcttaccttcccttctactatgaaggttgaaatatt

SEQ ID NO: 472888 - DNA, 1140 bp, Homo sapiens
agacaggtcctttgtttcaaaagtatgacacaagttaacctgtaagccaaggcacccagaccaatttccgagctgtacgtggataggagcagcttcgccaacccctgcaaagtgactctgaagaaggtgacaagccctgctccagtcacacccggaaggtgactagtccatgcacggccgaagcactgagggctgttcccagtatatacatcaagtcactgagacaaagaggtttattggactcgcagttccatgtggccggggaagcctcacaatcatggcagaaggcaaaaggcacatcttacatggcatcagacaagagagaaatgagagccaagtgaaaggggaaaccccttataaaatcgtcagatctcatgagacttattcgctaccacgacagcagtatgggggaaactgcccttatgattcaattatctcccaccgggtccctcccacaacaacttttactgccctttggctgtgggaaatgaaagcctctttatatgctgccaaagaggcctctgactttatcacttcacctgcaatggctgattggcagtccagtctttcatcttctttctcaaattcatcaatagcacccaggaagaggcattgtccttataattagtagttcccctgaatctctcaaaatcttgagataatgcacctgccaatttattcccttccaacagtatcccctcccaattcaacaccaggcaaaaatttaacaattgtgccattacagtttgccaagggatattaatgttccattactgccagttatgaggtccacattgcctggtaatccagtgccaaaagtctttttagagtttaattcctctatcccctactgatacaaatggtgttaggtcaagtttctaacagaatactgggaaaagacactgaaatcaagatttatgtgcagaaagttcattgagggagtgccctctgcatcaatatctgtgggagaattaaaaccaccatagagcatggtttacccttgctaatagacttagtcatttttggttttttaatccaagtctctgatatgatatgcatatattttgatctttatgttatgctatagaactgttgctgtagtcagttgtatttaaattaataaacagttatcaggccttg

SEQ ID NO: 472889 - DNA, 657 bp, Homo sapiens
agcaggcccaggaagagagtcaggaaagaagagaaaacaagatttctaatggcagggccaaaccagctgtgtcatgggagtttggtgtttttttctatttcttttgagtcaacagttttgagtggaaaatgcactagagcagtaaaggaggaaggaaacaccagagaacctcagtggaacacaggcctggggaagaggcccatgaaggccctggaaaagggactggaactatttggacaaggagttctgtatacctggagagaggtctccaaatattggaaatctgaaaccaagggatcagcaggcacatgcactgctgtaggaagaagaatattttctctgaaggctgtaggaaagaattttttcttgcctttctctatcttcccgtggctcttggcaatccttggtgatcccttggcttatgcatgcaccactccaatctctacctccatcttcatattattctcttctctggctctgtgataattatgtatttattcatgaaatatatatctttttgggctatgtaccttacaaaatgttctttcaggacctttagggtcagatgtttctattgtataatctaaacactgcttaacaaaatgcaccaattctgcttgactttggagaactaacctgcagatctgtacccttgaa

SEQ ID NO: 472890 - DNA, 1574 bp, Homo sapiens
ggagaggagtgcagcagggccatggtggatggaacagctctggtctacagctcccagcatgagcaacgcataagatgggtgatttctgcatttccatctgaggtaccgggttcatctcactagggagtgccagatagtgggtgcaggacagtgggtgcagcgcactgggtgcgagccaaagcagggagaggcattgcctcactcgggaagcacaaggggtcagggagttccctttcctagtcaaagaaaggggtgacagacggcacctggaaatttgggtcactcccaccctaatactgagcttttccaacaggcttgaaaaacggcacaccaggagattatatcccgcacatggattggagggtcctacgcccacggagtctcgctgttagctagcacagcagtctgagatcaaactgcaaggcggcagcgaggctgggggaggagcgcctgccattgcccaggcttgattaggtaaacaaagcagccaggaagttcaaactgggtggagcccaccacagctcaaggaggcctgcctgcctctgtaggctccacttctggggtcagggcacagacaaacaaaagcagtaacctctgcagacttaaatgtccctgtctgacagctttgaagagagtagtggttctcccagcactcagctggagatctgagaacaggcagactgcctcctcaagtgggtccctgacccccgagcagcctaactgagaggcacaccccagtaggggcagactgacacttcacatggcagggtactcctctgagacaaaacttccagaggaacgatcaggcagcagcatttgtggatcaccaatatccgctgttctacagccaccaatgttctgcagccaccgctgctgatacccaggcaaacagggtctggagtggacctctagcaaactccaacagacctgcagctgagggtcctgtctgttaggaaaactaacaaacagaaaggacatccacaccaaaaacccatctgtacattaccatcatcaaagaccaaaagtagataaaaccacaaagatggggaaaaaacagagcagaaaaactggaaactctaaaaagcagagcgcctctcctcctccaaaggagtgcagctcctcaccagcaacggaacaaagctggatggagaatgactttgacgagttgagagaagaaggcttcagacgatcaaattactccgagctacaggaggaaattcaaaccaatggcaaagaagttaaaaactttgaaaaaaaattagacgaatggatacctagaataacaaatccagagaagtccttaaaggagctgatggagctgaaagccgaggctcgagaactacgtgaagaatgcagaagcctcaggagccgatgccatcaactggaagaaagggtatcagtgatggaagacgaaatgaatgaaatgaagaaatacagagaatgccacaaagatactcctcgagaagagcaactccaagacacataattgtcagattcaccaaagttgaaatgaaggaaaaaatgttaagggcaaccagagagaaaagtctgattacccacaaagggaagcccat

SEQ ID NO: 472891 - DNA, 552 bp, Homo sapiens
gctgcagggtcaaccaacttgttgtcgggaccccgaagctgaatggctttcttctctgttgacccttggctcagcccagaagtacagggaaagcggaatctggttccaggaaaaccaacgctcccaactccaaagagtcagggatggatcctgctgattggtgcgttttacagagtgctgattggtgcattttacagagcactgattgatgcattttacaatccctttgctagctacagagtgctgattggtccattttacaatcctagctacagagtgctgattggtgcctcttacaatcctcttcattcttcatctccaaatgtagtacatccatccgataagcctttccttaagagtgatctacgacactccccaaataagcctacacttgcctatccagaaagcaacagcagagctatattttgtgctcttaagaatcttaaaggagttggcaactgttgaactgaaagacaacttagtgtgagaatcggaggcattagtgggaaggatggaggcaaaagccaaccaaataactaaagtttgaaaata

SEQ ID NO: 472892 - DNA, 598 bp, Homo sapiens
ctcaggtaaaggtgccaccagccatagaggtttctcttttctctctgcgcatgcgccgccccgcccacttcgccattttcctccggaagtgcggatcccagcggcggtcctgtagctgagcaggcctggggcttggttctatgtccctgtgggtaggtgcgagggcgaagaggaacctgtgggcctcgggggatcccggggggccagaccagtgttccccatttgtgggggcagacgcgtgggcgcatcgcgggcaggaggggcctgacgtgcatttgcgggccgtggaccctggcggggtctgggaggacaggcgtggggtcccagcagtgaagcgggttccagaggggcaggagtgggtaggcgaggctggtggccctgggcccggagtctgcaggccgcgctcctgtcctgccactgagggacccggttaccaaccctcatgtagctcagtttgcccatctgtcccggtgctaacacacagttctcgggagactttccccattcccagaggagtagtgcgaaatgcgtgtacctctagtcttaagctgggcgtttgtattagttgggttttctggtgtctatttagcaagtgaag

SEQ ID NO: 472893 - DNA, 671 bp, Homo sapiens
gctagcacctcaccatctcctcctgccggagcctcttctctggtccattgtcagtcatgctctcagccatgctcggtgtggaagaactgcggtgtatgtcagcattcacactgtacaacctgagttcaaggatcccagccggagaggactggtcccatccaacccagcctagcagtcggctggcctgttctacttggaagtctttgtcccagacacaggacagggaccaaggggttctggcaagcccagctttcaacagcaacatggagcagatgacagtggaggaagggcctgaggctttacctgaaaggaagcccaggaaaggtctaagtgataaaggaatctttatggatggggtccatagttgctgtggctttgacacaaattgtgcaaatatcacaatccatgagcttgaaaaccaaatggggaaaatgaaaaggactctagtgactgggtccaccaccaccatggcctatgggaagggtgctattgctggaatgtggttgtggctgcaacttaacttggatttgcagatggagacagtacaaagtggaagaaacctagatcctcgattgatctcatagaacagagcttctctgtcagccagggccaccagactgttatgtgtcttttacttactccaatgtaattttggggtctctttgttattg

SEQ ID NO: 472894 - DNA, 521 bp, Homo sapiens
gcgcacacacacgggtatatgtattccatacagacatcagaagaagacaggaagatgtgggaaactttgaaacttcctagagacttgttgaatggctttgatccgaatgttgatagtgatatggacaatgaagtccaggttgaggtggtctcagatggagatgaggaacttattgggaactggagcaaagaagaaatttctaagcagcaaagcattcaagaggtcacctggcttattctgaaagcattcaattatatgctttcacaaagagaaggtttgaaattggaacttatgtttaaaagggaaacagagcataaatgtttggagaatttgcagcctgaccatgtggtagaaaagagaaacccattttccggggaggaatttcagcttgctgcagaaatttgcataagtaacaaggagccaaatgttaatagccaagacaatggggaaaatgtctccagggcatgtcagagaccttcacgacagacaagcccttccatcactggcccagaggcctaaga

SEQ ID NO: 472895 - DNA, 518 bp, Homo sapiens
gctgctctgtggacctctcctgtcaaatattaatcaaggttatcattggctatttgtctctgtgacccttgggctgaacaagaagcatggcatcagcatcggcttctagtgagggactcaggccacctccactcatggtagaaagtgaaggggagcaggctgtgcagacatcacatgaagagagaagaagcacgagagggggaaaacataaagagctgtccattttgactctatgtggctcacagagtaccagattattatttctgccctgcactgtgctgcctttaagggctactccacagcactacctgcctggtgctgccttcaaatactgctctgcagcattgactgagcacctgttgtgcaggcatccacttgctcagctcaggatggggaggcagcaggcacccatgactcagcagtgcctgtggcttatggccagcatttaccctgagtggatttgggatagtttaaacatcattcttggatgaatttttttttattatactttaagtttt

SEQ ID NO: 472896 - DNA, 585 bp, Homo sapiens
aactgcaggaactgaggaggacagcggagggcagctctggcccgggcctctgaacgtctgatccattgtcctgctcctcacagtccatgccccagaggacctcacagctacagagccatagttgggaaacagatccagggcctggctctgagaccaaggctgaagacccaaaagagcaaaagggaccatttataaggcccttcgatgtactcaaaaacccaccagagaggctcctcttcaaatcccacacggatgttaggcagtgcacaggaactggtattgatcctggagatacactagtgagcaatgcagacaataatatagtgagaacttcaatatgggaggctcagagtaccatggaaacccacaaagggggaagtttagcaagtccagggcctaaaggagaaaaagaatcagcttttttggtaaaacaaagagttcagtttcaatgcatggaaactgtaagaagattctggctagaaataaagaaaaagtaatagaactgtttggaaatgaaatatattgttcatccatgcatttaacaaacatttagtcattgttaattgaatatttattatgtgtcag

SEQ ID NO: 472897 - DNA, 1027 bp, Homo sapiens
ttctcacatcatcatcaccccagaaggaaagggtccagtgttctcctgatccagacctccatggagatgctgctcacgctttgtgccccatctgcattgtaccagctcaaccacgcccatggcttccctaacacccatgtcgtgatgagtctcaaatccaaattcctacgcctgatccatggatccaggccagcatctccactttggtgtcccacagacacctcaaatacaacatgtcaaaaacggagctcattcctccccagcctgctccaaaccctcccttcctcctcttttcctttccttgttattaacacctcactcccccagactgccaagccagcaacttgggctcctgggcctgacaccaacggcttcgagagccccacgcccgacaggccttccatggctggcaggcaggcatacctcccaaagagaacagatctccagctgcatccaattgcttgcagcttccccaacaagctgcattcttctgccttttcacatgtaaattgcctcttaaatgtctgtgcctaaacctcatcgccgcttggcacctggtgaattcctgctccttcttagaaattcggcataagcattgctccctccaaaagccttctctgacgcctgtaggcctcaccacattcatatccatgttacggaacttagcacactgcaacactacccttgaatatctttctccaaaggggaagggctacagttctatttatctttagattcccagtgcctgacacatactaggtttttgaaagcttgatgaataaataaatgaagaaacaaataaaggaactcatgaagggcaaacacaaggggacagctgtggagaatgatttgatgtataatacccatattaattgggttttattaactacagaaatgattctaacttttgtaactccagaacctctttagttatcacatttcttggttatacatgtaggttggaacatgcatgtgaaatttttattccgtaaaccatacttgattagacaaataatgtaactatatt

SEQ ID NO: 472898 - DNA, 1840 bp, Homo sapiens
tatcacctccttcgatggttactcatctgttttgaccacaccgacgtgggccagagtttgccttcagtcacacccatgaaagtctgggttttgttgtgttacttccgcagaaagcctacagaagtggatgaaaatagaaaggagctgaaacaaggtccctggcactcagtgaggggttgccatagggagaattggagggttctgggcatgctaagcaccgggcttggaaaacacagaggagagccagcacccattggctgtgggcctggaaccaaggctaggaaaaaagtcaaaccaattgttccaaagctggtaatagaggagtttctcagcacatccctcctgctctccccgcaccccaccccgggctcccacagcccccggggaatcatcagcccagggcgtccacatggaagaaccgggtcagaggccactaatagactaagaggcattgctgatggcagaagtttcatccccagatggaggcgatctgctccaccgtcgacagagaaggatgaaaatgaccaatggttccaacaaaagcttgactgttttagtaatgatagtgggcaagtctggcaacaggtaaaaaacaatgaccacggcatggtgggatacggaggtttaaaagaggccatctcttcatctcttggttctgccttctgcattggccttgctcctgggcaggcttctccctatagcactaagatggccccaggctctccagactaacgggtgcttgtgatttccaagtaaaagtcagggttttagtgttattgagggaggagtttgtgcttaaataagattactcaggttctaatccaggtttgccaaaattaaaatttgattttattaagtaaaaatttggctttattaaaatgtataactttaataaattataaatttagaaacccagttcttccttaagctttgaaaattaaattatgaatcttgtcatctatttataactctagcaagtttcaaaaatcacttttaagggtgctttttataacctaataaaattcccttaaacatttaaactgtgtttataaatgtaatgtattttattttctttgaaatactttaaatgcctgattaacgcacaaatcttctcaaatcttagtctgataaatcagatgcattaaaactgtacatatggagaatcttaacttctcttcaatgtttttatgccttttatgaccttagtcaatttctcttattcctttcattttaaagattcaagcctaaattaattactcaaatgcccttttacattggaatgactagactaatctgttaagtaagcaaattctcttaagcattaacagtgtttatactactcaatgtgcacagattgtttttacttctatacttaatgaggctgcatacaaccagcagtcttgattaaatcagagttcctcaatcttggcagaactgacatattgggccaaataattctttgttgcagggtactgtcctggcatcatagggtgtttagcagtgtctttcatttctaccccagatgccagtggcaacctcttccccacccctgtgacaaccaaaaatatctccagacactgcccaatggcccctggggtggggtctgggcaaaatcacccatgttgagaaccaattgaccaggccttctatggatccattttctttgtgtttgtgtttgtctaaatgcctgggttggagcctcatttatttattaccattcttacctgtcccctgtggtgtcaagagagatgcagggggcttctgcatcccctgacccataaagatctttctgtatcatacaagaggtcactgacttgtcccacgaatgtttccgcacttc

SEQ ID NO: 472899 - DNA, 864 bp, Homo sapiens
cgatagtgagggagtgcttgtgagatctgattgtttaaaagtatgtggtacctcccctgtcactctctcttgctcttgctcctgctcctggcaaagaaaatgggacttgctgacaacctgtgggttgtgtttggtggttcttgcgcaggatcccttgaagtgtggttgagaataaaatactccaagttgtttgctgcagtcgtggacagcagtgcatcactcttagcaaaagttgatttttatgtgaatgcccagaaattgtggcaggcttctgacatcatggtggagatgctgaaaagctcagcaaaccatgatgagctgacgaaagatttcaagggtgctgtaggcagaacccgagagggtgttcagccagagtgtgagggctacaactgctgccagtttgcagaaggagtaggcttaagtgcaagatgtcttagagagggtgaagttaaagctgtgctgaacatgtgcaagaaggtcggagaagatctggaaatgaaacaggaagacagtatgaagaaagggtggatggaagagaggatgtacaagtggagaagatgtctgagtaaggagtctgggagggcttacccgactttccttccaagataaaatctcctctcagataagtcaggatccttaattccattttcagccttaattgtcttttgccatgtaacctgatatattcacaggttgcaggaatctttgaagggaccattattctgccacaggttcctcgttagattccaaagaatctggaggttttattcctcaatgtttctcctaccgagcctttgagcataagaggtgcttaagcaagatttgttgaatgagcacatttattctaaatggtattttagggaa

SEQ ID NO: 472900 - DNA, 779 bp, Homo sapiens
agagtgaggggatagccctccagcagctggtagcagcgcccagcaggacacgggctcggaagtatgcaactttcacagttcctgagctgctgtgcaaatgaggcgacacaaatgagcagctttcctgagtttgaggggccagctcagaatgactcctagccttctgctatccctaattgtctacctgccttctgcttacttccagaacacagaattaaagggcacagccaaccagcagggtaacctgaaggcttttcttttcatgactttcatgtgcatccgtgtgaagagaccaccaaacaggctttgtgtgagcaataaagctgtttgtttcacgtgggtgcagggggcttccgaggtgatcgggcagcgtcagtcttcagctgctaagccaagaagatcttggaaggagtcagagagccttgggccagagttccaggggctctgggagtggctgccaggtgagttggacagtccgatttccagtggggatggaaaaattgaaagtgccattttctggctatttggaactactgtagagtttgtattggggtcaagcggcattgcagaagaaaataagatgcttagattttggtcaggtgagagttgaagaggttttaagttcttaagaacacaggctaagggagaagaaggaggaatggagggtggaaggttgcccatagtgaaggaggcaagcccagagaaaagagagggtagagacacagagggaaggggtttgggggtttttaccctccagaaaagtgggaaaggggtcgggg

SEQ ID NO: 472901 - DNA, 638 bp, Homo sapiens
tgaatatctgcacgctattttgtctttccaagtgggagaggcacgctaacatgtctgcatgcctaacttttcctggtcatgtgacaagaaccaggtttttttctacaacagtgatacccatcatatccacaggttttacccacactgaaggggagatgaagagggttggaaataaatcagacaaaaattcaggtccttctaccttggcaaaatgtctaagggtccagtggtatattgcatgtcaagatatcttaacaaaggtgaaggccactcctgctattggtcaatgggctcatgaacaaagtggacatggacgtagggatggagaatatgcatggctccagtatgtggattttcactctccaaggccaacctggctatggccacttctgagtgcccaactgctagctgcagaggccaacactgagccctcaataaggcaccattcctcacggtggtcagccaatcccctggtggcaagttgattatattgggccacttccatcatgggaaggatagtttcattcttactggaacagacatttagtctgatatggatttgcctttcctgcatgcagtacttctgccaaaccactgtctgtggacttacagaatgccttgtccactgtcatggtatt

SEQ ID NO: 472902 - DNA, 582 bp, Homo sapiens
gcgggaccccactgaaaaccagactgtcttctcagcttagcagctgaagactgatgctgcccgatcgcctcagaagccctgtagaccatcacagatgccgagctttgggtaactctcacagtggaggcaaccgatcacatgccctcaccatcccattaaaacctaatcacccttaccccgctcaacgccaatatcccatcccacagtacgctttaaaaggattgaagtctgttatcactcacccgctacagcatggccttttaaagcctataaactctccttacaattcccccattttacctgtcctaaaaccagacaagccttacagactgaccctgacactcatcaggctcagcaaattacctggactgtactgctgcaaggcttcacagacagcccccattacttcaaagctgctcccacactggctttccataactcatcccaaccctttttcatcacacacagccaaagtgcagggctgtgcggttggagttcttacacaaaagccgggaccacgccctggagcctttctgtccaaacaacttgaccttactgttttagcctagccctcatgtctgc

SEQ ID NO: 472903 - DNA, 616 bp, Homo sapiens
tcccctggatggcccgtgttccatgggatgggcccagggctcagatattcttcacggacaaggaagaaatctctggattgccaacatccaattccctaactcaaaacatacattcagatctctgagcttaaatgccccttctgtcgaaagtggggagctaccattagtcttgcctgtaaaatgggaattgagaagagttcattctaattccacggttatgcaggtggaactgtctgtgtacattctggagttgtgtgaatgcattagtctatgttgtagcctcacaccaggagtttctctttctaactggtttatgtacctcatttttcacagagcagcttgttttgacccgaggcatatctatggccaaaacggaacaagcccttattggaaaaatatgtctgtataattaaattccagtattcacaatttccaaaaccactttacagagagaatatgatcagtcagtgtagcaatccccaatacaaattaaattaagcattagggtccatttgaaatggttacaagcgatacaagaaatccaaagcttttgtggtccattcaaaatatttcaaatgcttgaagaaatgacagtattgactgaggtatcaacttg

SEQ ID NO: 472904 - DNA, 546 bp, Homo sapiens
gaagatcagcctgcagtcaccccttggcatgcaggtggccgtgccagagttgacagtattgtgcttggtccagtcagggcggtgtgggctggagctgggaacaattcaaaggaggggggaaagcccacagacatgcgatgaggccaacgatgaggtctcccaaaggaaagtgattgaagacaaagacccattctgccagtgggatatgctgggaataccaactatacttgttactgagtgtgcatggctggtgttggccagccttcctgatgccagcaagaggagacagaatggaacgaacattgatttatctgtggccaccaacacttgttcccctcctcaccttttgatagtggaaacacctcttctattttatgcagcattttgttgggaaggaaatcaaggcatttatccatctatccttctgctaattgccttaaaagaaaatcctggttaatcttgaccaatcatgataatttcattctctttgccaaatgtttggcttaggggtggaaatgtgacctaattttagccaattatgtatac

SEQ ID NO: 472905 - DNA, 745 bp, Homo sapiens
ttccaccgaatgtacaggaagcatgatgctggcatctgcttggctaccgaggaggcttcgggaaacttgcaatcatggcagaaggcaaagagggagccagcgcttcacatggctggaaaggaggaagagagagatggtggaaggaggtgtcacacacttttaaacaaccagatctgatgtgccccgagctttctccgggaggtggtcaaaggcctgccctggcacccgaggaccattgtgtcatctttctctactcctaccttgttgtcttgccgcccactccaagctgcccctgtgcctgtgaccctgcgccagctctgcctgcaggggaccactgtctctgttggaaattgcccttattcctcctctgcagcttccaaagcacggtactggcccttctaattcttcacatcacagttcaaagctggtgtattataaagtctattaactattcacaagaccctctgaaggcttggaagagagaggagggccaggggagagcagagagagagaagcatccaaatccgcacccttccaaaacaggacacaagaagcatttgaaaaattacccacataggggccaggtgaagtgaaaatcaggttaatttaataaacattcacggataaacaaaatgtaaaactaagccttgtcaggatcatagtgccagtagtaaattaacttcttggcaaaataaaacacaaccttttaaagaaaaaaccataatccagatgttttataacatat

SEQ ID NO: 472906 - DNA, 559 bp, Homo sapiens
tgatttccatagtgagtcgcagatttcctgcttctgtattcagctgcatggaaaatggatggaaagcgaatggttcagggagtacatgtgcaggtttgttacatgggtaaattgtgtgtcacgggggtttgttgtacagattattttgttacccagggtgagggaaggcagggaagaatgaagcaaggatgcaatgacctggggccagttgaggtcagctggagtaatggtttaacccaaggacttgatggtgtgaagcaggcttccacgggtgagggcatgagcacactaatcaaggaccaagagtcttctcttgccaacaatctgtctgcaggtctgttggagtttgctggaggtccactccagaccctgtttgcctgggtatcaccaacagaggctgcagaacagcaaatatcgctgcctgatccttcccctggaagcttcgtcccagaggggcacccacctgtatgaggtgtctgttggaccctactgagaggtgtctcccagttaggctacacagggatcagggacccacttgaggaggcagtctgtccattct

SEQ ID NO: 472907 - DNA, 498 bp, Homo sapiens
tcaaggctgggaccaggtagagaatgctcttactattcaatttcttagtccttcaagctcccttcaaatcccactgtgcacagccctcaaacttctttctcaggaaaatctactcttccctgtgtgaaacttctcgggcctgtctctattttgtgaattctagtgaaagtttacgatggatgctagaggttgatttcctcatgcccttgtcagccccaagtcaggaagggaggaaacttacactcatggtggaaggtgaaggggaaggagacaccttcttcacaagatggtgggaaggaggagtacaagcaggggaaatgccagatgcttataaaaccatcaaatctccctcttctctcttcttccagaataagcaagacctgatcatgtcaatcccctgagtaaaaacctttgatgatgcccctttgtccacaggacctagtcagactctttactgtgacaatcaagactcctccatgtgggtccacatgcctctcc

SEQ ID NO: 472908 - DNA, 1694 bp, Homo sapiens
gggtggtcaaaggggcaggttggagtgcttttcctgtagagactggtgaggtgagagttggtccaatcccagctctcagccagatcctctcctgagtgcagaagtggatggcattgagaaagaagcagccacaacaaaacgggcaaggccccagagggaagcaccttgggtgactttaggtttaggaggcaggctctcagagctgaagcttatatggttccaaaacctccttacaaccctctaggtgaggccagagtgttgcaaatgtccagccccgtcagcacaggctgcccggctgcccggctgccagctgggtgggaggcagcactgagctgctgctgtttgtcgggattcaggaatggctgtgacagatctcttgtcccttctcctcctctgctgggattctccttttcaggaatgtcctactctaggtctggggctggctgtggtctgctcctgctgtggagcccgtcttccccctgccaggtggccctggctggggacaacacccaggagtgcactgcgggggttgtgaattgggcccacaattgtgcccataaatggtgctcctgggctgccagccagccaggcatcttagcggcagaacccacacacaggccctggctctgctagctggagtctgacttcttgccccctcctctctgctacttgtgggtttggccaaacttccctcactcatggcccatcgcagctgccccgcccaatttctccattttataactgtccagcttctgtccttgttgctaacttgcttggtctctctctacttcctggtctaaattcctgaaagaagggataagtgaaaggaaccagggctccttggagaaatggttgattccagggctgacgtgggaaagatacagatgagtctggaatatactgtgatgctggaaggtaaagatgtgcttaggaaaggtcgaggatgcactgaaaggtcagaggtgtaacctgaggggctcccaatggccagagctggaacaatttgagaacaaaataaacaacggtagtgttggattataacctatataataaaataaatgtccatgattccatgctgatataaaaatctactgaataaagaagtaactaaatgacggtgagggacagctcatggacattatcattaagtggacatcatggtaatggttgtggcagacaagacccactcaccaatggatgctaaagtgggaattcatataaagatacgtagatacagagtgggaaaaaagctgaggagaaacaggatgtttgcataatctcaaagtctctccccatgattatattaatgtcccagtggagaaacttggcagacaccactttagccaagcaaccaaggtaaacatcaccagtaagaagacatatcgacatcacaagccccttgataagatgcaccaagaaggacataacgcttctgtggaattcttgcaaaaatgcataacctcaccctagtcttgggaaagcattagacacacacacactctgaaggccagtctacaaaacaactgtcaaaggtgtcaaggtcacaaatgatgagaaaagactgagggactgtcacagatgaggagaagaaggggacacgttgaccaatcgcagtgtggactcctggaacactgaacggacattactcaataaagctgtaccgattgtaatttcctgtttctgatcattgtcac

SEQ ID NO: 472909 - DNA, 607 bp, Homo sapiens
cattttgcctacatttttcccattcaatccacacaacaatacatcatgaggtaggatctatttacgttttactcttggagaaggtgaaactcaaagagaccacattatttccccaacatggcacacctgcatgtgggagtcataggtccactcctcagcagccttgctacaggtggtcggctgcagcgaacaggaacagatgaagtctacataaatgagcatctggtcaatgtttccaatgaagacacacgtgttcatattttacccccgcaaaccaaatactttgagatcaattatgtaagaaaggaacaccacctggtccctggcttgtccctcacggtcaccgttacattttctccagatgagtggcgatactattatgactgcatccgtgttcactgtaaggtcaccagtgtgactggcgtgcaaagcttgttgcccagtgacatggcccaagatgggaaagtgttaggctgcagaggacctggacagagtcaggagacgcggtttgctgcaggcttcccactgccctgtgcctaaagcttcatctatcatgtggtgctggcagttgccgaagccttttcaaataacttcaacatactccctt

SEQ ID NO: 472910 - DNA, 1015 bp, Homo sapiens
tgtgcactggccgggcatgcacagcaggaagtggcagggacaggaccggagcccaggcaagtcttgccatttccaaggcagtgcctgaacaacatgctgctgctgaagatgctgctgatggtcatgctgtctcctgttactcattctttatacgttcaccttgtcctcccaaatagagtctcaggtcctcctcgcgggtatgagtggttccgtgggcctcctgtaaactctcatgttgcccagcacacaggcctgtggacagtaaatgttgatttgccccttttcttggatgtgtgtgaaaagacatgcatcctggtcttgagggacaagccgcagttcagaccctgtcaagttggaggaggggagagttcagatgagggctgtgggtgtgttaggaaggtgaagttgaaaacttgcaatgggaaacacaaaatacagtccaagatcatggaggcctctccaaagctccaggctaggcagaaaacgagcttctgtgagaagaccagtgcctgctttgaaaggagcctctggccagaggtgtcttctgtccctgccgcccctgtccttcccacgtgcttcatcagagtccctgcatcgactgtcatctgtgtacttggctttctctgctactttgggacccctgagggcagggcttgtggctcagtctttgctccccagagcccaagcactgccattggtggggacagagcaggcacccagtgcacaggcagcattagtggcctggagccactggagaaggtttcctccaccttttctcctgtgttctctgatgtctgtgcatccggggcttcccagctccaagaggaactcagcaggtgtgcagacgacacacacccaatgcagcaggaattctgtgctggggttctccagcagttcccctcttgcagcatttactaaagcagatacaggttgagggcccacagacccaaagatctaactttcggatgcaaggattcctgtttgagaagcaagctaaggttaagagaggacctct

SEQ ID NO: 472911 - DNA, 1100 bp, Homo sapiens
gaagcccagcatggcccagctgaccaggatgaggccagcctggcagcagctgctgggagagaatgcagttctgggctgggctcagttttcctctaactctgtgtgtccccaagcaggctgtgggggccttgatgcccacaaatctatctactccataaatggtctcatcagacaaagcccatggccagcctgggctggcagaaccattgcaggcttttcagtcagacccacggaactgatggtcaatggaggaaataagtcatgtacacagataattataatgacaatgcaaggcagaaagcactatatgccagcagaggatgacacagctcttctggaagaggtatgcagaatgatcctggaggagcagcagggagaggtgtgggccaccaacctgccagctgctggggacctccaacaaccttcagctcgtatctgggccagctggggctgcagagcctggatttccagctgacattgcaggtggtccttggcctcagctgcctgtgtgagacggcatgcaggtgactgcaaggcaagctttcattcctcttcatttttcaaagcctttaacctcccttgcagctaggatgctccactgacaccacagagtagtatgggaaacaggacaaaaaaaatgcatccttcctcagggtggcttttggttgcttggtatttgttatttccaattaggcccaagttaactggaccatggcatatgggtgttcaccatggatgtttcttgtcctttctccactgccactttctgaatccagggccttacctcctcagctctgactcctgcaaatagctttctgactgtgtaactgcccctgggatcagccctttcattgcccccatatgctgctgacaggatgtttctaaagcacaatttgatcttgtcactttccaagtcagagcattttggtaatttcccacttcctaccaagtcaggtccaaactactgtctgcttccaaaactttccatcatcctccattgtccctagccccttaaaattttagccccaactaattgaaaaatgtatccctgtttcagactgccagtgccctcatttctcccctctacttcccccaccttc

SEQ ID NO: 472912 - DNA, 782 bp, Homo sapiens
tttgtgctgcctgttccccctctccacaccaggagatagcatggatgccacatgccttgggggcttgggcttgattcagcaacctgactcccaggggtgtccatttttgaaagatcactctggctgcagagaggaaaatgaattggagagcaccagactgcaagtggaagacccagaaggaggtgattgcacaatccagcaaagagatgataaaactgtggacagaaactggcagattgacaagatatttagaagatctgctccacaggtcttgggcatgccattctcattgcagctgcaggagcacaagagggccagcttaaatataccagcatatttcaaacctctgcctgcatcatgttcaccagtgtatctttggagaagagagtcacacagccaaattcaagaagtggaaaaatatacttcacctctagtgggaggaattgcaaaatcacatgacaaagaatgtggacatagggagggtgaagaattagggccaattgccctatttatcgcatcactcttcaacacctctgcttttccacgaagaatcatttgggatcattcagggatagaaaaatggctgttgagacccaagtctcttttccactctagtttctttcatctccatgttcctcccagcaattctttttcagggctgtgactttgtgttcctttcaaggagggtcagtcaagcttctttgattgtaagccaaagcaaacaactcttgccattctatcaaaaagggaatcaaatgaaggctatcaggcagctcaaagac

SEQ ID NO: 472913 - DNA, 730 bp, Homo sapiens
gccaggttcctcgggggccaagcatccgtgtgtaccaagcaccttctgtgtgccatggagcacctgctacgttcttcccaagccccgccaaaaggtgtggagatgaaatgggacttaaccaggaggctagccacggcaagacttggtgcccagctgggtaggaaggagaggaagcacgtgaaggtgctgcgcaggtgtcttcagcaggatgagtggaggaccactcagctctacacacacctgtgttcaaatcctgcctcggcctcctaccagctgtgtaactgtgaacacacagctcctcatccatccactggtgactgcatctttattcatagctttgccttccttactgctgtactagaaaaactattcctgttcccaccgattgctcaggatcctttgccccctcgtcctcataacaactctgctcctgaaattatgccctctctcttgaattattgatttctccctctctactgggtcattcccatcagcatacaaacaggatgtattatattttgctctaaaacatcaagttctctcctgcaccccatctctctctcccccaatcttcagtcccatttctcttctcagcccgcccagcatccatgttctctggacactgtacctcctgtcctagaatgggcccgcccaccagtgacacacagcagacccacgacgaccaagaccgaaagcctgaactcaggaggaggaggtttctgggttcttc

SEQ ID NO: 472914 - DNA, 1110 bp, Homo sapiens
ttggagaacttggaaggcagtgtaagtgtgaaatgtcttacagaagagtatgacgttggaatggcccccatatgtgacccgaagaaacagaaggataaactgctgaagctctatagtgatcaacagaagtatgctgatcataaaagagcaaagatctatcacaatgaactgcaaattgaagagagctgtgaatattcaacaggctggtttcagaaatctaagaaaagacatggcattaattttaaagtttgtggtgacaaagcatctgctgatcacaaagcaggagagaaattcattgatgagtttgccaaggttaaggtcatccctgatgaaactctgatgtcagaagaaatctattatatattgctgataaaacatcaatgtgtcggcattactgccccagaaagactgactacagctgatgagacaatccctgtaggaattaaggatgccaagggcagaactgtgctggaatgtgcaaatgcagcaggcttgcataagtgtaaagttgctgtgatagaaaaatcttgtgtactcactgttttcaagggatgactttcttaccatttcattactatgttaacaaaaaggcatggatcactagggacatcttttccaattgttttcacaacattttgtaccagcggctggtgctcactacaggaaaaccagattggatgatgactgcaagattttgttataccttgacaactgttctgcttgtccgctagttgaaattctcatcaaaaataatgttcacgtaatatactttcccccaaatgtgacttcattaattcagccatgtgacgaggatatccttgggaaaataaagagtaaatataaaaacacattcttgaacagcatcccagcagcagcgaaccgaagtgtgggtgtggaaggttttcaaaagaagtttagcatgaaagacgccatatatgctgttgccaatgcttagaacacagtgactgaagacacagctgtgcctacctggcacagcctctggcctgtgactgtgttcagggatgatgacgaacaaggcagtgactttgaaggagtctgtaagtcaagtgagaatgaaatgatgtttgatctcgtatatgcagatatata

SEQ ID NO: 472915 - DNA, 681 bp, Homo sapiens
agaaagatctggttaggtggtagcagctcttccagttcagtttacctagccctagctgcatgaccaagacaggggtttcaaagcccatcccgctctcatgttgttcagctctgatctgtatgtggaatcccagacccctttcttatgcacacttggctgggggcagggtgaagatacttccagcccattattatctgcactctcagaagtgtgagcaggctaacccgggtccagagcggcggaaggaatcagcgctccagggctccgagagtcggacgattggccccggggaagccagtttgctgggaggcctggtgaccttggctgctgagtacccctccaagcacagtcagggaggctatcaggcaagtctacaatgggtcaaagaagcggatcctctgtcctcttggtctgcgacttttcccatgaaggacagacctcgtagcctacatccctccataaattcagatctaccccgtgagtaaaaaagagagagaagggctctaggggagctggggctcacaatcttctgctttcaataatgcttttcctaaacatgaagaccataatgtaacgagggcttctggctacagcaagcttgcacatccaccagtgaaccagggtaacaggacagcagcagaaggggtcctcaccctctgagcactgcaaaatgaacagctc

SEQ ID NO: 472916 - DNA, 585 bp, Homo sapiens
tatattttctgctaatgctgaggctttaggcacatgctgttccccttggctggaagcgcctcctcctcctccacatgctgggcccttattcatccttcaagaaccagacagaatttcctatcagaaaggcatccccgccatactttcgttgctacaacaaggtgcgcgttcaagaagtctgcctgttggaggggattgggggaggagtccatgttgcatatgggagtccagctggcaagatgtgggaggaaaggatgttccatggcctccacttgagggaggggcagatagagatgcaacctgagaaggtggtgggcacagaactattgataagcctgtccgattactgccaattctggctcaggccctcctcttgttaccttgttactgcagagaaagtcacccccaaacacactgcacaacaacaggctttctgtctgcaggctccgttccagtcacaaaggaaatggagttggacagacctgttctgaccccgtcatgtgttttaaaatatagtgtgctaatggaagagttcaggtacgataaagccaacagattaggagactgctgccattgaaaagacag

SEQ ID NO: 472917 - DNA, 522 bp, Homo sapiens
tggttcctttttgcatgctgtcatgtgtgtggttgaacctgcaacatactctctaatctcattttggaaaaccgagaaatgtcctggggttatatcagattttaccaaagcagatcccaaagacaggactgcaggccagaacacaggataccgggggctccaggaagcaggggtcaggctagggaaagccaccctggcccagcctctccagcagtcccttcagagagacctccccttcaagagcaggaaacccagagctgggatctggactcaacccctgaaccccagggacacccatacacaaccaggcagctcagccccatctgaaatctgcttgcttttcagtgtcatgcttcccattcatcctcataaaagactccaaacagcttccggtgactgggtccaaagcagcccaggtgttggattatgaacgggtttttgttttcttctttagctatgtctgtactttgcacattgttgttgttgctgttgttgttgttgttgttgttaataagtgagtgc

SEQ ID NO: 472918 - DNA, 1466 bp, Homo sapiens
cttctgtttacccatattgcagcatgagtgttttatactggaaaacacaggaatggctcccttgggtcagcctcatggatatccggcttcatgggataaacccaactttggggcaagctgtcagggacaccaagtcacctccaagtcccccccattgttggtgggggtaccgtatgggactggataagaacttgaccccagcgaccaagtcccctggagcagagtcagattgctatagtggccgcaaaggagtccacggcaggcgcttgctacctttctgtgcatcagggagcatgcctcccagggatctgatctttgccttggagaaagtgagtggaccagagagcgtctgccatgtaaaggaaattcaggcagaactgaagggaaccacacagacaccaatggcggttgacatgaagtccatcaagttggctactgaacaaggcaagaggccttgatgaatatatattaattttctatgcaagtgtatactcagggccttgagacagttggtccttcaagagcttcctggtaaccatgcccaaagatcacaggtgtaaagttaggttgttgatttgagagctttcttttttattgtgggcatttacagctataaatttccctctgagcactgtttttgctgcatctcatatattttggtatattgcacttccatttttattcatctttaattttcctagtatttcctgtttgactcatttgttgtttgagtatggtttaattttcatatgcttgtgaattttccagtttttcttctattattgatttctggctttattctatcatggtcagagaaaatgctttttatgattgtctttttaaattaattgagaattgttttatgatctaacatatagtttatcctggagaatgttccatgtgtactgcaaaagaatgtgttttctgctgttgttgggagagtgttctgtatatgtgttagacatagtcagtttataatgtcttaattcctccatttctttcttgatcatttgtctagatgttctgtccattattgaagtggagtactaaagtctttaaaccctattggaagaaaaagaggaattacaaaccaaaagtacaataatattagctttatttatctatgtatttatctttatcagatctttatttctttattacattgagttactttagtgtcctttcatttcaacctgtaggactacttctagcttttcttatagaacaggactgctagcaataaacacctttagtgttgtttacctgtcttaatgtctctttttaaaaaaatttctaaaattgacaaaattatacatatttttatgtacacaatgtttcaaaaagtatatacctgtgtaatacctaaataaaactaattaatatatgcattagtttacatacttacctttttttgtaatgaaacacttaaaattacttttagtgattttcaagaatacattgttatt

SEQ ID NO: 472919 - DNA, 724 bp, Homo sapiens
gcgtagggagtcatagagtctcacgggctttcgagggctaaatgtgattttctttggaaagagggtccttgccaatgaggtcatactggattgggtgggccttgaatccagtgattggtgttcttatacagagagatgtagagatacagagactcagacacattcagggaataaggccatgtgttgaagaaggcagagattggagcactgcaggtacaagccaagggacactcaggattgctggcaaccagcagaagatggaaggagcaatggaagatacttccctagagcagcagtccccaaccattttggcaccagggaccggtttccttgtgatgcaggaggaacagtgtcttgtggaactcgtgtttaagatgacaccaggatcttccacagccctggctggtcttaataaagctatagcagaaataaagacatccaagtggattctgaaaaagtcctcagaacttcctgagacactgtcaagatgctttggaaggccactggtagtcacgcagtcagactgccctatttgcaaataagtgggggtggagcctgaaccagaagactaactgttccttaatcttatagtcaagaaagagtaactagaaggaggttgctgactggttatccttcctgtgggaaggatagggttggagttcaaacaagaggaggtttctttagcaagaggtgatgtgaggaggttaaatcaaggtaggcttgc

SEQ ID NO: 472920 - DNA, 545 bp, Homo sapiens
cgctatgtgttatatgtcaggattttggactcaatcctgcaggtgatggcagccactgaagggttgtggctctgttttaaaacaaaagaaggagaaggagaagaaggagaaggaggagaaggagaaggagaaggaggaggaggaggagaaggagaagaaggagaaggagaaggagaaggagaggaagaagaggaagaagaggaagaagaggaagaagaggaagaagaggaagaagaggaagaagaagaagaagaagaagaagaagaagaagaagaagaagaagaagaagaagaagaagaagaagaggaagaagaagaagaagaagaagaagaagaagaagaagaaacaatgctgctagagcaggaagaggccgggagccgcagcctggaaaggccgacccggggcccactgggccaattagggcatgacccacaggtactcatttctcctctgggtctttcctgccacatcggccaaatccctcctcaaataggcttgcagtgcttgtgtaagcagagtatcaaagggagataatggatgtgaac

SEQ ID NO: 472921 - DNA, 512 bp, Homo sapiens
gggaggaagagaatgaggaaaagaagtggtttctggaaaggactgaaggagataaatatgagaggcatcgggaaatgtgaagtgggagcacgtggcatcacactcacctctcccatgtgctgccatacaggggcttcttcaccagcctgccctgctctgttaccaagtaccagaggccctggaagctgtcacagcacaactaggggaagtcagtttgccctggctgacactgtccacctcattcagggcccctcctggatgctggatctgcttctgttctgctctgaaatgtcagtgcacacatgcactgactctactctctgcccccaagacccttttgagggaaggggcttcaccgtttccacctctgcatcatctgcacttagcaccatgcgtggtgcagcagtctgcaccatgggttagacggactggaagcagcagggatcgggccccttgaaactcagcctggtgtccttgactcattggcaacttacaagcctgcctcatggcag

SEQ ID NO: 472922 - DNA, 498 bp, Homo sapiens
agacaagagagtgaaattgctaggtccagaggtaaaattgaaatataattcatagagcgaggacaagtcaccacactgatggcatggtctgatgcagacttagatttaggaacttcatttctagaggacaaagaaggctccagtggattctccattccccactccccaaagccctattcttgcccacctttgctcatgccctcctcctgctccttcctatttaaatctgctgtcacatcaacccctagtgtcaagtttggtcctcaccaacttcatgaagccatcagcagcaactctgaatccttaatacaagtggaagcagttactgttcacatagtcccattccttaatatcttcggctgctacgctttagatagtcgattacagggggatgagattgtgaccatgttaaatacatcaacatttgtatctcccagtggccgtagaaatagacaggcttgcaattcctttattcatcaatgattttactgtgcattt

SEQ ID NO: 472923 - DNA, 736 bp, Homo sapiens
aagctgagggagccggctccggcctcggccagcccggaaggggctcccacagtgcagcggcgggctgaagggctcctcaagtgccgccaaagtgggagcccaggcagaggaggcgcccagagcgagcgagggctgtgagggcggccagcacgctgtcacctctcactgggattacagaatgtcatacagttggtatagtacagtgttggtgtttgtcctggccatacactaccctggatgcaaagccgtcattgtgaagaacattgatgatggcacctcagatcgcctctgcagccatgctctggtggctggaattgaccactatccctgcaaagtgacagctgccataggcaagaagatagccaagaggtcaaacatcaagtcttttgtgaaagtttataactacatcaaatcatctactgcccacaagggcccgaagagaggccaaggtcaagttccaagacaggaacaagatgggcaagaacgagtggttcttccagaagctatagttttagatgctttaactttaaatatggcatctcattgcctcgtggcttctgttgtttccagtagaaatctgttgctaatcttattaaagattccttctacctgatgagtctcttctctttctgctttcaaaattctttgtctttgggttttgataatttaacatatctgtgtgttgaagagagtttatcctgctttgtgttgagttttctggtttttgttatatttt

SEQ ID NO: 472924 - DNA, 703 bp, Homo sapiens
cagcatagattcctttttgcgaagatgggcatgaccttgacctggcacttccacctccaggaatccatactacagaaaaaacttgcacatgtgcacagagatgtattcaaaaagatagttcacttccgcattattcgtaagagtaaaaaatcaagactaaaaaaggaagctgttaaatgttggaaaaccaggaagacccctattcctaaaaaggttctagatcaatcattttcaaccagggttgatcaccccccagggcacatttggcaatgtctagagacatttttggttgtcacaattgtaagaagaaagtgctactgtcatttagttggcagaagccaggggttttgcttaacatcctataatgcacaggacagccccacaacaaagaatcatctggtccagtttgtcaaccgtgccagggttgaaaatcctgttctacacataaacaaggcctctgttttaaagggaaactagaaactcataatgccaacacaggtggaagaattatggccccaagggaaggaaaaaaaaaaaaagcaggggcattggaatttcacagtctgtttttccaccccttttagcacaagagactgttattggaaaaagtgaccaagtcaaatagcatatgacaaatctcccacatgacaaagggatttcccagctacccacgcggtcgtaagagattagtcctaaggttccc

SEQ ID NO: 472925 - DNA, 555 bp, Homo sapiens
ccaggccatgactttagtgttaccaggccaatcacaatgattacaaggagcagagagcctggtccagtcaccttctttaaggtcaattgccaatcagccttgcaagggcctcaggctagagaatcagactttctggctctccccttctggggtgctgcctccctgctgggggctaaagctctgaagagcagacatctgtactggcaagcacagcctctctcaactggcttccagggaagacatcctcaaatagatacagctggtgccctgatggcaggagagcaaaaggattgtgacctaaaagccccacctaacaacctggatttatacgaaggaggaaaaaagtcctttcaggagcacacaggaaagtatatcaaagtagttatactacctgatggaatctgtgctccattctttccgatgatttgccctcaaagacatttacctaaggtggaatcccacctatgaattgagggggaagtttcctcccagaccaattacatccatgtggttgtctttatcttccttcctcaccttttttttttttttttttta

SEQ ID NO: 472926 - DNA, 1848 bp, Homo sapiens
ctctcctcctctggctttcctgcttcttctgttccctcatggctcctcctcagggctagtgtcagtgggcggctatcgccagccctcatctgagggggcaggagaaaggaatgttcctcctggtgcctggggctagctacaaccctgggacaggagctgcccaacagaagctgtggctgttaacagaggaattcagttataacccaaatcatgaccaggcagggcactttaatgaagtattggagacaactacaatatgcccttttaatgtctgtctgtggaccaagtttactgtttgcatttgtagccatgggaaagaacaggggaaacaaggtggacacaactctcaggggaaaattggcccctggttgccaaagcacaggaaacctgaagactggagaacgagcaaagagagtgaggagaagagactgtggggccatgctaaggattttggtctctccggtttgccctttcagaaaatcatccaggttgcaatggagaaaaagaaattgtagggagcaaggactgatggcaggaatactagttaggagtatctcttaattcacttgctcttggtctccttgttgcttttgtgtgtatcagtcatgtcactactttaaggtctttgcacgtgctatctctcagtctggaacactcttccccagataaacgcatggctagcatcttctcttattttaggactgtgctcaaaaatcattagagaagccactcaaaatgattagaaaagaagccactgaatataaatgacaacatatcacttctgcattcctgatcccctttctcttgatttgttgtgagccgtagcaattataaccacttgattattatatgtttaattgtttattgttggtctctccatattaactctaaaccacatgaaagcagaaactttgtttattttgttcactgtaatatccccagcatctcaaacagcacctgtcactgttaaatacgtgaatggataaagttaaatcagagtgtaacctatcacaggactacttgttattaggatttaccttaataataaaataataaaatctgcaatttactttattgcagaaataaagacatttcttctgtcaaagaacttcaggacctaaatatggtgagggtgaatgtatctgtggaattattcttcatggggtccctaaccctaccttcatattgatttatcctgaaaactgtttctttaaagattcacttataaattaaaatcaatgatagaaggatgaccatatttctttggtttggtcagggctttttcaggcgttaaaatgtgttgataattgcggctgtgtaactatctgttgacttgactagagtccttgtgacatctgtatgttttgggaaatctttttttttttttttttcacatcccttgaggaaaaacatgaagacctgagagtacagtggccacagctattctctgggaaccaacttaagggctgtcttccttttaaaaagcacaccacatatacccactcctattatgaatatgatagccatgagtgtgactgccatggagacccagctgcaccacagacctcatgtcagatgaacagacagttaaatgaatgaatttgctgaagagactgaatgtttggtttgcttacagactgtttttttaacctttgcccattcagcaactgttagtaactgttttgtctccttaccccacagtacagttggtcctccatatccatgagttctgcattggcagattcaaccgtgtattgaaaatatctgaagaaaaaggatggtttcatctgtactgaacgtgtatagactttttatcttgtcatcattccctaaacaatacagcataac

SEQ ID NO: 472927 - DNA, 703 bp, Homo sapiens
gacttggctttctgcgagtgcgcgccccttaagtcaatgtcctgcagcacaggatgggtactttctccgttctccctcgaaggtggcctggtagttccctgtccgttaaaaacttttggcccacaaaaatgcagaaaccagttcaagatttacataacagttcatggcaacagaatattgatcacgaggcagtacatgatgagttgccaaatgaactgcatagccctgttgctataggagtggagcttcctcaggtcctctctggaagtaagcagatcatgcactgcgagccagccgaaatgaacaagctgacagaggggaaggagatccaagcagacagagggaatagagggaatctaaggaatttgtctctgaatgaccaactgtactatacaggaaatattgggccatcaaaggatgtcatcactttaataagtagacacagtcaccaagaacattccagacagaaagagcagcctgaacaaagatatgaagaaggaagaagtgggatgtgtccagagatcatgaaaataatttggcccgattggactgtggggcatagaaaatggatgatgtggaaagaggctgtcatccccatcgtgtcaatgtggctgaactgcttcaagctttacatccacaaagcaaaccatccaggagagatatttttcttgtcaaccatttcagaaaaggccacatagccatc

SEQ ID NO: 472928 - DNA, 765 bp, Homo sapiens
cagggctgcaactctctctggcctctggacctttgtaaatgctctttttaagattcagactacctctctacaccacaaacttgcctatttctcaaggcttattgttaaaacattcaggttcacgttcactcagtctttcaactccacccatttttgttgatgtatctctgacccacactcctattagaggaataaggcttgtcattaataattcctcatctgctaattctttaaagaaactagaaagaggaggatgtatggaatctactcctcgtgaagatgctgtgaacattgttgaaatgacaacaaagagtttagagtattacatacacttaactgataaagcaatgacagggtttgagaggattggctgcaattttggaagaagttctaccatggataaaaaactatcaaataacatcaaatgctacagtgaaatgtttcatgaaaggaagagtcaatcgatgcagcaaacttcattaacatctgtggcaactatggaggtgcaccctcagatctcccttcaagcagaatctgctagaaatgattcagttaactgacagcttccaagtgtggggtggggggaggggggagggatagcattgggagatacacctaatgctagatgatgagttagtgggtgcagcgcaccagcatggcacatgtatacatatgtaactaacctgcacaatgtgcacatgtaccctaaaacttaaagtataaaaaaaaaattaaaaaaaaaaaagaaatataccttcttgttaa

SEQ ID NO: 472929 - DNA, 807 bp, Homo sapiens
cagcaaggtggtggcttcattagtgtttgcatagaggactctgcgggaggagcttctggaaagttctgaggtaaaatcaacaagattctggtgacagtgtagaggaaaaaggaacagagggaggacgtgtttggaaactacttcgatactcagcaagagatgatgtggacctgcactgtgggagcagcgataggagcagagaagagggccaaatttggggagagaggtgctatttcacctccatatccaatggctgtggggagacagagtggctcagcagtgaaggtgatatgtgcaggccagcaccctctgcctagagagcacgatgaaagaatcatggccctggaatcagaaaatcctcggtttaaagacctgggagggagtgacagtaagtcagcccgagtggtgaaggaaacatttggcactgtagtttttattgtgcctgtcttcagatgcattaccatcagtggaagtggcagctccactcgcttcgagcccagatctacagaatcagcgttgaatctacacccacaacaatgtggtatcagcatggaggatgctcaggattgcatccagaatgttcatggtgccgaataagagcttcttggccactctgaaccccaggcaaaaccagaggagctcatttcatgtcaggatacctaatgggtgatattaggagtaaataactcattcaataaacacatttggagccccacaatttgtaaaactttgagcaaagaattgtaggacatgcaaagggtaactgagtactggctgtagcaactgccatcgtaaaattgtaaactt

SEQ ID NO: 472930 - DNA, 731 bp, Homo sapiens
tctctccatggtgatgggtacattttccccccggtccatcatttcatcatttgctgaggtgctcagctctaggtggggagatggcagtgttgtgcagtctctgactcatcaaggctcccacactgacttccctgagaccctggaagctatcgagctggaccttgacctctcaagccagactggcagtcccccaatccaagataaacaaccctcctccccaactcgaatgatggatctggtttggtgttctgttcaagaactctctttccaagagtggctcaaaggctcctttgcagcttttaaattttacaatctcttaggagagaagacccaggccacagagttgctacctcctggtgctttggaagattctccctattcatactttctctcaaatcccacagctgctacttgctgtgagtgcagactagcacaaccaccaacacggacccacagtgtgactgtaaagccagattaaaaagcgcccatggtcattggaactcgccccagtcaaataatccacgttaccagtgccagacatcacacatccatttccatgacacattgcctttcatattatttctcacactcagaacagcatccctcctcctctgtctgtccaaatattaccagctctcacgtgccattcagattcctcatccgcactgaaattttctctccctacattaaatcaaataatttcagtccaaatctggatttgatgtaatatt

SEQ ID NO: 472931 - DNA, 867 bp, Homo sapiens
aataaggttattataataacaggtaattatgaccaaaagaaaattagagccaaaattaagtggtcattttcatatgaagcacacccctgcttgcagcatcagcagttcagctgcagaagaatctttccctctgtccatcatcatcacaggctggtgggaagtactatcaggctactgccaatgttcacttaaggccctaggtctctccagtcagtttgtggtgaatgctgccaggcctgagactcactcttcagagaagtgggctcccctctgccaacggcaggaagaagaggaagaggaaagaagaggaggagaaagaacaggaagaagaggagaaagagaagaaaaagaaggaaaagaagaaaaggaagaggaggaaggggacaggggagggggaggagggagagagggagggaagggaagagaaaaggagtagagtagagacagaatgtacttttctttatgtctggcttctttcaataagcttaaatattttgctatccatgctatggtgtatatcattattggttcatttcttttgattgctgagtagtattccactatatgaatgtaccatagtttgttattcactcacttgttgatgaacatttgggttgtaccaggtcttctttcatgtctgtcaataatattttgtagattttcagtgtaggggtctttttaattctttcataaactttattttcccacatgtctcctgtataaaatgttgaggggggtgtactagttaatttccaaagccctttccaggtctcacattccttatgtctatgattctgtgattaagttcctggaagtttaagtactgataaaagtgccattaagttctgtatactcagcactagcagc

SEQ ID NO: 472932 - DNA, 1248 bp, Homo sapiens
aaggcagaagagcaccaccttcttgagcttcttcacctcctctggcattgaagacttatgcaacttcatgtcgttgaacatgttcatgacaccatcagacagccacaccagaggccatgtttccagaagtgaaaaggagagggcatggagagccgcagaagacaagagcactgcagccgctgctgggacccgactgcactctccttcacaaagtattccccgcaagaactactcatccttcacggtctacttctatcgtagcagttcagtcttctgctgtttcttctggtaccagcctatggattgggtaaggagaaagatcagagactcctgtgctctaggtggtggtagaggcttcctgccagaaggatctgaggcagaggacgtggatggtgccatgctggcgtctctgtgcatctggcagcgcaacaaaggacttctgtctgccctgcgaggctggaagcataacacaaatgctttccagtctttctttgtgtggagagcagaccaagtgactgcaataagatcctgttacacatttgaaaaaaagacttttgcagagtggagaaaacctaaaggtggagccctgtctgctccatctgctgccctggttactctcatccagggcattcattctctttttataagtactgatatagaaagctgggaaggcagtcaaattggttcccggccactaaggccctgcatgcataagtatcacatgagggctatggacaccaagaccaatcaggccaggcttttcaggaagctctgctcagaatcaggtggagaacattcttaagcagtagtcaattattattcttgaatattaatcacaattagtgcaaaagactacctcttgccactaccagaattattttgtatatagagatcttatatgagcatgggaaaatttattttttaaatgctactctctgggaaacaaagtcattcactcaccaggtgtttattgagttaattttacgccagacactttgctaggcctagtgatacaaggtgaatgaggcatggcattgcccctaaggaaatataaaatagtatagagtttcaacttaagtgtcagatccaatctattaattggtagtggctgcctggaggattgtgttggggagaattctgaggctttgtctggacacagtgattgattagaacaatcttccttgaggatagaaaggggataatggtagatgtaccacccattttctgtacctagtcttctgagagacc

SEQ ID NO: 472933 - DNA, 679 bp, Homo sapiens
tgttgctcatctcatggacaagatttctgctatcctcagatgtgtagattagtcaaatatgggtgtgggacatggatcatcaattggtaaacaaacacatttggtaatttcagtgggtaacaattcttatgaactacaattgaagctgggggaggagatgacattcaagaagcgaactgaaggaagcaggagaacaaaccatgcagagatgcaggatgaagaggatggctccatcaacatcatcatcatcatcatcatcatcatcatcaacatgcagtgcaaagcccccaaggggctggggcctcagggaaagcacagtaagttttgggccagagtcattttgataatggagaaggcgatgatgccaagtctggggactctgcaactgaacccaggaccaggattttcaattgagaactaccctgctcaggagaattggacaatacagcttcttttaaaaatgtcccttctgttgcctagaaccaaaacgatttacttcccacttcctactatttctccagggaatctgttcacaacaaaatttcactctaaaaacaataagccttatctttcccagaaacaaatactctggagctgcctgtatggaccatctctcagaaagcaggtgcttgatcccaaggagaggcaccatgccaagtgaagtcttagccatcccatc

SEQ ID NO: 472934 - DNA, 602 bp, Homo sapiens
aggggccccttgatacaacagcgccttctctaggtgcatgctttatgtttcttctgagtcctttcttcccccaccttcatctctcctttccttctatctttgtttatttaccatcattgcaatgaatgctgagcaatgccttccaattgccaactggtgggggtacagagatgaaacggtcatggtccccactgtggagcagaaatggacaggaatccagggagaatttgtgaggctcaaggcatggcacagctgctttggaggaggatctctccccacctctgcctggaacatgaaggttggtggctttgcaaatctccagaactgccttgttgaaatagacaaaggccaccttatgaggggacacagacaagaaggaactgaggtgggagaggaagaacgggctggtggcaaacgatgggagaagctgtctggttttgtggaaatatgtgaagttccttttggcaactcctagaaaaaaatggggggactctttggggagactcatttctgtgacatgtaccatttcattacttaggtacttttaaatgtgctattcgaggttattggctgacttcatttttatgtttttttcccttccc

SEQ ID NO: 472935 - DNA, 1501 bp, Homo sapiens
tccctttgagcagtgtgagtggtcctatgaattcaaagcaggggcaatgcctcagcttaccatagctcccagggcccagccacatcacccgaagggtgctgctacctgcaggagctggtccttgggctccaacttgacagctgagcatcatatgaaaggtgacaagttgactcgagaagcttttccacatgtgacacaagtaacaggagataatgtgagcaaacgtggctacccctctaaatcctgtcatcagaaccactcaggggaacagaaggccgaaaagatgaacattaaagaaatattgaattccagttatgacaagtctatggaggaaaagcccagtgggggtgagtacatgtatcagggcaatatagaatctgctggggatggcagagaaggttgtgctgaacttatggcactgaaggtgagtcccggagcctgagtagaagtgtctggtcagggagcaggaggagggtgttccggatggaaggaacagcatgtgcacagacctggagctggagaggagcgcagcacagcagaaaaacacaaaggcggcccatgcactcgtaatacagcaagcacggaacagggtggcatgagatgggcaagccctcaaaagccatcacaaatatttcagactttatcttaatatcagggtcaagccatcaaacaaagcaaagtaacaggatcccgttagagttttatccctattacatgggaaacttattggaacaaggctccatgaaggcagaggggtcattaggaggcagaatcagcaggctttgggtattgtcttttttgaggtgaagatgaaaagggagaagtaattggaacgtgattctgaggatttgagcttagagaaagggacagatggcaacttcggatcaagagggagcacacaggagaaggagcagatgctggcagggaccaggaatgtctgcacaagaagaaatcctgcaaccttcactaccacagaactagagagcaaagatgagtttccaaagaggtgggagagggtctgggctggaaaagaggcccagagaggcagtaggtggaacgtcccctggcactccaaaattcactatttgtacctccaagggaagctgtcagggaggggacaggagcactctgagcccctgccctgaccccacagaggtgcaaacttacttcctgctggctaggtaaagtggaatcaaaggcagaaaagttccccactggctgacattttggggagctcacagaagggtgagtttcttaaatccaatctcagcaccaatgaggagctgaaacatattgtacccattagaaaagaaatgcaaatcagaaagtcaggcatttgtgtccatgacaacagggggaacgtattttggcaaatctgagttcatttatattcaaataaatatttcagtctatgactctggcacttttttgcatgagatatttcagaaccatattgaatgttgctctcatgctaaaaacttgagaattaaaatgaggtcca

SEQ ID NO: 472936 - DNA, 672 bp, Homo sapiens
ccacaggggggtctttacctccatggactgcaagagagcacacaaggagcctttccaaggcttcagctttcagtattcacctgaggctgtaaaactgatttgcaacttatacttggaggctatttcaggggtgaaaatgacagagccacaagataaaaagaacctgagaaacataatcactaatggaggagagcatcccactggtcagattagtcctccttttaggactttcagggactttaaaaaagccttatgctgcgttaatccactgagatttggggggttttatgctccagcagccagtattaatttaactaatatagaacttgttaccagaagtggggtgctgctgttacaaaaacctaaaatatgtgacattgacttggttgtcaggtggcaggcagcaaggaaactgattttggagctggacttatggaaaaccatgacaaataggggcaaaccatttggtgaaactcacctgtgacaacttggaaggcagaccaggtgcctcctgagcctgctgcattagggcatacagtttgaaagagtcaaagcaatagtatcagttggattttactttctgcttttgcaatgtgttaccagaaggaggtgagctcaagagcaacttggctggttagtcttaaaacacctcttgagtccctgaacttgcac

SEQ ID NO: 472937 - DNA, 1933 bp, Homo sapiens
cgccgcggcctgcatttccagagctgcccttcgcctggttcgtggcgccttgtgacccctgccacctgcaagtcggtaaccgcgctgtgctcctgtgctgcggcctgtggctggactgcctgggatgccctgcctgctgctgcccgactggctggcaagatgaagctctccctggtggccgcgatgctgctgctgctgctcagcgcggcgcgggccaaggaggaggacatgggcacggtggtcgccatccacctggggacaacctacccctgtgtcggcgtgttcaagaacggccgcatggagatcatcgccaacgatcagggcaaccgcatcatgccgtcctatgtggccttcactcctgaaggggaatgtctgatcggcgatgcagctaagaaccagctcacctccaaccccaagaacacggtctttgacgccaagcggctcatcggccgcaggtggcacgacccgtctgtgcagcaggacatcgagttcctgccgttcaaggtggttgaaaagaacactaaatcatacattcaaattgatgttggaggtgggcaaacaaagacatttgctcctaaagaaatttctgcaatggttctcactaaaatgaaagaaaacgctgaggcttatttgggaaaggttacccatgcagttgttactgcaccagcctatttcaatgatgcccaatgccaagcaaccaaggacgctggaactattgctgacctaaatgttatgaggatcatcaataagcctacagcagctgctattgcttatggcctggataagagggagggggagaagaacatcctggtgtttgacctgggtggtggaacctttgatgtgtctcttctcaccattgacaatggtgtcttcaaagttgtggccactaatggagatacttatctgggtggagaagactttgaccagcgtgtcatggaacacttcatcaaactgtacaaaaagaagactggcaaagatgtcaggaaagacaatagagctgtgcagaaactctggcgcaagccagagaagtgttggaaagtgttggaagactctgatttgaagaagtctgacattgatgaaactgttcttgttggtggctttactcaaattccaaagattcagcaactggttaaagagttcttcaatggcaaggaactatcccgcggcataagcccatatgaagctgtagcatatggtgctgctgtccaggctggtgtgctctctggtgatcaagatacaggtgacttggtgctgcttgatatatgtccccttacacttggtattgaaactgtgggaggtgtcatgaccaaactgattccaaggaacacagtggtgccaaccaagaagtctcagatattttctacagcttttgataatcaaccgttacaatcaaggtctatgaagattgaagtcacctttgagatggatgtgagtgatattcttcaagtgacagctaaagacaagggtacaaggtacaaaaataagatcacaattaccaacgaccagaatcacctgacacctgaagatattgaaaggatggttaatgatgctgagaagtttgctgaggaagacaaaaagctcaaggagtgcactgatactagaaatgagttggaaagctatgcctattctctaaagaatcagattggagataaagaaaagctgggaggtaaactttcctctgaagataaggagaccatggaaaaaactgtagaagaaaagactgaatggctggaaagccaccaagatgctgacactgaagacttcaaagctaagaagaaggaactggaagaaattgttcaaccaattatcagcaaactctatggaagcgcaggccctcccccaactggggaagaggatacagcagaaaaagatgagttgtagacactgatctgctagtgctgtaatattgtaaatactggactcaggaactttc

SEQ ID NO: 472938 - DNA, 717 bp, Homo sapiens
gcgatcaatgctagtcggaaaaagttcaaacaataccaccacccttccttctccaaatctctctagaggaaaccactgtttacagattgagattggggcgggcactgacagcagggagaagccaagcagtgggaacaggcacttccaagcctgtgagagcagaggggtccttcctgggctcctaagagtgcagagacgccggggtctgcagtctccatttgggcagctacagctgcgcttgggaaggatcctgcgctcctggcctggatcccccgaaggagaccccttgcggtggctgcgcttccggaagcttgcgcgcgtgtgcacactcacgtgtgccagcccggtcgggggcgcgaacactgagtcacggcggctgacccagcaaagtgctgggaaagggccagtcgaaaatgatgctttccaacttgcaaatcctgctgaagataacacatgtgggtgctgcccccagggtttggaggaggccctatcccggcctgcacagactctggcccagcacctggatctccactcccttttcctgctcttgctcccctgctacagccagggttcttgcttctggggtggtgaggaatgtggcccacgtgcaggagcaaggacttgtgggtagcagggggtggtggacaggacggatttttacgtggaagtttgtacacataagctagatttgcctctagaaacacaaagtgaccccct

SEQ ID NO: 472939 - DNA, 610 bp, Homo sapiens
tccctgcctgcctcagccccagcgacctccacccagaacccacaatggcaggtggaggcacccgcccatccccgcggcggcacctgggcctgcagctccagctctgggcgaacaagccgcctctgaagccgctggagaagtacccctttgacagcacgcaagggcctagagcagccgtctttattggcagccggagaggctgtttggggaaatggaaaaacttgtgtcggcggcgtcagtcttgtaaaggggtagccaagcagtttgcagcgtgttctgttcctcgcgctgctgccaccgcctcggctcctcagagcctgccggggaggagcgagggggaggaggcgggggagcgcctgcacagctctgcagggtgcgcgctcagactcccacacctggcgcagaggcttcagcaaactcccatgtcccccagtgctcggagagtatgagctctggaaaattttatatacatatcatttacataccatacaattcacctgttaacagtgcacaatgcaatcaatggtttttagtatacttacaaagttgtacaactattaccactacctaatttcagaacaatttcatcatctccaaacaaagctgtgta

SEQ ID NO: 472940 - DNA, 1865 bp, Homo sapiens
attattagtaccactgttttccatctaagctaatccaaaataatggtcaaaaaagtgctgtttagctggtattattttcatgttatcccttaccacagtttatctcaattctcacaggagcctcaatgcttatctcttagatccttttcttcttttaaaaaatttgggctagcctatactaataattgtactagtttaattaaaattatgattagcagtagcatgcgtatcttaatatttgagagcttacagcttgccagccgttgtgctaagagccttacttgtgccttctcctctaatccatccagtgtaatgaggttggagctattgttgtggtccattttacagatgagaaaactgaggcacagagaacctgcaggaacatattgctagttttattggcatagcttggaattgaagtcccatctgtctgatgccagagcaaagatctgccttcctgatagtaacagagcttcttagaggctgccaggaaggaaggaagaaggaacgagggaaaatgctacattgggactccgagcagcttatcccgggactttctgagagcagctgtacacacccgttgtggcagaggcagaataagctttcttctccttttgcatagagataatatttccagccactcttgcaattagggatggctatgtgagttctaccaatggaatgagcccctgaatttgtgtgcaaaattatatgtaccaactggacagagagaacctggccttttcagtctccaaaaagaagaatagatcaatatttctacagttaagagtttagttaaaaaccctgctgtgcaatgaaataatgcatctgctattggcgtagagcgactgggatgttaattccctggttttgtgtcagttaagggcaaattagccttccagcaccagtcatgactcattatgtcattatgtagaaggcacttactgtacctccactactatgcaatttagatccaataaaaattgtgacagcgtttttatccacttcattaagctactaatttcttgtaaaaaatgtacattaatctttttatagcttcatgcagagtggcatatttttagactctaacattgattaggtcctggttaagaataattttcacagtacttttaagaaatgtaaataaagttacaataatttaatttttcaacatagttatgacagtattgatcttaaaatgaacatgttggctgaattaaatgtgtagcccaaatgaaatacagactgaatatttaaacatgcaacaaattacaaagcacggcttaacaataccctgcaaacagaatgaagaaagggagcatgaaccttcatggaaaatatcaattgctcatattttaaaagaggtaaatggggatttttttgacatctgactttccctacccaaatgtttaaaaaatacagcaaaaaatagttttccccttttgatttttcattgcttgtgaagtattaatgactcttccgcctgaatgacttaggaaaaagtagaaaagaagaaagttccctctgccagctaattgtgatattagtgggtcggagtcagagaagacagtgcccagggttttcagagggcaccgtgggcggttgagggcagagtgttggcacctgtgtactcagtgacagaagctgcccccttcactctaacccttcatcaacccagagcttttggaacagggctgaggaagccatgagtcacgtcctcattggccgtaaagcattctctcagggtgggcctgctgctctgaattcgcaggcaggcctggccccctcatgccattaggtgaagaaggaggaggctgtgggctgccccctcccaccaggctgggaagccccagagcttgggtttg

SEQ ID NO: 472941 - DNA, 911 bp, Homo sapiens
tccaacaatgttagaaaattcaggctcttctgctgcaggtctgctggagtttgctggaggtccactccagatcctgtttgcctgggtatcaccaatggaggctgcagattactgcctgatctttcctctggaagtttcttcccagaggggcacctgccaggtgccagccagagctttcctgtatgaggtgtctgtcaacccctactgggaggtgtctctcagtcaggatacacaggggtcagggcagggatgtttaagtctgctgaagctgcacccacagctacttcttcccccaggtgctctgtcccagggagatgtgggttttatctataagcccctaaatggggctgctgcctttttttcagaaattccctacccagaaaggaggaaactagagagggagtctggccacagcggcgttggtctgcaggctcagaagtccaagatcaaggagctggcattggatgagggacttcttgctgcatcatcccatgacagaaggacaaagaaagggagggagagagacaaagagagaggatgccagtgatttgtagatttggcctttttacatgatcccatatttttagaaggttttgttcatttattttcattcttttttctttatttttatctgactatcttatttcagagagctagtcttcaggttctgagattcttcccttggcctggtctattcagctgttaatacttgtgaatgcattgtgatattcttgtattgtgttttttagctctgtcagatccattaggttctttcaaatacgagctattttgtccttcagctcctgtatagttttattgtgattcttagtttccttggattgggttttgccattctcttgaatcttgatgatactcatttctatccatttctgaattctatttctattatt

SEQ ID NO: 472942 - DNA, 907 bp, Homo sapiens
ttctgtggagctgagcccttaatcttttgaaatccgaaataatccaatgagcatttcctttgagcgtcatgttggtgctcaagaagttgcagatttagaagcatttcaaatttcagattttggattttctagactgtcctggttttcaggttttcttcagttagcttactttctttttctttctttctttccttctttctttctttctttttccttccttcctatcttccttccttcctccctccctcccttcttccttccttcctctctcccttccttccttcctttcttccttcctctctccctcccctcccctcctctttctttctctttccttccttccttccttccttccttccttccttccttccttccttcctttctttctttctctttctttctttctttctttctttctttctttctttctttctttctttctttctttctttcttaatggatatcagtgagtcgtatgtttggtctatatacttaatcacacattgtgtttattcttttttctttatttatgtctgattgagttaatttggtgaaccaatcttcaaactctgagattcttttctcaatttggtctatactgctgttaatacttgcagttgtattatgaaattcttgtagtgtgccttttcagctctattagatgagtttggatctttcttacaatgaccattttgttgttcagctccctttttgttttattatattccttagattccttggattgggtttcagctctctcatgaatatcgatgatcttcactgctattcatattctaaattctgtgtcatttcagccatttcagcttggttaacaataattgctgggaatctagtgcagttgtttggagaatatcattggtattttgatgaatattgcattgagcct

SEQ ID NO: 472943 - DNA, 953 bp, Homo sapiens
agccagcccagaaaggggctcccacagtgcagcagtgggctgaagggctcctcaagtgccgccaaagtgggagcccaggcagaggaggcgccaagaaccagcgagggctcatggcgttcgagctctgagaacaaacagactgtctcctcaagtgggtccctgacccccatgtaggctgactgggagacacctcccagcagcaatattggctgttctgcactatttgctgttctgcagcctctgctggtgatacccaggaaaacagggtctggagtggacctccagcaaactccaacagacctgcagctaagggacctgatcgttagaagaaaaactaacaaacagaaaggaatagcatcaacatcaacaaaaaggacatccacagcaaaaccccacctgtaggtcaccaatatcaaagaccaaaggtagataaaaccacaaagatggaaagaaaccagagcagaaaagctgaaaattccaaaaaccagagtgcctcttctcctccaaaggattgcagctccttgccagcagccgaacaaaactggatggagaatgactttgaagagttgacagaagtaggcttcagaagttcgctaataacaaatttctctgagctaaaggagcatgttctaacccatcacaaagaagttaaaaaccttgaaaaaagagaaaaaagagtaaaaagaaatgaacaaaacctccaagaaatatgggactatgtgaaaagaccaaatctatgtttgactggtgtacctgaaagtgacagggagaatggaaccaagttagaatactcttcagggtattatccaggagaacttccccaaccaagcaaggcaggccaacgttcaaattcaggaaatacagagaacaccacaaagatactccttgagaagagcaactctaagacacataattgtcagattcaccaaagttgaaacaaaggaaaaaatgtt

SEQ ID NO: 472944 - DNA, 701 bp, Homo sapiens
gctccggtacatcaaaaagccagcaagcccgacagcagcaaaaaacaagtcacctctaataactgagggactgtaaccttgatgccgggctggaacatggggatttcagtgaggcttcccatggccctgtcacctggacacagcccgcaagggcctgtccaacaattagaacaggagagtgttttcatgtcagtgagggctgagtgtccctctgtgcgcatgtgggcgtggctagatcttcgaggaggaattcaagataccagggcttctgtgtggggccgtgggtgtgctgatgcccgctccttgtgtacagtcttcaccaagttatcaacttcaagctgctgtcaaaacaaatatgatcagtgcattttgcctttgctctcaccagaaccaaataaggggctgatgtaccagttacaaaacaaggtcaatggcaagaagacgaacctcacacagctggacttgcagaatccagtgcctcacaatggcccccaagagttccagatgcatgtggctttcagtgtttataatcatagagaaagagaaaccacctctcatggcaagagtgctgggaacattatgatttggctcagtttggggaagggaccctttcctgacctaaccgccatgcccagggtgtgggctcagttccctgagtgacctagcctgggtcgtggctgcttcttcagcaggaaggtgag

SEQ ID NO: 472945 - DNA, 647 bp, Homo sapiens
tccaggaaataagcgcaacatgtggaactcaaacttgccttcatcttatttcccagtcctttgctgttttgccacttttggctacccagtttcatcaacattggaggcccacccaggggatcttggtgtcagcaagaaaagatgcaatttcaacatagacaaagagaagaaggccattaaacaaaagcaaaggttgcagctttgcagccataagccaaaggaccgctggagccacaccagaagtggaaagaggaacagtcaagacttagagttttcagtagaaggaagcaaacctaaacacgggagaagcaaacagtgggtccctatgttacatagagccaaaatcaaagtgaaacccttcacaggaaaccctcaccttttcttattggtggacctgcctccccatcctggcagggatcctcagagcgaggagcctggtcctctgctggcccaggagctggccaggttggctgtgggcagctgacatcgaggatgaccctggttgtctgtctcctgaagccacagagcatttgcttttggttttgctcagttgcctggccaatcaaatagatttctgttttaaacggcatatttttttcaaccttggcctctgaagtcttccagaatattagaaacctgttaaagca

SEQ ID NO: 472946 - DNA, 1892 bp, Homo sapiens
ggactcagtagctactctgttacttccatacttttcaggatttttagggtggggtgatgaggaataatgtctttttactatgatgtccctcagatctgggacagtccaggaatggattttcagccaattgcagcacttgcagctgcctggacagctgttgcagcaaggaaactagctgaaaacagaggtgcttctgctccaaaacagctcttagaagaactgcagcgccatcaggatgctttgtggctgaagtgggaccaatttggcattggacagtttgaggggatgccccggtaccgcctgcctctaccttgctctgcagaggcctctccaaagcgggccttccagccagatccctccggaagccaggatggtggcccccaactctgctccagctgtggagactgttgccggttggaaaaggtacacgtggcctcctgagggtactgactgtgtggctcccacagggccagccccctgtagctactcaatgtgaattctgaaggacaggacagctggaaagggccccggaaggatcccttgcccaaaattggccttttcccatctttaccccaacttagggatcatgatggcccaaatactaaaataacatttgttcttctagatttttttttctattttatcttttgggcctgtttaattctagtctttttttcctgtgaatatttatcctttccaccgttctccccttccccccaaactttacagattttagattgtatggtttacagttttgcatctcgtactttttacttaatactttttgataagcatttgtcgtagccctgacaaaatgattactctattttggacataaaagccaatttttctttatcataagtaattattctccaaacacgcttatatataaatactctgagattattagtgtgcataactttctcttttaaataaaagcagatcctttataaaataattatgagaaaattcttgaaaagaggaaaagaaggcattctggactccaggcccacgttggtgttctctgtgggtaatgccctagcatcttggtgagttccttctgggcctttttctgtttatgtttatgaataccttctggactcatgggatcatagcacacatattgttttgcaatcttcacactgtattagtgtgcatgttttcccacagatatgtctctgaccacattctttgaatacatttccagaggtagaattcttgatcaaagaagtattaaagttttaggttttaaatttaatatatgatatatattaaattaagctaatatttgtatataatacaaagtatgtatcaaagttcttttaaaaaattgttccagccccattcgttgaaaagattattctgtccgcatcaacttgcctttgcacctttgtaaaaaaatctgcttcccatatatgtgtgggcctattctggactttctgttctattcttttgatctatttgtgtacattgacagtgacagcacactttcttggttattgtagctttataacaagtcttgaagtcaggtagcttagctctctaagtattctttttctttttcagagtttgcattctaggtcctttgcattttcatatgaattttggaatcatcttggcaatctctccaaaaaccctgcttttaagattttgattgagattgtggtaaatgtagatgtatttggagagaattgacatcttaataatattgagtaatctggctcatgaacgaggtatgtccttccatttatttacatcttcttcatattctcctagcaatgttttataacttttagtgtacaagtactgtacatcttttttcagatttattctaagatattttatgtttttgatactgttgtgttattttaaaatttcaatttgctaatatt

SEQ ID NO: 472947 - DNA, 667 bp, Homo sapiens
gaaagctggtgggctgcactttagagcagcgtcccaaacatgttttcgtgggccacctccatgatgcttgccgtgactgcagaccacctgtgctcttgggccaaactactgcttttaaagcatttgtctgtggacacctacaggtcgtctcccctgccacctgtggtttgtgtgctctctctagggaaacagaggcccaacccaggggagcctgttcctacatctaacaggagcgagtcggacttgccgatgatttctggagccctgcctgcctctgagatttcaggctacctcagctattacaaagcccttgaaacaaatggtaccgatcttaatgctgatatggaaacgcatccaagaagaaaggcaagtgtcaaacaatatgtatgggagcaaggaagaccagctggccatgaccatggccaggggatgcctcaggagggcctctgtggagatttggggacagaagcactatgggtgccctatgagtgcaattcccccaaaggagatggaagcaccaggtgtggccctattgatggtgaatattgatcaagtctgggcagggctggtgaggaaccgtgagactcatcatcactccagcccagtgtcatggtctggactgctaagttgtattcatggacttgcatgacccggacagctttgggaa

SEQ ID NO: 472948 - DNA, 2065 bp, Homo sapiens
tcccagcatctgacgcttagtaggccttcagctcttgtctgttctctttcccaggacacttggctcccaggcctcctcagcagggacctgctgcctaattttttttgtatttttagtagagacgggtttcaccatgttgaccaggctggtctcgatctcctgacctcaggtgatctgcccgcctcggcctcccaaagtgctgggattacaggggtgagccaccacgcctgaccctgctgtgtgattttagctctgtcctcggcgtgctcatgaatcacactggagagccctgtgtggtccttccacggctgacgcatcatgagcctgttcaggcatttttctccgcttcactctgccatctgtgtgtgggatgacgaggaaagcccatgtgaagcgactgtctcctgcctgtttattgagggctccggagtgctcttcaaaaccatcttcctgcccttttcggcagacagcagcatctcagggatgcctttgcctcccagaggggccggaggtgggcagggaacagaaacctcaaagagtcctgcagctctctcagcgagaagccgccacagcccttctcgaggcgtgcgcccgaaatgcacttcttctagctggaggccaaagaggcgaggcaccgcgactcacacctgtaatcctagcactgtgggaggccaaggtgggcggatcacctgagatcagaagttggaaaccagcccggccaacatggtaaaaccccatctctaatagaaatacaaaaattagccagaaatcacttgaacccagaaagcagacatcgcagcgagccgagattgtgccactgcactccagcctgagcaacggagcaacactttgtctcaaaaaaataaataaataaaagtaaggatccccttgcctttgtccgccaccttgtcactcctgtgctctggggtgtcactcagacgtctgcctactgtgcccaaactgcagctctccagtcgtcacctgaacatcccttgtttttgacttctggtaaaaagaagagctgccagcaccccagtgacgttttccaaggaaacccccgtcccctcctccctgacctccacttcccgctaaaccgctttttgaatatgcgttctttgcaagtcctcgtggggttcttgcacctcacctttaccaggctccggggcgcgtgtgggaagcggcacaatggcggtgaggcagtgggctctgtgccactcctgctccgtgccggcaaggctgggccctgggcaggggctgtcaccaccccttggctcagtttcctcacctgtgaaccggtcacagtgatggcgttgacctcatgggccgtgcccaacacacccctgcagcctctccaccagcccatcaccccactgcagcctctcccccagcccagcacacccttgcagcctctcctccagcccaacatccccctgcagcctctcctccagcccagcacacccctgcagcctctcccccagcccaacacacccctgcagcctctctcccagcccctgtcctgaggaatgtcctggaacttttcatgagctaacaacccaatgaataacaagtcagcatttataaagtgaacattttcactcaaaaaaatgctgcctggttttattcaacagagcattcgtgaaatgattttttcccctggaaaaaatgacaatttatagctcaatataagtgaagcacatcagatatggaagaaataaagagccagataaaccggatgctggcccatgttttgatcgtcagctgtaaatatgaaggttgggaaacaatttgtgtgaagtgagccttttttttttttttttttttttttttttacttgctgttctgtgcagtgggtggagattttggcaggatagataatgcaatccagttcatttatgttatgcttctgattctccagaaagttatgtaaacccctgtgaaataaaacatgctagtctccagatcacggagaagaaactgattgtgactgaattgttcagcagtcaggcctggatgcgtagggagctgacagagtgggaaaaggttaaatggacctaactcaccaaac

SEQ ID NO: 472949 - DNA, 496 bp, Homo sapiens
cgacttaaattctatgagcttgcttgttcatctggaaaatgggcataataatgcacagagcaaggagagggttggggagcagcccaggggccggccaaatgggtcactgccagctattgagggttgggctgggcttatcccaaggggcacagccagtaaaagtgggccccaattgcaaagcccagatgtggagtgtgctttccttataagcctcaaggcccccattcctgtccacaattatacctcattagaaatagatgatatggccagtggctttcagagggctccaggggaggttttccctgtggtagtgagagtacacttgctcaccaaaggagagaaggcaggcgcgccccggctggccccaagagttttggattggggtttatggaccccgatccatgaggggcagaagttgaaaagatctccaggcttctccaaaatttgacgttcctagaactatttgtaacttataattctaattcacttatttctc

SEQ ID NO: 472950 - DNA, 1107 bp, Homo sapiens
gtatttggggaactttacatctcacgatgcatgacccttccttggtcacccctctcaacttctgtccaacttcccaggttgaaggcatggaaactgaagcccaaagaggggcagcatcgggcccaggtccccaccagatgtgtgaacggaatctttccacggtgcctgacagcatctctggattaggcaaggcccctgagggaacttggagctgtacttgctcagaattctgggagcagagggtgggcttatgtgagagaagaagggcccttagagccaacgccagactcacccgaatcacccatttaggagctgcagagtcactagggaatgagctgctccacgtccgtgaatgtggtagacggaacaatggccccatcaatgatgcccacgtcctactccgcagaacctgtgaacatgtcaccttacatggcaaagggactttgcagagtaagaggttatcccaggtgacccagctggcctctatgtcatcaggaggattcttactagagagaggtgagagggccagcatcagaggaaggaggtgtgacaacaggggcagaggttggagtgacgtgctttggagacagaggaaggccaaggagtacaggagatccgtagaagtaggaaaaagcaaggagacagatgctccccaacacccccagaagtagcctggccctgctcacctctggattttggccttctgaccttcagagctgtgaggtaataagtgtgtgtttttataagcattaaacttgtgattatttgttatggcagcaataggaaacgaataccatgatttttccagaatatgttatactcaagtattgtgatagtttgtatcaaaaatgactgtaacaacatttccagtcccactagcttttccagagttttgacactcctccattaatggtagggtctattctccttcctgtgaaactgtgtgggcctctgtgactgctttgaggaaagaaatagtgtgactttcaatactcaatcataaacattgacatggcctctgcccaggttttttttttttttctctgggacatgcactttgggagccctgagtcagcatgttagagatccacctgccccgaaaccccc

SEQ ID NO: 472951 - DNA, 761 bp, Homo sapiens
tctccacctcaagcccagcacttggtaggtacagggtctcagaagcccagcacctggtagattggctctgtggtgagcgcctaactgcgagaattctgtgaagctaggcatctgggaaggtgccatcataagaaacagaactggggacctaagtggggtgggacagggatgctggccccttctgaggatagaggccatgtgggctgagaggctgatgctccccatccatgggtgtgggaaggctgcccgctggcacagatcacggatgttaacatgcggccagaggaagaattccttaacgcctgatagccagaagggcccccagttccgagaaatgtgggaggtgctgcacatgcccttggtgaggactctctcgtggtctggctgccccttgccctgtgcctgcctggaccgagagctccagagggctcagaagctcttcaccctgctccacgctgatgaacagccggcaggggcctgcaaggaaaggaggggcaagctgtcaccacgaaacctttccttccacaagccgccctcattcctgctccctgccccatctccaggtgctgtcctgagtgatggggctgagcagagacggatgacgatagcagaccacagctctatttctggcaggaggagcctggcctccgtgttcagcccctctcttcacactatggggtatttaatgcctcctcgagttcacctatagactcagttaccaattcctgagcaccaggaaaggtgcccctggatgcagcatt

SEQ ID NO: 472952 - DNA, 661 bp, Homo sapiens
atggctgagtgatggcactgaggtacagaggctggggacacacctccaatgcaaatctctatctcagctgctttccagggaaccccacctgtgacataccaagcaggaaactaataaccacttcactaaaaactggcctctcgtccagtattgcccagtgcagagttccaggaaagctgagacagagaaagcactttggtccttcccggtggggaggcatcctatctccccacaaacatgaatccaaatctctctggccagccatgcccaaacccacacactttccatgcagaggaacaaaacaaagtctgagaataaacccggaccctcttcccatgcatgcagaatgccagaattgtggataatctttgttttgtaaaatcatttaatatgattttcctaaattttcaaaaaattaaattaaaaacttcagctttatttaaacaattgtaagattttgatatccattaattataattatattttctttcaattgtcacagagaattgtaaatattttaaagaagatttttattgaaaacataaattttttaaatgttttgattctatttaccattatttagggtttttgataaaaaataaattcaaattttgtacatattaaatgcaatcaacttttatttttcatcatataagctggc

SEQ ID NO: 472953 - DNA, 504 bp, Homo sapiens
cagtttctcttttgtgcagtgaatgtgtatttcacaacctcatgaggtcggaggtggggagaaaaggggagaaatctgtgaggcccaggcagaggctgcagagggtcctgcccatacgcattctcctggctgccctggagacacgggcctagtgtttcgcggagcacagggccgcccagtctccctagtggctgggtgtggccatatcactggggaaaacacaaaggcagacaactcgcagttccccacacttgagcagaaacttaggagtgatggtgagaggacaagtgccattagaaccctgttctgtggcccaaggtggcagttctgcaaacagttgatgaacatctgccctgtgcttcactcagagcccctgtgggctggatcatgaaaatatgctcctctcttttgctattgtggtgttaatagctttgttttttccttttacagacttcgtccatctgaaatgaatttggcagaatgacactctctttcttgtgaaat

SEQ ID NO: 472954 - DNA, 1102 bp, Homo sapiens
gttctgggaacaattaagaggccctttggcgcccggggccacgggctggcggcggcgaagtggcgggcgccccctcggggccgcgggccgggccggggcagggggatccggggacgcgcggcccccacctccgccggccgcgggcacaaagcggcctttgtgcgggcgccgggcagggcgtttccgcgcagacaaagcccccgcgccctgccctcccaccctgcctccaggcgcctgaagcctcgcagaggacaggccttcatgcccttccctccccagccccgcgacgtgggtgcgggcggcgcggggacagcgtgcctcgatccaggcctctcagccgacctgagccggagccacggagctggggatgcccgcgcagctctgcgccgtcaccctgtgtccaggcgcactgtagaagggggccgacaggaagaggcgctgcgccagaactcacaagggctccaactctccccagtggccactccggccctgtggtttcccatgcgggtgctactggcaggctttcaggggggctctgggcccaccagccactgctcccattacctgcctgttcactgggtcctgttggctcctcaggactcccagaccatatgtcccatcctcaggcctttaaagggcagtggctcagctgcttggtccatgaaggaataagggtctagtgctgccagattggtatacgttttcaggggaggcccgaaatccagattttgatgtgaaaactcccttgtaaaatatcagaccaaaataaaaactattttaacactggtagaaccagacaaatgacatgtagtgagagttgggttgtttgcatctcccctgccgcccccagcctgcatatctcatgttgaaaattgatccccagtgaaaggtatttgggtcacgggggcagatctcttatgaatagattaatgccctccctctcagaagattgggggatggcagccgggggagcagtgtgagttctcattctattagcttctgtgagagctggttgttcaaaagggtccagcaagcacctccctcccccatctttctagcctcctctctccccatgtgatctctgcacgcatggctccccttc

SEQ ID NO: 472955 - DNA, 818 bp, Homo sapiens
gttattaggtgatgaacacgaaaccattccaagaaatgtctcgggcccttgccaagccccgggccctgggtccctcgcggagccggtgccgcgacaaagggtttcacacagtcaggagcgttaactatgcatgctttcgcgttgcccgggctcagccaaatgccctgggtcaccatgcagccctggctctgggctccggaatggagtatagaggcagacagtgctggccatggatgccagcaacacgcactgcaaattcagcagctcaagcgggctggggtcatccccccaggaccctggcccaggtgccgaggcccagcttggaggacctcctctgtgcatggccgccaagggcagggcctctccggagtggctgattgggatgcctggcaagtcatcggccctgggcggtgggccagcccacagcccccatggaggtggcctcattaaaggcctcatggtccagtgggcagggcatcagactggacatctggaggcctggggcccggtccagcttgctgctgctttgctgggtgaccttaagcagattacttggcctctcagtgccccatctgccccctgcctcctccctgtctggcaaagcttcctggagggaatattaatgggataactcacagaagccagattctacggcccctcagttgtagccattgcagccatgccagggggtggcagggtcacgcagaaacccttcctcctgaaaccctccaagcctcacccagcatcgtttccaagggctggcctgagaggcaaagctgtgtgggggcccagagaggagtgctgcagcatctcggagc

SEQ ID NO: 472956 - DNA, 869 bp, Homo sapiens
ccctagggacgtccccgccctccctagtcagctggacacctgcagctcctccttcctgtctcagcttcatcgcggcttctccagggagctgcctgtggcccctgggtgaggtgagaactggagagcgcaggtgtggcttgggcaagcctgactgtggaggatgcagagttgccgccagacacggagcctggcatattcgtgtccgcttcttcttgtgcaggtgggcatggtggagctgcagcccccaggctccatgcagatcagcatcctctgcacccttgggcaccacgatgggcacatcaagtcatggcacgtttgccttatttgccaatctgttgactgtgcccccactggccctcaagtcctattcattgagcggcatgcaaggaggtcagacagcaccatcagctgggaaaagtatgggtttggtgttggaccaagccgggttctaagcctgactgcgctggttagcagctgtgtgaccttggaaccctccactctaaggacacgggaccacaagtgcaaagtggtcctgtatgagatcctggagcagaaaaaggatattgacaggaaaactcatctatggattgtcaacagtgtcataccataattctttgtgtgtgtgtgggggggggagggttgtcaaatgtgtgtgtgttcatctactaatacactcatataggcactcaactggcacacacatatgctcacagtcacatttttcatccatgctcacatgccattttacatctaaccatctaactccaggggtgcatagagtcccaagtccttccatgtacctgaggttaagaacccttgctgctttaaagagagggaatgatgttaatatagttaggaaccaaaatttt

SEQ ID NO: 472957 - DNA, 593 bp, Homo sapiens
cacacgcacatacatgaccgtgcacacacttccctcatctaaaagtttcctgtctcatggggttgtttgaagacggctgaaatgatacgagccattgaggagcccaaggctgccaaggtgttcatttgtgtggccactctaggacccaacctggagctgctgctccccggcatcaaaggtcttggcttgagactccttccctcagatataggtgctgatgtgtctgtcaatggctgtgccctgcaactggaggaagacagtggactacataatcacagggtcttcccaaacatgacaggaaccaagagaacacagataatgatcagggaccctaaggtaggcctcaactcactccacattagcacagcccccagatacaggagggcaggcaggctggggaactgctggccagcaagagggacctgtggcgtggagaagaaggaacttccttcagcctgcagggaggaaagacccagcctgggctgaacccttgctctgccaccatcagctgtgtgacctggggccattggcatcatctcgatgaatctcctcacctgcaaagaggataaacaatagcaactggtgggtttgtt

SEQ ID NO: 472958 - DNA, 665 bp, Homo sapiens
ccagataaagaagtaaagaagaggccaggacaatgggcaggaaccagcagacgacaccgaaaagcagaaatagcaaggtgaggaaaaagccagtgcgctgggctggtacaaaggatgaattgcacattgttgaagtagaggcaatgaattacaaaggcagtccaattaaagtaacactggcaactttgaaaatgtctgtacagccaaaggattcccttggaggctttgaaatcacaccaccagtggtcttacggttgaagtgtggttcagggccagtgcatattagtggacagcacttagtagctgtggaggaagatgcagagtcagaagatgaagaggaggaggatgtgaaactcttaagtgtatctggaaagcggtcggcccgtggaggtggtagcaagattccacagaaaaaagtaaaagttgctgctgatgaagatgaagatgatgatgatgaggattttgatgatggggaagctgaagaaaaagcgccggtgaagaaatccatacgagatactccagccaaaaatgcacaaaagtcaaatcagaatggaaaagactcaaaaccgtcaacaccaagatcaaaaggacaagactccttcaaaaaaacaggaaaaaacttctaaaacaccgaaaggacctagttccatagaagacattaaagc

SEQ ID NO: 472959 - DNA, 537 bp, Homo sapiens
tagctttaggagatatacctaatgctaaatgacgagttaatgagtgcagcacaccagcatggcacatgtgatgaccacagagaatgcaaggtgacagaaggcaagattggagactgggagagaccctctgatgaagtgctctggcccaggcttttaattccctttttctcacaaggaggcattttccccaatcaaccttttgcagatcaaatcccacattggcatctgtttcttggaggaccccaaatggcacaaccttcagaagaattcttctttattgaacaacttagcttggattctgtcatctccattgaagataaactgcttatgcaagcagtactgttcagtttaatacttaagttccccaactgtattaaattgcccccaaaatgtagtgtaaataaaaggagttttctcagttgtaactgggaaaatgagaggtcttatagacaaagtgaggtgtgattttatgtgtgtgtgtgtgtgatatatgtatgtaaaaaaggaagctgattcagaagctagggttaaaagttt

SEQ ID NO: 472960 - DNA, 567 bp, Homo sapiens
catacacacgtttcactcaactctaggaaccgtttctcatctcgaacggcactctacgggtcttgaatcttgtttgacacagtggaaggtaatgcagggtgtccttttgggaaactctctgcagctgaaaatatgccaggaaggcattgagagtggacgaagggaggacacagaagcagagctgaagagggaggaagctatgtactctgcacaggactgctgtgtactctgcacaggactgctgtgcacgagatttattcctgaccccaatgcctcttggggaaggggagactttatccacaggggtactcttggacctggacagagcagggtggttttgcccatgagaagtgaccagttcagtctgagcacccccctgtctcctggcttctccgggggtgctagcctgctgcatctgcttgcagtgcagcctcagatgcccaaccaggatgcttctcaggaactttcatcatacctgcgtgtgggtccattgctagaccaaacatgcacaggaacactggcagccctggctccacaaacaagcagcaactgctcctgttgttaaag

SEQ ID NO: 472961 - DNA, 1215 bp, Homo sapiens
ttcagcccctgcagctgccttcatgggccggcactgggtgcctgcaggttttccaggtgtagggggcaagcagtcagtggatctaccattctggagtctgaaggacagtgacccttttctcacaggtccactgggcagtgttccagtggggattctgtctgcctggaactggatgaagggtgacacaagcagccctgtggcccccaccattgggactgctctggatgaaatcccaagccagaacaggactgagtcttttccaaggcccacagtgatcactgcctgtgtaccaactatgttcattcattgcccaagggctctagaattagccagtaatgaatccaatcagacttctatccttcccttctggctggtgagttttcgtaggtcttgggctcatctggagatgccacccaaaagccagagccttgagtcaggaaccttaagaatctaccaggtggtctattctactgaagctgcgttgccacacaaactgcaataccaagttcttcccctcttccctccccttaccttaagcagaagagtttctcctcatgggcaccagtgccccatgcccacatccagtactgcctggctattgcttatgttcactgaaagcccgaggactcttcagtcaccttatggtgaatactgccaggaccaagcctcttcctacagggcagtgggcttccttctagcccagagaaggttcagacataccatctaggagccaaggcctagaatcaaggataccagtcttctttgtggtctacccctctgtggtcaagctggtacctaagctaaaagacaaagtttcctctactcttctctctcctttcctcaagcagaaggagtctctccccatagccattccagctgtgaatgtactgggtctcacctgaaaccagcacagttctgagtctcacttaaggccacatgtctccttccttaatatgttaaaaccaggtactgttacctgatttttttgttcttatgtaggtgctttttcgtgtggatagttgttcaatttggtattccttcagctggttattatgcagacttgtttgtgtgattactttatagtgtaactggtctatgttagctggttattatgcagaattgtttgtgtgattactttatagtgtaactggtctacgtacttaagtgtgtttttgtggtggccagtaaatctctcctcttcatctctccatgttt

SEQ ID NO: 472962 - DNA, 733 bp, Homo sapiens
ggaagattgcccgtagtaaaaaggatgttcagcagcacccctggcctctactcactagatgccagtgacactccacgcacagttgtgacaaccaaatatgtctccagacattgccaaatgtcccccggggtaggggtattatccacacttgaaaaccactgggctaatagaaggctgaaggaaaaatgtttctggttgcaagaggcttgcattaaggatattctgagaaagtcatccaacctggataaggacagcagtttatcattccagagcacccaagttccagaaagaaggcatgcatcactagtgcaagagcagaaagctgtgtggcagcttctgtctagttttccaaatgtgtttcagaatgacacatcactaagcaatctatttgatgttcttcgaaaggcaaacaggtaagaaaatgtaagaattaaatgtaatattagtgttcacaaagaagtgtttaaaaaaatgttacctgtgatgattactgttatctgggttatttaaacacagagcaaataatccttcagcctcttattgcagattttagcagtgaagggtctgtaacattttctatttcattaaggactgtttagtatagtatttctctcaatatactttatagtccttagtgaccaaagggaagagtctttatttaacttcagggtcaagtctgtcattgataatataaagttaattttctattagttacttattttaatggcttgac

SEQ ID NO: 472963 - DNA, 1768 bp, Homo sapiens
ccgccatcggtgacacccatgacccagataaaaccatctgtccgcagaggagctattgtacagtcttaatgttgaaagagcctgtggggcatctcactgatgagagttgtgaaagtcagaggagtgaggtgtgttctggccttgctcttgctgctgacttttcccgtgacaagaatgacggttatttgatggtaacaagaggattccaaggtttacattgcgaagtaagagcttggtacctaagacccagaataaaccttagttcccatgaggaaccttactttcccagtgaggaaataaaaatggctcggagttctcaattagtctttctggttgatatgatttggctgtgtccccacccaaatctcatgttgaattgtagctcccataatccccatgtgttgtggaaggaaaccagcaagagttactttttaatggttgactacattcataaaatttgcatgtctactatgtggcaggcaccataatcaatagtctgaatgcatctttactcagtaggtttggtcactttacataatctcatacttctcatagacttcgtcatcttaatggaagacaaactcttatattatctagtctttcagcctgcaatctctttgctgtcccaggactcttccctgtcattaactagcatctcattagacatccctgaacctgtatgtgattaatggttatgtcatcatgtatgttaccaatatacctaatcagaattacattgtcataatataaataagacaagtcatttggatttactattattcactaaatcgttcctttcaaatattggtacaatttcaagatatactttgaagcaaaacctgtttatatgtttgttgtattgaaattctatgtcaactgaaatataaaggacttcaaaacttttatgtcgtactaagttactatctaatttagctaatttgtagagtatatctcagttttggtttgtctcatgcttgctcatgattggagtgagctttgcattattattgggaaggatagtacagagacaatgtacacttctcagggtaccgtatcagaagggtgcatgatgccacctgtcactatatcttattacctgtgatgttagctttgagtccttgattaaggtggtgtctgtcagatttctcccctgtgatgttactattttggaagacataatttggggtgcaaatatcctttttctccttaaaattttacccaaaatttcagcatccattggtgaatcttgcctgaaacaattataactgtagtgttgtaatggtaattctatatttaccacctttcctctagaattactaattggattctttttctgtaaggaagtgttatctcttgtctaccatttgtatatttattcagttatttatttatgtcaagataaatactttttcttttttgtcttcctacatgatgggtagcagtgttctagcactatttgttgaaaaggtgatatttccccaatgtattgtctttgctcctttgtctgcactgtagtcttataatagtgaatttatattaccaccttccttctacagttactaattggaactcttctgtaaatacatgttaactcttgtctaccatttctctatttattcagttacttatctatatcaatatggactcattgatatttattttattctttgggttaacttcaattatgtttaactaatttatgttggttttataaatccagagttagagatagctaaactagtagaatccagtgtgaatatttaagtca

SEQ ID NO: 472964 - DNA, 583 bp, Homo sapiens
gtctacaatctcctacctaatgatatgtactttgctgtaagcattttgggaatgaaatccatgttattgaagagagtaacagagatccaaagaagtcaccttcttctagggcagaaagaatcttttctgcgctcaaagagaattcagggctccttcatcttgagtgtctggggctttaaccagtatacatcggatttggtttttattctactccagaaatcttctgtgaagccctttaattcacagaacccaaatatttcccctgagagacagtcttgtggaccattaagcagttccgtcgttgtcctaaacacaaagggaagccattcaagggctttaagaaagggagtgacatctttagacctgtgctttgaaaagatcattttggctgcaatttggagaataacttggaaaggcaagagtggatgcgtagttgtgtgtagatcatgtatcactggtgataaaaggtaaaatctataaattgtttcagaaattaaattaatggtaacagtaatgttcttccctaaatgacgattttaattaacgtctcttgtttaacctgtatttgtaatattgactgcct

SEQ ID NO: 472965 - DNA, 623 bp, Homo sapiens
tcttccccttcgctttctgccatgattgcttccaggtagcttccttgggtgccagcagtggtagtagtgggctgggcaagtgagtgtgtcctcaggcccctagatagtaggcatggtgttggtgatggcagtagcagtgttgggacagctcttagaatgccaagcggtccgtcctggttttggcagtgtctgctacagtccaggtggaccagtccacagggccctgggaggagtccccaggtatgtatatgtatgggtactggctgtggtgagtattgttgaggtgatcccctgcccccgtcagagtgctcaggtggtgaaggcagcaggtgtgctgcagccctgctgctggggaggtcagagctgctgtaggttggtggctgtaggatggtggctggggatcacaagcttcaggcccaggtggtggctgcgggttgggtttcctggcttcaaggcacgtgaaaacgtgcaacagccccacttcttgggggtaggtttgctgccagtgactcctgcttcagcccaagaagtggcagccaacagcagtgacaactgtaggcaggggatgtcaatggggtaccagggatatagagatgcagggactattgggccctagggaagga

SEQ ID NO: 472966 - DNA, 753 bp, Homo sapiens
cggcttgcctgtgctccacaatgtctgggatctcaacggaaagccatgaaggccaagagtgcccggaggcatcttcattcacaactgtagctgggatctcagctatgcttttggctgaaacacttacatgtggcctttctacttgccctggtgatagggacaggaggcagagaaattctaggcaggaaaagggcaggggtcctggtgaagccccactctcaagcctggaaactgcagcccaatatgagaacatcttgttttcccacttgaatgttgtcttttccaaaaccacccctggcccaccccacttcccatcctgtactcataaaaaccccaggctccactggcagagagtagagaaggggagaagagaagaagcagctgaagatgctgcgtgtggagctgcacggagtttccacttgtcctggttcctgcacctgctcacctgcatgctccccctcctgcaaggggttgagagttgtgggctgagtaagccaggcacccctcatgatgcctgtgttcaagatcaagtggcccaacaagcaggagtggaagcttcaggcctggacctggaaactcataaagcaccaccttaccatattctattgatcaagcagtcacagacctcaggagctctcagtgaagtgctccaatgactaagcatctcatcaattctgctgccagttccatgctggtattgtgtcttggtgtgacaattgtgtttaggcttgtgccttgataagtgttccatag

SEQ ID NO: 472967 - DNA, 703 bp, Homo sapiens
tggaccaatcaactctctgtaaaatggaccaatcggctctctgtaaaatggaccaatcagcaggatgtgggtggggccagataaaggaataaaagcaggctgcccgagccagcagcggcaacctgctcgggtccccttccatgctatgggaggagcaaacaactcccgacacgccgcattaaatgctgcaacactcaccacggaagtctgcagcttcactcctgaagccagcaagaccatgaacccaccagaaggaagaaacgctgaacacatccaaacatcagaaggaacaaactccagacacactatctttaagaactgtaacactcaccgcaagggacacaactggagaaactggttattttaccaaggctttgactggaatggcatgctttcctttaaggagtcaaacttgacttatgcaaccaataaaagccccttggaaaaactggcctcataccttgtctacacagtccctgcacagggttcatgacctgtgtattttctcttcacaggacatgagacttcacaacctgctaaaaatgagctttctaataactcagaacctacccatctaggactaaaccaacttagtcataagagagaagatgaaacctgagaccagagactcattttcttctaaaatgttttctccaaaagactttttaaaagaaaaggggggaaatgtgaaaggcaaataaat

SEQ ID NO: 472968 - DNA, 799 bp, Homo sapiens
taatgaaagccgtatgcatggatgagtttgtatagagattatagaaaaaggaggctacagaaatgcagactttataatgagtcttcagaaattttaacacgtaataaccaagcaaagggagcagaacctgaggagagtgggatcaatgacagccagtatcttgttttgacgctgattcagaaagaatgtgctcagctttttatcactgatgtgaataagcagtcaacaaacagaaaaaattcctcctttttgggagagcatattctagggaaggaaatagaagacaaaataaaaaaagtgaagcatatggtgcatgtgatagcaatgaaggaaaaggaggaaaaatatagtaggaagagtactggagagacaacagaagaatgtggagcccaacaacctagctggaggttggagcctgagttgaagaaaacacagaacatgttttctaaagaggacgcttaatatttaatttaaaatctttcatgtttgttcaatataaatatcctgcatttttcaaatgttcagaatattactgtgtacttttggaaagttagcaatatggcttttgtgcaaatataaaatgaacatgtaaaaaatgtattcaattcattaatgcaggaagttgtatgctattaagactagttcagatgagaattgaagaacaggtataaatagaaactcaagatgcttaaatttaggtaacagataaaaactgtttaatttcttatctaacagtaatattttcaaatttacttgcattgctttggatgagaatctttcgtattactatccgtcttct

SEQ ID NO: 472969 - DNA, 793 bp, Homo sapiens
agttgatgagcagtggggggctccacctgccatttacaacttccatgaagatagaaattgctcctcccccagccttgggctctccacctccagacaatgaaacgccattgcacgtatcaatcagcagtaacacctccttacatcagcccaggtcttttgggctcatcatcacacttaggctcactacaaccctccttgttaatcaaagtttcctggtgcaaaaacatcctttctgccctgactccctgatggccgatgctgccagagcagccttgagcagccgagcagctccgcagctcctctccttcctggtatggggggccaaacttgctccttgttcagcaaatgcctggttcgaaggatggaagagaggagctaccaggttgcggcaccaaagtagaatcacagaaacctcatcgttgaaagggacattgaagatcttcacatcttaccctctgccctaatccgtaattctatctacagcctcacagcaagggcttgtccacactatgtctgaatacctccagtgacaagaaatgcactatccaccaaggcagcctttgtatctctacatagccttgttcttccctttacaacctgaggtgggtctccctttagcttcttccctgtggtccttccttggaaccatatggaaaagctcgattgctcttccacctggcacatgtaaataatgctcaataactgctgtctatgagtatgatttctgagccccatgaacccaagctccctgtgtaccgcttgccccttcattttgcagctcaccctcaagcac

SEQ ID NO: 472970 - DNA, 1985 bp, Homo sapiens
tgtgggttctgcctctcccacagtcactcagctggtgagtggccaagccaggcctctggtccaagccctctgaaggcagagctgatgccttgtaacgcagctctcagctgactttggcttccagctctctctgcagccgtcgtggacacagaggatccaagtgaagtgcaaatacagcttgacttttgtagcctgctgagcggtggtagatacctaatctggggagatctctgattccttgactcagaaattagcatctcatgcaacacttcaaaagaaatttgggtcgcttttctggatgctgtgggctcctgactttttacttaaaacgggaggggagcactcagaagcccaggtacaggggagcaccttgtccgaggtaacttaatgagccggtggaggatccatgggggccgctgcagttattcagcaatgttttcaaatcgaaggtggattcaggttggagccctgaaacagctgtatggtgtggtggatcaggaagatgaggcagagtgggaggtggactgggaggagaagatggacggggaggaggttgaggaggaggaaaaggtggactcggaagaggtgagggtggactgggaggaggagaaggttgaggagctggggatggtccagttcttgtggttatttggaggtggaatcaaggcaggaagccctggaagccagggcctggggaggtgctgcccgcccctcctttacacagaaggacaccgaggtctggtgaaggccggggagttgatctgggccatcctggtccaggcctgctgcggtcccctgtcctccaggctgcctaggctgggctgtggttgggtcaggcaggaggaggtcagagacctggtcatccagagagcgctggcgaaggagccccaggacaccggggaggctttgggagctgctctccttcagttatttcagcactcctgcgaggaaagagtgaggaagccctggcatagtaagaacttgcccagctctgtggtgaggctggagtttgatcctgactctgaaagcccgtgccgcctctccccacagtgccttggtaaacggagagggactagacccagacattcctctgggtaagaagcctttcagcacctgggtcggcctggcccagcccagctgccctgctccatgttcctcccgcttccacagcgggagctgctccaggctcctctcctgccatggctccgcttgtccccatttcccagcctaggcctgagctgcagttggggatgctgagggtctccagacttggtctcctgagctgcctgtcccactcttcaggtaactgagcacagtgctagcctggttcctgagctgcagctcctgttcctgctgcgtcctgcccccactggccagcctagggcctcagccccacaatggccaagactccagcttgctccattcagacgtctggctgcttgaagccagcctctggcttggcatccttgctgagattccacaacttctgggcaaccctctcttcccccaccacctccccccacatccctatcccactgctcagagtccacttggccgaggactagaagaagccatgcccagtgaactgaatatctgttgcatcagactgctcctgaggccccgtcctggctcctgcgctgctgcatttgtagacctggggctacatcatgtcccttccttagcatctggaattgctgtgtatagaatgctcagtgctattccttactgctcctgagatgtgagagccgccctgaacatctaaccatgttgggtgattctttttttttttttttttccatctgcctctctatttctgtttgcaggagccttatttagagttaaagggcccaggcccagggggaaaagatcagtgactcaggccacagctgttccttctgccctggacaaaggcaacagagtccctgctccctgacaaccccatagcaccaaagacagtcttggttctatcacagtttagcttattc

SEQ ID NO: 472971 - DNA, 4191 bp, Homo sapiens
ggcacctggcaggcacagtcatcaccacagcaaagactcttttcttcagagacctcaatctgctggtagcaaggactggacagttgtgaccaagccccttcctcacctcccagctctcactcaggacaaattcattctggattggaactgggaggacgggagacgttcacatctgcacctgcagtgaaaacaaacacccagcaatggggcagagggaggaagggaaggctcctgcccctgatccagcagctgaaagtgagaagctgataatagcgacaatgcctgaaatgcactccacggtaatcgagctgcatctggctcgagccctctgggaaaggaggccacatccggcctgccaggctgcaccatgcagacatggggtgtggctggtcagtgtcaacagcatgttcccaaccaccccctgcagccgggggtgggagggaggtccaatctccaggccacaaggccaattttctcctgccagagtgaaggagaacatccaaggccaccttttcccagccccagtttccctgcgaggctcaactttcctggaggtgaagtcgtcaggagccaccacactaacgagtgggaccaagcacctggccaggtcccaaagaggagtgtttggcctggcatggagctacctgtggataaaggagccctgctgggctgtcatcgcaggtagtggcaaaggctctggatgaagtgtccaaactggtttaacaccttcttggtacaatactcattgtggttttgacttgcatttccccagtgattagtgatgttggcatcttttcatatacttattggccatttgtatatcttctttggagaaaactctattgaagtcctttgcctgctttttaatcaagttatttttacttttgttgtgtggttattgagttgtaggagtttttaaaaaatatattttgcttattaagcccttatcagttatatggtttgaaaatattttctctcattccataggttgccttttcactctattgattgttacctttgctgtgcagaaactttttcatttgatgttggtccacttgtctatttttgcttttgttgtctgtttttggtgtcatagccaagaaatcattgccaaatctaatgccgtgaaggttttcccttatgttttcttctaggagttttatagtttcacataacttatgtttagatctttaatctattttgagttaatttttgtgtatggtgtaagataaaggtccaatttcattcttttgcatgtggttttccagttttcccagcaccatttattgagaagactatccttgctccaatgtgtagtcttggtactttaggtaaaggtcatttgactgtctatgcataggtatattttgaggctctctcttctgttccattggtctatacatgtctgaccttatgccattaccatactgttttaattactgtagcttggaatatgttttgaagtcaagaagtgtgaggcttccagtccttggaaaaactgtcctccacaaaaccggtcccttgtgccaaaaaggttggggaccactcttttaatctatgaaagatgtctttgcatttatttgtgtcactttaatttctttcaggaatattttatacttttcactgtacaaatctttaagcttatccctaagtattttattctttttgaggcaattgtaaatgagatttttttcttattttactgttggattgtttgttgttagtgcattaaaatgcaactaatttttgtatactcattttatatcctgcaactttgctgaatttgtttattaatcctaacaggtttttttggtgcagaatctttagggttttccacatgtaagaccatgacacctgtgaacaaagataattttacttctttacaatttggatgctttttatttctttttcttgcctaatgctctggctaggatttccagtactatgttgaattgaagtggcagcagtaggcatccctgccttgttcctgatcttacaaagaggttcagtggaaaagggactgaattgacaatcagtcaatcaacaaatacaaagtgataactatgatccaaaggatcttggtttttagtctttctaacttgcttatatactcacttcattactctaggctgttttaaccccaataaaagagggagctgcattagattataagagtctgtccaaattcagtgctccttctagattttatggttccaaaaatgttatttagtacctactaggcatttaaccaagggaaggtataagaaaagaaatattaaattctcagtaaatcaacaaaatataaccaagcacttatatacaaggtgctaggcaagaagtattcttgtttcttgcccaggaggaatttacaatatgtgagaaaggtaagacatgtatatatgggaaatacaatatcagtaagagagatgacagtgccattcaagaaggcagggcatgcttcattgccaagtgaaggacacaggaacaatctttagataaaagcagttcgcaaagtaggggatatagtgagacttattctcaacaaatgggtagaaaacacattgccaagatgaatgacatcatgatgtatcaggtcaggaatccagagaagagaacaggctggaatcgttggagatcgatattggaaaggctgtgtgtatggtgaacatttgcttccattgggctccgctttctcccttattttggaaactatcctgatttctttctaggaagcactccttcctcctcatcagcccatgaactgcaggtggaagcacaacactccttccctatccccgagccataagattggtccagggatgggtctgtgacccaatcatagccaaggaacacctggtatgtctgctggggctattaggaaagaggcaagttatctttctcactgggcttgaatctgcagcccattttgcctgcaaacctcttgccaccaggtgtgtagagtctgtgagtggagccaacatggagaaagcaaaaccaagagatgaaaccagatcctagtgactttaggcaagaccctgaatcaagccattcccagattgatccaacgttctgttgcaaagtgggccttgaactagatttgggtgggtggaaatgaatagagagggcaatccatgcagattgtgccacaagaactagggcatgttgatgagggaaggatgtggtatccacagagctgtgcagaaactgcttgagagagaaggtctgagtggacagtgtgcaaaataccttgcaagataacacctatttttatttctttgagtgagtttatctatttggacaaatccagtgggactgctaaggagtggcatgtaatggaaagacaaaggaagggagacagaaaaggctctaaaaataatagaataacagcaaatacttgctgaaaactacatgctaggcactgtagtaagcactttttccattgaattctttcagcagaccatgaggtattatcacatctccattttaaaatggggaaactgaggcacaaagaagatgtccaaggtggcctatttaataagtgccagagctaatattttaacttgaacccccaggctgtctgactagagcctgcattcttaacctacctctcctggctctgcagacatggtctctgccttggggcagccaagggccagcgtggtagtagggggaaggggaaggggccagctatggccaaatggggccacaggagaacacagaagtcaaatcattttcctcagggtgacctggatttgattatttgttcattttcactcaggttttcaaaaacaaaaaaaaatcctttcaaaaaaagctgttggacaaatgctgaaactctgacttgcctgcccctgcttagcagccgtcattggaatcagcggaaggctctggctggctgcttctgatcaggcctgccagcctcctgggctggctgaggacactcacagcgggagcaggttccttaagacaagcccccttcgctggccctggcttgctccctcctctctccctgtctgtttccacctctgtgtccccttcccttggactgcctcaggaaaaggaagaacaaagttttttttaaaaaaagaagtttaatgaaaccacacacttgtatttccaactattgacattggatttgtgcttctccagctctgccatttgggacaagtctttctcctcctctcttcaccc

SEQ ID NO: 472972 - DNA, 647 bp, Homo sapiens
ctcttttcctccaggcgtccttcatggattgctcttccctaagacgttgctttctttatgatggccttgctatttatataagtggttctcttctgttgcagctaggatgccacctgttgctgtcctcagctcacatggaggacataatccctgaaggaaggtatgaaacttccctctgcttggctgttggagaatggtgtggtcaggacagctctggcaaagctgtgatgcagacattaagtcctgggtgcccctacccctaccacatgccccatcctgggttctgtacatggctgggccacaccagttccagggcctccatgcacacactgtcctggccaggaggggaagagtattccagcgaggggagggctaagccgaggctgaggcagtgtgagcacattgacaactacacttttttaaatcaggaatttaaacagtaatcacaaaaagtacaatctctggcatactgaaaatttgacagttataaaattccttcttctctatacatggatgaatattacttattgttaaaatgaggcagtgcttagcttcaattctacttctattttttctttcttatatatgtacctgctgagaaaacatgttcacaaaatatgattgaaatagaaaaagctttgttatat

SEQ ID NO: 472973 - DNA, 720 bp, Homo sapiens
atagatttcaaacgtaggcttccatgccctcagtagagtcactattgcctaacagagaggactctggtgtccagcttctggggagttcaaagggtcagaggactgagtggccagggcagactttacagagaaggtggaacttgaccctgctccacgtctctgacaggaaggcctgtcttccttcccgtctgcccccaggcatgcaaggaccaagccagggtcaaggagtggaagagcagcttatcctccagaagcctagagctatgctaagacacagtgaaccatttaagagtgacaatcaagatgctggagggaaattaaggattccactgagcatggggccagtcttcaaaaaagtggttgttagtgaaaagaaaggattctgtgaacactctttctgggcacccttcatccccataggcactcaggccacacttttgcctccttggatccctccttcctttccctattcctatggataagaatcatttccattactaccaggtctctacatattccagatttataatataaccatgaaaaaatatataatgaaagtctcagaaccttataggatcagataaccacaaatagttctctataccaggggttcccaacccctgggctgcagaccagtaccagtccgtggcctgctgggaatcaggccacacagcaggagaaggacacagtcattggatttagggaccatcatgaaaccag

SEQ ID NO: 472974 - DNA, 721 bp, Homo sapiens
aattccttttttttttttttggacctggccggacctggaaatgccggttataaacaagaataaaaacttgaatttattggtggaaaagcaaacagtctccattcagagagcaggaccacactctgggttcttgtttaaggacgacttgctgtccttgatccatttcgggactgggaaagagtaccaaatggaatctgatcagaaagttgtcaacatgttgtcagtgtttcaaccattccagacctggattctcccttcttaccccttggatgcggccttctcctggggctcttttcttccccacgtcttctggggctgccttttgctcttcaagataatgtgcatccccctcaccccgactcagcagctttctccccatggtccaagctactcctctttccttctctcttggcgatatgcaccttcctgcatcaccagcctctgtaaccaactggcttccgaataaaatcctagttgtcacctttagggttataatgcttgttttgagtatcttcccttgccaaacatatagtctgatagaagtcaactttgtaactgccccctctgagtgtcttctctttgttttacagcaggtataagcccattttgcaattgctggttcccaatgggccctgtcctgattctatttttgattcaggtacttggtaaatttggattaccaaaactatagagttgcggtgttgatgttctgtattccact

SEQ ID NO: 472975 - DNA, 1052 bp, Homo sapiens
catttcctgggttttgataactatgtttggccaaattcacattcgacacagaggtcaaactcaagaccacgagcaccatcaccttcgtccacctaacaggaacgatttcttaaacacttcaaaagtgatactcttggagctcagtaaaagtattcgtgttttctgtatcatctttggagaatccgaagatgagagttactgggctgtactgaaagagacctggaccaaacactgtgacaaagcagagctctacgatactaaaaatgataatttgttcaatatagaaagtaatgacaggtgggtacagatgaggaccgcttacaaatacgtctttgaaaagtatggtgacaactacaactggttcttccttgcacttcccactacgtttgctgtcattgaaaatttaaagtaccttttgtttacaagggatgcatcccagcccttctatctgggccacactgttatatttggagacctcgaatacgtgactgtggaaggagggattgtcttaagcagagagttgatgaaaagacttaacagacttctcgataactctgagacctgtgcagatcaaagtgtgatttggaagttatctgaagataagcagctggcaatatgcctgaaatatgcaggagttcatgcagaaaatgcagaggattatgaaggaagagatgtatttaatacaaaaccaatcgcacagcttattgaagaggcattgtctaataaccctcagcaagtagtagaaggctgctgttcagatatggctattactttcaatggactgaccccccaaaagatggaagtaatgatgtatggcctgtaccggctcagggcatttggacactatttcaatgacacactcgttttcttgcctccagttggttcagaaaatgactgaggcctggagaataatagacctgtgctgtccaagagcacttgaaatgtggctagtccaaattctgatacagtagggaatgagtagaaaatcaagaggaagattttcaaataacctgtgaaattagagaggctatatatgaaagtacatagaaaaa

SEQ ID NO: 472976 - DNA, 633 bp, Homo sapiens
tgatttactaccccttcaaagaatttgaattttcagacacttccctggaggagacatgagggctttaggtggcaacctagggaggttacagggagctgctcttggcaactataactgtaagggaaaccagtatgaggagaggtggagccaagtcactacggaggaggtggcagcattccggggggaacagggctgtgcatttcccaagcgaagggaacacattgtgcttcatgccacccatgatgcctcagcagcagaggcagagaaccaaagccaatgcctggagataagtaggagaaggcagctcagctggagagcacgtgtacagcagcagcccttcccacaaggccatgaggggatatttggaagactgagcaatttacatttgaacgactgtaatttctcagcaaaaactgagttaacaactctcaatcccgccatttttttaaagctagattaaataattataaaattaaagaaaggaatgctttaaatttttgtactttgctgaaaattctttttcccggggtctataaaagattaatttgtttttatattttactactttttgtggttttttttgtttgtttttaaatcaataagtaatctaggactagcattatgtttgctaga

SEQ ID NO: 472977 - DNA, 594 bp, Homo sapiens
aattcacaaccaataatttggtgttggggaggggccactgttgctcggagcacagtacctgagggctcatgcttctcaatggtgagcgtcaagtggatatttgttaacacatggaatttcccggagagtttgtttcagaaggaagatggaatacactttgagtggagggtgaatctgaggataagttccagctgtttctattgttcattgtttgattttttgatactagccattctattagaagaaaacataggagatatgcttcaggacatagacttttttcattcaagattaatagaagacatgggcagaggggtatgtgtgcgggggtggaggaattatgcccttttccatgggaatgagagaatgtggagaatggtgccttgtgcagaacagagctcagggaagagagaggtaattgaaacacctggtgataccaaaccgtcatctcaagattttcttattgctaagcgcatgtttaacttctttttggtaatttggctgggaatctgcctctacggcagtagtttgtccacttaagtatatctatataaaatcagcagtgccttgttgttttaataacctgtttcactc

SEQ ID NO: 472978 - DNA, 1081 bp, Homo sapiens
aagaaggacatcgtacttgtccgaacgcccagtaggagggccttttgcccaaatgaatgggaaatcattggcccaattaacatcctgtgatcttagatctaaaaatgacccggagccgggtaaacaaggtgacgtcagcggactgggcagtgaacggctctctactgccacctcgaggagagtgtcctcaatggcgcggcggctccgggcccaggggaagcggacctgggacggctggaagggaactgggggagaactggccggcgctggaaaggcgcggggaagggaagaaacccacagaggggcaagaagctcctccgtgacctcagctagaggaaaacgagggctgcgtaatccgggccattgggcgttactgcgctgtcccgtctggcttctgattcctgggagccttctttttataaaaggagtcagacaccgtgaactcttgccagaataacttctagctaaaactgggcggggacacaatcctcaaggctgggcacccttaatgaaagcagttcccagatttccagtcctggagggagaagcagtggcatggccaggctaatcgcagagggctacaagatttggggttttgcttcgggcttcgctgggactggggcgggggagggagtgcaggggtggaatagccctaatttactttcccgtcaggctaatgcgagaaggaggctgcggagctttctgcaggacacaagcagcatgctgggagatgccccagaaatgcgctgggcccggggtcggggaaggtcaactgcgcattattgcttttcccctgcagatgatacacaaaaggaaaatgagttggtttttaacttgatgaaaacaaacacaaactcattttacttttggatcagttttgctgcgttacaaaccacctcaaagtgctgagaaccaggactggaattgctggaccaaatgcaaagtctatgtttaaatttttgatgagctgttagactggtttccaaagtgatggcaccattttatatttctatcagcagtatatgaagttttcaatattttcacatcctcaccaacactttttattatttgactggttaag

SEQ ID NO: 472979 - DNA, 556 bp, Homo sapiens
gcagctgtgatattgatgccaggtcacccctctctccccacctaccctgactgcagttccctgatgcagacaacacttctctggctgtcagcttttgatgacttcctcaatttgggcttctggtggttccttcactccttgaggagcgaggaggcaagattcctcttcagagagcaaaccaatgctgtggccaagcaaccatttgctaaagagcttactgtagatagaagggagccaggtgctagttaccaaaacagtgggaaaaataccctgaaggcatctcagagagttacaaggctgccccttacagcacaggcccagagctgtaggaggtttcaggggataggcctgggacaccttccgcaagctccttcccacggctgccacaggtctctgatcccaatagccttcctcagctgccccagctacggctcaagtgggcccaggtttcctacaactatatccctgcatacttgtcgaataatagacttgtgattttactcctatgttcatctccttgatgtctgctccatgtcacttcaataatacttcctgc

SEQ ID NO: 472980 - DNA, 611 bp, Homo sapiens
cagtgccacccgaagtgagcacacacctggccatgttacaacagagcccaggctcagccacaacttctctctgcaccagagtgggcaccaggagcagggagaggccagggaagcacatggatgcctgggtccaaagccatggctggacagctgcatctgtgcctgagagcaccgagctcctgccccgccaactttgtagggaggagggctccctccggttcctggttcccactggctccatggagtacacagtcttggctgcccctcccttgctgcagctggccatcccagtggtggctgctccagatggcccctgcctccatcacagttacaaagttctctggattttaggactcaactggaagctttatgccattgcattagttaaaacacattgctttcctcctcatttaaaaaatgcagaatgcaagtttcaacgacttcctaccatattatgttttcattttgtgaaataaaaggaagaaaagttttaataagagaaacaacttttgtttcatgttttacttcacaataagctgaaatgtgtatgatgtcttttttatttcctatctagataagtagtaggaaagtccgaaacaagtactttttgc

SEQ ID NO: 472981 - DNA, 2715 bp, Homo sapiens
tttttaagtgcaatttttttttttttttttttttttttttggagacaaagacaggaaaatgtgggaaaatttggaacttcctggagacttgttgaatggctttgcccaaaatgttgatagtgatatgcacaaaaaagtccagactgaggtggtctcagatggaaatgaggaacttgctgggaactggagcaaaggtgattcttgttatgttttaataaagagactggcagcattttgcccctgccttagagattggtggaactttgaacttgagagagatcatttagggtatcaggaggaagaaatttctaagcagcaaagcattcaagagttgacttgggtgctgttaaaggcattcagttgtaaaaggcaaacagagcacaaaagtttggaaaatttgcagtctgacaatgtgatagaaaagaaagtcccatttcctggggaggaactcaagccagctgcagcaatttgcataagtaatgaggagccaaatatgaatccccaagacaccagggaaaatgtctctagggcatgtcagaggtcttcacagctgctcctcccatcaaaggccaggagtcctaggagtaaaaagtggtttcatgggccaggcccagtggccttgtgctgtgtgcagcctagggacttagtgccctgtgtcccagctgctccagccttggctgaaaggggcaaacatagagcttgggccgtggcttcagagggtgcaagcctcaagccttggcagcttccacatgatgttaaccctgagaggcagtgcagaagggaaatatggggttggagcccttctggggcaccatccattggagctatgagaagaaggccactgtcctccagaccccagaatgatagatccacggacagcttgtaccatgcacctggaaaagccacagacactcaacaccaccccatcagggcagcctggagggaggctgtgccctgcaaagccacaggggcagagctgcccaagactatgggaacccacctcttgcatcagtgtgacatggatgcttttcctgtttttgatgacattgagagttctgcggaatcctggtcagttatttcgtaggatgtccctgactggaatttttctgattttttctcatgatgagactggggttacatctttttaggagatatttttcgttttcaaataaaaactcatcaattgctccagcttcttcaccattgctataatttgttcaaaaccttcttacattacttccataactgagtctttcatatggtatcttaactgtgtaagataaaacaattattgttctttatgaaaacactaatgttaaatagtgttcactatcaccttttatgtagtgttcactaattaatgatgaaagcactattaaacttatatttaatgcaatgtcaaagtctattatctgctttgtggtattttcaccctcttggatcaaacgaacttgccattaactacaatacttagacttaaaaaaagtaaatcattcttaactgtttcaaacactatgtttactaattttcccatatgatactaatgataacaatatttttgtgattgctcattattagccaagaaccacattaagcattttatcttgctcgttttatataaaatcactacagcctaatcttatttacagaaaaggagacaaaggcacaacaaattgagtgtcttatctaaagacattgtagcattacatttgacatttttgtgtttattttgttagtttggaacaatttacctttttgagtttttattcaataattatattatagtctcttaggagacaagaaacacatatttcaaacttagatagttaagatttgtttttcagtgcacttgaaaaaaatgttaaatggaaaactttctgagaagttacacaagcaaaccttctagaaaaagggaatgcttctgcagatattcaatagtgtaatgtttcaactacaatattctttagcctaataggagactgcttgtgctcgtcatccttcttaggggagagcttcctttcccctttacagaaggataatatatggtaagtgaaatgccttctgtctctgctgctactgcctctggtgctacaaatttgacactcccctattatttgcctaaactctcatgatcaattatatctgtgtattcattttaatatcatagtgcttgatgcctgccatcttacttaacaccttttgtttagttcctgttgaattcttccaacaaccttaagattgaggttaacttttcgcagacatagaaaatgtacaaattaattaatccaagtattctccaagtctaaatggatttagagcaatataaactttattctctagttctgtgtggaaatgacacttgattgaaattgattgagattattatttagagattatagttatggttatattttctttacttcccaggtccaaaattagcaatatctcttcactttcctgtttagctcagtatcccttcactttttccacaaagtataattttttttgctagatagccgcatgtccacagatgaaactctgcagttttctctgttaatcaactacttggcttacagtttaatttgttgctctgatgcaactgtcatcttcccttaattgcctaccaccaaaatctctgagggtagagtgcccctactcctgaaattcccaacatgctgttccaattaagtcagtcattttaagatagttatagag

SEQ ID NO: 472982 - DNA, 530 bp, Homo sapiens
ggggcacacacagggagtgtgcactggggaagggaagaggttcatggagcattggtggtgcctatgtgccaattggtgtgagtcagctggtgggttgagaaggctcttgggtagcgtcctgctgagctggggaagctggacgctcactcattacacacttctttccccagtgggaggaatcacatgccaaggagttctcttttggcatagaactgtgctggcttgggagaagggtgatggtgatatagtgaaactcttcttcttaccctctttaatgcacctattcttagattttttctcaagtggtatgctgaaatatctctgctctactcccagattcccacaaatgtactcttgtccattggtggttttcaaattcaatgcactggctactatgaataatgctgctaatgaacgttcacaaataagtcttgtatggacgtatggcttcatttctccaggagctatgatcccttctgagtgtgtatgaaggcgtgtatggaatgaggggtccaaatattattatgtgc

SEQ ID NO: 472983 - DNA, 846 bp, Homo sapiens
ctacaccgagagtccaagaagcatctgaagtcaggagagcaatatgccatcttgtgaactaaaagtgccccctgaccgacaccaaaaattaaagacaaatgttctgcatatcaactgcaatgcaaatcattctgctatcctctggagatactcatccttggaactcaaattcgcacacacggagagactcccgcacagagaagaaatgagcaccctaactgacagccagcgtggaccatccatcagcaatgtgactgagggagtaacaggagagaaatttagactaatcatttctccaattgtgaacacccccccatataacattgatgccaaaaccattaatggcaacatggcaggcatggaggaggcagcgacctttgggagctacatgaatggcaacctggatccagatgaaagggaggaggaagctgcctctacaactgaggaagaagccaagaaaaacagatggaggaaaaagaagagtaaaggggctgcagcagggcagcaggaaactgataaaggattaagagcctcagtggatgaaggagcaagacaactggaaagacaagcattggaaaagaaagaaagagatgatgatgatgagacggagatgaaagaagaaggaaaagaggaaaaagaagaaggaaaagaggaggaggaggaagaagaagaagaaaaggaagaagaagaagaggaggaggaggaagaagaggaagaagaggaagaagaacaaggaggaggaggaagaggaagaggaagaagaagaagaagaggaggaagaagaaacaaccaaaattccaacagaccctccctccctcagttccaatatgtggctgtatcctagtc

SEQ ID NO: 472984 - DNA, 611 bp, Homo sapiens
caaagaatctacaaatcattaatgaagagtaaactagtcaatacaaatggcaagataattgaacagccacttatcaaaatatatggcaggccagagggtgtcaattctaaaggcaactacaatagacctgagaagttattggagaactatgtctgtggcctaacgaatacaaacacacacatcatccttgcagctatgatcactgaaaacttaaattctatccgaggacacaaaaagataaacaaattgcttcatcacaatatggcaagtgctatgctagatgcacgacctgggtctatgggagcacagagaattcacattggccctgactctggtcgggggaggattcctagaggggacagcatttcccaagacttgaaggaaaaccaggcattattgaggggagggaagcaatcgggcctgaggaatggagaaaaatgaagttgccaggtaagctgtggctgttactagaacggcacaaaattaggcacactagacatttgtgtagaaaatgaatacgagcataaagaaaaagtacgtagaatatttggtgctatcaatgattttctaaaattaattgcagcttttatgtactttcagctgataactgc

SEQ ID NO: 472985 - DNA, 650 bp, Homo sapiens
aacccccaggccacggacccgtgaggaaccaggccacacagcaggagataactttgaagatgaagaattccattcttaaatatgtagtgcttgttaaccaatctagaaaaggaaaaggaaatttcaaaattcatgcctttgtggatgttgctatatgtagtaaatggtctgtaagctcgttgcctgatgaccacacaccccataaaagtgagttatgcactggtgcccgtgaggtagcagtggaacaaagggagctgctgctggcagtcaatgaccatgttgaaagcttcacatgtgagataaatgcactcaaagattcctcacaagtagctctttggagcttcagatgtgaaatggatcattcctcaatctgtaatagacccttctgtgaagctcttcaatcaaaccagagaattcaagagtttccaacacctaagagtggtatttggcaaatggtgggccaaaggaataaagaaggcatgcaaaactcttgacagaagacattcagaaattgatttgatatcagatacaaggagaaaatatgccagtaagaaaatgcatttttcaagattaaattcggcatttgttacttaatagcatttgtcatattccaatttttcatatgtagtaaattcatttcaaatcatttc

SEQ ID NO: 472986 - DNA, 638 bp, Homo sapiens
aagaaggggtcagggggcaagtaaagcctggagagggaggagatggacttagaaaacctggaggaaaacagtggaaagagagataaaataatccaatttaagctagctacaattgattataactattatcacttcttggagacgtttgatattatgcctattacccatcagaccccaaagcatccaagttattctgaactgacagagggtcctgtggagtcagcacttcattctcttggccctggctctgtccattctctacatcttcccctttcccatagcccagtcctcaggttctgtggattgaaagcggagtctgctgtattcaatactctagtgagacacaattgcttgttaacaccaaatcccactgtagtgcaatggtttgcagctttagtgttcccagacactttggattctagaatatttggtggctcactcagagagattcctttgcatctataaatataacctttaataacctgtcagtgttacatcactggttgcatagagttgtttgttgtcttttcaggattcttgaaaatatttccaaggcaaggtccttgagtgtttcagaaaatatctcaagtttctgggcatataaaaataaaatgtaaaatgtgataggtgcatgtgtt

SEQ ID NO: 472987 - DNA, 841 bp, Homo sapiens
ctgagagttacaccattggcttccctagttcttaggcttttggacttggaccaagccatgctactggctttcctggttctccatcttgcaatggcctactgtgggatttctcaacctccttatgagacgcatggatggatggatggatggatgaacggatggatggatggacggatgggtggacaaatgaataataaaagggaaatccctaaagtacatcaatttaaaagcaactatgtttcaggacttcacctgggaaagccacctagtggaaagccacctagtggaaagccaaacgaccctcattctctcgtgcccatcttcatactgctttccaagatagcagcaatgaaggattctgcagctcttaaaggaaaatgtgaatgcaatggtgtgtcacaactgcgattagagaagtccaagggaaaagagtacaacatgctgatcaaccttggcagtccccacatacagcatgattatattgtaatactgtttgatgcaatccagcagcgaatctgtacaggtctgcggcagtctgagttattgcctcttcctcagaagaagtttgaccgaggggcataaggcagagtgagagaccaaggcaagttttagggcaggagtgcaactttattctgtctttcaaactcaactatgtattccatttctttttgtcatatttcatccagcatttccatgagttagaggagaaagttgtttgtgttagtttggcttgctgtgttgctagaaacaaaaagctcattattattattgttatgtattaatttgaccaaagcactatttattaaaagactgctgcaattcttactattcttgtcatttt

SEQ ID NO: 472988 - DNA, 575 bp, Homo sapiens
tggatttctgcaactcagagcatgttccatgctggaacctgagactttggtatgtaggtacattgcgagttttgtaccttcagccccagccaatgtagaggccagggagaagctactgacggagctgcttcaagaaagatcccaagtctacgcaaatccattgaactcatccaacttcttttactgtagaaggactgatgtaacatgggagaagaatgatgttaccaggagcaagaatgagggctccggttggggaagctccaggcagctggtgcgcagggctctctggaaggcacatgacccagaaagtgctgtgcttcatcagctccgtgagtcatgtggggcagcggttcaagaagtggtggctgtgacgagagacttcatgcaagaaggcctttccaaagtgtcatccagcaaagaaaacatggctttccctgaagccccaccctgtggtttcctacatcatcagatctacgtggccctgattgctggctgcagtgaagctggggaagggagtgttctcactgggctgctctgaacaaacacagagctctgttagcaaagaaggagaaatc

SEQ ID NO: 472989 - DNA, 473 bp, Homo sapiens
gtcttttcttttcttctttgagaggagagaagaagggatgtgggacagggaaaagaagaaaccaataaaaggacagaatgctattaagcattttaccattgaaggcaactggtgttcagtgaatctggggagctctgactttctggaacgtgtgtctctcatagggtggagagggagctggggtgtctatccatcaactcaggaaaggaccagagatgcaggtgctggcgttgaaccatccaaggctctggctgcaagggagcagactggcagtgagagttacccacccatgcccctgagcacccaccattccctgcatcctggagacaaacatctgagcatttttcccaagggcttccctggcagccagagaccattgtgccatgctaaaggcaggccaggagctcatgagagtcgatcccatgaggaggaaccctcagttaatgtccctaatgggacagggtagatagatc

SEQ ID NO: 472990 - DNA, 590 bp, Homo sapiens
accccacgacaggccccagtgtgtgatgttccccgccctgtgtccatgtgttctcattgttcaactcacacctatgcatatctcttcaatatactcacttcctttcctttggttatatacccagtactgggattgctggatcacatggcagttctgttttagttttctaaagaacttccatactgttcttcacctgactacaaataccatatgtttcaatccccatctattatgtgtggctgaagtgctgccccacactctgctgcggggcttgggtaacatacaatatatgcatcctgtttccactctaaaattggaaaaattctgcattctgaaacctatcttgcccgtaagagtttccaaaaagggagtgtgggtctgtaatatctacctcatagggttggaaaaggatgaatacagtctcagtgcaggtactctctttaaatcctgcagtggagcaggccactgctctgctcaagtcttgcaatgacgtctcttcactccaagtcttgcaatgacgtctcttcactcaaagtacgaaggcagcgtcctcctcaggccctacaagaccctactaatcaggtctcctg

SEQ ID NO: 472991 - DNA, 484 bp, Homo sapiens
tgtaatgtcatgaggacttcaaaccaaaggaactcaataaaactccaggagccgcacagcaagtcaaacctcaaacacattccagcctcctacaggatgcccggtcctctgggcatgccggtggctgcagactcctggcaaagtcacaatgctcagccgctaaaagagatgtcatcaggcccctgcctgcctgagttctttggggaatctccatactgtgaaaaccatattttctcatgtaaaaacagggtccccatgaccaggtacgagaagtatcctggtggcatgggagatcagattggggcagctctgaaggatgctccttcggggcccagcagccacatgccttttccatttcccatggcctctgctctttggaaggtctctgtgtcagtcacctccaacttagtgtaacttttaaaaatgtgttgtgagtccttaggtcttgcattccatccttatctctcttcagggaattaaagta

SEQ ID NO: 472992 - DNA, 751 bp, Homo sapiens
actgcctctacagcaaatcaagctccaggccaacagcacgctgttgctatcaggagtgaaaaagaaatagcttctctgaatgcactggagagaagctctgagcatcatccaaagaagatgtggagctattgaaagagaatttgcatcatcggatgttgcctttgaaacctggaaactttggggaagatggatctaagggagccaaggctaaaggatgcaatgggaaggcccatgcaatgggtgtttcaaagcaccctctcagcaaatctgcaaaagaaggtggagaagcagcggacatgaacactactcctgcagaagcaagggcagagcaacttaccacagaaatgggggtgggtgggcaggttgcaatggatatgtcgcatcttgtgccaggtgacaatgctactaaatgtcaagaaggcaaaggccctcctctgtcatcatcagctctcactagtgtttcagtgctacatggttcagaacttgattatctatttccaagtgatgtacacctgagccacagttgcaaccaaactacaaaacattcctctggagcactgtctccttccagaccaaggtgctcagttttctgtctatagtgtcaattaaaacaatatttaaaggtaattgttcgtcttgtgaaggtcaacttacataaactagaaaatagtcataactccatttaatgggcccatgtaaacagcaatggatcctgaaacacagaaaacaaaaggatgaaaaagcgtgtgac

SEQ ID NO: 472993 - DNA, 688 bp, Homo sapiens
atctcaccactctaccacatcaggtctatgatcgccagtgaacacacgaagctccataaaagtaattttaagcgctttgctttagctgtggcagcagtcgcaagtcgtatttttgatcatctgggtgcacaatactttaccaggtcttgctcaccaggaccaaatgtgaccaagatgggaggtggggaaggagattctggagttgttttaaagggggtgagaaaacctcaacagaaagagacctgtgttgaatgcctacggctgctgagcagagagacagagaaagcatttacaaagaaaggtggctctgtttctgctacggatgcagactactctccatgctccctgagaatttggggtactatgagcctttgtaggaagatgcaaaacttttctggccccaaatcccaacagtatacctccttagatggtttttgatataagacttttgtgtcacaaacagtccataaagagggattcactttgaatatttggatggtggaggaagtgagggtgggtagaatatgtaaagaggctcaaatcacaaatcacacaatggtggaacttttgctatcgccacatacttggaaagatgactggagatacaaatatagaaggaaccatttgcaaactaacatagtacaaattgtacttttcttaattctttggattttattatttacttttt

SEQ ID NO: 472994 - DNA, 605 bp, Homo sapiens
gagcagcagggcactgaagaagtatgtgcaaagagaagtaacagatgctgtacaaccgagctggggctaatgcagctggtgactttaagttgaagccaatgctcatttaccattttgaaaaccctagggcccttcagaattatgctaaatccactctgcctgagctctgtaaatgggataacaaagcctggatgacagcacatctgtttactgcattctttactaaatattttaagcccactggtgaggataaagccagattatctctaagtagtgatgaagcttcattaccatccagttgggatgaaaatctcaacttcctactcaaaagtttcagacaccaatcaagtgggggaattggcatggatgggggaaaaatggaagatgaaaataaattataccaaaaaaatccaaaacaaacaattaaacaaagatttcaaaaatgtaaggaaaaagttcataattgtgctacaatttctgagtccatttagtaaagtagactgaagaaatagatgctagagagaagaagaatctgtgcctacagccaaacctggaaggtgcccgatttgaggcctttgtggcagggtgtccacttcagctatgag

SEQ ID NO: 472995 - DNA, 1144 bp, Homo sapiens
aaggacctgttcaggaccacgagccagtcacaccaggatatggtggtgaccagagaaatgaatgtgaaggatcacgaaaaaccaaatgatcaggagaagcagcaagcatattccaggaagagcctcttgacaaaagcagttgaaaggcatatgacagacagcagacattttgatcctggactgctttttatcatcaagagttctctccagttttccctgctctgccatgtgtccctgctaacatttctggaacagctgcacacagccatctacatgagatctgtgccttctcggcctgcagtaaccactccctggctactgcctatgttcactcaagtccctggagctctagagttgccagatagcaaagccagccaggcctgtgtccattccttcagtgcagcaagttccctcaggccccgggtgggtccagaagtgccatccaagagtcagggaccagagtcaaaaaccttagcagtctacctggtgttctattgtactgtggctgagctggcactcaaaccacaagatgcagtgcttcctactcttccttcccctttccaaaggcacaggagcctcacctcacagccaccaacaccataggccacaggaagtactgccagactaccactgatacacccttaaggcccaagcactcttaagtcagcttgtggtgaatgctgcctggcttggtactcacccttcagggcaatgggctcccctctggcctagggcaggtcaagaaacaccatccaagagtcaagtcctggaatcagggaccctaaagagcctgcttggtgctttaccccactgtggttgtgctggttttagcaaagaaacatttctgtttacttctgtaactcctgtgagggcatggaaattctaagtgccattattttctggagattcactatgctaaataaacttgttttcctttgttaatccaattacatctaaagttatttaactttaattttttttttcacaatactactacaaccatcaagcagaagagtcagggtcagttgaataccagattaggaaacataattttaaataaagatttcctcttttaaatgttttcactagttaacgagttacaggatataaattaccttgcttttggctcttcatgtgactaatc

SEQ ID NO: 472996 - DNA, 539 bp, Homo sapiens
tgggaattataggagctacaagatgagatttaggtggggacacagagccaaaccatatcatggtttaactgatcgtaaacgtggagcccttgtgaataagattagtgcccttgtaaaagaggccccagtcttcttcactttttcaccacctcgttcatcgactacccctgcttatgtgcttggctcccgtagagttgtaacagggaaagaagatgtggacagtgaaggccaggatgatgaggtttccgatggaaataaggaacttgctgggaaccagagtaaaggtcacatctgttatgcactagcaaaaaacttggctgcattaagtccaggtaatagggatctgcagatgtttgaacttaagagtgatgatttagggtgtctagtggaagaaatttctaagaagcaaagcattcaagaattagtatgactgcttctaatagcctatgatcagatgagagcaaagaaatgacttaaaagttggaatttatatttaaaagggaaatggagaataaaagtttggaaaatttgtggcctgg

SEQ ID NO: 472997 - DNA, 477 bp, Homo sapiens
aggagtgctgcttcttcgcccaggaaatgcgtagccccttgtactactgccttgctccgtcaatcattggccaggatctccccaagaaaacagtggccttggctatcactgtttgctcagtttttggctggaggaagcactccaagaatagcaggtccttggctcaacagttagacaaacctgataaacccaacagccaagtggtttcaagaggtgatgtggaactcatctgtgactatattaccgaagtccaatccatcctcggaaaccttgactttcagcacccagagacgtggaatacgcctctcattactgcagcagaggaaaatctaacagagataggaaccatctctattcatttcctcactcggtccacaaatattcctgctatatccaaggtgatcactagattttatggtggatctggatgtgaatcaaacacagatgccacccccgaggagctaatggtctaatggc

SEQ ID NO: 472998 - DNA, 570 bp, Homo sapiens
tcaaagatctagccaaatgtcaccattagcaatccccccaccccccaccaaaatcctcctatcaaaactagtatctttctcgcttgagcccagaaggttcgtgtttcagaatgatgtggttgctgagtggagaatggattggatagaggataagcacagaagagttcattccctacttgagcgctatcttcttgtctcttcctcctccatggcaaggaggaaatctagtgaaaatggaaaaatcacctccagggtggcatatgttataaaaatgtttttcaataacagcaggaagccacaaaagtttcagtgtcattttccaacaaagtatagtgacttctatggtgacttctctgatggaacaataaagttttgccagaacaagtgcaagcattacaagcgcttcccaatacaaaattgaagaattttgttgctagaagtaatggaaaacacaacactacagagacatcgtaaagtaagtatatgccatgctattgccaaagagcttgtgaaaccagctacaaaggtaatgataaatactatggagaagaatcagaactaccaacaaaa

SEQ ID NO: 472999 - DNA, 864 bp, Homo sapiens
agtgatgactgccagggaaaatggccagcttaggcttcgtgaggatctttcagattgcaaaagccccaagaattctttccctccgtctgtgctccccctttgcaatacgactttcagctcctgcccctgtgatttgctttggccatactatatggcagaagctacacagcatcagttctgggcctagatttcaagaggccttgaacacttctgctctcctacttggacctcgtggaggctccatgggaacaagcttgggttggtttgatgaagggtgggagacacaagggcctacgttgtgtttcaaatcagcccatgagggcactgatttcagtggctacagttcttctggatggagatgtgggtgtggcccggtccctatagcaggggtgcaggatgaggtggaaggtgacggggacctgccagcaagttcttcctgccagggtcactcagcaacacgctgaacacagggatgaaggagaaggaagtgcctcaggtgacatccagatcccacaagtaaaatatgaggagacaagatggtgtggtgggtgggagaaagtggtttggacccagatttggtttatggggaccccttttgttttggacattgggtttgaggtgacattggaacagtaaaactttgattgttctttctaaaataaaagacccagtaaagaagcaagattttgccaagcaatatggcaaaccagtacccagacccacattgagggttacctgtgaaagcattttgtcaatagtaaaggtgccttataagtggtaggtatcacatttatgtgaataaagtcactagttctctggggctttcagtgcctgaagcttaaagagtaaactttcttatatttc

SEQ ID NO: 473000 - DNA, 998 bp, Homo sapiens
gaacggggaccccgggatgagtctgccagcagcggataaaagctccaattaaaaataaaaaacaggagatggaggataaaaattggcctataccacctcctccagttgcagaaacatcagtgccacttcctttggtggcagaaatagagaccccaatacaaagaaatttatgctctgctgccatagctggagagcccttaggaccttgcgcttttcctatttctgtaaggcctgatccaaacaatccacagcaggttattcatgaacacactccactagagtttaagttgttaaaggaattaaaaacgagtgtggtaaatgatggcatacagaacccattcaccttaggattgctagaatctgtgtttggtgctatgcgtcttttaccctttgatgtgaaacacttggcacgaacttgcttgtccgctagtgcatatccgacatggaatttaaattggcaagaaatgtgtgcaggcctggctaaacagaaccgtgttgctggacacgcagacactacagaggatatgctgttaggtaatggcccttattcagacctggaacatcaaatggcactcccagacgctgtttatcagcagtgtgcacaggccgctaaacgcacctgggtcacaattcctgaagagggagttccagtacaatccattttacatatcatacgagggttgcaggaaccctataagcaatttcttgcaggattacaagaggcagtgaagcgtcagattcctcataccacggctgcagaaatgctaaccttaactctagcttttgagaatgcaaatgcggactgtaaatgtgcactggcacctgtgaggtgtacaaaaaacttaggaaattttctcagagctcgtcaggatgtgggaaatgagcttcatcgctctgcaatgttagtgtaaggaatggctaatttagcagttgacaaatctaaaaggagccaagggtcaaatcctaaaatgggaaaatgttatgattgtggaaaaact

SEQ ID NO: 473001 - DNA, 525 bp, Homo sapiens
ccccgagtcagcaagctttttctgtaaaggagcagaggagatactctggggcttgtggtccagatgggcaaattgccccgtgttgagaacgactgttctagtagaatcacttaccacgttaataaatcaagcagtatccaaagtatttacggtagcgatgggagggcaggatgttccagtggctgcatttttgtgtttggtaactttcatggacagatcaggcttaagtggatgtggagcatagtttcaccccaagaatgtgacagtcacagctgcaagctgacagtggaaaggagcaaatccttttggataggatatcctgtgagcataatatgtgacattcatcggttttcagaagtggctttaaagttttttcttcttctgaagctttgtgtggttgctgtcttcaagcatagaattttaatttttcacagttcataggagatgcaggagaaatcttcctttctccctgatttgcttcctttgactgaggcttgataaacttacaaattctaactttatgta

SEQ ID NO: 473002 - DNA, 653 bp, Homo sapiens
acagctcattgagaacgggccatgatgacgatggcagttttatcaaatagaaaagggggaaatcctttcccaacccaactgctggaaactcagcccttcctgctgctcaagccccaaacctcaaatgcattctttcctcctttctttcacactctgattctaatcagaacattctatttggctctgtcttcaaaatataaccagaatccaacaacttctcactaccttcagcaatactcccatactctaagtcaccatcatttttttactttgattatgttaccttgctcccttactgtctatcctcaacacagcagtcagagtaaatctattaaaacacatcagatcaagtcacccctctgctcaaaacctccggtggcttccagcacactcacttctatgcaaaatcttaacaggatgcttttaagtctcatcaatcctgccctcttctgccatgagggctacagagatgccacttgctcgcagctcaatgaatagatgtcattgacatggacaatctgtttattaggaactgttatagccagctaatcatttcattcataaaccaccaactagccctcatcctggaattcttttgactaattcaagtcaggtgtgatcctgtgacctccaggtgtggagattggttaagc

SEQ ID NO: 473003 - DNA, 560 bp, Homo sapiens
cagtggcttaatacaactcaaatgtattctcttacttattatctctctctggaggcaataagtccaaaatcagtctcactgaaagcaaggtgttggcagggctggctccttctgaacactcttggggagaatccatttcctccccttttccagcttctagtggccacctgtgttccttggcctgtgtccccctcttccatcttcaaagtccatggctccagtctctacctccaccatcacaccacctccactgactctgaccctccttcatccttcctggaagggccacttgactacatcgggcttaccaatataatctgggatcatcccctatctcaagatccttactttagccacatctacagaatcctttttgccatagaagtaaagcagattatcttccatgatataatgggcatcactctgtcagttgaaggccttttgagaaaaaagactgatgtgtctcagccctggtaagacaatgaggaacagttccatggcacgatgctatgagcatatatggaggtacaagcaacgttcaccatatttaggtagcggac

SEQ ID NO: 473004 - DNA, 861 bp, Homo sapiens
cagccagtattttctaaaatgtgttttttggaatgtaaggtgccatgatcaggtgagggctcctccgaactaaggttcagatatggcagatgtgatcaaagcaaccacacaacccacctgggaggctggggattcacatctcaaaatagtaattaatgatttggaacatggcagtgcctattttcgtccatctgcccaaccgtctatccatccatccatttgttatcagctatttgcaaaacctcctactggagccaaaagagcatcattttgtacctctttccccccaaccctgcgctatccacgtgggccacctttcaggtcattgggcccactggcttctttcttccacactgggcttttacatgttgttcccttcacctggaatgttcccctttcccatctccctgcctgggtgcttcctttgtatcttcagaccttaaatatcatcagcttccatactgcatgcagagaaaaaccctctcatatctcagattccctattctaactctatcagttagggtctctctgctctggtctcctatttatccccagcccgaagcttagctcctggttcatgatgaagattcaatgtatagttgtggttgaatgaataagtgaatggatgaataaatgcagtggtatatttgagtgttagctgtccatcaacttgaatacaagatttattattgagttaaagcccttatattttaagagaaactttaaaagacaaaaccagttttgctgaaataatcatcccttttgatttctttattctctgtgtcccagtaaaatgaagttttattagaatctcatcaacaatgtaaatgcaggccccaattaccctggtcaaattacaga

SEQ ID NO: 473005 - DNA, 514 bp, Homo sapiens
aggattgcaaataatggataagaagcccctggcccatatcagcagctattatcgaaggggtaatatattattatattatagaaggagtaaaattatagaaggaatccagggttgtggggtggtagagaacaaaggagttgtggtagatgaccaggaatccctgggaggaagagggagaaattctccttccttgtttgctcctacttcaggcttcctcacaccaccgacagaaggctcagtcttcctgcctctggccctcactgccaacaccttgccaatatctgaaccccaaatgggcctgaaattggcagagtctgctgagcccctaatgccttatagcacttatctaatcgtccaccataacatgcttatggaccacacaacgagagctccaaaacgtcctgctttattaaaggagtgaatgaatgaatgacaaaatgaacactaaattttcaaatgcttatgtttgatttctgccaacctcaactaatacccgtgtcatgaaaatgacact

SEQ ID NO: 473006 - DNA, 740 bp, Homo sapiens
gccagactaaggcatttttgctactctctctgcaatgaggaatgccaaatgttgagctcagtgccctgggtatctctgaccctctagagggtcaatgcttgatctcatatcatggagccatgatacctgctacatccccgatcaccttccaccatgtttccaataatgagggtgacactcccactggcagagacccttaccctccacgtgactgctgcccttccctgggctgggatgttgaacagatgaagaagcacatggagaagaagaagggcctgacaaactggtctctgctgacttgtgagatcctgggcatacacacaggggaatttagggcccagagatacagaaatggggacagggctcttttctccaaactcctcacagatctccatgtagttctggcactgggagttcccatgtgggtagccccagtgagccctatagaacgagccctgcagaatctcagtgaagttactagccacacagatggaggcgcagcccttgcccaggaggccagaggaaagaaactccacagacttattcaggagcacgggaacatccccagggcctcccgaaaataaccaagggaggtttggaggaaagactgcagtgctgtgagaacagatatgggctcagagctctacaaatttggatattaatactaaggcagacgtcattggtgcttaaactctttttgagagagctgtaggaatgtgacttatttagaatgaaggaca

SEQ ID NO: 473007 - DNA, 801 bp, Homo sapiens
cctgcccaggtggtcagatccagaagcagcagttttcctggaccctccaagatgcgcttcctggccctgctcgtctgcctcctggtgctgggctttcaaggtgagtacatttcccactgcagaccatgcaggggccttaaccctggacacagcgataatgacctcagtgagttttggaaattacattgtgacgtgcagcaagaatggactaagacaggaattgctactaagaagtgtggtgctgctgtcacaactcctaaaatgtggaagtggctatgggtagatgatggaagagtttggaagtgtgcgctggcaaagcctgtattgccacgaacagaccacaaaggtatcactgctacgggcattcatacacttttttgtgtagacaaacgttttcatttgggggtgtataatcctataagtggaattgctggattatatggcaattgcatgttttaccatttgagaaactgccagaccgtttcccaaagtggccgtaacattagcctgtgtaataagaagaaagaatctcttagtgaatgagtattgagaacagctgaaatatttgagggtgtaaaaaataaatctgagaaacagcttttaaatttcaacaaaattcacaggattttgattgtcacagtattcaattaatttggagagagttattatattgacaatattaagtttcctaatacaagaacatggtaaaacctttcgcttattgagtctccttgattctctctcagtaaccttttgtacatttgcacatactctttataactttttattttaccataatat

SEQ ID NO: 473008 - DNA, 510 bp, Homo sapiens
ttggagaactcaggggcaggtttgctgttgaggactctgggccatgaatcctcagctgtacctcaagcactacctgtttggatttcaccatcacaaacactactttggagcctggagatgctgcacatcctcctgtgagcagaacactcactgggaccctgcacagtgtgatggccccaaacataaagctctcaaggaagctccgcctctcagcgtggaaggagaggctgcggtgccaggggatgtgtccacagagagtcgagtcaggtgggctcaggcagttgcctggagagtctttgaggaagaggacatgaggcctcagtcacaggtacatgctcctcttctgtgtgaacaggggccaggtctctccagggcaccttccagagcctcttccttcctaactccttggggtgctcaagccctacagaccctccagtgttggctgccacatcctcactggaccagccgctaaggtttcctgctgtcgtcatggctgcagggatgctcagt

SEQ ID NO: 473009 - DNA, 4580 bp, Homo sapiens
tagtgccctccttgtagtgacaagtgaggtcccacttagttctggagcagaagggtggatggagaggttggtgtttctcctgtaccctcctgctttggtgctgcaccacccaagctgcagcttctcccaagaggcccctctctgtgggcccgttagccctggggatacagcagctccccactgttgccagcccctgggtgccttgacttccctgtgggcccccttaaccctgccctccccacaggaatcctcactggaccccaggttgagccctgtttcctgcccagcccctgactgctcctgcggggtacaaggcctggatacgctggccccaatggcagcccaacatcatcccctggagcccctcagccagctgccctgctccaccaggacgccagaagctgccctcagccggctgcccgctccaccaggatgcctaaagtcacacggagcctggctctgttcctcgtgaggcaagctggcctgccctggtcccctgaccaagcgctcttgtcgtctgttcacactgaaccacctctctccagaccttccctgactgtccacccatgcccatgggcagattggaattaagagtggcctgagaccagatgcaagatggcatgacttccaacctcgaagtctatacccgaccacattttaatcacctatgagaacagaacaaagaaattttcagacatcagaaagttgacttcacgtgtaccctttcttagatttttttaaaacctttgaggggaaaaaattgtgaccagagaatctttccaccaagtatgaggatagtatggagacacttttggatatggaggctcaaaaactgtctatacagacacatatatacatacatactctaaaaattacttcaacattttatagttgaataaaaaagattcaatattgagagttcaaaaatatggaaaagttaaaaaatggagaccaatagaaacagtttttaaaaaggaatgagtttaaataaatactgttagaatatttattaaaagtaataaaaatattacaattattcttggaaaataggttgcttatgttatgaaattcaataataacatttttggatataaaaatcccaggatatagtacaaaaggttgaaaggaaagatgcatgtacaaagccaaccaaaacatctagacataaaggattaaataattagttttgataaattcaggtgatagaactgtatagaatcatttttaaagtgtgatttaggggaatatttcaaatcatcattaatgctcagaatagatcccttagtaaaaatggcagtcaccaagaaacataatataaatctaagcataacataacctataccataacataaaatataacttcccattttcagaaaatgtaaaaatatatacattattattatattcacagaaacaagaccagaagagattccccaaagtattcacagttatcctcgtaagtctttataatctttctgcattttccaagtcttctataatgattctgctctactccttttagacaactaacaagcaaagcatgagtcccatggccatgcccacagatcatactagacacacaagtccccaggccaaggtttagcagcttggagcctgctttttcttctctttttggtacatcttttcttctcctttagaacattgaaataaaaagtccaacatatgcactttgtactcagtagcaactctactcttgccaagatagtggtcttgtgatggcctaagtggggaaagagagaatggggatgaagggtactagataggcgatgtactcaaactgggctttggaaagcattttgaaattgtcgatcatggtgttgtggaaggactgatgtacaagaaatccaagcaagggtgtagtctaaactatgagagcagcgtagacccttccaagtcttcgtgtctatccctaaagcagagataatatggtcctcacctgactggtggagatgtgtaaggccgttaaggatgtagcaggcatgtagtggaaccctctgcatacttcaggcttccagacctggaggctgtcaggcttactacctggcatgagggctgccagccccacctccctctacctgtctcttcctggacccaccactttcactcccacctccctgctctcctctccctcagttgctaagatgagctcgtttcactttcttccttccaaaggcagttgcaaactttatagtcccattgtttgaaattattgaagatgctaatgtttgatgtggaagtttaagcctgtcaggaaatttcactttcaaagtccttcagtcggttcaaaaattcctcacatgcgatgtcctcttgatggtgtttccaaaccccttggagcctatctggagtgaaatggtccacactgaagcccttctgggggatatgacagaaccctaaagattgtcagcactgtccgtttttaaccatggtctgacatgcgcatactgtcttaggagtaattgttagttctgaactcaccagtgagcattgcagagctaaataatccagaggtctcctgcaaaagtaaatataatagagagtgctacaccctgtgcttgtgacgaatgccaaggcttggcagaccaggcctctgctgggctctggactcagggctccggcctccaacagccagaaatcccaccaacaccaaggagactgtacccagaaaaggtcacccagaaatcccatcacttttggaccatggcagaatatttgcctctccagaggttgaaacaaagtatgagtcacttccaaaattattttataaaagttaaaatgtttcctttaaaaagaaaaatcctatcagaatgcagattggggtttgccagggtctgtgggggttgaggaatagggaaaaactgcttaatgcataaggggttttgctgtgcagcaatgggaatgttttagaaccaggtagagggggtggctgtgcagctttgtgactgtactccctgccactgaatggcaaaaattgttagttttatttcatgtgaatttcacctcaataaattactgtaaaaatcatttcaaatgatttttctcccctctggctggcaaggctcattatctttgggtgagggtggtggcacttatggtgtatagtacagcagacaaagcacaaaattggcaccagcctgactggtatgtgcactggatgacctggggcaagttgtttacttatgctgtgtggtcaaatgaggccagtgatctagctgtttattaaataatctgtacatttttctaatgaacaaagcaatactggtatattataaaacagcgatcctcaaccttttttggcaccagggacaggttttgtggaagacaatttttccacagaccggggaagggggatggtttcaggatgattcaggtgcattacattaattgtgcactttctattattattacattgtaatatatcatgaaataattatacaactcaccataatgtggattcagtgggagccctgagcttttttttttttttttttttttttttgcaactagatggtcccatctgggagtgatgggagacagtgacaggtcatcaggcattagattcttgtaaggagtacacacctagatccttcacatgcgcagttcacagtagggtttgtgctcctacgagaagctaatgctgcggctgatctgacaggaggtagagctcaggtgagaatgtgagtgatgggaagtagctgtaaatacagatgaagctttgctcgcttacccaatactcacttcctgccgtgaggcccggtgaggcctggttcctaacaggccacagacaggtaccagtgccagtccatggcccagggattggggacccctgttataaattttatataaaataagaaaataaaaatcatccaaaacttcactactcaaaggtgacattttgtattttgttttctagctgtctaacccttttcatacccatgtatatttttaagtatttttgatctccatgcttttcttagccagtcctttgttcttggactctgcctgtcccgggccatgtcagcaggaagcttgcagacacctccctccttcacgcttagggagcatttcctggggtgggagtgggaattggaaagatgtttgaatcacccaccattgggatttgctcttttaaatctttaagtttctgttccttcctttgtcttcagagtttttattaaaacaatgccagttttccatctcctctgtggcatctgtttattctctttgactttcagaaagctgaacatatgactcatttctgtgtgcgtgtgtgtgcgtctttgtgaagcaacgcagagtaaaagggaagtgaagtcgggaataattatttgaacctgattcttctgtgaatgtttcaatgagaaataaatcttgtttcccctcacaggaatttgcaagtttgctacaagccaaacagaaagattggtccagggctgtgaatttggtcagagccccttccagttggaagtagcaactctttgcagccccagtaacaggaagtccatgtgagtgtgcttgggccctacgggacctgactcagacccaggtacctttcacac

SEQ ID NO: 473010 - DNA, 1314 bp, Homo sapiens
gtcctcctgtctagatggagggggcgggactccatcacttcccaggcccctccaactttcctgttataactctgtggtctttgagagcttacttccagaacacccttcaacaaggaaacacccagaagaccaatgaaaccaccaagaatgcctcatccaggaagaacgatgtggctccaggaatgcccattgtgagagactgtggctgcagatacctcacagcctgcagtcaagtgctgcctctgggtcccgggagccttcaggcagagcagcgtttgccaagggtcacgacggctgtgttccgtgacgaatgcacatgttgtagatataaaccagtaggagacaactttggggaaaatttttaaaacaaaacatattccgatgtgtttgaattatgcattgtgaagatattcagactttccatgactgaggcagccatgattgctgtttgtttttaagggcaacacacgtttcaaagattttgttttgttctgtttgtttttcctacagagctaggatttgcaagacaaatatggcttatactttagaggaatgggattcgaagatggagaaataaaacgccaaaatcaaaaaaattttatgaatgtcatttctttctgatatcatgataattctcattacaataaaaagaacctgtgagatgattccatttctggtgagcggaaagtgccgagcgactctccttctcaaggaaggttgaggtacaagggcaagcttttgtacttggatttaaaagagaagttctagttttaaattcttggtctgctgttaaccagctgtaaatgttgggaagtcattttcttcatctgtaaaatgcgtaaaaggaatatttgtcttataggatttttgcactttgaaatccaactatgcaactcattatttctttcaactgtggccacattcaggatcccatggtgtactaaaatctctttgaatcagaaagcaaagaagaaggaagaaacattggcgttttccctgtctccagcatggctgtaggatgcagagtgattgaaaatggacatttattaagatgattaatgtgtgccctcggttctacgagattgtctgtataaattgtctttccctattcagtctttgtaatttgcgccttctctatttttcggtagatattttttgcatttggggaggtttactttttttttttttttttttataaagtttgcctttatagtaagactttcatacaataccatttgcattagacgaaggcctagtcatgagaaaatcacatccgttaactgaccagggagcatttactctaattattaactc

SEQ ID NO: 473011 - DNA, 651 bp, Homo sapiens
gaagaggagggggaggcagctctgagaagaacggggaagaacagtcaccaggacctgggactgcacacccctgagcaggtggtggcatgcgggcccctccagacaaggtgcctggcaggaacatgattcatcatcaccaccaccatcactatcatcaccactaccatcactatcataatcacatcaccatcactgttaccatcaccaacaccatcactgtcaccatcaccaacaccatcactctcaccatcaccatcaccatcaccaccatcatcgccatcactatcaccatcaccttcatcaccaccaccatcaccattaccatcatcatcaccaacaccatcatcaccaccatcgctatcatcacaaccactgtcatcaccaccaccatcactattaccaccaccatcaccaccatcaccatcactgtcaccatcaccatcaccaccatcaccatcatcactgccatcaccaccatcaccatcaccaccatcactattaccaccatcaccatcaccaccatcaccatcactgtcaccatcaccatcaccaccatcaccatcaccaccataatcaccatcaccaccaccatcacatcaccaccataatcaccatcaccaccatcatcaccgtcactttcactgtcaccat

SEQ ID NO: 473012 - DNA, 622 bp, Homo sapiens
aacaagaaggaatgaagagctgtgacgcttctgggaccccagacctgagaaatccccaagccaggactgtgacacactgcaacaccctctttggggctctgtggttcctggcatctccaagctttttgatgccatcatgttcctcttgtctagacactggtgcctatggtggaagctgctcgggtgtggttggcaaaatgaggggccataaagatgtctctgtcctcatcctcagaacctgtggatgtgtcaccttatatgaaaaaaagggtctttgcagctgtgactcgggttacagacctttagataaggaaattattttaaattatccagttgggctcaatgagtttttaaaagtagaagaaggaggcagaagagtgggtcagagatggggcttggcctgcctgtgtctctttgatgaacaaccaactgagatgccagcttctcaggacacgaaagccagtaacaaagtgctgcaggaagattgacgagttatttaaagattatttatatcttatgattgctgtatcatgaataatagaatatgctgacattaaatgacaaaataaaactgttagacatgcattgtccataggcactgagaccatgcacagtgtttctg

SEQ ID NO: 473013 - DNA, 1686 bp, Homo sapiens
actgataaaaataactgctgtgtcttctaagttctacaagagcagaagcacccggtatgtcccagctgcttagtgggcacgcactctggattcccgttagttctacagtcttgccaatacttattttcatgttaatttcagccaagttaataggtgttggccctggccgattactgaaatacttcattttcagtgcctgtgtggccgtaattcgaacacatggattaaataagaataagccttgtatgagatctatggcaacacctcctttattttcacgtgaggaaaggattcagaacagggctagacattgcacctttccctcaacagcaaccaatcatatctacattcctgtatcaccaaagaatttgccatgcttccagtcctactcaggagcacctgaattaaccaagacaagtaccttaaaaattgagttcccactcccctatacaaagcaatatgaccagaaatgcccgagcatgaaaattattacaattttgatctcttgagattttctggaatcttgctgaaaaggaaactgttctatgaaactgttattttaaagatccatttcaactcctctgaaaattattaactaagaagtaacagcatcaagttaattttgtgggcagtggccaatttccacttgctcttctccctctgttttccctgctacaaacagtaaaaagatgtcagtgcagttggctattccctaacagtaaaattcccctcccattctaaacagttgagcagactctcagtacagaataaactattggtcatgggtcagagcccacagttctttgctctttgtcttattaatttttaaaaatatatgtgatgatcatctcctgaatttcaatttcctgaagacaatatgacaaatttattttaactattctgatgcagaaagctaattaagtaaactggttcagcaactgatcatgtttcactaatttcaaccatctgcctcaacatttgttcctatgtgtaccagctttcatagcttctttcctctaatagcaattaatgaaactgttaataagctacatatatcatacactgttataacaatttaccaaagggtagcattatgagacaaattatatttaacaattgtagaaaaatgactctgattatcaaatgtacaacatcaattagattttttaaatttatgcttctcaattaattatctaattaatttggtgcacattctatgtataatttgtaattttaaactcctggtcagattttgccatctatttttacatgctgactgcttatatgaggcacatattaatgaaacataacttccctgcaaattactgagccttgcttttattttcattcattgtgctttttcataagcactttttcaattgttgtgcaatgcataaaaaggcaaattgtactattatccagtttttgcactatattcaaagaatgatatatgcacacacatatataataattttaattttaaatgaggttaatttataaatatcttttacaaatatcttttaaaaataaaacagtacaccaaaaaccaaaaaataaatggcttttacgaaactttgattaaacatatgttagcccttctcatggtattccttgtgtctcttaccctcccttctgtatattctaatcttccacctctctgagcgtggatgtctaaagttctcagcc

SEQ ID NO: 473014 - DNA, 1490 bp, Homo sapiens
tctgtgtggtttgcaacgcacattgctttcgagagctgtgttttgtccgaagctgattttgatgcattttgttttcccagatgacaatctgtttgacattaatagctatattcatggtgagggaaaaagtagaaagtctgtggaaagaggtggcgggatctcttctaccaaggaagcaggttgtacccttcccacacttgctgtggaaaagaaggaagacatagccatgaccatgagccccttgtttttcttgttctttgaaagctggatccctaaagcatgtgggccacttggttccctgaaacccgaacaatacaaatcactactcctcctacttagggatccagtaaaaagtaaaaggatggaggaggattattatgtcctctttatccatacttatgactgggaaaactcctactttatccctggtaatatttgttattatgacatgcttatctttattactgcatatagttagttcttcacttttaccttttaacacttggacagtaattaagatgtttagtccattaacaattagtatagtaattggtagcctaccctcttgctatttatttttctttttattattcttctgttcctcttttttggccctctttttgactagtaatttttttgagtatttcattttactttctttgtggatttcttaactctctcccctaattattatttttaactggttgctctatgtttaactgtattctttcttaatgttccttttgaatcaatactgtgtcatttcactcattactcttcacacctgacacttcaatcttcttacttcatgcttctctctttaccctgacacctccagttttagtataaagaccttgtaatagtatgattaaatttaccaatagtatagttatatttacatcaaccaataattatgaggagatacttaaggaaaaaccctactcacaagtgacagagcactcaatagaacctgatttagatatgatgcatattttaaagctattaggcaaggaatttaaaataactatgattaaaaactgtagtggaaaatgtggaaaatatgcatgaacagttgtagcatttcagtagaagggtagagagtgtaagaaaatgtcaaaaggaaatgctaaatatgaaaaacaaatgaagaatgcctttggtgtgctcatcaattgacctgacacagccaaagaaagaatcataaatttgaagatgtatcactagaaattaccttataatagtgtacttatacttgtttaaagccattacactaaagagggaagcgtccagaggtaataaagagggaggagcaaaaagacccaacagagcatccaagaggtatggggtaataacaagtaatataaaatatgtgtaaatggaatgctagaagaaaacagagggagaatgggacaaaagaaatagttgaagagatattggttaataatttccagatataatgaaagacatcaaaccaccaagcacagaagctc

SEQ ID NO: 473015 - DNA, 906 bp, Homo sapiens
gggcggtgcaagatgtgctttgttaaacagatgcttgaaggcagcatgctcgttaagagtcatcaccactccctaatcttaagtacccagggacacaaacactgcggaaggccccagggtcctctgcctaggaaaaccagagacctttgttcacttgtttatctgctgaccttccctccactattgtttttagcttctttgcgatgggttcgaacatcctcctttagcttggagaagtttgttgttaccgatcgtctgaagccttcttctctcaactcatcaaagtcattctccatccagctttgttccattgctggcaaggagctgcattcctttggaggagaagaggcagaccatcagctgcatctctgttggagtttgctggaggtccactccagaccctgtttgcctgggttatcacaagtggaggctacagaacagcaaatattgcagaatggcaaatgttgctgcctgatccttcctctggaagctttgtctcagaggggcacccagctgtatgaggtgtcagttggcccctactgggagatgtctcccagttaggctactcggggtatgcatcaaatatttgttttatgtagttgaggtaaagttatttatacttgtgttttaagcataattaacaaactttcatttgtcttagatgacagatatctctcttagatttctgattatattaattataggttttttaaaacacaattttcttttaaactaaatttaacttaaatttaactccccctaccctgccatttttgtttcttctgcattcaatcttatctctttttaaatcttttttttctagtttctattttggaggtttcactcacattcctgggctatttggcagtctgttcacattcaagatagaagctctggatgctgatt

SEQ ID NO: 473016 - DNA, 739 bp, Homo sapiens
aaattcagacaaatgaattaacctctcggagcttcagttctttcatctgagctgcctcctctcagctcctcaaactaaaaatgcttacatcggccaaaatctatttcttcatcccagttagttcagcaaagatagactatactattcaaggcttcagtctcaatgccaatacacaagggctctgcacagaccttgcagatacctcatctgtgcacgcagctttagaggagacaattgtcattgaaaaaacagttgttattcacagttctcaagagaatggggcacagaactccatgcaggtcctcaaggggaagcaccagggcagtcaggaggcagacggagtgggaggaaagcatgggcaagaggcattattgtggtttctgcaagaaagaatgggtgaggcagggattgagtggtgtcaaaaaattctgctaggaaaggggtcctctatgggtgctgtttctatccctcatcagggttgctggctacctgttgctggtagctgtgaactagatgactcttgaagtgacagctagaatctgtctttctcttgaagacaagataaggcttctattattttaacaattatatttttgtgtatattctctggaaatagttgtaatactgaggcctctgtcattctaaaaagagctgatctggttaataactattaacttagaggctttcagtagaatctcttttagtgaacagcaatcttgaattttaaaaaatatatctc

SEQ ID NO: 473017 - DNA, 771 bp, Homo sapiens
cattgggagtgaggcctccaacatgcgaattttggaggcacacattcaggccatgacaggctcaaggggctcatgtggttacgctggagctaccccagataatcctagatcagcagcggcactggattctcagaggagcgccaaacttcttgtgaactgttcatgtgcgggatctaggttgtgtactccttatgagtatctaatgcctgatgatctgaggtggaacagtttcattcccaaaccgttctctccctcccctgcatccatggaaaaattatcttccatgagaccagtgcctggtgccaaaaagtttggggatcgctgttacagaggctccttctgccttgtggctgaccctagtgttgctcatgcagccctgcatgccatggcatgccatatgtctgctgtttctacagatctcgtagcagagaagctagtaagagatgacttatgggccctgcttgctaaaaatgtccttgaactcaagaatgttttaaataaaggaaaggttaagacgctggccacagttggagacaggaaactcacctacttcactgaaccatagcatggaaaacatatttacattgggctacttcactgaattttaaactccccaataccagaaagggacttaggaggtagaggggtcccgaatgtgttgatctacagtacaaagaacaactgatagagactcagcagaagaaggctttaaagaaaatcatagattttctagtttatttgcatagaggtgtttatagtattctcagatgg

SEQ ID NO: 473018 - DNA, 515 bp, Homo sapiens
gcagtttgttccttctgatgttcggatgtgttcggagtttcttccttctggtgggggtgaagctgcagactttcgcgacccaggagcccagctggcttcacccagtggatcccccacgggggctgcaggtggagctgcctgccagtcccgcgccgtgtgcctgcactcctcagcccttggatggtcgatgggactgggcgccgtggagcaggaggcggcgctcatcggggaggctcgggccgcacaggagcccacggagtggcggggaggctcaggcatggtgggctgcaggtcccgagccctgcccggcgggaaggcagctaaggcccgggtccgccggggccacgcccacccggaactcgcgctggcccgcaagcaccgcgtacagccccggttcccgcccgcgcctctccctccacacctccccgcaagctgagggtgctggctccggctttggccagcccagaaaggggctcccacagtgcagtggcgggctgaagggctcctcaagtgcc

SEQ ID NO: 473019 - DNA, 859 bp, Homo sapiens
cgcgtaacttaccaagtgatcagcaagaagaagagcagaacttggggaggttcagggcagttgctatggggcaggaggagattcatcatctaggaaagactttccctactactcctgctctgtccctgctttaccttgcatgggcattatcacaacacatctcttaccctcttaaactctatctcgatgtctgcttcctaagggacctaagcagatacaactcacatgaagcttcaagttatttggagagaaagaacaacatccatggcaaaaacttcctactatctggcagcttccagattgtagcagacatcagctccatcagtgactcagttctgcactgtgtctttggaagttgttctgattgctggccttctgccagactccagctagatgctagggaagcaaagatgcaagacaaagccttatctgaaatgattacaggaaagagaaacagaaatagccatggggaatctgtctgggaacgataggggcgcaaagggtctcaaagggtactgtggtggtcaattcagagttggtgggggcaggggagcatatttttgcaaaagaagcagcttcagcatcactgaggaggtgtgaaaaagcctggaatgttctggaaactgcaaacatggggttgggttttaaaggctaagctttggtctggaggcacacaggtagagtttggcattctggctatgccacatacaacctgtgtagcccatgtgagttatttaacttctttgaaactatttcttcatttgtaaagtggggataataattttcatttcacagggtcattgtgagaattaattgagaatatttatcccacaaaatatcttttggacacctcctatac

SEQ ID NO: 473020 - DNA, 763 bp, Homo sapiens
gatgggcggggggaggctcaggcatggcgggctgcaggtcccgagccctgccccgcgggaaggcagctaaggcccgcccggcgccggcagggccggccggccactctgaatgctgggcccaccgagcccacgcctacccggaactcgctctggcccgcagcaccgcgcgcagccccggttcccgcccgcgcctctccctccacacctccccgcaagctgagggagccagctccggccttggccagcccagaaaggggctcccacagtgcagcggtgggctgaagagcccctcaagtgccaccaaagtgggagcccaagcagaggaggcgcggagagcgagccagggctgcgaggactgccagcacgctgtcacctctcacagtggcctgatctccactcactgcaagctccgcctcccgggttccagccaaggtcagttccaggacttgtacaggagatgtgaggattcagagctggaggtcaccccggggccttgcaagttctacgacagtagatcagttgtgaggagaggagaaaagcccaagatgcctgagaattccagcatccttgtcagaagtcaaggaagaagcttcttggaaaagctgcaagatggagactggtttgaggagaagacgaaggaggaccctgaaataggcccgggctccctgtgaaggtgattcgggggccagccccctgcttatgccgtcacattccttgctttgtaccagggtgcccattcttggcaattttcccgtgacttggg

SEQ ID NO: 473021 - DNA, 664 bp, Homo sapiens
ggatctccagtgcagagagagcctgtgacgccagtaagtgctcagtaaatgtccactgtgatatccaggatgatgctgagaaaggtgatctccacaagtgatctccacccactgtggccgccttcagagggagtctaccagagaccaatgccctctcttcagtactgcccccgctgctcctgtggagacagtgctcgggcagcgggcaccatggttggtggcaaggcgaccaccacggtggaggagctggtctcaggggtgcggcaggtggcagacttagaggagcagttccgctcctactcagagagcgagaagcaatggaaggcccgcatggaattcatgctgcgccacctgcccaactaccgcaacccacccaacagcggtggccgcctggaccagctgctgtcccttcttcatggtctgggccaaccacctcttcctgggctgcagttacaataaagaccttttagacaaggtgatgggaatggctgatgggatggaagtggaagacttgccacaatttactaccagaagataattaatgaaaaagcatcaaagtatgaaggcttggctgccacctgagatgatgttgcttctcaggcaagtaattctaaatccccccacccccttggcattaaatggattttcactgttgtcacatgct

SEQ ID NO: 473022 - DNA, 994 bp, Homo sapiens
ttttcaatcccatcagcgaggcagaggtccctggaagacagcaggggctgctgtggcagattcgcgattccttcagcccgccttctcctaactagctcttggaggatgtgatgcaactcaggaacaccatggtccttgccttcagagacctcatgtctagcatggggacagacgcggacccatgggctctgggcctgcgggatttgaagtcttcacgaatgaaaggcggagacctgaaggatgggcagtacctcctggcagagctggaggaaggtattctggggcgtggaaaggaagaggagccgcctcagcaggacaaggcaggacccgtgggaagaaagaagctggagcaaccagagatggagcagagctacccctggccctcgagggaccagggctgggggcctggctcttggcaggaagtcagggcagttgggagtccaggtcacacacactcactggggccctctgtgcagagcgaggccagtcctgagaatgccgcgcgggagcggagccgggtcaggacgctgcgccaggccttcttggccttgcaggctgctctgcctgccgtgccgcccgacaccaagctctccaagttggacgtgctggtgctcgccgccagctacatagcccacctcacccgcacactcggccacgagttgcctggccctgcctggccgcccttcctgcgtggactccgctacttgcaccctctcaaggaggggacttccccatggctcttctgtgacagctactgggaagtgggagagaaagagggccggctccgcctcatggagatcgtccttgggggctttctctaagtcctaccatggggtgccagaaatgtgatatagcttcggtgaaactcatctctggccctaaagaaataacttgaggactaatcatagaatctacacacactgaaaataactttccagatcggatgtagcctcaaacctggcacctgaagtccagatggaacaaattacctttc

SEQ ID NO: 473023 - DNA, 605 bp, Homo sapiens
cagagacctcctttcatctcgttaccattctcaacatgtggctgccacttcatggctcaagacggctgcttcaacttgagccatcccgtcttctttccagccagcaggcaggagaaaaggggaggagcagggcatgcccctcccatgaaagacgccatctgtccctgcaggcctcgaatcctctatggcagtcccggggctccaccactgtgtcttcaggaggccgtttccgctgcccatcgtgcaggcatgaggttgtcctggacagacacggtgtctacggcctgcagcgaaacctgctagtggagaacattatcgacatttacaagcaggagtcatccaggccgctgcactccaaggctgagcagcacctcatgtgcgaggagcatgaagaagagaagatcaatatttactgcctgagctgtgaggtgcccacctgctctctctgcaaggtcttcggtgcccacaaggactgtgaggtggccccactgcccaccatttacaaacgccagaaggctggagtgcagtggcacaaacacaacttactgcagccttgatctcccgagctcaagtgatcctcccatcttagcctcgcagaacactaa

SEQ ID NO: 473024 - DNA, 652 bp, Homo sapiens
gcccctggacgtccccagccctctctctatgccatcctgcctttccactcaccttcgggcatcgggaggatgaggagacaggtctctggagcattctcccaccttcacactgggccaccatccccgggagcccaggaaatccttatctgcagagctgcctgcactcccccattatcctcctatcctccttctccactcgcttatccagaagtccctttcccctgggtgcccttccttgatgatagatggaggagggagagtcgaggggaagggactgggcctgggaggggtgaggggaaggcaggggagagcaacgcagagctgcagggctattcaaaggagaaactggagatcaaagggccacaatgcagggtgcggacctcagaggcttcgtgctgcagtgactggcgagaggagcatgggcacattgggaaggtcctgcctgtctcccaaggctgccacctgggggtggcccagggcactgttgccagacgagtcttccattaagcactcatcccatcctggccctcattctctgctcctcacctccaccagccaatgccccctcattgtcccaggggatattactgcagaactacagacactttgcaattttacactgggaattgccaactacccttttaaagcctat

SEQ ID NO: 473025 - DNA, 535 bp, Homo sapiens
tcggagcagtgagatgcttaatttttctatgtgtgtgcacagaaagctgtggatttcgaaaagtgctgctgcaaatcatgaccttttccttatatttcctggcaaaatcacaaagaagagccatcaaagacaaaaactgtttaatttctttaaacaaagattatttgagaatctgactcaagaatctagagaagacattgatgaagcagtatgtgcaatattatttaaagaaaattccattgtgaaggacatcaaccagacccaaagacaaaaatccaccaaagatgctagaagcacagagaaatcagtctctaccttggtacttaatattggtgacctggtacttgaaatgctcccacagaggaaggtaagagttggagattgtcaactcattcctgaaggctctcgcctctctggaattctttttaaagctgtccagtgattttaaaattcttaattttggtagtaaattttctgctttttcttctctatttatttcagcaggacttttagcctgtgcagacttctatattct

SEQ ID NO: 473026 - DNA, 787 bp, Homo sapiens
tcactgacttagttcaggcccatgaatacctctttccctggacaactgcagcagtcttggtctaacccttgtgatcaagggttagactatgcacccaccttctcttcttggaagtgtgaacttgggagatggaccaggcctcagggtgcaggatgcctcgtggggccatctgaaaaaggcacatcctgccagggaggaccaggccacctgcccctctgccggtgtgatgtccataactgctgggacaccaagcattttccttccgagctggccactgagcaaacctgggagagaagactgaagagacaagatgaagcctgtggttttacacaagttgagtttgaggttcccataggacagccaggtggctgtcacatcaagaaggccattagatgtgcaggtttggttggggtgaaatgtatctttcctattcaaaccacccactcaaggttgatctcctatggaaacagcctcacagacaccccagaggcagcccaatcactcaagtcaaatgccaaaccacctgggaatcagaggaatgggttcagtgcctactggagcactgagaataacgctttatcgctggtattatacttccttccaacaggatttcttactctctcaagtgattttgataatcttcataatcctgttaaaaatagccataattcgttcaagtatatgagagttgatgacgtctgtgatgacaaaataattaagattgtgtctctcttcatggaatcaacctagatgtccatcaatggtggactgaataagaaaatgtcat

SEQ ID NO: 473027 - DNA, 897 bp, Homo sapiens
agatgcttgattggaggctggagggcacttggcatggcgacatcatggaacacaccgggaagaaagtcagtgcttttatggcccttagaacccaatgcaagatacttggcacttttatacagattcctgttaactgcaagctaaatgcttatgaaattcgggttggaccaatcagaagcttgggaaggcacgaggtccctgagtatgttagtgaaggttcccagagaaatggccaaagagcacatggtgcctacaataactctgaaagtttgctggtggtagggatgcttccagaagaagcagatcttctagcacattcacctggtgctgggaaagagaccttggaccttcccagcaacctactgtggaagcaagaggtgtggcctgggaaccagtcagcagcaaggtccatacagcagggtgagtctctgaagtgtgaccgaggtgctcatggctatcagaggggcagcacctatctgtgtcttggaaccttcactgatgggaacaaagtcattgcttccttcaagagctgcaaagccttgttggacatcaagaaagcatcctcaaagttcctggtactttaccaagcatggcccacagtgaccatgtgggttaaacatcatggacctgatttttgccatggaggaggatgaggcttggagaggttatgttgctagtcattgtttgagtacctggccaggccctgtgctgggaccctctggctctcccgcagggagtgagtatgctgacagctaccctaggttgaagatgcttgcccaagaggaggtataagagtggggaagggaagggacaatgagaaccttgtttaactggaggaggatgggacaaggccggggggagggaaggagactcaggagggaagagggaatcacaaag

SEQ ID NO: 473028 - DNA, 571 bp, Homo sapiens
gtatttctagtgctgtccatgtacatgaccttggaggtgcttctcccaggagaaaaacgagcggaggaggaggtggctgggagcaccatcttggtgcagcaacgtccgggaggcctgctgtgctcagccctgcaggtttgcagctcagctgagagttctggaccacagcgatatttaattactgtaggcaaatggatgttaattaagtcaaagagtggaggaaattgtccagggagactgtaccagattctggaaattctggaacaggccactattttgagggtcctctgtaaatttcctactcattattatttcagtgaatttgttccacaaatgtctgccgagcacctgctgtacattagacctgaggtacagagagagaacaaaatggaaatggcccctggcctgcaggtgtcccaggagatggaagggggattctagaaggactgatttgctccatctgataccctgcacaattttggagagttttgctaatggctctgcaacattgctttgacaaatgggtaagaacatggcagtatgtgacaaattacttgaatatcagccaagg

SEQ ID NO: 473029 - DNA, 1202 bp, Homo sapiens
tacaatcatggcaaaggggaagcaaacacgttccttctttacatggcggcagcaagcagaagtgcagagaaaaggggggaaagccccttataaaaccatcagatctcgtgagaatacactcactatcctgagaacaacatggagtcccaaggactgtgctgaccttgtggataggtgccatcagatcccagcatcagtcaaaggggaggtcaggccatccgtcatcctcagtccggacttcctaggctccctcttggaactgcatccagggtacatgtcatcaggaggtgtttcctgtgttctctggcccacagattctagtgtcttcatagtctctgaactccagttgtatgtatcttcaatgcagcaggaattccagtttggtgaaaaggatatttgctagatttttcaaacaagttttggaggctttccttccttttctaatcacttaaacagttatttaagatagttattttttgaagggatggcaaaaggcttattaaggaattgatctttgctgatcttctattgtttctttttcattttgttaatatctgcttttatatttgtcattttcttcttgtaacatttttaggctttagtaatttttctttttaaacttaaaatgaatgaactcatttgttaaaaaaaaaaaaaagctgtttttaataaatacatgaaggctataatctaaaccccaagtactaatttaactagagccttcatgtgttgaggtccacagcattttcatgctattcatttctagatactctgtaatttgcattatgaattcctccttaatttgtgagttattaataaatgtatttttaagtatctccatatctggagagcagaaagtgttgtctactccattatcttttattgttgtttttcaatgtagttgaattatgcttagcaaacatgatctgtattttatcgatgccatgaaatgtattggcaatttctttgtgttttaagccatgattaatttttcttgaaaagaatatatcttctatattttggtgtgatgagacattttctacatatatattatatatattttacttttgctggttattaatttttgtctcatatagttgatatgttaatttctaatatgaatgtgttgaaatctttctcaatggtttaaaatttggcatatttcaaggcagtattgctaagaacaaaattatgattcttct

SEQ ID NO: 473030 - DNA, 2808 bp, Homo sapiens
acctgtccccaacagatgcgactttgctcctcattcaccttccaccatgattgtgggcctccccagctatgtggaactagacttgttgaatggctttgaccaaaatgccgatagtgatgtggacaataaaatccaggctgaggtggtctcagatgaagatgaggaacttgttgggaactggagtaaagatactcaacaccagcccatgaaagcagccaggaagggtgctctaccctgcaaagccacagaggcagagctgcccaaggctgcaggagcccacctcttacatcagcatgacctgaatgtgagacatggagtcaaaggagatcattttggaactttaaagtttaatgactgcactatagatttcggactttcatggggcctgtatcctctttgttttggccaatttctcccatttggaatgggtgtatttacccaatgcctgtacccccttgtatctaggaagtaactaccttgcttttgatttgccttgtctcagcctccctactcccactgctgcctactcccactgcctccctactcccactgctgcctactcccactgcctccctactcccactacctccctactcccactgcctccctactcccactgcctccctactcccactgcctccctactcccactgcctccctactcccactacctccctactcccactgcctccctactcccactgctgcctactcccactgcctccctactcccactgctgcctactcccgctgctgcctactcccgctgctgcctactcccactgcctccctactcccactgcctccctactcccactgctgcctactcccactacctccctactcccactgcctccctactcccactgcctccctactcccactgcctccctactcccactgcctccctactcccactgctgctgcctactcccactgcctccctactcccactgcctccctactcccactgctgcctactcccactgcctccctactcccactgctgccttactcccactgcctccctacttccactgcctccctactcccactgctgccttactccccgtgcctccctactcccactgcctccctactcccactgctgcctactcccactgctgcctactcccactgctgcctactcccgctgctgcctactcccgctgcctccctactcccactgctgcctactcccactgcctccctactcccactgcctccctactcccactgcctccctactcccactgcctccctactcccactgctgcctactcccactgcctccctactcccactgcctccctactcccactgcctccctactcccactgcctccctactcccactgcctccctactcccactacctccctactcccactgcctccctactcccactacctccctacttccactgctgcctactcccactacctccctactcccactgctgcctactcccactgtctgcctactcccactgcctccctactcccactgcctccctactcccactacctccctactcccactgcctccctactcccactgcctccctactcccactgcctccctactcccactgcctccctactcccactgcctccctactcccactgcctccctactcccactgcctccctactcccactacctccctactcccactgcctccctactcccactgtctccctactcccactgctgccttactcccactgcctccctactcccactgcctccctactcccactgctgcctactcccactgcctccctactcccactgcctccctactcccactgctgcctactcccactgcctccctactcccactgcctccctactcccactgctgcctactcccactgcctccctactcccaatgcctccctactcccactgctgcctactcccactgcctccctactcccactgcctccctactcccactgctgcctactcccactgcctccctactcccactgctgcctactcccgctgctgcctacttccactgctgcctactcccactgctgcctactcccactgcctccctactcccactgcctccctactcccactgctgcctactcccactgcctccctactcccactgcctccctactcccactgctgcctactcccactgcctccctactcccactacctccctacttccactgctgcctactcccactgcctccctactcccactgcctccctactcccactgcctccctactcccactgctgcctactcccactgcctccctactcccactgctgccttactcccactgcctccctacttccactgcctgctaaccctgagcatttctcaagctgttctccatttcaactgtagacaaaaagagtctctgtaaaatatgtgaagagattgattctgagccaaatgtgaatgaccatggcccatgacacagccctcaggagatactgagagcacgtgcccaaggtggtcagggtgcatcttggttttatacatttttttgggagacgtgagacatcaatcaaatacttttaaggtgtacattggttcagtccagaaagctcttcccaagtgtggacaatccatttcaaagttgctctatacaactgtccagaatagacctgttctttgagggaaaggcttagagaggagccaaagcactgattctctgaaaaccatttgtctcctgtttctgaaagaccagatagaacctgtggctctttctaaacattggcttgccacatgcctgaaccttccagggagcaccaactcgactttttaagggagaac

SEQ ID NO: 473031 - DNA, 939 bp, Homo sapiens
gtaacactcaaccgtgagggtccgcggattcattcttgaagtcaaaccatagtgtggaaccggcctggtgagatggctgctgccatggccatatccaggacgatattccctctaagcgagctgctcctccaactgcagaaacacgtccccctgctgcacagaacactcttcactcagagagctgcgtggctccctccctgggccaatttccacacttatcccaaaggtgaagatgtagctcatcaaggcacctggtataaacagcctgatcttcatgattttaccctcaccgggtcttccgaacctccctcctgtttaaatgccccaaagtcactcacctgtgaggcagtgacatgtgccaggccgtatgccaaatgccagacagacaaagatgaaacagggaaagaggaaaaaaaatctcactacctctcaccagagcagtctctggaaatggagaacaggaaccaggtaaagctgtcgattttgcgggattctgaagtgatgggatgcagatgcaagaacacagaactacaggagaattttacaaaatctgctatctgtattgttgttgactgtgctatgaaaggaaattagatgctatgggcctctggaaagaaagaactatgttttaaatttttcatattccctagaggatttagcataaaactttgatattctgaatattagatatatattgttatcagattgaacggaatctgattggtatgaataagtgtgtttgcgtaagtgtgtgtgtgtgtgcgcgcattacagaaggcttgtaaggagcaattatgaaaacttacatgaaaagtctcaaaatatacagcttcgtgtacattttatggcaataaaggaccgtgacttctcatcattctctaccatgagccttccagtcaagtgagatcagctgtgtcattttacccaagtaaagcactt

SEQ ID NO: 473032 - DNA, 687 bp, Homo sapiens
tctctggcttcaaaaggaaaaggaacaggaacaggatactctctgttgggactcctgctctgagcgggaactatgctgatgcctgttcaagttgttccctgggtattttggcttcttgccctgcctgacagctgcaggagttctgtaagaaatctgagggagaatttcctttgcaaccatgactgagaacccaggatcaagagctttgcagacagaaaagacattacccttcgaatatcccaagccatctattagggtcagcaagcagccggcaaaaagcggggcagctggtggtccagccctgggtggagaaagtggattccatcgggaaacagccaggttcattggattggatgttgggagtcgaggagaaggaggactcaaggacgtcaagttgagcaaccgatggtgccatttatggagaggaaggccagggtcaagagaatctaaaaaatgtcattttgccattgtaaatttgagttgtgtttggatgcaggagtctgaaactcagaggagaggtgcaggttctgagctggtggacccaggatgtgctggctccatgaatggaagtacatacgtctcccctccctaaatgaagatgtgtagtacaaccactgactatggtgattagttgaatacattaatacattagaagaggagtgtctggagggcagggagcctcttttc

SEQ ID NO: 473033 - DNA, 1302 bp, Homo sapiens
gcagggctttgattccaaagcgggcactggggaaaccagaggagccttatagttctgccaaggcaccatgttgactcatgaggcagaccctcaggtgtacacaggtggctggagcctccctgcaaaggcccagccgcaggaagagcacagcacattcccatccctgctccgcgttcagggttctggcacggcctttccctgtggatatgggaaacgcagtgggacagcagtaggcccttgcgaggactcccggggagccagaagcatctgggacgtgggctctgctggctgccctcgggtgctacagcggcagcagctccccttcctgcgccccgccctgcaggcaccgcgcgctgccttcttccctttggtttccgcggtggggactcccggcgtccctgttgtgcgggtggagaagcgggagcgcagagacatgaggaaggctcaggaagcttcctttgcttgtcactgcttctctgtagccaagggtgcccttgacctcagggactcagagcgaatcctggagagtcacagctccctgctggcagttgaaagagactccaaacaccattctgctgcagccctggctcctaatgtgatatagatcccggtagtactgattagaggaaggactcatcttaattcctcccattaaaactttttctaatgtttctaatctcgatgctgaaataaatgagccttcgccatgttaaattggaggagaggaaatcatctcaacgtatttattcaattaacttttcattctctcatactccaaaactagcagaatgtttacatcctgacatctgaggacataagaccttctcatcttaatttctctcaatcatagcagatttttacattctcttcctaatacaaatacgttcatgagttacagctgctgattttataattaccaacgaattgcttttggatgcaaggagacattttcttaaagtcacagcatttagaacagtcaactgaccagaattttaacaaggtggtattataggtacacattggtttatataactaaaacaacaaacttagattttagatattttcccttaaaatgaatccagctttcaactgctttagaagaatttgttaatattttcattataaatatacaaacttgtatataaagaaagccctaactaaagccaaagactccagttgagaaaaactaagtaattggatatattttaatacataaaatgttacacttgttaaatgttactgaccatagctttctcatccctgcttatgatccttgttggcttttattttctaacattcttt

SEQ ID NO: 473034 - DNA, 522 bp, Homo sapiens
gagtgctcacggatgtgtgagcaggcacctgccaattaatctgtctatctggttctaatgaagaatgataagggtcctgagaggctggatattcatgagtcaatcattagttcctggaatttctctaacttctctaaaggactgatacaaagtaatgagtggaagcctgagaatgttccagaatctgacaaagacgaagcaggagttcatgatgagaacgacagtgtgaaatacactaagcttcctgccacgcaaattaaaggctttgctctaagaacagcaaaggccatttcctgcaagagcaacttccagcaggttctctgtgcccggattcagcatgcagagcaaactgcccacagggggcagaggcactggcgggggaaattttatatgattactggggtggagacagactctcagcagctcagcgccctgccaggcccactgagcaaccaccccttgtttcggagcaaggctttccacagcagtggtattcttctctttgtctgagttgtaaaatgt

SEQ ID NO: 473035 - DNA, 1277 bp, Homo sapiens
ggaagctgtcctctgagataatctccatggatgcactgactgtgaacatgcagaagtccacccagccgtattctggagtagcgccctatgtgacagctgtaggcactacagaaatgtggccaaggtttgcagggtctgggatagtcatagttgtaaacattgccatcaacatctccatcatcatcatcgtcatcatcatcatcatcatcatcatcatcattgctaacattcgctgggcatgcactcacactgcattccagacattgcactatggcctctcatggcagagtctggaggctgaagaaggtccagaggggaccgcgcagggcaaccggccaggcttcctgggaagtcagtgctggaaacaggagactgtgctcggcttggtgaagcagctccgagcctgtgatttgtctgtagacagctcggttcgggctgcgtggccctggcaggagagcatgcggcaggcgagcctccggccgcagagatgccgggctctgtgcgagacctccccaccgaagctgcgggaagccggcggtgcaccatctgcagtggagcaggtcagagtgggcctgctgaggctcctgtcactgctgcggttaatgctgccgattaccatggacacagggctccccccacactgccctctgcaacaggtgtgccgcccccacactgccctctgcagcaggtgtgccgcccccacactgccctctgcagcaggtgtgccgcccccacactgccctctgcagcaggtgtgccccccccacactgccctctgcagcaggtgtgccgcccccacactgccctctgcagcaggtgtgccccccccacactgccctctgcagcaggtgtgccgcccccacactgccctctgcagcagggctctgaatcccaagtctccttggccaccaagctgctctctgaggaccgcctgcttcctcactggccctctggtctccacgcaccctctccttatcgcccatacttacacagcagcccgtgttaatggcaagagagaaggcggagggtgtggcctgcacacctgtgatgcattgcctgttcccggccattggcgggctgccgggtgagatgaactgtttgattctgaaaaccatggccactgaagtctctgcttttaaagttctgctgtcagacttttatactttctctacgtcgagggctgttgttcaccctcttatcgtcatgcttcctcttggcttggagaaagccgtggagcaaatgctgttcccgtgttgggggcagggagcctggagaga

SEQ ID NO: 473036 - DNA, 607 bp, Homo sapiens
agacggttctttacttaaacctcatgaaccaacctctgttagcttctagcttttctgctggagcttccttacctctgttagccttcaaagaattgaacaggggtagagagggtgccaatgaacacagtgctccaaaggggggtggtcagggtgccacagtgcaggctgctggtgcccactgccagaggaccttctcgcccctgctggatgcactcgcgctgcctcctccatgctgcccccgtgcttgtcttacctctgcatgccaattcctctcagctgggcccactctgcctctgagagagctgctctccatggggctcttggatgctaccggagaggctcatgtctgtgttggggatcctgccagcttgggctccaggccaagcccagacctgctgtgcagtggtgctggggctatgggcaagggctttcttattctcccacaggaacacctggcccactaggtatgtttccgatcggtgactacagatgacagttttgcagcactacttccactactccaattctcccctccactcattgtttcagtgctgcgacacacaacgctgcgacgcacaagccactgtccctccagcctccggcagcc

SEQ ID NO: 473037 - DNA, 579 bp, Homo sapiens
tttttaaacagctgcatggcgttgcatcatatgcctgtttccttccctcccctttggttgtaagatggcagagcctggcacagagccaaaagcacccacgggtacaatgggactttgtctacatccggagagagtgcccacaagcctggtcatccctaaaggcaaaaacagaacttccaaagtatctttctgtgacaacattaggttcaggcttgaagtccctgatttcgccatcaaagtcagatccaggggggacgatgctattcagaaacgtgctgagaagaggactgcaatgactgctttcaaaaaacaccagaataaatacatacgtagtgtaagcaagcgaccactgttgtatcaaaagccctttgttgtatctgttggtggcggaggcagccagcggttaactgaggttctactgagctctgtggaccacagagttgtcttctcaagtttgcttctagggacaaattagtgactttatgatgtcaatctgtcccaagtccatggccaaagagaaaaaaataatgctgaaaaagtcaaaattcttagaattcttagagaattataaaactgcat

SEQ ID NO: 473038 - DNA, 649 bp, Homo sapiens
gtgtgtaaatgagtgagaatggggcccagccattgcgcacagccagacaggctagctgctgcagagggcaggcagctccagatgccaacacaggtgatggctctgtgcaaggctgcagctggaccagatgtgctacatacagcttctgctgcaggcatccatatctggacaagggaaatgcagtctgtgctccatgaaaggctacaactcgtctgtccccattgcctacgatgtggaagaacaaagtacacggacaactggagggtgagcaaggtagagaggagcttcattgagcagttgaacagttcccaggagacatacaaaggacagctcctttccacaggcaggtcatccgtacaagtgtgcagctcacagccaagacgagagccagagtgggtagctccttcccacaggcagccaccggaactgtaagaaatatgtctctattctttataaattacctaggttcagacttcttttgtgatctaacatatggcctatccttgagaatcatccatgtgcttagtaaaagaatgtgttttctgtatcccttgaatgaaacgttctgtaatatatattcgatccatttggtctgtagtgcagattaagtacaatgtttctttgttgatttttcatctggaagatctgt

SEQ ID NO: 473039 - DNA, 563 bp, Homo sapiens
cctcctcatgttccgtttagtaagatggctccaccaaagccatatagtgctgctgagtgcccaggaagaagagaaaatagatttaatgaggagatggataataaagagagaacatatacattaaacaatgagttctcacagcacaatagagggactgtgattatgaaaacagttggaagtgtaggccacaaacaggaagcagtacatctgtcctcaaactctggaggacaaggaccagagaattttgctaaaattaggcagttatttggagggagtaagaagtttgaaaattcatacctggaagactacactttggagatgggaaagttcagagcattgaatacctacatcagaaagtctgaaagagcacaaagagacaatctaaggtcacacctcaagaaaatagagaaacaagaacaaactaaacccaaccccagcagaagaaaagaaatatcaaagatcagagctgaactaaataaaattgaaaaaaaaaaaactacaaaagatatatgaaacaaaacctggttctttgaaaatataaataaaattgatagatgattagc

SEQ ID NO: 473040 - DNA, 835 bp, Homo sapiens
agggaggctctggcggtgcagggtcggggaggggggctcaggcatggcgggctgcagcactgtcgggccggcactgctgggggggccggcactgctgggggacccggcgcactctccgcagctgctggcgccggtgctaagcccctcactgcccgaggccagcggcgcaggccggctgctccgagtccggggcccagactgggtttcaacatgttgtccaggatggtctcaatctcttgaccttgtgatcacccgcctttacctcccaaagtgctgggattacaggcatgagccactgtgcccgacccagttgtgtttttttaaatggtccttagaagaaatcaactttgcaaaaattcttagacttctaatttccagagtagaaaaaatatttttaaactccagaatggaaaataaatttctatgtttaagccactcagcctgtgctatcttcctacatcagcccaagcaaatgttagtgttgctaaatgcagtgcttgtagaggtgactgtagaaaaacagaaactcaagaggggcaaggaagcaaacatgatgaatgaggggtcctgcattgcattatctggatgtgatgatctgcttactcctccaaattcttcaagcccctacccattactcagttccaaagctgcttccgtattttcagaaaagatacttatatgattttgattatttttaaaatgtttgagactagttttgtggcctaacaaaatttgtaactactataaaaaagacaaaaaaataagaaatactgggaggaacatggagaaaaatggtatgcatatgttgttattgggaatgtaaattagtacagcc

SEQ ID NO: 473041 - DNA, 584 bp, Homo sapiens
catctgcctagatttcagaggatgtatggaaatgcctggatgtccaggcagaggggaggagccctcatggagaccatctgctagggcagtgtggaagggaaatgtggtgttggagcctcaacaaagagtccccactgggcactgcctagtggagctgtgtgaagaggggcaccactctccagaccccagaattgtagatcctctgacagcttgcaccatgtgttctggaaaagctgcagagtctcatttccagcctgtgaaagtagctggaagtgagtctttgttctgcaaagccacaggggtggaggtgcataaagtcaaggagcctgaagaagacgctatgaagattagccttccagagcacaaggcaggtcagagaattgtggagagtgggaaaaatggccccatagggctggagctattgagagtattgatcattgtaaataatggaggatgctaaatccttcagctaccattttcttgcagactgggagataaagttggtgtcttttcagttcttcagaagcatacccccaaattacttctccttagactatttttaaaaatattcatttcattttatc

SEQ ID NO: 473042 - DNA, 526 bp, Homo sapiens
caactccttgtgcttcccagagattgcaatgcagtggccgtgcactaagtctggtgtcagaaaggcattttctgagctcacatatggagtaacagaatcgattaaggaactactccctccaggaagctgccctgatccaatgaccatgggtgtatttctgttctgctccaaacaaggcaatgatgtgaccttgcccctgactctaaagctccattctagaaactttcagtatcctggtcctgactttattgggccactgatacaagaaaagcagcaacgcagattggcaggtcgagaaataatagacacacacaagatagtgaaagctgggtccaggggagtcacctccttctggtcctgcaatgccgccaatgcactggatacaccagcatttattattaagtttagtgagggcgggggtagaaacacagtctttccataacctatgattagtaagatattaatcagcagtaacagttgcagcaaacaatcaatagaaacaggacatgaagctggacaaccggtt

SEQ ID NO: 473043 - DNA, 856 bp, Homo sapiens
tttcttaggtcctattcatggccaggagctggaatctacttgatgctctatactactgcagctgttttgttctggcactcaagctgcaagacggtttttcccattctttattctcctttcctgaagcagagggagtttctccccatggccatcactgtcccaggcccatggaagatgggagaaagtttggaacttcctagagtcttgttaaatggctttgaccaatatgctgatagtgatttgcaaaaggtagttcaggttgaggtggtctcagatggagatgaggaactttttgggaatgaggcagaaattccccctggaggactgcctagtggagctctgagaagagggccactgtcctccagaccccagaatggtagatccactgatggcttgcaccatgcacctggaaaagtcacaggcactcaatgccagcctgtgaaggcagccaagagggggactgtacccagcaaacccacagagatggagctgcccacggctgtggaaccccacctcttgcatcagtgtgacctggatgttgtaactgagaaatacagaaaataacaaacaatgaaagaaaaccaatgaatctgacctattttattaaaatgtaaatatatatttgaaaatgacattacaaaatgcactttatttaattgcaagacaatccgtgagcacttacaggaaattttctcaagtgaaagaatgcaatatcacaattgattaaattgttgtaaatatacatatgatttttctggagcaactgtgataattgaaaccttttagcattacactaaattaatttggaaagaatgattttacagatatgaagataatttatttcaaagtgggaata

SEQ ID NO: 473044 - DNA, 921 bp, Homo sapiens
acctgggaggcggagcttgcagtgagccgagatggcgctgctgcactccagcctggatgtttcccagagattctggtatggatggaggggtcaagatggcccaatagaaacagctccggtctgcagttcccagcgggaccaatgcagaaggcgtgtgatttctgcatttccaactgaggtacccagttcatctccttgggactggtttggcagtgggtgcaacccatggagagtgagcagaagcagggtggggcatcggttacccgggaagtgcaaggagcgggacggggagcacctccctcccccagccaagggaagtggtgagagactgcgctacccgtcctgggtactatgctttttccacggatttttgcaatccacagttcaggagattccctcgtgggcctacaccaccagggccctgcgtttcaagcacaaaactgggcagctgtttgggcatgctcctccactggtgatacccaggcaaacagggtctggagtggaccaccaggaaactgcagcagacctgcagaagtatgacctggctgttagaagaaaaactaacaaacagaaacagcagcaacaacaatgtcaacataaaagtttatatttttatttaatcatttattctggcatgtcttagatgtgaaaactgtgacgacaataatattcaaattgaaaaattcttttgtgtgagtgcgggattgttataggaaaggcatacatatagactctaatataatttgacaaaaagcaaagtcattatttgacaacttaaggcaaaaggaaggtgaactagctaaagctggagaatttaatgccggtaaagaatggtttgataattttaaaaagaagtttagttttaaaattatcaagataacaggagaagcatattctgctgaccaagaggcagcagaagag

SEQ ID NO: 473045 - DNA, 2661 bp, Homo sapiens
cctttctgctttggctgtgatttcaggcccctcagctccaggtatgttggagtttgctggaggtccactccagaccctgtttgcctgggtatcaccagtggaggctgcagaacagcaaacattgctgcctgatccttcctctggaagctttgtcccagaggggtacccacctgcagggatgtttaagtctgcagaagctgtctgctgccttttgttcagatatgccctgcccccagaggtggaatctagagaggcagtaggccttgctgagctgcagggtactctgcccagttcaagtttccctaccactttgtttacaccctccagcatcccaggtcgatctcagactgctgtgctagcagcgagcaaggctccaggggcatgggacctgcggagccagccgtgggagggaatgtcctggtctgctggttgtgaagaccatgggaaaagtgtagtatttgggcagtagtgtaccgttcctccagttacagtctttcacagcttcccttggttaggaaagggaaattcactgacaccttgcacttcctaggaggaaaatttgtacacagacactcatggaaaggaggatgtcacgtgagaagacactatgtgatggtggaagcaaagaacattgagggttgctagtatagtaagtcagcagaagctaggaagaggcaaagaaggattttcccctacagatttcaaagagatagccctattaacacctagatttcatatttctagctttcagaactatgagaaaataaacttatgttgttttaagctacccagtttgtggtactttgttaatcagtgctagaaaaccaatacggaactctttaatgggcctaaaaatattgttgtccatgaaagaggtttgattatcaattgcttaaataagtcaacttaagtgattagttacattctgaatctaagagattttgatagttaaataatttgtaataaatacttattaattgccttctacacataagttactgaataacacagacactctctgtggctcattaaatttatcagccaacatgggattcttggacttggttaaaatgaggggttggggaacgaaaattcactcttgtattctttagtattaaggtagaaaattattattgaaaattgaattattttggagtacatgaacctatttatcttctgaagacactttgaattttggtcatagatgcttagagcacatctggcataaaagataagtgaaatgataaatcattagacaaactgcaaagggtcacaatggagcatgtgcccatggatgaatttgaggactgtaccctggggagtgtggagacatgtttggcctgctgctttaatttgtctgtacatgatttgataagaaaacaaaaggatatgggaagcttgcttgtctaagtgtgccaaggctgcaatcaagcccttcacccattctttcaagctgccacctttgtgacagctgcagatgcagaagagctggctgctgtgccaaggtaaaaagggcacagcagccagaaaaaaaatatgaactacaagaatgtaaaccacagatgctgggttggaagaatacacagagatgcaaaaaagagaaacaaaaaacaaacaaaagcacaaaatattcctagaaagcaaaaattaaaactcaccctcttacatatctagataagcaatgcttatgacttaaaatatactactggtggttaatacaaatattactgtgaattgtatgctaatgatatagaaacccaaatatgatggaaattgaatttagaggagaaaagtctgtcacttgtgaggcaaaatagtttcccaaggcacataataaatttgaagcagggctgaaattataacctgcattttgtaattcttagttaattatattttcactgaaacatgctgcctttctcccatcatcataacatttgtctatatcaacaatatgactcatattagtatcattaagaaaatgctgctgttaggtgtgttgtttaataaatttaaatttttacttgatatttctttttttttaacatcaaagcatacaaattttaatataaagaagataagtaaccaattaggacatctgaattattcatgaatcaccccccaactcagctataaagttttcttttttttttaaattatactttaagttctagggtacatgtgcacaacgtgcaggtatctaagtcaatacatcatctgctctttcttctccagaaatttgtcaatgtttctattctgctgatagcactacttcttattatggacttattattttgttattaatattttaatatattttgcatatattaactttctcttcagttctattttgtgaaggagaaagggaatcttcactcaattacatatgtaatgagtgctatatttagaattgacatcttgattcattgttactgtttttggactttcattctttttgtctttatatatatattttttattacactttaagttctagggtacatgtgcacaacctgcagttaaaaggggcactgaatgcctactgacaattcatatatgcaggatttcacctaaatagagtatttgttagccaaataataaaagtctctaagtttcagaactatttattgaaatattatattggcgggatcagtgtttctggaa

SEQ ID NO: 473046 - DNA, 500 bp, Homo sapiens
acatcaaagaccaaaggtagataaaaccacaaagatggggagaaaccagagcaaaaaagctgaaaattctaaaaatcagagtgcctcttcccctgcaaaggatcacaggtcctcaccaggaatggaacaaagctggatggagaatgactttgatgagttgacagaagtaggcttcagaaggttggaagccaaaaaccttgaaaaaagattagataaatggctaactagagtaaatagtatagagaagaccttaaatgacctgatggagctgaaaaccatggcacgagaacttcattacacatggacaagcttcaatagccaattcgatcaagtggaagaaagggtatcagtgattgaagatcaaattaatgaaataaagcaagaaaacaaggttagagaaaaaagagttaaaaagaaacgaacaaagccttccagaaatatgggactatgtgaaaagaaaatctacgtttgattggtgtacctgaaagtgatggggagaa

SEQ ID NO: 473047 - DNA, 569 bp, Homo sapiens
tatgataagatagtattcctcggtgtgagaacagactaatagcatggatcatcataaagttcttcattttccttgtcttcacattgagtggactgaaaaggaggaggaagaggaggggcatgtcaagcaagccaatccttgggttccagtggtgacagcagcagtccaagcatccctgtccttgggccccatggtagtatacactggcactggtgttagtgggttcaggtcagctgattattgggccaccaggaggattccttgggtgttggcagtcacagcagtgagccaagtgggtgggagggtccttggacccctgggcatcaagtatggcctgggtgatggcagtagcagtggcaggacaatatctggctatcctggtgttggtgcttggaccctgtgtgagcttcctctcagaatgaatactgtgggaagtctccaggcagctccctatgttagtctcaggggctgcttgagttgaatggctcagggtccgggctaggatttcaggagtccatggtaagaaggtggacctgccgggggtttctcattcacccttttcccacatt

SEQ ID NO: 473048 - DNA, 3688 bp, Homo sapiens
tttccgatctcaaactaacccgtaatggagctggcaatcggagaggctgcaggggaggaggaagacccagccagctccagggtgcaggattctgcccttccacccgagagcctcccccggtgtcccagtggcagtggctgccccgggctgcggtcgcagagtaagcaggggctccagtcctcggtccgcgcgccctgccccttgggctcagctgcgagccaccgccggcgtgcgcacccacaaggagagaaatggagatctcctggcgagtattttaaaacaggactctgcgctagatcagctcgcccgtcggcagctggacaaatcatttgccttgcggaacttggccctccaatttttttccgagcaaagactgtcaattctcactggaagaagcaaaatgtggcttctgttgccatcgaggtgattcaagaatgtatttctcagttatgaggaatcttttaggttacattattggcatacttctctggagcacaaataaactctaaaaagaaacctggtgcccaaagtaaccttagacagacttctaggttgccagtttagcacacataaaaaactcatgtgtgtgtacacatgtacaatggttacagccacaaagccaagttgttaccagtatgcatatattttatacataatatatctttaaacataaacctaatacatacatatatacatgtgtagctgcacttgtgcaactcaacagtttttagtgcaaacagaatcttagtaatggaggtaaataaagaatgaataagaggtaaaaatggatatagaagtaaaacacaagacatgggggtataaataaattaaaactaagttctgaaaagtgacttttagtaatagaaacctaaaaacatttcatagaaggcaagaacaaagtctgacaacagagtttagttttagtggacattgtggtagtaaatatgtaagttacttctctcttcagaatacaacagatctcactgggccttccagggtcattattcctagaaataatcccactaaatgcccatcttagcaacgcacatttccatgtgtgagttatttctctctcagccccatttaaaaatgtgaaatttggatttagaaggggacatgtatttaaggaagagaagtgccacacaaataatggagcaattttaccatgaaattaatgtcatgaaaatagatatttctataaatacctcttgtttttattattaagacaatgcagacataaaacacttcatactgtagtttctacattgcagccaaaccacttatcaatggccaataaattacttcactcctatgatagatacaaatgctcgattcaagttcaattaatagaatagtgtcaggatatcatgcagacagcttgcataaatactcgaggaataatagcataccttcagtagattctgtgatttttaagcatgaaaactttgtcttattccaaatttcaaaagatggaataaagaatgttttcatataaaatacatttggaacagttttccttcttaaaaaaaaaggcatctaacccacttgcaacatatactggcaattcatctttgtagttacaaaatcagatagatatatattctttttcatctcatgtgactgtatgtgaacatttcagtaattccaacaatatcaaacagctaaattcaaaatcatataatactttctaataagtgtatacgatatatatcttttgtagccaaaggcagaaagaccttcagttagttgatttcatgtttgggcactagtttatattttatcagataattaaaagtcattagttatttcacagtataaaatattgaatcaattaccaacaggcttttattttctgctcctaatttcgaaatgtatttggactcgaggtatgggaataatgtcactgcttatcaaacaattttctggaaatcttaatgcacaaaaatttccagatttatatattcaaaaataaattatatgttaaatgaaattaagaaaaaaaggcgaggggaaggagaaaatctagtttatattctgtgtgaatagctttcaatatcttccaggtgggggcaaccgtaagccacttttgagagaagggagaacaggctctttaagctccctgagtctagttacagaagacttcctggcagtaacaccgtgaataaaacaaccacaagcttccaggagatgagacttctaggctctgctccagacaacacccggccatgggcaacagggcccaccgccctgggcgcgccgcagcctcggccactccgagtcggctccgatcgcgcacgcgcgccgtgcacctgccccatcgcgcccagctgctgcctgagctccgggcacgcccgcgctgtgccggcggggagtgtccgtcactctcagcgctcaggatctctccctttccaggaccgctaggaagcaggaaatccttttcctctcacgtttacatcccattcattcttcctccgggcaattcaagtccattcacagccgccacagatgcacgtgtgcacgcgcgcagctgcacctttaaagaaactctcaagtcctggcggccagaaaaccagctttcaggcggggcggtggggctccccctccccttgcttcgtctctgcagatctttgtgctctagggagggatggccgcacattctgacgaggacgagggtggtgcataacgcggaggtcaattttgcacagtccaggcaaaagagaccccccccccccaccaacatcccttcctgttcagtttccctctctggcccagcgcgaagggcgaggggcgacagaagcccgagggacagaaaaccgaggctcctcagtggccgagttgggagagagtgtgagtccaggagagcccgggggcagcagggagagggtgcagaagctcgagcgcaccgagccagaggccccctcttctcccgccacgcggggctggaggtgcaggcgccggttccgcggcgtggcccggctatgtgtcgctcctccgcgcgccgcccgccgcagcccgtgccctcgggccgccgccgccgccgctgccccccgtcgagcccgcggccgcaccctcgggccgatacttgagccagcagatgacccaggtgacaacgaccgagaagagtgccaggatgctggccaccgacaggcagatgggccccacgggcgagggcgagggcgacccggtggccggtgcctcgccagggggcgccccgcctccgggggttcccccgccgccgtagtggttgacgaagatgaggccggtgaagagcagcaccaccatggagaggaaggagaagaccacgcacacgcagccagcgtttctctgcagaagacagcaagatgccccagggaatgtttgtgaaaaaggatgactggatgggaagcaagctgaagaaaaagaaggaaagaaagagagaaatcagtaaatcaccacacaagaggtggagaagaggacttataaatattgtttctatgacatttgaaaataaatgttttactccatgctaatagtgaatgtgatgtcttcagtttgaagggctttaagtgaagctcattaaaacccactattttccatttcctagtttttaattttgtaattattacttggggtaataacattctttcaattttttaagcatttcacttagtgatggggtggtgatcagagagggtgggttgaggggaca

SEQ ID NO: 473049 - DNA, 1912 bp, Homo sapiens
ctcctcatctgcagcctctacaggtagcacgtctgtttcagccctcttgcctcaaagcccatcaagcaggatgagacccttaatgaatgagggagaaagtggtttcaggacatacctgacccgcagctcaaaaaactggactggattcatccgtagaactgcttcagattatgaaaaaacgaaaccttttcaagtgggagataaagtaatgggaagtggctggagaaaggtaggaatgcagacagtaaaacagcacagagtgactctgattaagatcttggggaatctgagacatcaggttctgttttaccatgccctccacctagtgcctccttccctctctgcccatgatttagttctggcactttccagtaactgctgtcgtgaagtagacctggcccagttcactttccatctcttatccttgaaggtttatggaggtagggttgtcactcacagctccaatggtgatttctatcagaggcagagagaatggggatactacctcctcaatgacaaccattcaatctgattccttcgtctggatccaaatgactaatagagtagcttgcactcattggttcattgtatgtgacactacatgcaatatacaaaattatgaaaattaacacagtggtatgtgttttacaccaagaaatacaacagtaggacttcagtactcctggaaatatatctttttttgtgcttcttgctagtacattacttcagatgctaatgtaagaatgtgcttatttcaagagacagttttaaaacatagttacattttattactcctttaaaaatgcttctcaccaatcccatatcactgagaagtgtgttggtccaatgttttattgagtgcagcccttgtcctatttatgacccaggactgatgcaccagcctataaatgtgatttctctgaagcagtggaggacaagtatctagctgctgtgacaggaagacatgtaacacaataattttgctgctctaaaaatgcttctgttgccggcatcccagataggaagcaaggcttcccatggatcatgcatttgctggaaaagcacaccatgttttgaagaagctagttctaattggtgcgaaacattttgaattgctgaagttctaatggacttgaaaaaccccctggagaatcgaagaaagaacaaaatgatgtaatggtctttaaaagataaaaacggaatgaaaaaaatgctttaatttatttcagaaagatatgtcaacgcttagtttttgtggataaagttgccagataaacctttctcaatttgggggtgggaaatggagggtggagggggggagtagaattttgggcagaaagaggactagcaaacaattagtgccatctagtggttgtatagaataaagacagattgttttcgagaactgtactgtagtatcacagaaatgtacaagcaggctaaattacagttcttagattaggctggcttgagtttatatctccatatattcactaattaatgaacttcaagtgatgtggcaacagttgaaattagttttgatagttaagcctaaacagaaaagagttgcactctatatagaaaataagccctttgacatgttttaatttgtcatgtttcaacaaagtccaagttaaaactaccatgatatttcaaaaggaaaacctacatctatttcaaagtatgccagtgagagttttctgttacctggaaacaataaacacgttctaaagttaggctactgaactgaaggtctgctcaagaagagcaggacagaatccagtggtccagaaatttggatgggaaaaatttacatctttattttcactactctaaatctgaaatttagcatttccttcaatcaagaacgtcagctgcaaaccacggtagtgttagcaatacctgagatttc

SEQ ID NO: 473050 - DNA, 680 bp, Homo sapiens
gtccatctcctctgcttctaaagtactaccatcatcatgacaacatgaaatatcccacagctgctgtacagaggattgacaactgggagccagctgtgaggaggcttttgctgtgctccctgagaggtgatggctgcttggaccggatggtagtggaggtgatacgcagaggtcagattcaagacacattttggaagattatggggaaatcctctctgtcccatcaatgcccactccagcttcaaccatcatctcccacatgcaatcagatggtgccttgcctctggtccatcttgtgtgcctctgtcttctgccctgatgagtcttccctgggaacttgctctgcacgtgcacagatacagcctgcaggtgcaggaaatttactgtggccagggccacccttaaccagcggggagcaggagcctgtggatgaatgcttcccactcttattccctcgcaaacagttctgagatgcatcttttaagtctcctcagaaggtgtcagagggactgagcaccagtcacctctaatggcagccaaactaatatatcattctattttcttccctctttctctgttcacacctaccatcctttactcttgttcacattccaatatatacttcttcaagccagtctttcttttcttgccagaaggttacacttggccttcttaatgat

SEQ ID NO: 473051 - DNA, 823 bp, Homo sapiens
ctggatatccacttatacccttcctcctgggttttcatgtaaattccagggccaaacaacgtgacaagattgtctttcaaaaggtgtataattctccgctgcagaagacatggcatgctccagtccccaaagggtttatattggggttctcacactgggatgttccagactgcacaaagcatcttttctctctactgctgtttccagaaccattgcatttgttgagttgttttccccagtggcaggctgcttgcactgccttaggctgcttcagggccctttcctgctccaggccccactcaagatccaagctcttcatatttcccggtatatagataaagcagtaattccaggtgtggaatatgctgccccagaacccaaaaaggcctttcctttctgtgccttctttgttataacagggcacaatgcaatgagctgcttctactttggaatggatgtcctgaccactggatttctaaacattttacagatgtggcaggttctgattctttgcattctagcctatcatctgattgctattgatgaaccagattccgtagcaggttctcccactgtcagcccaggcctgcaggggacagccaccactcaccttcttagtgatgccggtgcctgctcaccagcacattccaagccaaataggtaaaataatactaatactaatagtcgtaataataataatgtgatcataatttagaaacacaaatcaaatcaaatctacatgaccaaaaacagtactttcaaaatgctgtgtttcttaaaacatttttcttcaattatttcaacaaatattttagcctctgcc

SEQ ID NO: 473052 - DNA, 1943 bp, Homo sapiens
aggtaaacaagcaaaggtgctggagaatgccgaaggtgccagaactaccccttcagttgtggcctttacagcagatggtgagcgacttgttggcatgccagtcaagcaacaggctgtcaccaacccaaacaatgcattctatgctaccaaatgtctcattgtccagctatcctgaagtacagaaagacattaaaaatattccctttaaaattgtctgtgcctccaatggtgatgcctgggttgaggctcatgggaaactgtattctccaagtcagatcggagcatttgtgtcgatgaagatgaaagagactgcagaaaattacttggggcacacagcaaaaaatgctgtgatcgcagtcccagcttatttcaatgacttgcagaggcaggccactaaagatgctggccagatatctggactgaatgtgcttcgggtgattaatgaacccacagctgctgctcttgcctatggtctagacaaatcaaaagacaaagtcattgctgtatatgatttaggtggtggaacttttgatatttctatcctggaatttcagaaaggagtattcgaggtgaaatccacaaatggggacactttcttaggtggggaagactttgaccaggccttgctacagcacattgtgaaggagttcaagagagagacgggggttgatttgaccaaagacaacgtggcatttcagagggtgtgggaagctgctgaaaaggctaaatgtgaactctcctcatctgtgcagactgacatcaatttgccctatcttacaatggattcttctggacccaagcatttgaatacaaagttgacccatgctcaatttgaagggattgtcactgatctaatcaggaggactatcgctccatgccaaaaagctatgcaagatgcagaagtcagcaagaagcccccaagtaaagctgtcaatcctgatgaggctgtggccattggagctgccattcagggagatgtgttggccggcgatgtcacagatgtgctgctccttgatgtcattcccctgtctctgggtattgaaactctgcgaggtgtctttaccaaacttattaataggaataccactattccaaccaagaagagccagcaggcatcattgaagctcttcaaaatggcatacaaaaagatggcaactgaacgagaaggctctggaagttctggcactggggaacaaaaggaagatcaaaaggaggaaaaacaaagaaacgacttctggctttatgagtgtgaagagcaacctgtctcccacaacacatgggatttcaagatgagatctgggtggggacacagccaaaccatattaccatggcacgttgtacataatactgtgatggcgttgatctcattccatcaacctacttgtcctgtccttccctcagagctcaatattgtacccaattgtcacacagtttcatcttgggatgaaaactctattggactcaccttcattcattcattcatttatatattaattctacaaacaactattgaatgtctgcaacatggattatactgtgtaggcattggggaccgaatggtcagcaaaaacagaaaaaatccctatgctaatgcagtgtagagtctagtgagaaagactggctttgatcaaatgatcactgttacctgtaaaattatgtcagttataagaattatgaagatttttgtgctatgagaatatgtagtaaagtattagcaggtcatggaacgtttccctgaaaaagtaaggctggttctaagatctgaaggacacataggacctaataagataaaagcaaagaaagaaaacctaacagtcaaagggaatgatatatacaaaggccgtaacacaggaaaaaaaaaaaaaaaggcaacttgctccttgaactgaaggccgctatggctggaacacagaaaactctgtgcagaaataatccccttactc

SEQ ID NO: 473053 - DNA, 647 bp, Homo sapiens
gttgtcgccggtcggcgtgatcctgaagtgtgtgtgttcgtttctcaggtaaaatatggctaaaagcttatggagtaagtggaaaagaaagatgcgtgctgaaaagagaaaaaagaatgccccagaggaggtcagcaggcttaaaagtattctcaaactagacgatgacgttttaatgaaagatgttcaagagatagcaactgtggtggtacccaaacccaaacattgccaagagaaaatgcaatgtgaggtaaaagatgaaaaagatgacatgaaaatggagactgatattaagagaaacaaaaagactcttctagaccagcatggacagtacccaatatggatgaaccaaaggcaaagaaaaaggctaaaggcaaagcgagagaaaagaaaggagaaaaacaaagcaaaagcagtgaaagtggcaaaggccttcttgcaggggaactatccatggatcctaaatgaagattgttcaaggaaacttacacagctggtacatgatggatcgggaatgcaaatccagatcttctgactctaaaatctatgtttgttctgttcctggaactgcctttgtaattgtccattcggaataaatgttctctcatctataccagcagtctccaaactttttaacaccagggacc

SEQ ID NO: 473054 - DNA, 599 bp, Homo sapiens
acggattgtctgtcaacccagagattttcattttcaacaaaagtatcaaatagtccctcgtactaacaactatagcataacatgacaaacaaaaatgcagaagcagcaaatgaaaaactggaggcttcaaaatctgccataacttcatgggtacagtcatttcttgaggcccatggatttttccaggccatctgtggaaatgacattcactctgcctccttccccacggtccgagggcgtgtgctggggacagataataccaggtctaataccttaaaaactcctacgaaatgttccacactcactctcttctctcattcctgcctggatgcagatggcttagtggaaaactgtgagtacctagaaaatagtggagttagatatcagaaccactacgtggaagaccactcaccacatgtccaattggatttcagtaatggatgctctttatatacagaaaccactttcattcttcttgtctataaacatctttgcataacttctttttaggccagtcctaattcacaaatgaaaacccattgctctgagttcactgtcaccatacagcctccttttaggttcctgaatattaaaaaagg

SEQ ID NO: 473055 - DNA, 4943 bp, Homo sapiens
ccacagtgttggacacatagtaggctttcaagattctgtgaactagtcaatatgcctttaataattttttctgctgaaattagccagggtaatttctgctgcgtatacttcagcatcttgatcaactcgcaaaggcaacacaacaccaagatcatgattagaaaagcagtgaaagagtttaagaacaacaaaactttcacaactctcgagtacctgcaggtcaaaattgaaaatgagacaatgactcaggttgctggcaatgagggtaagaccctgattgcagagaaagcaggcaagtctcccctctctctcttgctcctgttccaacaatatgaggtgttcactcccccttcatcttccgccgtgatcgtaggtttcctgaagccaccccagaagcagaagccactatgcttcctgtacagcctacagaatcatgacccaattaaaccttttttctttatccattacgcagtcttgggtctttctttatagcagtgcgagaacaagctaacacagtggatcatcaaaaactggtatcatattacaaaaagatgcagaacaaaaacccaacatgataagagtagcaatattggaattgtgtgattacacaatttctattttattctgtgtgctcttcagaattttccaatctttctacaatagatacacattgcttatggaaatgtctccctatcatactataaggcaaaatttaatgatatcaattccagtacatgtttagtatagaggtaaataactttcactttgtcatatagaaaacaaaatgatcttcagatctctgtcatttacatagttaggatggcacattggtggatgatctggtataatcttattagccaaatgttcctatgaaataagaaatgtaaataattagaaatgaagctagatgcatgagaagagtatcctgtataggggcagaaagtattaacggggtagaattggggtagaggagggtggtcagttgcattttgaagagccaatttctgtttaccatatgtttttcctgataagtaaataaacggtacagaaagttccttatacactccattttgccaggactttcctagtagcagtacatcaactttcgtcacattggcaagaaccacacccaggaaatttcagagttctttgaccttgagctcgtatatttcataagtgtctaaagctcttttgcaagtcaagcatctctagtcgctggaatcttgcacacacgcacacgatattttctaatcctctcctagaactttctttgaaataataacgtccaaataggtttctaaataggagaaatttgtgtgtgtgtgtgtctgtgtgtgtgtgggtgtcagataatgccatggcattgatgtctgaattacatagagcttaataaatatattaagtcaattaacttaacaaattccatgaatagaccattttttaaaaatatccccaagagaagacatttttactcacaatgaatatccagaagactgactgatagcaaaataattttcattataaacggaataaatatattttatagctaaaaacagtcaggagaatagaataagtacacctgattacaatattaaagataggctcagttgaaataaaaatgtactatatatagtagtgatataaaagaagcaaaacatgatttttataactttttcttttgaaaaatgcttgtgtaattactacaatgggcttaaatacacaaactaagctgacatcattgagttcattaatgactctcaaaaatactcaaactcattagtcatatttggaggatttttagaagccaatttactcttctgaaaactaatcaataaagggggagaattacttctgagccatctgtacattaagatagccaaataatcatgaagagaaagtccctctttacagataaattccaaggaataaatgcataaggaattatagaattaaaatatcactatttggcagcccagaataaaataaccgatctaggtgaaaacccttataatctgcaaaaacggttagatgaaacactgtgagaagcctctaatagatgaatcaaatttgcaatgcctgaatgcctgtttaatattaacatcacaaagagagaaagatactaactagacatggcaagctccccaggtgatacaaaatgaatttataactagctctgaagtatcgctgcctaaaaatgaaacctgagcttatctgagtctttagatcaaaccacaagtttatgggaaattaaagggcagaagaacatggcaaatgacaccacaagtctgtgaaaaacaaaatccagagtgtgggatttgattcaacataatacggatggaagtagtgggaattgaacaatgagaaccacatggacacaggaaggggaacatcacactctggggactgttgtggggttgggggaggggggagggatagcattaggagatatacctaatgccaaatgacgagttaatgggtgcagcacacctgcatggcacatgtatacatatgtaactaacctgcacattgtgcacatgtaccctaaaacttaaagtataataataataaaataaaaaataaaaaaatttaaaaaacctaaaaaaagaataaaataaaagtttacataaatagctatgtacaatgtaggcaataccaacaactgaatagatataacaatattttgatactaaaacagtttacctaaagactgtgatgcattcaatttttgctatttttttcataaataattgatgggataataataccttcttcaagaaagctttataaatattaaacgaggctttgtttgtaaagtgctttgcatagtgcttgatacctaaatacccaataaataaaaataaaaacaacaacaataataattgctgctactcttactgttactattagccaaagttctgtgctctgaagagatcatagtcacaatatgataacacctctaactttacctttagattaaatgaattatttgattatatatgccaaatcttatttccaaacaatgcaagtaaactaattgtgaacatactgaaagatatagctgtcagaatatttttgtagctttgtttacagaagcaaaatacaaatgaataaacagaaaacttgggtataatctatatttccaaaaacaacagaatgcttaaataagttttggtatatactgacaagaatgccatgcatttatggataataaagttagggaagaatatttgatgttgtatactacaactttactttgtaatataactttattttgtatgaatgcttggattcatggagatacacataaatgttaacaataattttcctttagtgacaagattatcctttttcatagaatttatttttagagcagttttaggttcacagcaatattgagcagaagattataaattataaagcagagatcatatcccttctgcttttcatctttgctgaacacattctagatattcaagaaatacttcttgattaaacctagcagatttttaattttttttaatttttttttgtttcaatatctttagaggtatacgtggtgtttggttacatggatgaattgaatagtggtatagtgaagtctgatatttcagtgcacctgttacccgagtggtgtacattgtacccagtagtctatcactctcattagttctaattatatttactttatatattagtaccttgttgtttggtgttggatgcatatatgtttacaattgctaatcttctttctgaatttacctctaatcatcatatagtgattttctttgtctcttcttacatttttgacttaaactctattttatctgacataagtataactactcttgttctcttttggtttccatttgcatggaatatcattttcccttccttcattttcagtctatgtgtgtctttacaggtgaattgagtttcttgtaggaagcatatacttaggtctttttttttataatcttttcagcccctctctatcttttaattggaaaatgtaagcaagttatatttaaggttatttttggtaggtaaggacttactcctcccatttcgttgttttctgggttttatttatatatatataatatataattttatttttatatatattattttatttttatatatattattattatataatattattttattataaaatttattatataataaataaatatttattataattaataaatgtataaattatatttattataattaataaatgtataaattatatttattattataaaattattgtaaaataaattatatttatttattacaaatatataaattataaatttatatatttatatataagtatatataaatatatttattactattttatataataatttattaataaattaattatattaattaatttaataaattaaattaatcaataatttaaataattagattaatttaattattaattattaataaatatatattaatatataatatataatattaaaataatgcattcttttaaatttatttaaaacaattaaattaatttaattatttaattaattaaatatttaattataattaaaaattaattatattatattaataaattaattatattaattatattaatttatttatatatttatttatatataaataaattatatttttataaaattattattaaaataaataattatatttattattaaataataaatatataaataaattataaataaataaattattattacataattttattatataaaaataatatataattttattatataaaaatgatatataattatatattattttatttttatatattattttataatatattaatatatattttatatatattttatatatatatataaaaccctttacctttcttcctctcttattgtttacctttgtgtatt

SEQ ID NO: 473056 - DNA, 634 bp, Homo sapiens
ctgggggtccccttgtccctttaatccaggcactgggggtccctttgtccccttaatccaggcatggctcttctgttgctgcaactagtgaatcaaattcaacaaaggctgcctgaagtcgtgctgtgtgctggtgccattctgatgactggagaggaaaaaatgaacagtatagacaggatttctgatctcacggagttcacattcggaataagaagacaggtgaaaaacttgtgggttaatgaaattgccagatgtgactgcttgccaaaatattgggatgctttcgttgtgagaaagtacaacaggttatgtggaaaagaaaataaagaagcagaggttactatttactacattctgtatggcaggcactgtactgaatgctttgaatatcttctctcattggaatcatttcaacaatatgaggtaggtgttataaaggcccgtgttattgatgaggacactgaggaagaagaagaagaagaagaagaagaagaagaagaagaagaagaagaagaagaagaagaagaatagcaaaaaccatacgtagcccacaaaacctaaatatttacaatttgatcctttatggaaaattttgctgatcctgctaggagatatagtagggacatctgta

SEQ ID NO: 473057 - DNA, 2078 bp, Homo sapiens
agtgggcagcttcatacactactcataacagtatgcaagattccactacaagattccagaacaaatctcagtcagctaaagtctggcagagaaagcagacaatctttgatctaaatgtcagtgatgtttgcaatggttttgaagaaaagattcccacaaaagagtttgggaacctcctggatctggaagatgaagaggagcgctgtttcctagaaacacaggctaaaacagctttgtcatgttttcattttcagccatatgggttggaagagaagactttgaactatcatcaggactatatgagggtcattatccaagaattaggaaccagaacaccaatggaagggggagtggacacttgtgcagctgtatcctgggttttagtggacactccagggccatatataagtcaggaagatgatgtgaaaaccagaagatccagaatcctacgacacctggtcgtgtctggctgcatccagcagggctttaagcacccagccaacttgcttggtcctgagtttattctttctaactgggagtgattatatagaacaaaagctctgagcatcgtattctctaagaggatttagggagagatctccggaggaagtcaatagtcctaggaagatatgtaacttcaaagctacctggcagctggaaagcccctaactcataataaaaagaggagggaggaggggacctttgcaaatgtcagaagaactaaagggagatgtgaaagcttcttgggaccactagtacatctgtctctccctagagttgcctgaaggtttttaaggctgttacattagatgttaacttttccccatggcattcagcagggcttctcttcggggtccgtttctagcaaccaccctttggaaatcactgggcactatgtatttacgtgagtctacttatacttccataccatatttttattgttattttaaaaaagaaatacaatttctcacttatattattttctccatgaagatggcgaacccactttgctcttaatgatacatgcacctttcatgactatatatgaaacatgattaaaacaaaattatatatataacatatgatttatatataaaatgtacgcatgatatgtatttaattttatatgcatttctgtattttacatgcatttaacatgtacatttgtatttaatttaacatgtttttaatttgctcctagaatttgttgccatctccgtacacttttaacttcagactgcaaatattatagtaaacaaaacaaaacaaaaacattgtctgaggaagaaaagctgctcgttatgctagatcttagtctttcaattatttaaaaatatttttagtactacttcacaggtaaagattttatgaaagaattatttttctgtcaaacatcctacgatgtaccctttttaaaaagaaaagcttttatttttccatgaaatgtcacccttgtttaaaaaacaagtgttttaatcattgtaaatttagccataacacagactttgttctttatttctaaaaagaagctacggctataaataaagggatttttgttgtaacagtaacatatcacaataatggtagttcacaataattattataaaaatggatagaaatcatttttttgagaatcaaatatctatttttttgtcatcttttataaacaccatctcatttaaggctcacaatgacatatagggcaagttatatttcccccatatacagaaaaacctccttaggctcaaagaggttaagtgacttgcctcagaagagttacagccagaaatcaaattgatgctttttttttttctgttatgccagggtagtgcttattagccaagcccctaaaacacagattacagatttacttttcaccctctgactacagattactgttgtcaactcgagcactttttcagattcccaactcttttgccaatcctttctactttggaataatagattgcattgtggaaatactttaaaattatgaaatacgttcgcatgcattttctctcatttctgtcaacatttgtagtcttattttacaaattagacactagcttatattataa

SEQ ID NO: 473058 - DNA, 1557 bp, Homo sapiens
actgacactctttaggaaactctccatggccatggtgctggtaattccaatgtccctgggtgcccccaaagcttcccaaactctagcattttggtcaaaaccattcaacaagtctgtaggaagttccaaactttcccacatcctcctttcttcttctgagccctccaaactgttccaacctctgcccgttacccagtttcaaggtcacttccacattttcgggtatctttataacagtgccccaaactcccggttgctgacctgcagccatccatgtgcgtggctgctttgggggagctgtggccgtggagctcagggctcccaacagctggcctttctccattgtgaaccggtaaatgctaaaacttttgctccattcccaggggaccccccattaaattcattttgtattcactacctgccaacaggacctgtaagcgagccaagaggagcagcagattaagcataattatgaattctgagtggaagggagtagtctgagattgtttttcatgaaagacctattttttttcctactgaaaattcacatagaggaagtactgaatgctccatggagtctttatatcgaaatgctctttgcaattaatgcttcttactccttgtgctttcatggaacagatagaaaacctctcaaacttgaaagctgttcttggaattggattttggtttgctcaggatttgtatctaattttctagagaagtattataatatttattaacaagaacgggtactaagtgtaaccctcaagtcatttcccaggcttagttgtcaatgagaagctaatccctaaggatttctaaaccagcacaactgagtaaggattcaaaggcctcttgcaggctgttcttgagtgcttaacgtgtagtcatcagtaacaagtcagtggtaccatttattcttttactctttccttcttcataaatgaaaaaaagagaatccaaaatattgagcataaaaatgtttgtagtgcctgcatactctatactcactcagtactatgaatgttacaatgtgctaacttttcctaatttgatataaaattatcaacacccttcctcatgtgttttcttcgtattgctgatatattttccttttttgaaatacttttatctgcatattagaaaagcattgaagtttgctactggaatagtctatccaaatagtctgtccaaataatctgtttacccatgataaattactatcatgttattaaaaagaacacctgtaaactgataacttgagagagtcaccaggacattctaagaagcacacattctgaaaggaggactgaaattgattgatgacatcaacgctgtaaataaattgaatttgctgtgaggattttcaataaatttccagagctattgaataatgaaagttagtgtctactgagcactggtaatacaggtaagcacttttgattttacttctgcttttatttcctcaatgacctaataagttagacaccatatgactagtacttctcagatgaggtaactaagggctagtattagtgttgatgccaaagtaatttc

SEQ ID NO: 473059 - DNA, 923 bp, Homo sapiens
cacagtctgagtgttggagacaggctggggtgataattctacatgctcctggggctgtggttctcttctagaggcagcccccttgtcggtggagcaggcctttcatttactccctttccagggtggttttcctgggtgacatgggcaccagtggaaatatgcataatgaaggtctcttttggctaccactctggccacagtattttgccccccaacacccctgcagaccttcctgtctatatgcacgaaagccaagagatttcacacagcttgactgaaacaaataccaagtcagacgagacctcagatctgagctgcataaatgcaacaccgtggaatgcagcagtaatctcttcaacaaaacggggatcagaaaaggaaaaggaaacctccacaatgcaaactggtccctgggagccaggactgattaatggacaattttatggctcatttgtgaaaaaggaaattctaacagagccctctgtttactttgctcctacaattcatatcaagaagacagaaagcagaaatgtgggagggtgagggcatttttagacctcactcaatagctcaactaaatagagcaaatagattatgggtttctgagcattaatgactctaaattacttgtggatttgttacaaataatgattgtcaggggatgacaaaatgctagcatattttccttctttgatagtataaactcaagttcaaatgcaacattggaagcttatgggtgggttccagttctttctttctctcccacagtgaccacttgttatcactctaatggcttattgatttatcaaggctggcatatttgtaaatgtgaatgtatgagcatttgtgcgcatgtgtatatgagtacatgtatgtaggtgtgtacttgagtgtgtaagcatgtttgtatatgttaagtcttc

SEQ ID NO: 473060 - DNA, 1580 bp, Homo sapiens
gttcccctgaagtccagccatctcccgctggattcttctccaaagttatgctgtcaagctgtccctctgaagtcaagacacttctctctgacatccagctacagaccccaacatccagatgcttctcctctctggcactgactcatggagctgtgagcagagggccgccatcctctggaccccagaatggtagatccacctacagtttgcactgtgcacctggaaaaactgcagacactgaacaccagcctgtgaaagcagccaggaaggggactataccctgtgaagccacaggggtggagctgcctaaggccatgggagctcacttcttgcatcagcttgacctggattctcagttatgtctttataagcagcatgaaaatggactaatacaccagccatatgaaactgtgagttcattaaacctctttttcattataaacgacccggtcttagaagaagacaggaaaatgtggaaaagtttggaacttcctagagatttgaagagctcagaagacaggaagatgtgggacagtttggaaattcctggagactttttgaatagctttgacaaaaatgctgataatgatatggacaataaagtccgggctgaggtggtctcagatggagatgaggaactggttgggaactgccgcaaaggtgacacttgttatgcaaagagactggcagcattttgctcccaccctagagatctgtggaactttgaacttaagaaagatgatttaggggcagtgcagaagggaaatgtgggattggagcccccacacagagtccccactggggcactgcctagtcgatctgtgagaagaggcccatcatcctttagaccccagaatggtagatccactgacagtttgcgctgtgtgcctggaaaagctgaagacactcaatgccaggccatgaaagcagcaaggaaaagggctgtaccccagagagccacaaggatggaactgcccaaggccgtgggagccaacctcttgcatcagcatgaaccagatgtgagacatggagtcaatggagatctttttggatctttaaggtttaatgactgccgtattcgatttcggacttgcatggagcctttaaaccctttttttccaccaatttctcccatttggaatgagtgtatttacccaatgcctgttcccccactgtatccaggaaatagtaatttgctgagaatacctggtgttacatggcctccattctatagtggaagaaaatttccattatgaagaggtgagagtgtgaagtaaagagccatgtctcaagagctcttaacacaaaattaattactatgcccccaccttataagtaatttctagtctaaagtctcctagcatctggagaaggctaggttaaacctttgttattaacaaaataactgaagcctcaggtgataaaatgattgatttagaacatacactgagtccaggtaaaagttaaagcctaaacctaatgctgttgagcggagctcagttaggggagaaaaatatattagcagctgaatgttagacagtgaagacaattcataaaaaggagatttggcatggctaagc

SEQ ID NO: 473061 - DNA, 3116 bp, Homo sapiens
cttccatggaaagcaagtttgacaagtttgatatttataccgggacccaagccaggcatgctgcagacacaagcccacaagcaaagcagagacatcgctggaggagaaaacggccatgcaacagttcgttgggagagaatgagggttatttcagcagctacctttgtgggtccccagaacatgactgatatctcagaggccacctggaaagatgacttgaagcccagattgtggctgcctttcccccatgcttctggccacaccttaaacactcaaaatttagagtccagtgatagtgaaatgatgatggaagacagtgaggaggaggggctggagggggagggctgtgagtgtgtcctgggaagcttatgcaagcagcatgggcagagatgccctggacagagatgctcttctcaaaatggaggagaaagttctcaaaagcttcacaggagatttgatatatgctccatacagctcccctatccctacagagaacctctgtagccaacttttaaaatgttatctctaatatataaggtttatggcaaaccagattccatccaaattgaaaatgttcgttagacattttacagccaataattccattatgataaatgtctcttctgtgctgtagagaaaggtttcttgcctttccagctagactaccttatattcccttgtgatacgtttcttatgtaacaagtttctgtgggcatgctcattgactgatcttctccagttcaactctatttctcacaaattacagacaactctacctgtttgaaatgaaaggaaagcacgaaggggaaagggagctgggcttattgacatggggtcacttaccccgttcccagatgactccaacctagattctgagctgcagtctgccttctggactcagcagacacaggcctgaagagagtggtcattcaaggcctacaaccctttcataaaaggggaggattcaatgatgataaggaaaaggaagggaatttagctcattataaacctatcacggtaacttgttaaagattttaactgcttcatatgttgtgtttttatactcttgacacatcctagtatcatcttattctacatatttctaccttctaagagagaaataagagagacaagtcatgcaagcaaattctcctttttatataataacttacctaggatgtccccttaaaactcctgttttccatgaaagcctgaagaatcctcttttaaacattcctggggagtattatatggcttccccttcctgttagatccatttctgcacccattagaataggtaaccagatgtgcctgtcacatatgaatgaggacaatttgtaaccaagagagaagaaggagaataaagcacagaaaacagttcccctattaatttgcacacatgcaggtcttgtccagatacctaaaaagcaatagtttcccttcctgaaatctccaaggctattgtggttgaccatgaggtcaggggaagggctaattgcaagagcagctgtcatcgacccagagagttagctgaagagtcaagtacaaaggcctactgatgctcaaaacattcctcaaagcactcactggagtctcaggactcagtgttaaggagattagtgatgggtgaaccacaaacatgtttaggcatgttttcccttcttatatttaacaatacggatagtcacttatatcctagatatatctaacctgattactatccaccagaaagttatgtctaaatttaatatttagcacaacaaaaaagccattttaaagtacttgagctgccaaattcaggacttagccttggttatagtaatataatcaagaatctccattatttcaatatggtcttagcaatgaatatccatagctatattatagttgtatttattctctaactgtacataaatagacaagactcttcgtcttaaattagctcaattctaaagatgaacaacataattacctcaaatgaaacagcactcacaaaggttacatcttgctgtaagtacacttgtacttaccctactcacaatggtatgtgtctgcaggataaatggatggtgacgcatatttgtatgtggcatttcaattgttttcatgtgtttgcaatgtgaatgaagcagtgtatctcttaaggttatctgaacagtatattttcacaaaaatcattacatttgtttaaagataattccaatgtgttcatcttaataaacttgaaatgattaatcatagatgttcataaccacatgcaattaacaaaaattaatctggttttcccttactgccaaataaaaattttgcttaaaaaaagtaaaaagtcatattcattgcatcatatttgaaaactggtaatcttgttccaaggttaaaactcccccctccacaaaatacttttaatgaatgcatttgttatgcggctatacaattgtttccttcctctgtagatgatagagtcataattatttctctgatgttaattaaaaataaaccctttcatttgtaaaagaatagtaactatttgaaaatcacacaaatcaattagtagtttcacatagaaaaaatatccagttatttaaataattttaactgccactaaaaagaaacaagcacctggattggaaaaagaaaggctatcattatttttgaaagcattttctcattgtctccttataaagttacaaggtcatatattatttgtagtagtatatggaattacatatttgatgaattcagaaacagaatagggatttaatatatttttaaaatttctatacaggaagcttattttaaaaaaccttagggacttttacatatgcaaatgttcactaacaaaaaaataatcaaccttctaacactttgcatggaaaagaattctagacaacactatactctcaagaacattctagtaccatgcaaataattaaaccataaaaatctcacatataattatacatttatgtagatgaagaagtatttgataaatataaaaggagaatgaattattataaaccaaaaggataaatttttgaatttttaaaaattacatttaaaatttcataaattttaaaaaatacaaataataaatgtttatgtctttcatacctaaa

SEQ ID NO: 473062 - DNA, 1158 bp, Homo sapiens
cgcgtgtggccttgtcagccgtgaggccgggagaccgtgtgctggccatgggggaggatgggagccccaccttcagcgatgtgctcattttcctggaccgcgagcctcacaggctgagagccttccaggtcatcgagactcaggaccccccacgccgcctggcactcacacccgctcacctgctctttacggctgacaatcacacggagccggcagcccgcttccgggccacatttgccagccacgtgcagcctggccagtacgtgctggtggctggggtgccaggcctgcagcctgcccgcgtggcagctgtctctacacacgtggccctcggggcctacgccccgctcacaaagcatgggacactggtggtggaggatgtggtggcatcctgcttcgcggccgtggctgaccaccacctggctcagttggccttctggcccctgagactctttcacagcttggcatggggcagctggaccccgggggaggaatgtccctgcaagcagaaaatgcaggacctcagcaagaaggttcagaaagtaccctgttcccctaacaaactccaggtgcatctgcatctggcttctgcacacacttctgaatggccaacttggaaaaactcagaggaaaggaaccaggagtggtggctcactcctgtaatcccagcactttgagaggccgagacaagaagatcacttgagcccaggagttgaagaccagcctggggaacatggcgaaactccatctccacaacaaaagtacaaaaaaaaaaattagtctggcatggtggcgcgcacctgtagtcccagctactggtggtggcagattgggtgggggttagggggtgatgtaggaggatcgcttgagcccaggaggtcaaggctgcagtgagccatgattgtgccactgtactccagcctgggcaacagaagaaaaccctatcttggtaacaataataataattttaaaaagaaaaataataaaatgaacttgaaatttttaaaatgcaaaaataactaacaaacacagaatctcatggaccagtcaaaggtgggctctcttgccatacctgagtccaggctgacttccacactgaggaaggccagccacactgagccggtgagatggctctagtcagaagtggactggaaaaac

SEQ ID NO: 473063 - DNA, 1162 bp, Homo sapiens
agaagcgacagcacgcaggaatgcaggggtggctgggagctgctgtcgccattcctgaggtgtgtagccgtggacattgcctggctgaggtcttctgcctctttctttctttctttcttttatttctcttgaatattgccatttgtattcaaagttgcaattctcctaaaccaattagagagagttctgatctggagactagctccagaaattcactaacttcctatttatctttcttttatctccattctatgaaattttccagcaataatactattctccagaaacgcattctagtgttcctccctcctgaggatgcagtgttcatgaaagcaaacactgggccctcaccaggcaacaaacctgctggtgccttcatcttggacttcccagccttcggaactatggagcccgcactctccagttcatcaccaccccagcatccctactcttgcatctaacagtttccgctattttgcaccacctgcctggcccttatgggcaactcaaggaagaaaggaaagaagagatagaggaaaaatggattcaacaaatgaaagtgttctttctgactactgctgtgtttacaaacattttaatcatcaaaacatgctttatttgatagaaagatcaaatctgcctttgtaaaacaagagactattttaatcattaagacaacacacatgtttgatttggaggcgtgttctcattcaaaaccttgcaaaatataatttcttcttgtctgggagatggtgtctttcttcggggagaaccttgagagaaatgtctatgaatgtgtctgtagattgaggataggccaacaaacatattttgaaatattttttctttcttttaaaaaaatagatacttttaaaagaaaatgcttatttaaattacatagctctttttttcactctcagtcatcatttgtggtttcagtcagtactacatttattccccagagctaggattgctgtgtttttagaaagggagcctgtttgaagggactctatactcttgcagtaattaaaatccttttaggagtctttgactttgacttactgctttgttttaaattattgaaattattcaacttccccattctaacccacggaaggctgttgttgttctcatttataatggcacaatataagtttaaaga

SEQ ID NO: 473064 - DNA, 753 bp, Homo sapiens
ttctaaatcctgccctgagaacccatacgtatgggttcccctatacaggtctgcaacttggaaagttgaccttatgcttggggaccgtccatcacaatgtactacattatttctatccaaaaaaatgcaggtgagcgtactcctgctggcaacctcctcaaagcacaaatcgggtgatgagccccaaaaagggcttattagtcccggttttgcatgtgaaaagtcagagagcgataaagccatttcattccccatcgacctggcactcagcgctgcaggggtcagaaccccacatgaagactgcatgccgcactcccgaccacgccaagaggcctctggtccccttcggccactcttcagagacaccaatccccggccccccacagcattttcaacaatccacttccgactacctttttatgactttacaacacagtttttcctcaaattttatggcatttcattaaagccgccagaaggacatttgatagattttctcaattacaggacttgtggagcattttatacttacatctgcaccgaagcccgatagagtcgatgctcgtcttgcctctctcccttttatcccgtgcatccttttaatgaccaatttgttattttttcccttttatttctccttacctcctattttctgcattttgtttctctttttgctgtttggtttagagaatgactcatttctcacacaaatttacattatttgtaaaagagaagggaagtggggtcgggggg

SEQ ID NO: 473065 - DNA, 699 bp, Homo sapiens
cgggccacttcttacctcgctagtcctgcaaggagggtctttgaaatatgggacatgttaactcctactcatccttcaggatccaagtcacatatcacttcttcagctctgttgtacatgtggaccatggcaatgtctgtgctctaccactatgtctactgctggagtccaggcttgtctgggtgaatcctaaggactgggatggggatgggtggccccttctgctgacaacccacacagttcctggaccatattatatgctcaataaatatctattgacccaacttaatgaaccccctcaggttagaatacagatgaagattgtgcatgaattgcatcagtgtgctgatgtagacttgctgaggaaggttatggaagtaaaatgtcactcgggtaaaagtcagaacataggctgtaggaaccgtctttttgggggaggctctgaaaataagccatctaatcacacagacacagacagcccaggattggatggaaacaggattttgctgatgcctattaagctgcagtgccaataactcttagatttgtttttttgagactatttctggattccatagacatgcttcattgtttcttattttttcttttgtcttctctgactgtatattttcaaacagcctttcttcaagctcactaattctttcttctgcttgattgattctgcttttaaaagactct

SEQ ID NO: 473066 - DNA, 667 bp, Homo sapiens
aaccacttatcaatcacatgactctgtgcagctcacttctgtgagtctcaggagcctccttcgaaaaatgaggattaaacaaggcatataacattatgcaaaacacttactccatcaggtcagttatgttcttctctaagctggttattctagttagcagttccttcaggcctctcttctgcaggtctactggagtttgctggaggtccactctagaccttgtttgccttggtatcattcagcggaggctgcagaacagcaaagattgctatctgttccttcctctggaagcttcgtcccagaggggaatgcgccagatgcctgctggagctctcctgctgcacccacagccgccctttcccccaggtgctctgtcccagggagatgggagtttcatccataagcccctgactggggctgctgcctttctttcacagatgccctgcccagagaggaggaatgtagagaggcagtctggctacaggggctttcccaagctgtggtgagtgttttctcatattacagatgagaaagctgtcacagaggtgttggaaatgggctgagtttatatggactgaacttacccagagtaggctgtagaattgccagggtgttcagctgtctcaatgacagaatcagattaaatgtgtggctgatcttattgatt

SEQ ID NO: 473067 - DNA, 1485 bp, Homo sapiens
agggggagggggagggggcaacaaattttcctatatgagttatttaaggatttagatggttttatgagccacttagtatttacaacccttcttaattgtaccctcttcctcacaggggaacatttgcctaaatctttggaaggattttttatctatgaagaagaaggttctggagttccaggttctagtaggaaaggaaatgatgccatcgtagtagaacaatggactgttattgagggatgtgaaatcaaaacagattatggccctctgctgcacactctggctgaattcggatggcttctgacaagcgtgttgcccacacctgtattgagacatgacaggaagaaccaagttgcacagggaattgaggacagtgattgtgcaggttttattgagggtagaggtgggatgcagtgggaagatgatcatcttccggagtttgaccgtccagcagccgatctcctctccaaccatctccagccaaactcttctcagcattcagatgctccttctcttatctctgccacgccattctgaattttaaattttaaaaatcaaatttaaaaggcaaaaagtcaatcaataaataaaaatatgtggaagctgtacatggtttctggccctgaaggatcttgtgagctggttaagcttacgtttcatatgtacaaaacaagggacttacattctggtcagggcagatcaagcttatgtattgtgtaatataatacagtaactaatcaagggctagatgaggtgtcttagtctataggttctgtaggaatattaaaaagaagagacattttaaactgtcaaagttggatgggatcatcaaatactaaagagattagagggcagcatcatcactatttagcagatttccatttaggaagatgctactaactctgtatagaagatagcagaaaaatgtaattttaacattaattgccattatgcaacaaggctcactacaactctcaatgtctactcttcttttgtatgccaaggagcattgtgcaatattggtgtttattttgttcctttgcattttgtaatttgagtcctgccaagtgcctgcaacacaggaaatataggatgaaggtcatttggtaacaaggattgttggtaaatcttgtttattctctgcctttttattcttgtgcaaatatactgtccctgtgacaagtcacatgctgttcttagctgcttcagtacacacaacgatagtaatcatggtcaatgatgtcatctttacaaataaagaaaagtgttatatacagttgaccttggtcaaaatagaggatagagcccgaagtttttagtctctgacactagaggaatggttatgagctgcccaggctttggagctaagcagatcttgttttaattatagcttcatcattgtttagctgtatgatttgggcaagtcatctaacctttttaagataaatttccttatctgaaaaattggacaataatatcaacttt

SEQ ID NO: 473068 - DNA, 760 bp, Homo sapiens
caactcctttccttcctgggcatggttggatactttcgcctttggatacctggttttgccatcctaacaaaaccattatataaactcacaaaaggaaacctagctgaccccatagatcctaaatcctttccccactcctctttccattccttgaagacagctttagagactgctcccacactagctctccctgactcatcccaacccttttcattacacatagccaaagtgcagggctgtgcagttggaattcttacacaaggaccgggacggtgtcctgtagccattttgtccaaacaacttgaccttactgttttaggctggccatcatgtttctgtgtggtggttgctgttgccctaatacttttagaggccctcaaaatcacaaactatgctcaactcactctctacagttctcataacttccaaaatctattttcttcctcacatctgacacatatactttctgctccgcagctccttcagctatactcactctttgttgagtctcccacaattaccattgttcctggcccagacttcaatctggcctcccacattattctggataccacagctgacccccataactgtatctctctgatctacctgacattgactccatttccccatatttccttctttcctattcctcaccctgatcacacttggtttatcgatggcacaagctgaactcattgccttcactcaagccctcactcttgcaaagggacaatgcatcaatatttacactgactct

SEQ ID NO: 473069 - DNA, 878 bp, Homo sapiens
ctggagccattacttcaagactatggaggacctgagggcccagatcttcgcaaatactgtggataatgcccacatcgttctgcagattgacaatgcacgccttgctgctgatgattttagagtcaactctgcagctggagacagagatccaggctttcaaggaggagctgctcttatgaagaagaaccatgaagaggaagtaaaaggcctacaagcccagattgccagctctgggttgactgtggtggtagatgcccccatatctcaggacttcgccaagatcatggcagacatctgggcccaatatgacgaggtggctcagaagaacagagaggagctggacaataacaggtctcagcagattgaggagagcaccacagtggtcaccacacagtccaccgaggttggagctgctaaggcgatgctcacagagctgacacgtacagtccagttcttggagatcaacctagactccatgagaaatctgaaggccagtttggagaacagcctgagggaggtagtggcccgctatgccctgcagatggagcagctcaatgagatcctgctacacctggagtcagagctggcacaaacctgggcagagggacagtgccaggcccaggagtaccaggccctgctgaacatcaaggtcaagctggaggctgcgatcgccacctaccgccgcctgctggaagatggcaaggacttcaatcttggtgataccctggactgcagcaactccatgcaaaccatccaaaagaccaccacccgccagatagacccgccagatagtggatggcaaagtggtgtctgagaccaatgacaccaaaattctgaggcattaagccagcagaagcagggtatcctttggggagccc

SEQ ID NO: 473070 - DNA, 963 bp, Homo sapiens
tcctcacccatgtatcagtttgagaggtcttcacagcagcacctcccatcacaggcccggaggcctaggaggaaaaagtgggtttgtaggctgggcccagtgtctcctgctgtgtgcagcctaaggacttggtgccctatgtcccagctgctccagctatggctgaaaggggccaacatagagctcagcccatggcttcagagtgcaatccccagcccttggcagcttccatgtggtgttgagcctgtgagtgcacagaagtcaagaattggggtttgggaacctccacctagatttcagaagatgtatggaaatccctggatgctcaggcagaagtttgctgcaggggtgggacccccatggagaatctctggtagggcagtgcagaagggagatgtggggtcagagcccccatacagagtccccactggggctgtaagagggctaccgtcctccagaccccagaatggtatatccaccaatagcttgcaccatttgcctggaaaagctgcagtcactcaacgccagcccatgaaagcagccaggagggaggctgtaccctgcaaagccacaggggtggagctgcccaagaccatgggaacccacctcttgcattggcatgacctgggtttgagacatggagtcaaaggagatcattttggagttttaagatttgactgccctgctggatttcagacttgcatgggtactgtagcctctttgttttggccaatctctcccatttggaatgggtgtatttacccaatgcctgtatccccattgtatttaggaagtaactaactcatttttgattttacagactgataggtggaagggacttgccttccctcagatgagactttgtagacttttgagttaatgctaaaatgagttaagactttgggggactgttaggaaggcatgattggttttgaaatgtgaggacatgagatttgggatgca

SEQ ID NO: 473071 - DNA, 971 bp, Homo sapiens
taggctcctgcgcagcttcactcctctttgctctctgtgtccccttgctgccttgatggatcccggaatcttttccccattcatcatgatactagtgtgggtctatcatacagactttttggcttttattgtactcagagatctgtggaactttgagcttgagagagatgatttggggtatctggtggaagaaacttctaagtggcaaactgttcaagaggaggcagaatataaaagtttggaaaatttgcagcctgatgatgaagtagaaaagaaaaaccaattttctggggagaaactcaagcctgctgcagaaatttgtgacatgtcagagactttcatggcagctcctcccatcacaggacttggtgccttgagctccagtgctccagctgtggctgaaaagggtcaagatacagctcgggccgtggcttcagagggtgcaagccccgagccttggcagcttccacatgatgttgagcctgtgggtgcacagaagtcaagaattgaggtttgggaacctccgcctagatttcaaaggatgtatggaaatgcctggatgtccaggaagaagtttgctgcaggggcagggccctcatggagaacctctgttacggcagtgcagaagggaaatgtggggttggagcccccacacagagtcaccactggggcattgcctagtggagctgtgagaagagggccactgttctccagaccccagaatggtagatccaccaacagcttgcaccatgtgcctggaaaagctgcagacactcaatgtcagctcatgaaagcagccaggagtggtgctctatcctgcaaagccacaggggtggagctgcccatggctgtgggagcccatctcttgtatcagtgtgacctggatgtgaaacagagtcaaaggagatcattttggaacttcaaggtttaaagactgtcctgttggatttcagacttgcatggagcattgt

SEQ ID NO: 473072 - DNA, 474 bp, Homo sapiens
gagggctgccagcacgctgcttgccatgtccgtggtgcccagtggaagggctgagctgaaaaatttggataaaaaacagagaacctctataggattaaaacaatggagccagacgctctcagtgttagcctttggatttgagaggcttgtgtttaagaagtctgggcctgaagaggtggaaatacagggggctaaaaagttagcctcccacagtttcatggatgctgacagaagacaggagaatcctggggactggaatatccacagtttttggaatctgagggaggtcctggaactaatctcccatggataccaggggacagctgtaccagcagtgcttttggaccacaatgcaagtagaaaggaaatttctataattcaaaatctatttaactgtgcagttgaagagcttccacttaactttaattgcaagtgaagaatctgaaatgtagcaacataccaaaaggaggatat

SEQ ID NO: 473073 - DNA, 560 bp, Homo sapiens
atcatctgagtcccacatggctggggaggcctgacaatcatggcaaaaggcaaaaggcacgtcttacatggcggcagacgagagagaacttgtgtaggggaactcccctttataaaaccatcagatctcgtgagaacagcatgggaaagacccacccccatgattcagttacctcacacaaggtccctcccacaacatgtgggaattatggaagctacaattcaagatgagatttgggtaaggacgcagccaaaccatgacagtgggaaagtgaattctggagaaggtgctgcatgtgttgctgcatccccagacgcccctgaaacccccgtgcccttgtacttggtagcatgtgcaggatgtatatcatcgtccccaccccagccatttttttccctccttttcattatgaaatatttcaagcatacagaaaattgaaagaattttacaggaaaaaaaaaacgtaatggaaaagagacaaatattcatgcagaaaaatggtaaataatgtatgtagatactccattctcaggaaggtggagcataactccctacttggt

SEQ ID NO: 473074 - DNA, 1691 bp, Homo sapiens
tgtcagagagtgggcaaaatacaacaggaaaggtccaaattcaccctctgagggcccggggcacgggggcagcctgctctcctcctggggccctgttccctgtggggactggaagagaggctttgagtctagggcctggggcagccaggactgacgggggtgcagtcctagaagggtcggcagtcacggtggcccaccatggcatctccgtatccttgctgcatgctgcacccactccagctgccagagcacggaggcagagacgtgggagccgatgaaggtcgcacgccagcctcccacctgtgagacaaagggccctgtcactggaagccacgtccagcctggccccgcaggagccagggctctgcgcctaacggaggactgatgggaaagggaaggctggcagcagtgaggttttttgaccttggcaatgttcccgtcagactgcagaagaattgactattcccgttcaggtagatgatgaccggccccataaacagccaccaagggtcaccctctccctccccagccctgaaggccaagaaatgggactgggctccttggatttatgaccttctggctcctgcagagagaggaggactggggcttgacaaggacacggggctaaggactgtccttggatctcagtaggacagctgaccttccctccacccaatgactgctccagtctgatcgttcctggccacctgataatctctttgtgcaaacaccaggaagccctggttagagaacttggctcaggagatgacatgtgaccaatccgaattttccctggggactgatacgtggacaccagggacctcgtgcaccaccccacgagatcttacccgcttcactggtaacacccagaatcctcagcacaactgctaccaccaggtagcagctccaggcggccccataggcggcatctcacatggccccatctcctccgccgtggttgactggaccagggaggagcacgtgattcacagggatgtggagcagctcacagttgcaaagaggttgctgagcaacgtgcactgcctggaggtgactgcagcggccctgggcttccctgggctcccccgctggcagacagaatctgacagcacgaggctgcctaaagccctacctgaaaaggatgctaggtttgtgagtccaaaggtcagccggggaaggtgcagggctactgtggttcccaagaagagcccagacaagcattctgctgaaggagcctcagacatgaaggtgcgagagcatttaacgcggagggcttggggcctgcaggagtgagctgcgtgcccaagtgtcatacggatgcctctgttgaaaggcccagtcctcgatgggcaccatggctgtgaccagtgtggactgaaacccagggttctctgcaaacagtgcagtcatcaagggatgccccagctaggacccgcgcaggatcttgggggcggaagggatccagtgaaatggagctggagcatcctccagtaaaccttggtgaattagggcaagttacgttcaatttgaagaaataagagaagtgtgacttctactccaggttagcctagaagccgttcctgtgaattgaagtgtcccccccaaaattcacatgctggagccctaacccccagtgtaacagtatttggagacatggcttttaggtaaaatgaagtaagggtggggcctga

SEQ ID NO: 473075 - DNA, 553 bp, Homo sapiens
cagagcagtattaggggtatgccatggctgaaaggggtcaatgtagagctcaggctatggctacagcggttagaagccccaatccttggcagcttccatgtggtgttgagtctgcagctacacagaagtcaagaattgaggccccacacagagtccctactggggcactgcctagtgaaggtgtgagaagagagccaccatcatccagaccctggaatgttagatccaccaacagcttgcaccatgaacctggaaaagccacagacactcaacaccagcccgtgacagcagccgggagggaggctgtaccctgcaaagccacagggacagagctacccaaggccatgggaacccacctcttgaatcagcgtgacctggatatgagacctggagtcaaaggagatcattttggagctttaaaatttgactgccctgttggatttcggcctgacttccagaaattcaaatgtgaggataaatcagttcctgaggacatagagaagtaaaaaaattctgagcagatgaaaatgtcccttgattcacagtttctgca

SEQ ID NO: 473076 - DNA, 787 bp, Homo sapiens
gaagagctccctgttcccctcatgacaccgacacaacaaaaaagagttattccactaattcccttgatggtcggtttaggactttctgcctccactgttgctctcggtactggaatagcaggcatttcaacgtctgtcatgaccttccgtagcctgtctaatgacttctctgctagcatcacagacatatcacaaactttatcagtcctccaggcccaagttgactctttagctgcagttgtcctccaaaaccgccgaggccttgacttactcactgctgaaaaaggaggactctgcatattcttaaatgaggagtgttgtttttacctaaatcaatctggcctggtgtatgacaacattaaaaaactcaaggatagagcccaaaaacttgccaaccaagcaagtaattacgctgaacccccttgggcactctctaattggatgtcctgggtcctcccaattgttagtcctttaatacccatttttctccttcttttatttggaccttgtatcttccgtttagtttctcaattcatccaaaaccgtatccaggccatcaccaatcattctatacgacaaatgtttcttctaacatccccacaatatcaccccttaccacaagacctcccttcagcttaatctctcccgctctaggttcccacaccgcccctaatcccgcttgaaacagccctgagaaacatcgtccattctctctccataccaccccccaaaaatttttgccgccccaacacttcaacactattttgttttatttttcttattaaga

SEQ ID NO: 473077 - DNA, 3178 bp, Homo sapiens
gcctcgtgcagctcccaggatcaatatgcagatcaacggcaaagcactgagggtccataattcacccttcccatttacaatcaatggatttttgacagcatattccacagggaaacaaggagaaagtagtatttccagcacatggtgctgggataactgggtatccacatacaaaagaatgaagttgatacctacttcatacaacatcctacatctttctccacgctggatgcttcttgcccttgaacgtcggccttcaagttcttcaattttgggacttggtcctcagcttgcagatggcctattgtgggaccttgcgatcgtgacttcaaaaacatcagaattctcagggattttttgtaaactatctttcttttattctatactttctgattacaattccagtaatttatctgacttaactgccatctgcctattgtatataatataaatatgttgcttttttgtaattatataataaaaattatataattacaaattatataaattatatatattattatatataattataatatatattattatatataattatatatatattattatatatattataatatatattatttataattatatatattataatatatatataatatataattataaataatatattatatatatattatatatattacatatattattatatataattatatatatattatatatattatttatatattatatataatatatataatatatatattatatatataattataatatatattatatataattatataattatatataattatattataaaattatataattatatataattatattatatgtatattatatataatataattatatgattgtataatttatacaattatataatatgtatattatataattgtataaattatacaattatataatatacatatgttatatttatattatataaatataatattatattttcacttcatggacgtgttcttgtcctccttttgtattaagtatatgctggctacataaaataatttgaaaaatagtctttattttactatcctctgataaagtttacataaataaatatatacaaatatatttggtgctgatatataaatatgttatataaatcccagcaggctttttaagcttcctcaaaatagaatctaggttagcctaaccaaccatacttgcaaacattcctcaccatgcctgaatataggggaataccaggctagatatcattttggatctatggcttttgaaaataccatgcttttctcttttgtatttgccaaatgagtagttgttgcttgaagtcacagccctggttgctgtcctttatcatttcacatataagatataactcctagcccctttgtcaacattgtaatagcatgacggcgtagttccacaaatccagaaactctcaagcagcagcctacagtttatcatacagtaatgttggtccacagttggttatacaagtgaatcattaagaacttcatcttatttaatgaggcctgatatagatgatactgtctgcataattattatagtagagcttattaaggaacagaacatgtaaggatatttttaatggcccctgaaagacaactggagaccatcattttaaagatcatatttagccaacaaaaatccttggtttggggaggtgctaaacatttttaaaccatttgaagcgccaaaagaaaggtcctattctggtcaagaggaaagacaaggcttaaagtatgaaaaataacagggactcaaagttggatacttccaaagcttcaagttgaatctacaatagaaaagtgtccttaagtaatactatcaccttcaatgaaccagttttgtcatttgtaaaataataattatttgaaggattgttctaaataaagccggtgataaaaataaagtatctagcatagtatctgtaccacagaagataaccaaaaactactagttgttgttaaaacgattggctttgttattctctagccattccacactagctattaaaacatccgtaaaaattgccatacctttcagattatataatattgaaaagatattgaaaaaatggtactactaatcacttagttgagaggagtttcacatctgtcatcgatggaatatgcttgaatgtcaattttacattaatatagtttttaattaaaattgtatggaaaaaatgcatcatttttcttctccctaagtaacatctataattagctattttatttcctaagaaagtaaattttaattataataaattctatggagtatatatttcaaaaaaagccaaaggtgtcaaattaagtactgtaagatgtttccaagttttccttttaaatattcgtttgctctaaatcatgacttttgttgcctaaaaaccagtatcagcagaacatgactagtgactgtttttatgtaaatgagcaagaattaccaaggtatgtctaagttccattattttaaagtatcagcacaatctctgactgtctattaaagggatctgttttgccaggatattcaatagagtcaatgtttatccctgtaatctataattattagtgaatttcctctcccatctccaggatgccatctggaattgctctttgttctctgccctgaggcaagatatctactgctgacctgttttctcctttctgaaactcctatttctccaagacaactctggttcataggaaatgaaccacacatgcacacagaggaaatatgtgtacgcacacatgtgcgcgcacacacacacacatattccacaagtgattttatcagaaataaaagcagcattttgaataaagtgtgatttatttaaagaggcacactcattcttattctaatctactgctttccttttcttaaatcagcaattcttctaaactctgagaaaagtatataatttttgtgcttcgtcaaggatcatagaaattcatacagaaacagacataattcttttgtgaactgtttgtgtgactcaaaatggaatattttcatcaaaccttcaggaattggaatacttgtggatactcctagctaatttgtgtttggtttctgttgtttagttatgaacttctaggcaatagacatggcttcaatgattgcggttgaaatgaattagtctgtataactagtt

SEQ ID NO: 473078 - DNA, 646 bp, Homo sapiens
ttaagaaaatgtggcacatatacaccatggaatactatgcagccataaaaaatgatgagttcatgtcctttgtggtccagcttataggtccacaaaaagagctttgcctttcctatttatatctaaatggtctccagagaagaaatggttatgtaaggagaaataacccaccatcagttctgaggaccaagccacattccacagaaaagaaaataaaaacctgcgacgtgactaagatccagttagattttgatgagaacatcttctattccatctttcacaatctctttactagatatggagatgtaaaatggagaatgaactgttaccaaaaccacaaagcaatccctatggctacaaatctcaatgggaacctgtcctggattctctctggaacaagagggttgactttacccggtgttctgctacactctgcagaaagtcctagaagtaccccttcctatgtcaggggtcacagtatcttccaccattgacagaaatttaggttgatttcatatacctttgccattgtaaatagtgacttcagccacattatataaagctttacgattgccttagttaagtggatagtgcacatgtgacttgaatataccatttcaccagcgccttgaagacaatggtgttt

SEQ ID NO: 473079 - DNA, 663 bp, Homo sapiens
ctccagttagagggatcctctagagcctgagtctctctctctctcagagcagtatgagaacgaagagtgatcatcccaaataccagggtgagaaggagagggtcaggacctcaggcctgcagaagaggctcagaggaagtgacaatcaaatgagcctaagtaaaggagggaaagttgatcaggcttctcgatgtggcaaggagatggattcaggaggtcttgatgacctcctggctcggagcgagagggaggaggctagaaaggggctcatgcttccgacaggggtgaacaatagggatgatatcattgctgaccaagataggaactctgacacatcagcaggcaaatggagccatgatcaaaacagacggcacctccaccctcaaggagcttccccaaatgagaaaccaaaaacgaagctcctgaattggccccaaactgagcactttttgaccacattttcgaagctaaaatctcaaaaacaacttgccttcattgtgcctggtaacaaaagacccaatgcccttctcaacggcttcctgtagaagatcactctcagaatcccaggagcctctgataagcaggcagatgcagcagggaaaagaatccctgaaatgaaaaggagatgacatttaaacgagtagtggttgtttcagcatcatt

SEQ ID NO: 473080 - DNA, 786 bp, Homo sapiens
ctctggagcacagtcagtgtgcagaatgaatgccatatggttctacaggaataatcagcagagaggcctcggagagttatcccggcagagaagcctcggggaggtgtcccggcgggggagcctcggggaggtgtcccggcgggggggcctcggggagcttctcatcaaggtgaatgacagccaagtcctaaaaaagaagagcactctttctttgcaggtggagaggacaaggagctccagtgacaggggctctcacttcacaattgtggggaagggaccacaggcacagggagagcatgattgtctgctacactgtctctgtcattctggggcccatgctaaagaagcactggctatctggatgacaattctcatggattatcctcatcaccattatcatcatcagagcacaagactcaagccaaactatacatgtgcatttaagccctctgaaatctcatggatcaacccaaataacatggaaaattaaactctgcccaaagaaggagaaacgtgacaagtattattgacgacaatttgtcggttgtgttctttgaagtggcaggctcacttagtttatttttgataaaatgtctttaaaatatccaagtctgaataaacattcttttctgacacttgttcattcttttctgtaaaaaaaaaaaaaaaaaaaaaaaaaaaaatgcattccaggagaagagctgctagtttagcttgcaactcagatgcacaagtacttttccttgagatgaccactgtgaccagtgtgagtgccttccatttcat

SEQ ID NO: 473081 - DNA, 567 bp, Homo sapiens
ggcttctgtatccagacaaacatggctcccaacgccagctccacccctagtgaatggcatcacctcagacttaatcgagaacctaaaattataaggatcattttaaggtacagatcttgccctcaaggagtccagactcatgggaaagacaacgtcacaacctatgctgcagtgaaatattgctgtagtggaagcatatccccagcatcaattcttctgatgaagaacaagatgagagcaattatttctatggagctaggaaggaaaatgattcaggagtttaggactcctgataatccttcccccaagacctgccatcaccgatcctgcctgtccgacatccgcgaacaaacagatagcagacttctggtaatctcttctctaggcacacagagactgttcttctcacctcttatcaccgggagccctatcacctcctgcatcagcccccctgccagcctctcctctcctctcagctaaacaggattttcttccttagttttcagactggggataatcttgtcacttctcctagagtagaaaggcctagaagtcaagggttagaaa

SEQ ID NO: 473082 - DNA, 735 bp, Homo sapiens
cggctggctggcgcttgagttatccacaggatgtgtggaaccgggaagagatgtaactcgatgcataatgctggcagacagcacgtcacagccacatctattgccagagaaatggaatacagcgataatttcacctgattttcactatcaagtagaacttctcccatcaaacctaagcagacatgcagtcagaggaagcaagccttatccatccctggaggctgacagcacttacatgttcactcatctactgcctcttgagggtgttgacttaggcatggccaggaagcattcagcaaaattaactgtggtcaatgtccagtgtgccatctgtatcccccaagagtgcactaacatggacagtgcccatttacctagaaatctccctcagctggagccccagtgccagaaaagtggagaattaaattatgcacacctcagccctgtactagataacctcaagttgcatggatttatcaaacgagtagttattgtgctatgttaggaatatgttttgaaaggaacactaagttttaaaagggagctgccacttctatgatttggttataagattctatttatttattcattgaaattattctattcctgtgtcagtctgtttgtgtttctgtaaagcaatacctgagactgggtaacttataaataaaagaggtttatttggttctgcaggctgtacaaaaagcatggcgcccacacttgcttctggtgaggctt

SEQ ID NO: 473083 - DNA, 591 bp, Homo sapiens
gagacaagcaggaagacctcggatggggcagaggcccatatgcagaacccctagagcaatcaacagacagacagagccctgcttcatggagcgtctgctctctcctggagctcacacgctgaaacagacaggatgcaacacctcagggttgttggagaaccagctcctaattgcataccctggcatgacccagccacctccattgagcccttcatggcacatgactgtaccttccggctgttttcaggctggtgagagagaccctttcatatttatcctcttggtagcacagtcttctctgcagctgaagatagaagccagggtagtgattctaagtgacacttcagatgtcactcttcagctacctgagatgaaaaattgggattcctgtttcatacaaaaggagcttgaaattgtacccagggtatgggaagatgccaagatggtggcagctactgaatgctgggatcttataaataaatagaggctcagagaagtttcaatgacgcagctggtacgtcagggccagtcagagagggacttaggtcggtgtgatctcacatccagtgcctctttgttcatctcagaccc

SEQ ID NO: 473084 - DNA, 784 bp, Homo sapiens
ctgcaaggtaagtctcagtcctgcaagaccacagtcccttcccatgccagtggcaaatctggtcctcccgtgcggtggactgactggctggaaacagtttacttgtgtttatgggtttattataaaacataccacaaagcagagagatgatgggagagctgcagagggcgagggatggtgggggcttctgtgcacctccacgtgttcagcagcctggaagctcatcaagtctcattgttcaagagcttttatagagcttcatctccagctcaccccagcccccagaggtcagtgggtggggacgaaagttccaactctcgaatcacttggtctttctggtgaccagtcccatccagaggctatcttggggccccaacctcagtcatctcataagtataaactcagggacaaagaccaaatatatttcctatcatactacagaaggggtcatggtcatgccaatgccatggtcatgacctacggcccagtgcatggcccagcacatgcttggggactctagcaacaatcggaagggatcgcttcaacaggcagccgcctgttcaaagtctctccactgtttatctcagaaagtacagcgtgccattatgaattgcattattttcttgatttcatttttggattgtttattgccagcatatactccaacctgctaagctcatttattagttctagtagtattgttgtgcattctttagaatatttttacatataagattgtgtcatgtgattttttacatataggattgtgtcatgtgaataaaga

SEQ ID NO: 473085 - DNA, 681 bp, Homo sapiens
ggaaactaagacaagactgaggaacctcaaggaaaaccaaaatggggaatagggcgttgccgctactggcctgcagaggatgtgggcataccctcagtgcaacaaaacaaaacaagttccctttcctttggaccgtgattaaagccactgtgggtgtgctttgcatgtacaaagcgtattttcaattgagatcttcaatcagcatctcatacaatttgagaagcagccttaagcctactgctaagcttgctcaggacttggcagggagtgaattcaatgccagctctacatacggcgtctacagctacgatttcagccagggctttggaatcttcagcagtcgctggggcttcccatgctatcccagtatcggccatgtgtccgtgcggcacgggcagatggttttccggtcaggtgttttgctgctggttctgcagtttgtagtcacagaccagaggaaagccacagttttgtttctttggaaagccctgagtgataccctggaaaagaggggtgttgtttgactttggacacatcaactaagtctttgtgcttcactttcttcacttataatatgggggttatagtcacctagcagagctgctgtgaggattaaatgatgcagcaatttccggtatatagtaagttctcaataagtggttgtttcttcccgtttccttt

SEQ ID NO: 473086 - DNA, 1365 bp, Homo sapiens
gcgcggtcacgccgagccagcgcctgggcctggaaccaggccacagccccccagcttcacccaccacctccctaccatggacccccgcaaagtgaatgagcttcgggcctttgtgaacatgtgtaagcaggatctgagtgttctgcacaccgaggaaatgtgcttcctgagggagtgggtggagagcctgcgggtaaagtaccacctgctactcagaaagctaaatcagaagaaaatgccaaggaagaaaaacctaatagcagacgaaccatcaagtgaggaaagtgatctagaaattgacaaagaaggtgtgattgaaccagacactgatgcccctcaagaaatgggaggtgaaaatgcagagataacggaggagatgatggatcaggcaaatgataagaaagtggctgctattgaagccctaaatgatggtgaactccagaaagccattgacttattcacagatgccatcaagctgaatcctcgcttggctgttttgtatgccaagagggccagtgtcttcgtcaaattacagaagccaaatgctgccatccgagactgtgacagagccattgaaataaatcctgattcagctcagcctcacaagtggcgagggaaagcacatagacttctaggccactgggaagaagcagcccatgatcttgcccttgcctgtaaattggattatgatgaagatgctagtgtaatgctgaaagaagttcaacttagggcacagaaaattgcagaacatcagagaaaaggaatgcctggaatggccggaatgcctggactcaatgaaattcttagtgatccagaggttcttgcaaccatacaggatccagaagttatggtggccttccaggatgtggctcagaacccagcaaatatgtcaaaataccagagcaacccaaaggttatgaatctcatcagtaaattgtcagccaagtttggaggtcaagtgtaatgcccttctgataaataaagcccttgctgaaggaaaagcaacctaggtcaccttatcgatgttgcaataatacaaaccaatgtacctgtgacatgtacatcaagagagctggggtgctttgaagataatccccacccctctcccccaaatgcagctgaagcattttacagtggtttgccattagggtattcattcagataatgttttcctactaggaattacaaactttattcactttttaaaccttcaaaatatttaaaacaaatttaaagggtctgttaattcttatatttttctttactaatcattttggatttttttctttgaattattgggcagggaagatacttatgtatggaagattattgctctaatttgagtgaaataaaagtcattagtgc

SEQ ID NO: 473087 - DNA, 873 bp, Homo sapiens
gcgggtcccggccccgctgagcacctccagcagtggcacagcctctggaggggtccgggacgaagccacccgcgcggtgctttctttttctctgtaatggttggatgtttgaaataggagaggtggatctaccattctggggtctggaggatggtggccctcttctcacagctccactaggcagtgcccctgtggggactctgtgtgggggctccagccccacattcctcttctgcactgccctagcagaggttctccatgagggctctgcccctgcagcaaacctctgcctggacatccaggggagaaaatttgaagaaagtgccgcaacatcttattacacaaaatgtacggtgcttcttacttgttattctatttcacaagttaaattaaatttcagtcctttactgttgtctaatatttcagatgtttcctacaacatacttaaaatttcaaaaacaattgtaacattatctgaaatgtttcaccagtacaatttatacagaacataacaaagaaaaatgaagcactgacaactgtaaatgacagaagtcaaatgtaataatagttgaatatcaaagaaaaaaatgatagcctaaaataagatatatttctgaggatagcaattaaaaatatttcctatatagcatagacaggaattccctgaactaaaggagatggaagacatgtatggttgttttaagtctgggtacactttattttcttcctctagtctgtgcgttgtaaaggcatacctgttgaaaaggaaacttttgttgggttacccctcctgtcttttaaagatgagggggaaaaagaagcctttgctgttatggatgcagttctcagaatctcactagagggtggtgttgg

SEQ ID NO: 473088 - DNA, 922 bp, Homo sapiens
ctccaagcttgtgggggcatcatgttcccctcctccagatggaagtgcccacagtggaagccacgtggaatacgtctggtccagcctcagcctcacatggagctggtacctgtgccagtgtctggagctgcctactctgccgcagcagccagtgtgtctggttgtgcgcagtggccagagcctgcactcactcacccacacgccccttgccactccgcgcctgacgtgcccttggtaaatgtgggatctgggtcggtagcacgagctgagagcagcctgccaggccaagtaggtggaatgaacacagcaggtgtgaaaaatactcaggtagaaggtgctgctggccacagaggtttttggctagtgaagcggcacctaaagtatcctgtgacatatccatacaatttatgtgcatttatcagttacagttggctataaatttgataaaaagacattgtacatttacttacaagaaataaggcaaagagaggagttgtgtaaaatgcaatcaactgattgtattactaagcagaattctgatttttatttctctttgaactactccccctgactgctttgacactatgaaacacaacatatgtcctggaaatatgtgacatatttaaatattgtattacataagaatacactttaggaacttatttataatttctttcattttttaatatctaggttattttgttcttctgatttattctgcttctcagtacattgccttgaatttagaaaagtctttgctttgttaatcatacttcaaaatgaaaaaaatttgttggaaactgtgtaatctcacaatgtgaacatgcttttttttactatttttatttcctatgtatagctattccagttcttttgtttttgagggagaattttttaaatttatttttaaattttgatttta

SEQ ID NO: 473089 - DNA, 652 bp, Homo sapiens
gaggcacaggaatgaagcatggcttcaggaaggaatcattaatttcaatatcatcctgcaaatggaccttttgcataaacacaagagcaaatggtctaaggtcccatgtgtgcaggccttctttgccttgtagtgtaatgcggacttttgtcaatgcagtattgattcagccttccagtggccataaaaggagatgctgcaaggggcaatcccagggcactaaggaagcaaacccaagaggaggacctggtcccattgcttcatctgcttatgacagggaagcaatggaaggtctgccccaccagttgctggcagcaatttggacactcctcagatgcatcccccaaactgggaaacatttaatttccccgaacattaagctgcttggcaatctcttgaagaggccatccatcgctaggggaaagggaaactagaagcctgacatgccagcaaaaggggttaaaggattgttttaaattatataagataaagtaaaaggtttaatcaagttgtggaaggttcataaatgttaattttgtaaaagcaattctgtgtgtgaacatattgagtaaatttaaaaggttgttatttggtttttctgtaatttgaacatttgaataaaagcacaaaaaaggtttcttaaggcactaat

SEQ ID NO: 473090 - DNA, 936 bp, Homo sapiens
gacctggaatatcaagatgaaatcagtctactactccacattggaagagaatgtgcatgagattaagttgaaaaggggtacacttatggttaatattaagtggcaacttgattggattgaaggatgcaaagtactgttcctgggtgtgtctgtgacggtgttgccaaaggagattaacatacgagtcagtggactggaagatgcagacccaccctcaatctggctgaggaaaatgaagcttaatgaggttaaactggcactcgaaaccaggttcatttgcaaaactgctgccactgaaatattcagtgcattgcatttcttctaccccaactctgagattttcatcaatcctaatgatcccatacctgaggcaaaatttatcagggaacattctatcttcaaagcttcaagacattctgtaatgccaaagtataaagtgtaggttatctgagatactttattttattaaaccaaatttgatagttatgcccttgataatcacaggcaaaattcaaaggttcagtttgttattatgaaacagtaacaattcttacgacttttaaacaaatgtggtgagccttaatcttttagctaaaagggtttttgctagaaagtttgcatcttctaaaactctttttcagagattcttttccaattgtagaactgtcaggccagaaatctatgaaaagttaaaacctctcctaaatatacataaaataataaataaaactaatcactcttcaagggaagtttatcttgtacacaagtagttctatgaatttttaatatcattcctataagcagtctagtatgtttaagaagactcctttagaacttaaatttgttctattatatttttttaaagtttaacatgaaagttaaaatagtaaaatgtaggtttataaaagccaatataattcttaatttatttaaagg

SEQ ID NO: 473091 - DNA, 511 bp, Homo sapiens
aggcagacatcacaaatagattatagccctcgtatgaaagaacgcttgctatgggaacccagccagtctctatcttcaaaccagaaaagggacattgcatgagtccctcttgtactttgaatttcattgacgcctcctctatcacatccctctggattcctttcctgcctccttcttccacatttaaggactcagatgggtcattgcgatggcagcggggacccatttgtagcagccattgcaaagatgccagctgtaagtggggaggcatgaccagggatgcatgctccatggagctggagggagctggggacaggtggagccccaccccttatgagttggtggggcaggagccccaccctccccggtgcagctactactgcccagccactactgtggacctggacatctctgcactcccgggggctcaggaaacctctgcctccacaggcttggaagtgcctgctctcgctatctgtcctctccccactccttaggcctgctctgattt

SEQ ID NO: 473092 - DNA, 783 bp, Homo sapiens
tgctttcttttttttagtggtatgtatactttcctaagtggcattctcactttcagcaggggtggagccatcttgaaaaccatgaaaaactctttcttcgagtacctgtgctggcccccagtgggaagaaccactgctgcgtcttcaacagcgtgtggggacattaacatgtttccaaaagaagaaaacactccttcctgtatcatttccacctcatctctcttaccccttatagggcatgtacagctggtcgacgtctgcaccttcagcaccgctggcaagcttcttcgctttgggttctcagccatgtttggctttggtggaagaactttggctctggcagaaaaatatcgatggatgtcccctaaccaacggagagattttgctgttgttaaggcactggcaaaacttaaggcagaagactgtgaaatatcatttttaccatttaacagctctgatgatgtgcaagaaaggagggcacagggatctcccaaatctggaacctgcaaacgcattcttggtaggcattgtgacactcagtggttagaagaagcatgcaggggtgcccactagacatgggtgttctagaggcataactgactgttttacagaggatttgagctcatcaattatgttaaatttcctatattctgttacaaatataatacagatttcataagtctgccttgattcactgctccctaatccagagcagttaaatttcaaaatcacatagttatatagcctacctgccaaaaaagaataacccatccctgtcttctt

SEQ ID NO: 473093 - DNA, 2175 bp, Homo sapiens
aaaaggaaaatccagggagtaatgtggcagaagcccagggagtgcccagatatactacctgcaccacatcgctgctgctgcggttggggaaaagatagtgctgaaaataagagtgagtgtgtcatcaacaaacagcagcttcctaaactatgtggaaatctgaaagcaaatgggttcatatcgatgtacaagccacagaggaactttatcctggaaaatgtacctgagcaagttacaccaaagacgtttgttaattccaatttgctaatttttgatgagattgtggaggcagaagtcatgaataccaaagtggagagaagagggacggtgtctggtttaaagagcatcgatggggatgagctaagtagcaaagatgagaaagtacgagtaatgccaagtactgatgagagtagaaagaaatcagttttctcatatttattggttttggtagtataaatttgttcaatatttttggagggcaatgtttattttaacattgtcatttttgcaaaaataaatttaaaccatgaaatgaccatctagcagaacttgttaaaacaaattaagatataacaataaaatgaatgcaaaatattcatcaacatgcatgagagatctatatgattatatgtgaaaaaaaatccctgccacagtatagagtaaaaggcatgttaccaaaaaagttataagaccaaatatgcaatcgagtcacctataaattataattaagcttacatctatttagtgcttatcatgtaccaggcactaaactacataccaagtgctacagatgcaagcatacacatatgcaagcacacatccacacatacatgtatacatatacatccaatttttatctttgtgaaataggaaagctggagtagagggtgggtggagaaggaaagtagggaggtagggaggttcaagaagaagtaagtttcagcaggattgtctgaatttttttagtatggacatacatttgctttgttatcaggaaaaaattgatcaagatatttccgttttgagagaaagcgagaaaaatatgtgatattttgttcgttcaccaaaaacattactcattattttcacaagactaactataattttgatatgagccactttaccaaaaatagtgccttgttcgtcttggtatttcatcttagatttttcacttgaaaagttattaatacatggtggctcgattgaatgacaagttacttttatcagatacttttgggaatgataaggttttgtaggttgattctagtttccattatgttaagaaattaatattataaaaatatgcagttttaaaaatatatgtttttcttcataaaatacttattttcaataatatacaaaagcacagtttcagtttttatgaaaactctttggatatttaatattttaaacatatacacaatatttattctgctgcctttagtggagtcaagttcaaatatttctgtacatgacttcagtgccatattatattgcataaatatatgtatattgtttatttatataaattatataaatattatattgcataaataaatatttatattatttaattatataaataatataatatttataaaatatttcatattataaatatttataatatcataaatataaatataatatttatattatttataataaaataaataatattaatatttatattaatttatattatttatttaaataaataatataaataatatttatatacatataaaatatttatttatatattatttatataaatataaataaatatttatataaataatataaataaatatttatataaataatataaatataatatttatataaataatataaataaatatttatataaataatataaatataatatttatataaataatataaatataatatttatataaataatataaatataatatttatataaataatataaatataatatttatataaataatataaatataatatttatataaataatataaatataatatttatataaataatataaatataatatttatataaataatataaatataatatttatataaataatataaatataatatttatataaataatataaatataatatttatataaataatataaattaatatttatattatttatttatatcatatc

SEQ ID NO: 473094 - DNA, 594 bp, Homo sapiens
gtcctgcttccacacagctggcagtcctaaaggctggtctcactcctaccaaccgatgcttctcattgctgctggagctcccactttacttcctccccaaagaatccatgggacttggaagagtgagtactctgtactggaaatagctcaaaaggaagtagcagttttttgctgtgagctgggcttctctcaacacaaagcaatggaagaaacatttcatgaagaggttaaagatttcagagtggtttgtttacatttggctttcagacaatgtggtgaggggtgtcaggaagggcagaaaacccttaataatgtggccacaccatatcctggtggatttaaatgtttcacctgtgaaaaggcagcagacaattatgagtgcaaccgatgggctccagacatctactgccctcgagatatccagccgtctgagtaatcgaaaataagttttattgccgtctgtagtcactgctcatttccaaatgggccagtattttctaacattaccactgtggaatgaacattgctaatggatctgattaaaccactgcttctcagacttggctgtctattgaaattacctggtaaactttc

SEQ ID NO: 473095 - DNA, 761 bp, Homo sapiens
cgggtggcaaggatggtggatttctttattatcttctttgtaaaagcaaccattgtcttaagcattatgcacctcagtgggataaaggatatctctaagtttgctatgcattatataatggaagaaatagatgaggacacatcaacggaagacttgctgaaaatgatggttatggctcttatatacagattattagtttgtttttatgagataattttcatttggggagcaggtggagctaccccagggaagctcctggtggggcttcgagttgtgacatgtgatacattagtgcttattgcactaagtcgtgttttagtgattcctttttcaaatgttagcattacaacgtccactatacgagctttgatcaagaattttttgattgcttcttttttccctgcttttatcacactgttgtttcttcaacataatcgaacagcctatgacattgtagcaggaaccattgtggtaaaaagaaatgggaagaaaaacctattaaattcaagtattaaaatttttagatcaaaaaggcaaatgattttataaacaatgaacaatatatactttcttaagatctaaggtactttcataagatctaagaatttgctgaaagcattttcagctttgaaatctccaaatgaaactttaaaattgattttggtttatcccaaaacaatggaaaatgtccagttgtgttttgtaaacatgtatgtaactcatcttttagttcacacttcctggggagccaccaaagaagg

SEQ ID NO: 473096 - DNA, 650 bp, Homo sapiens
aggaaaggagctgaggttggaaaaccatgcgttcatcttcaatatgactcgtctaggattcctgcttctcctcacctgcgaagactactcagcattgtccatagatgcttatgaccaggaactgacaaggaggctgggtcctgggatctgccttgttcttgctgtcttcctgtccaagcccactgccgtgatgctgggaagcaatgttggttctggtctgtgtcctgcagctgtttggggctctgtgctgagtagagcattaggaagatccgttgtgctgctgaggcccccttttcttccactcggtgcttttgcttatcctcctaccactgctgtgtctccttggatgacagacttggggacccaagtgggcatgggtgcctgcacttctatagcccatgttgctgatcctctgagttacaagcagaagctcaatgagagagggagaggacagcaacctcgggtgagggcgtggagacccagaccaggaagttgcaaatgcaacgagtgctttcagaggatcttatagccaagacatggccaagttacgtaaagaaggtgtctgctgtggagccctgtgaatgtccagctggggtgggtcaatgtgggttcaggtcagaggctcaagtgaatgtttactcaaagggtcg

SEQ ID NO: 473097 - DNA, 676 bp, Homo sapiens
cggcttcattcttgaagtcatgtcaacttgatcggattgaaggatgcaaagtattgttcctgggtgtatctgtgagggtgttgccaaaggggattcacatttgagtcagtggactgagaaaggcagacccagcctcaacctaggtgggcacaatctcatcagctggcagcatggccataaaaaaaagcaggcagaagaatgtggaaagactagactagttgagtcttctggcctccgtctttctcctgtggtggatacctcctgccctcagacatcagactgcaagtctttgagggcagctttgggactcttgggctttagaccacagactgcaggctgcactgttggctgccctacttttgaggctttgggactcggactggcctccttgctcctcagcttgcagacagcctattgtgggacctcaccttgtgattgtaatgtacggtagtgagcatttatcctagtctgttttatgttgctgtaatggaatataacagactaggtaatttataaagaaaatgaatttatttcttatagttctgaaggctgagaagtccaatgttggggggtctgcatcttatgagggccttcttgctgtgttataaccatggcagaagggcaagcaagcacacaggacaaacagacaggatgggggccaaacttatctatttat

SEQ ID NO: 473098 - DNA, 571 bp, Homo sapiens
attcattgctaataggaatgcaaagcagtacggccactttaaggatagattggcaatttcttacaaaactaaacatgctgttaccatacgatgtaatggaggaaagactgtcactaaatggagggagaagagggaggttacgtaggagagagcagcaagaagataaacagggaagggaaggaccaaagaagctgacatctcctggtaaactactgaaggatgaatctggctccttggacccatgggagggagaccagcttgatggctggtgtggccacacagctatagctagcaagaagcacgcagtccacgggaactattatgattctaaacaccttctggcagaactcaaactttttctaagtgatcgcctcttagtcaacggaaaggctgtcattgcacaaggagactgggtcacttatttctgggaggatgtggtgcaggtccatggaggggaagatcaacagctcaagctcagagagaaatatgtaccctgaaattcgagatgcctcgtgctaattcccatggagactggtgtcaggtaactgaggacaagaccgtaaacacagtc

SEQ ID NO: 473099 - DNA, 966 bp, Homo sapiens
acatcctgagataccatggttaaggtgaaggccagagtcaacagatttggccacattgggcaccagatcaccagggctgcttttaactctggtaaagtggatattgttgccatcagtgaccccttcactggcctcaactacatggtctacgtgttccagtgtggttctacccatggcaaattccatggcactgtcaaggctgagaatgggaagcttgtcattaacggaaatctcatcaccatctttcaggagcgagatcccaccaaaatcaaatgggacaatgttgacgctgagtacatttgggtgtccaccggtgtcttcaccaccacagagaaggctggggctcacttgcagcagggagccaaaagggtcataatctctactccctctgctgacgcccccatgttcatgatgggcgtgaaccataagaaatatgaaaacagcctcaagatcatcagcaattgcctcctgaaactgtggtgtgatggccacggggctctccagatcatcatccctgcatctactggtgctgccaaagctgtaggcaaggtcatccccgagatgaatgggaagattactagcatggccttccgtgtccccaccaccaatggcatcctggactacactgagcaccacgttgtctcctccagctttaacagtgacacccactcttccaccttcaatgatggggctggtattgccctcaatgaccattttgtcaagctcatttcctgttatgacaatgcatttggctacaacaacagggcagtggacctcatggcccacatggcctccaagaagtaagacccccagaccaccagcctcaggccctcagctgctaggaatcccctattgcactaggtctcctaccacactgagaatctcccctcctcacagtttccatccagaccccctgaagagggaggggtctagggagccccaccttgtcatgtaccaccaataaag

SEQ ID NO: 473100 - DNA, 846 bp, Homo sapiens
ggaaactgggaaccattaggtcatgttgagcaaaagagtgactgaagtggacttaaattttgattgggtcatcttggctattgtgatgagaatagacttgaggagcatctcagggcatgctcagtgctccatctgtctctactcattcacttcccccagtgtgaaatgctcacgttctgtgtggacgagagacttgagaaaagaaagagacacagagacaaagtatagagaaagaaaagtgggtcgaggggaccggcgctcagcatacggaggacccacaccagcaccagtctgtatagctgccatagataatgattcctctgatggatctgggcaaagtaaattgaaaaacttctggaaagaactcatcattctagataccattaagaacattcgtgattcatgggaggaggtcagtatatcaatattaataggaatttggaagaagttgattccagtcctcctggatgacgttgaagagttcaagacttcagtggtggaagtagctgcagatgtggaaatagcaagtctagtggaattattagaggatagcaagtttgaattgctgacaatgcatactcggtaagcaccaagttattttcagaaacatatgaacgttgcaaaacatttgcatttttttcttgggcctgtaaaacttggtattatgcctactcagtctgtaagcatactttacttatctgtatgctcatttgttcaacacatttattgagtgcctactatatcccagaaaatataaacataattcagttacttagataatctgttagaacttagtgacttaaataacttaccaggatggagaggagaattaagatggctgaatac

SEQ ID NO: 473101 - DNA, 521 bp, Homo sapiens
tcctcaccatcaaagatcaaaggtagataaatctacgaagatgaggaaaaaccagtgcaaaaatgctgaaaattccaaaatccagaatgcctcttctcctccaaaggatcacaactccttgccagcaagggaacaaagctggatggagaatgactttgacaagttgacagaagtaggcttcagaaggtgggtaataacaaacttctccgagctaaaggagcatgtcctaacccaatgcaaggaagctaagaactttgataaaagattacaggaattgctaactagaacaaccagtttagggaagaacataaatgacctgatggagttgaaaaacacagcacaagaacttaatgaagcatacacaagatattatccagaagaacttccccaacatagcaagacaggccaacactcaaattcggaaaatacagagaacaccacaaagatactcctcgagaagagcaaccccaagacacataatcatcagattcaccaagcttgaaacaaacaaaaaatgttaa

SEQ ID NO: 473102 - DNA, 678 bp, Homo sapiens
tggttcacactttacagctgatgggtcaattatctgattaatatgattgatcatttatcataatgggtggcctgcccctccacacctgtgggtattcccatcaggggggacgagagactgagaaaagaaataagacacagagacaaagtatagagaaagaacagtgggcccaggagactggcgttcagcatacggaggacctgcactggccccggtctctgagttccctcagttattattattttcactatctcagcaacgggaatgcagcaggagaacagggtgatagttgggagaaggtcagcaagaaaacatggcctcagggctttcatgagaaactcaatgcagtggaaagccagaagggtgttaagtggggagtgaggagtgatgccatcaggcctgttttgggaaagcacttctgctgttgtgtagaggtaactgcaggaagccaagcccttgtggagagactcagtaagagactcttgcaacattccaggtgtcaaagagttcactgcagaagcagcagcagacatgaaaaggagatgaattttagatctattttgctggtagaattgatagaatttggtaatagatggaatatacaagagtagaggggatggtaagagaaacgggaaaatcaaggatgactcctagagctttggggaagatgatggttgc

SEQ ID NO: 473103 - DNA, 839 bp, Homo sapiens
ccacggttctctaccgtgatccatggcttctaatagagctgtaacaccgcatggcccaaggttccattctttggaatccgccggtctgctatcggactgtatagaggtgggaaggccaaaccgaggaattatgtctgacagaagggaagaaatgaccatggtggccttcttagaccttgtgggaaaggcctctacctatccagtgaaagtgtctacccggaccaagaggtattttagtttcctgaattggggcatcaaatcacaagaaatagctaattctacccccatcttattgaactccctgaaagtgaatattctgattgtaattactgaagaatttgatatctacaaacctgatcctggcacctatgaagatgcatatctgattgcctcttttggaaaggttaatcagaaactcaaaagaatgcaaccattttttctcacctacctgtgacctggatgccccctccctgcttcgagttgtcctggcctttctggactgaaccaatgtagttgttacatacattgattggtgtctcgtgtctccctaaaatgtatacgaccaagctgtgttccgaccaccttgggcacatgttgtgaagacttccagaggccgtgtcgggggttcacgtcctcaaccttggcaaaataaactttctaaattaactgagacctgtttcagatgtttggggttcacacatctaataaatgcaatcgtccaataaaatgtcttctgatttacttcattcacaatttgctgatataataacctaagattataatttattttcccatagttttggtaataatattttcatctaggcttaaaggttgtgctt

SEQ ID NO: 473104 - DNA, 742 bp, Homo sapiens
gggaagaaacggagcagccagtgtcagggtcccgtgagaatatgactgacgtgttcaaggaataccaagaagaccaacggggatctgttcatgtaggagacagtaatgtaaaaggaatgatgggtcctggagtgaacccaacaactccagaagcagaagaaaacctcaagtcttgcctctcggctgatatccagtccaagggccatctcccatctggcatgtggaggcagcctaaggatggtaaagaatggggtgaagaatacgtcacaaaagaccacccagataaactcaaggaggctggccagggtagacacagctccttggaaaacgttttatgtgaaacctccttagctgatggctatccagttgtttcagcatcattaattgaaaataccttctgtttcccattgttgaagaaatggttaatatcaagtcctctttggtttgtttctaaagctaaaagacagactgtggccctggaactgcttgaatctgaaagaaaatatgtcattaacatctctctgatcttgaagataaaagccacattccaggggtcagatggaaagaggaattccaaagagagaaggtatccatgcactcattgcctttgcttttcagattgattaggatttaagtatattaacatttactatcggcatttttctccatgcaaagatgaaagtaagtatattaacatttactaactttcccatcacaaaccacaaaccttcagcacttttta

SEQ ID NO: 473105 - DNA, 3604 bp, Homo sapiens
ggcagcaggtggaataggagtcaactccttgagctttttgtctttaaagggagggtccagccccggaggtttcttggcaggaatttccagacccttcttccgcccgtcgtctgctggcttcgccctctccttgaggttggggtctctggactggtgcctcagcttctccatctgcttcatcctctccttgtgccccttgtggcgctcctcgatctccaggtccttctgggagaacatcctctggaagctgattatcatcatgtcgccatccccccggagcttttccctgggcctggcatttttcttgcctgggtctttggatggcgatactttatcatcccctttgctcatcttcacagagtcgtccttttctttttctgcactgtccttgaatttctccttcagtttggccttcctgagcctcgggtcctcatccctggacttgtctttgagtgcacggggagggctgtccttgtccctggcagtgggcttctgcttggtccctgtgatgccgcaggagccagtctgcatgcctgttccggttcttcctcttctccttctccgggaggcaggcgctctccctggcctcctcctacatgggtggctgcttgagagagatctccaggaaggcagtcatccctggctcctgccctcagtctgtgcagctgtcagaggagacctcactgattttatcactggagtcgtctctgtactcatggagagcttcttccaacttttcaagcaggcttttttccatgtcagcacttctcaaggacttcctctccttggaatattctttatctgacttctctttgtgtttgctgttagccttgtcttcagcagactgtttcttttcagccttctcagggagcttctgtttatttttcttatcttgtgtggagtccactgaagctctttccgtcctgttcttatacttttctggtactctttaaccttcttctccttgtgcttttcaaggactttctcttttttatctgtcacaccgtcagcagcccctgtgtcctttctcttgtctttgggctccttgtccttttgcctcttgggtgctgctcatcagaagaggacttcctgtgtctgtcagaggcataggcctcccgcccttcgtccttctcctagaggtcatccatcctctgtaagtcgctggcctctccgatcttgaacctactccccatgtagttgtctttgtcatcctctctctcttctgtgaatacgtctgcgacgtaccagcttttctccttgcctttcttgtcattttttttttcagagaagtcttctgagataatcccagggaaagttttctcctttttctctttcccttggtcaagagacactttccttttttttgtctttgccatgtgtgtatttgtgtttattccttggtatcttttttctctttaaaacatttatcaaattctctgtccttctgacatttttcgaggatagatttctcacttttgtccttgttactggacttctgtttgtatttttctggatttgttttctccttcctttccttatcaaggccgtccttcttctcttgcactgggtcttgcagttcccacggttccaggcccttcccaaaatcgcagtcagacttttccttgaagacactctggtagcctcactccttcagctcctcgcggtgtgcggtgtgcctcctctggcttggccctgcagtccctgtgctccttggagctctggagggtgtcctttttgtcctggctggcctctacggactctctctcctctttttgtcattttccaaaaggtagccggggacactttgtgcttttcagtctggtcttttctcagagtttttatccaaatagtccttgtccttttggaagaagggctctctgtagtctcgcttctcccgggccctgctgtcctgcttcctctcctggctgtcctccttcactgtttctaagatcagcttggccacagagttattcttcaagtccctgtagtctgtcactgaagagtcccagctgtctcccactttgaaatcaaaggatgaatcagacaagtcaaaaaaaccaccgatctggctgattgtcagaaaggctaaatttgatgtcttcattctccagaaactgatttttattaaaatattcatcaaaagcagaatcttccctataaaccttttcttttttgagtttttctttatcttctttaaaagtcttctccttctcttttgaaatgttgtcctcttttaaatcattctttttctctaattttgacggcccgtcttttcacttactctttctctcctctttgtacagtctcagtttttcttcctttgaagacttttccttcagagatttctccttttctgctgtattcgaacagtctttctcttcttggaaagatctgctgatatctttgttcatgcctttgattctcttcagtgatttttcatctttggagaccttaatgatctcatctttaaagagccattctttctcttctgatatcattttgctaagtttctcttcttttttaaagtggtctcgatcaagctataacacttttaacttattttcagtggaaatatcattctctaaaagtatagccttaatctgacttttgcttgtagtcctcatattcatacgtaaaacgttccaatttcagctcttggctgatagaacactgtcccttctccttgtttttgtgtttgtgttttgttttatgtttttttgacaactttcccctccttgttcagcttggggacggtgccctctgcgctggagaggaaggggcttctcttctctgacagggagccctgcagcctgcccagcttcctgtgctctggcttcttcctcactggtttcagcgattccacactggagcccccagaggagtaatcagactggcttgtcagtctcctccttgtggattctgataaagaactgacctctgaccaagccaggagagaaatggttttccaattgtctgtctgccagtgcttggtgtgctggtttgtattgttggggttctgcttctgggtagcagagcccccatgagatgaggtggaggaggcagacagggagatgaacagggaggggtccttcaacaccagcggggaacacttgaggcagctggagctccccatggagtccctgtcatcctccccactctctgaggactcactttccgactctgaggaaaagaacttgtcaatccattttccaaagcaaacctctctgccttttgtttatctgttttccttcacttctttttcatttttttttccttctgctgcttggcattagaagcctcccatttcttactaccaggcaatattgtatgtgccgagagtctcagcttctctcctgtgtccccatggtgacactcacgtcctcctcgtctgatgtgtctgacagaatatgatgggatgctttctttggtgcaatagtgttatttttagtgtaacttttaacctccattttgagtatagagataaaactattggattttgtttcttttctgtaatacttttttaacaggttcattcagagcacctttctcttctatttcagtgactcatagatatatggtaaaaaaaataaaaaataatgccttc

SEQ ID NO: 473106 - DNA, 670 bp, Homo sapiens
aagtaaataaatggagagatattccatgctcatagataggaagactcaaatcatttttttttctgtttcagttttgacagtctctgttgctaaattttctagtttacaaatctttcattgtgtaatttctaatctgctaataatctcttatagttgtcattttagggatgggagctttcttctatacattttagggattggtgcttccttctctattgatttgggtcaattctctatatattatttagacaatttagtttttaaagatgtctggaaatacaatttgagtaaacaatataatatggcaattccagagcctaataaaatcgcaggctacctgaagggaaatattgtatctcaatctccccaactactggaatcagatcttaggtgacttatgcatatcctttttacgttccttgtacatattctggaatctaaataacttagcaagtctgattaactcaagaatgccaatatgttattgagtcattggttaatatatgatcacttctatatttatatgtgtatcttcaaaatgcaacttttaatcatttaaattttgtgccaaaagaataattacaattaaaatttagacccagtgcccgatcttggttaattgattgacagaatcttttgtctttctaaaatttgaaattatctattctaa

SEQ ID NO: 473107 - DNA, 533 bp, Homo sapiens
tatatcctattggttccgttttgctggaaaactctaacacaaccagtagaaagaaaatccagtgaaaccatgatgaactctgcctctgtatctgtaagaagaggtgttctgtgggaacctgggttagttcagatcatctttggctttacagagcaaacatactttccaataaacgcaaaagaaactgaaaaaggcaaaagaaaaggagacagaaccgaaagtaaagctgtgcctctgcagatcaaacagctgagcgggctacttcccaaccaacttcctaccaaaaatgacacttgtaaggatcttggcactgtacatgatactctaggggctaaaaactccactgacataggtaaaatgtttggagcaaaatctattgatagctccttccaaatttttacccaaaatgttcagtattctttgaagcctgaagaaaaggagacactcaaacctatagttgaaaaacttatatccaagggtcatcttgtagccttcactagtactcatagcattccaatcctatgataaagaaa

SEQ ID NO: 473108 - DNA, 780 bp, Homo sapiens
acagtggctgcttcagatgggttgctgctgccatcaagatttgttgaatggctttgaccaaaatgctgataatgatatggacaatgaaatccatgctgaggttgtctcagatggagataaggaactttttgggaactggatcaaaggtgactcatgttatgttttagcaaggagcctggaagcattttgccccagccctagagatttgtggaactttgaacttgaacgagatttaggacatctggtcaaagaaatttctaagcagcaaagtattcaggaggtgacttgggtgcttttaaaggcattcagtttcaaaagggaaacagagcataaaagtttgaaaaatttgcagcctaacaaggcaatagaaaagaaaatcccattttctgaggagaaattcaagccagctgcagaaatttgcataaataatgttggggaaaccagctccactccacccagtgggtaccctgagtctggcagagtcaaaggagttagaaagagacagaataaacatttaaaaggtggatccaggggactggagcattgaagacttgctcacagcccagagctcttgggctccacccaatttattggtttgcaaaatctttgttctttgggcagatgggagggggaggaagggatgaggaaaaggattaatcagtgaaggagaactcctgagtcatttgataagatgtataacagtggcgattcctgtgaatttccttgagcaaaagtgtgagtctaaactacttaagatctttaacttatcaggactgaaac

SEQ ID NO: 473109 - DNA, 573 bp, Homo sapiens
ggcttgctctcccattgttgcatgtcatgccattaactatggcaaagcaaaccttcaggcttgcccaacagccaattacgcttcccgtctgggtacccacaagacatcttaagctgtgccatgagccagaatccaaggaagaggtaaaaacctcagaacgtccctgcacccccagtttgtcagatggctcagatgaacatctctgtcgagcagatggaaacggtaaaactccccatggaactccactgacctgggggcaaatgaagagactagctcacattgcaaaagacaacctgaggtctcagaacaagctgctgaccaccagtaatctaatggtagctatgatggcagtaacctccctggcggtgagtctcccgatagctgaggcagatcaaaattacccttattgggcctacactccattcccaccactgatgaggcctgttacatggttagaccccctggtggaggtttatgttaatgatagtgtctggatgcctggaccaagagataactgaggtcctactcatccagaggaggaaggaatgttaacgaatgtttccattggttatc

SEQ ID NO: 473110 - DNA, 590 bp, Homo sapiens
agaaaggaagaagacactcatatgcaatatatggctatgggattgggtgacggcgaggcctggaagcctagaaagaaaacagggtttcctggatcaggcccagggtccccatgctatgtgcagcctagggacttggttccctgtgcctcagccactccagccatggctgaaagggtccaacatagagcttggcctgtggcttctgagagtgcaagctccaagccttggcagcttcgatgccgtgttgagcctgcaagtacacagaataccagaattggggtatgggaacctccaccgagatttcacaagatacatggaaatgcctggatggccaggcagaagtttgctgcagaggcagggcattcatggagaacctctgctagggcattgcagaagggaaatgtggggtcagatcccccctacagagtccctactggggtaccacctagtggagctgatccctgacttcccgcaacagaagataaggttggaaagatgttttaagacctcgcagtgaagtgtcagtataccagacaataggcaagattttgtccatgaagaaaggggtgggtcattgaaaaatgagggag

SEQ ID NO: 473111 - DNA, 591 bp, Homo sapiens
gccgcgcacagctcagcgagccatgggtgggggattacatgtttcagctagtttactgccgccacctcgctctggagggctgcttccgggctggctcagccctgccgccacttccggtcacatggggcagctgccggacaccaggagacgatggaaggtctatagtgttacagctctgacccaggaagtcccagggtcttgccttccagaagggtcgcggctcttccctccctcagtccaacgaacaggagcacgtcacctcccgcagctcggggagctggccaggaacgtgttacagcccgtttcgctcctgtccgcagctgggagactgactcgctatcacgagaacagcatagaaaagacctacccccatgattcaatcaactcctatcaggttcctcccacaacacatgggaattgtgggagacgcaactagaaggtatcattcatgagacagaaaatagtttctgttgtgaggaaaatgatttctggttgtgaggacacaactagaagatattattcatgaaacagaaaatggtccctcaccggacactaaatctgctagtgttttgatcttggacttcctagcct

SEQ ID NO: 473112 - DNA, 2081 bp, Homo sapiens
cggccttaacgggcctggaaggtgagcagagtccctacaacgagtggaacggttagcggcacttgctctatgttctatcgaccttgctgtcggaagagagaaatggcagaatgacatcccccatttggcccgctggaaatgcccaccatcttttgggaagatttactggctgtttatagaatgcctgcctatataatatgaaaaagctgctctcaacttctcccccaaaaccttttaaaagaaaacatttgccacatccagcccttctagagtaaagaggttgccaacgtatgaagtagagttagaaaatcacacaccttgcaaattctcattagtttaaaaagaagtcatagaaaatgtcttctggagttgactttttgaaatggagttattagaccacttctggaagcaacacgtccacgtttgttcaatgggctagaggacatggagcagaagacctgagaaggaaaagaagtgccagtagaacgtatgtctgaaactctcccctttctgcctgaagttagaagactacatgttgaaagtttgctttgagcttggttcttcttgaacatgcagcttcaaatcaatgtctgtctgctcataagttcaaccaaaccaggactgccactggctgctaaagggaagaaaaggctccatgaagaattccagcgtacctcctgccctggcagccattctgctgtttctatggaaacattcaccagatagcagcatgctatactgtgcaagtgaagaagaaggcatcttcctttcatcaccacatctagagtgtgaccacttcacagaatgaaagaatgtggtgaacacagttctttattctgacagataaatcgttcaagagaaaggggccagatgccagtgacattttcttggacttcccagcctttagaaccatgatccaaataaactttggctggagacctgaaaaacttgttccacagactcccttttctggcatggtagattgcaccaatgagaagcatttgcacaagggttggaagacagaggaaaagaatgcagatgaaaatgagcaaagggaaaaggtgctgcggcaaagtctgcaggaaaccagttactccaagtggcacagctcagagagaaggtactctctgcttggggatggagaggaaactgagcaccaggctttgcctcagatcccaacactgggtctatcccacagccccaggcttcaggctggtatccacagagcctccaagcctgccccaccaccagaactgatctcaatccccctggctttggacccacccctatcccaggccaacccctgcagacttagattccaagctctttcccatgaccaggttggctccagtggactatcccaacacctggggcggggaggaagtgactaaagtcattgcctaacatagatgacagagaatggatataaacagtggatgacggttatagaatatacaaatatccctcaggtgagaaaatattccacatgtttcacaattatagtatattgaattttcatccaaattcagcagtttggtaaaagaatgaaaaaattaaaaggcagctattgcactttcactttttataatttcataaggtttgtgtttagtaatgaacttggcctcttcaccagctgaggtctttcattatctattatgtcctatatatatttctgaaactaattatccataagtacttatctgattatttctaaaaggaaaaggaaaatttccctctgcaaccctcctccacaggcgttacagttttatgtatatatttgtccagcgttgtctaccaaatgcttagcacaacactgattcctaaataatttatgaataggcaaatctggtccaaatcctgttcaaagcagagagacttcatattaataaagatgaaagattttacctaagaggacacttctgtaaactgaagtaatgagagagaaattgtggaatcccaggaagcagtgtacagtggtcaggaagacagggtaagtgtagaatatactccaaacctgcacatgttgaatgctcagcaatgataaaccagtatcctgtatgaggatgcacatttttagaata

SEQ ID NO: 473113 - DNA, 615 bp, Homo sapiens
gtctaggtcttcatggctgtgaagatgggagtaatgcttcttccaacctgggatggaagtatccctgtcaaagacagaatgatgaactattataaatatttggcatgttctgtaaatatgtggcactcaatcaaaagccatttaaaccttgaaaggacaagaaacataatgaaactgaatgagactatttcagttttacctgttttcttagaatgctttattgtgttgttttctttttcagaaaaagcaaaaggcttccagggcagtgtttctcaaagtatagtttctatggaatacctgcatcagtgcttctgggtgattggctacacttcaactcctgaatgggaagctttggggataaggcttggaagaagcaatccagccccaaaagatggagagtccattaccagctgtcaccctacttgccacaattctgatgcacacacccaatattcccataggaaggacaaccattaagtctgcccttgagcagactctcaccttctttagcatcttatcctctcatcatagcactgttacctaagactgagggcttctaaacagatttttgttggtttaaagtcttttttgtctgaaattgaatagcagtccctg

SEQ ID NO: 473114 - DNA, 569 bp, Homo sapiens
tgttctttctgagctgcagccagagattgctggttggttcataggaacaagcaaggaatctcaggtaagaccttttaaagccaaaccgagccatgggtctattctcaaatacctgtgagttcgttgatgctctcctcttaaggttccaagataaatttggagctcctggacctgttagaaagcgacattctttactgaccacaggtggttcctccaccagggagacaaatttaattgctgtggggcaaagctggcctccctggcctgggaaggaggagactccttgggcacattgcagaaaatgccagccagctgctcctggcaccttgggccatggattccagtcccagcaggcagcagggagcagcgatgagccactcacctcaccagtcttgtcccaaaagggaaaggaaaaggccatggaaaagctgcagttggttcccgatccctgggagcaacagtgggtggaggtacagtttcctccactctcagaaatctcaggatgaaaaggctcaaaagggagaggaaaaaataactctcactcactacttcttgagtctccacattgc

SEQ ID NO: 473115 - DNA, 543 bp, Homo sapiens
gaagcgataatcacacctggctttattgtgtggatacattatgtcacagccaacactttgtaattgtcaacgagtcattccctgcaatttggagtctctgcatgaacttatgtatctcatattcctggagtatgtatcagtaatcttgtatgcctatgacctagttgcgagtcttcagggacagcaaggctctggcttcttcggctatgctagtgggataagacactgtctcccaccaaaatgtctgaacagtggattccacaagcagaggaaaaggtctcaaatatcagaagattttaaaataagtctccaaatacctttattgccagcagatctaattagtttgatcagtcaatcaaacactgcaatgaggggaaattctaatttattgaccacctctcctgtggcagtcactgaaatagaaattatctgctttttaatcaattaacttggctgatgacaactgttgctttgtgctaatatattttatattttcccttatcagaaactgcatctttaatttgaaatattataaaaaagcaa

SEQ ID NO: 473116 - DNA, 1676 bp, Homo sapiens
gcggcagccacagctgccttttccctgaaatccaaatataattctaacccttacagggatgtcatgggaattctgcttcttggcaattttcacggattgtaaaattagcttaccaacttgcataaaaacttctgtggtggaggtagctctcagtgagttggatggggagccagatgagggatggagtgggaaggtagtcttcccctggagtttggctgcccagcagctagactctcctccaactgcccctggccaaattcccctcgacatctgcatcattctgccatcgatggcctgccagtgtctgctggaggtggcaagtgagaggctgaagctggatggggaggttggggtggacccagaggagcagggctggagggagctggctcctctgctggggatgcctctgggtcacgtatctttgaaaccctgggcttgccagtcctacactggatcaaacaggagggctggatcaatcctacactgtcagcaaaggtctgaattgccttacaagtaaactatcgcaaggacaaaaaaccaaacaccgcatgttctcactcatagatgggaattgaacaatgagaacacatggacgcaggaaggggaacatcacactctggggactgttgtggggtggggggaggggggagggatagcattaggagatatatacctaatgctaaatgacgagttaatgggtgtagcacaccagcatggcacatgtatacatatgtaactaacctgcacattgtgcacatgtaccctaaaacttaaagtataataataataaaaaagaatctaaattagaatataatgtggcacaaaatatcctaaatagtacatttaattcacttccatgaatcaatttcatttttggaaaagctctcatcaaaaggaaataatttaaaaaatgttttgtttatactaaaaatatttcaaactgactcagagagtatgaaattttaaaaataaaaatgacactatcacatataaagtccattctcctacaacgcatcataaaacctaatgccttttctgggtttaatacacgatgaaagggtaccaaatcagaggttcacaaagatcacttcgtgctcctaggacaaatgattattcataaaaatcagtttcatttccatatttgctttaactatgtaaagcaaaactaaaaacttttatctggacatacaggagctttcatatgagaatttcaggactagcataatgatacaatgtaattcttctatccaatataataatgatagatattctgactcaaatatggaatatcctgtatttggcttttaatgtttatcccaaaattttacaaatggtatagaagagcaacataggcttttccagaaaataaaagattatcatattttaactctactcaaccgttctcaggatatattctacagacaccaatagacattttcttatgtttatcagtttctttatatactcttgcatctcaaagcttcctgttagttaggaattgcatttggctcctagaattaggttggtacaaaagtaattgcagtttttgccattccttttaaattattgccattacttactaaattatgccattatattttaaattttaaaagtaaatttgcaattacttttccagtgccataaaaatgtatataatcatgacacagaagattggc

SEQ ID NO: 473117 - DNA, 449 bp, Homo sapiens
ttctagggcgcttagagccacagaatggaccgccgagtttcaggatcccctctggtggccgtttgttcatttggtaggcaacagccttggtcaacaatgcaatacctttccatacagagaaggcacgtcctcacatccaaagttccccagactttccactttgcaaggacttgcttgaagggcaactttgccaatacccaccttgttgagagcgtgagagaaaacggacagatgtacctctcagatggaagggccagaggccatggagggaaatggaaaacagaaccagagattgtcagatgggttaatcatagaatgtactccattgccaagaaaaggagttctcactattccttccaatcagtgtcccagggtggaggatccccaaaatatcctcaatttatagttagttggaccacagaagctgcctgtagacatgactgaaaggg

SEQ ID NO: 473118 - DNA, 931 bp, Homo sapiens
gacggtattgtactttgatgaccatccctgagatctttttataaaaaacccagtctttgctgaccagacaaagcataccagatctcaccagagagtcgcagacactatgctgcctcccatggccctgcccagtgtgtcctggatgctgctttcctgcctcattctcctgtgtcaggttcaaggtgaagaaacccagaaggaactgccctctccacggatcagctgtcccaaaggctccaaggcctatggctccccctgctatgccttgtttttgtcaccaaaatcctggatggatgcagatctggcttgccagaagcggccctctggaaaactggtgtctgtgctcagtggggctgagggatccttcgtgtcctccctggtgaggagcattagtaacagctattcatacatctggattgggctccatgaccccacacagggctctgagcctgatggagatggatgggagtggagtagcactgatgtgatgaattactttgcatgggagaaaaatccctccaccatcttaaaccctggccactgtgggagcctgtcaagaagcacaggatttctgaagtggaaagattataactgtgatgcaaagttaccctatgtctgcaagttcaaggactagggcaggtgggaagtcagcagcctgagcttggcgtgcagctcatcatggacatgagaccagtgtgaagactcaccctggaagagaatattctccccaaactgccctacctgactaccttgtcatgatcctccttctttttcctttttcttcaccttcatttcaggcttttctctgtcttccatgtcttgagatctcagagaataataataaaaatgttactttatacgtatatgcttttgtttcattcttatagtaagagcctttggaagaggagggagaagttgggggagaaaaaaa

SEQ ID NO: 473119 - DNA, 610 bp, Homo sapiens
aactgcaaggggttgagagctgtgggctaagtgaggcacccctgttcagcaatgagatgcccagttcccatggccctgagcagcccaggaagaagcagagatcttccaggaatggtgataatgggtatgagggaaggaccctgggaggaggggcactgagtgtcagagcttgcgtgctgtgcgaggagacccgctgctctcttcagagccagcagacaggaaaggttaagtctgctgaagcttggcccacagctgccccttcccccaggtgctctgtcccagggagatgggagtttatctataagcccctgactgaggctgctgcctttctttcagagatgtcctccccagagaggaggaatccggaggggcagtctggttatagcggctttgtcacactgcagtgggttccacctgtttcagaaagtgagtgtcaagcactgcaggatttatttgatggccatggaattgagaagcaggaacatgactcacaaattggcttctctgctagtgaggggtaaagtggttaaaatatagggtttctccaatgaaaggactgggcattaaaaacaaagggaggaatattcatgtcttttctggaaataggttg

SEQ ID NO: 473120 - DNA, 621 bp, Homo sapiens
ctgctaatcctcaggaacaggaacgaacctgaatcacttataatgggcaacaagcaagcctaccctttgcttcagagggagacttctttattgtacctgggagaacctgctgtgctgggggtccaaaggtgttcctggattgctggccacaacactccacagacaaagcccttcaccagtcagtcatccagagattctgggcaggccatctggcttggtctttgggcaggcttgctgctggcatcctcaagtggacctattgacttggtataccagggtaggcagtcacttcatgagggcaggcccgaagcctctaatcacaggagccagactaaatcctacttcctggagaccaatctggctctaaagcaggccttgaacccatgtcttcagggtaccgagtccacagagcctcgcctggaactgggaaaatccagaacttgtgtctgtgggggctggcctagtgacagaggccacagaggctggcctagcatcagggctttgtgctcagatggacctaaaggcttggggagggtttgggatttgacaggaccgtatcctgcgactgtgagtgtcagtctggagctggggtctgcaagtgctggcctgaagttgtagctg

SEQ ID NO: 473121 - DNA, 690 bp, Homo sapiens
aaaggggcaagatttttctttaaatgtcacagaaaaaaacagaaatagctctaggagtccttacacaggtccgagggatgaacttgccaactgtggcatacctgagtaaggaaattgatgcagtggcaaagggttggcctcattgtttatgggtagtggcagcggtagcagtcttagtatctgaagcagttaaaataatacatggaagagatcttactgtgtggacatctcatgatgtgaacggcatactcactgctaaaggagacttgtggctgtcagacgatcgtttacttaaacatcaggctctattacttgaagggcctgtgctgcaactgcgcgcctttgcaactcttaacccagccacatttcttccagacaatgaagaaaagatagaacataactgtcaacaagtaattgctcaaacctaccccgctcgaggggaccttttagaggttcccttgactgattccgaccttaacttgtatactgatggaaaagataatagggataaaagtacaaattggacatcttttggcaaaggaagctccttaaaactcagccttggttacatcaagaataagaattcctgtgtcatccctaagaagtagatttttatataactcaaaaccagctcaagaaatataatatttaaacaaacttctcagtgcttggttaataagcattgttatg

SEQ ID NO: 473122 - DNA, 1239 bp, Homo sapiens
tcatcagttaaggcaggaaccagtcatctggatgtgaataccgccatcttgtggcctgttagaatatggcctcgaaaattgaaaccaaagtgcatttacacctgcaagcaccctggaagtggaatccttctgcaggaatctggttcagacaggcgctctacccagggtacacagggctgctgctgtgtggtgcagggccagtgtcaatatcagcagtggtgccacgtggcagtgaggagcaggagcgagctgacccatccagctttctacagatactggatcttctgttgatagcacaggagaaatttaagacggctgcagaaatttgggtaaataatgaggagccaaatgttaattcccaatacaatggggaaaatgtctccagggcatgtcagagggacttagcatcctgcttccaagccactccagccatggctaaaaagggccaaggtacagcttgggccgtggcttcagagggtggaagccccagaccttggcagcttacacgtggcattgagcctgtgggtacacagaagtcaagaactgaggtttgggaacctccacccagatttcagaagatgtatggaaacacctggataaccaggcaaaagtttgctgcaggggtagagccctcatggagaacttctgctatggcagtgcggaagggaaatggaaacaggaggatacagccaccagatggattcaggcagaaacagaaatactggagtggaatcactaccagctctcagttggtcagctgtcagaggccagagaatagatatcaagaattcaacacagatcaaacacaccagaaaggggctctgcacaggtggagatcagatctttacattcttctctacccagactgaccctttacaccttatctttatgcctgaaatgcattcagcttatcagctctgcaagaatatagagagattggtaaaatcttcacctctggttttgtggtttttctatatggttttaacttttaatattaaaattgttgatataactagaattatttttaatgtacaatgtataggtataacttgatttaggtataacttgatttttcccttcacttagccaatttcccaggaccatttcctgagtaattcgagcttcatttcatttaataaagagaaagtaagggtggagcatgttaacattagggtaatacatgttataaagcctttccttagtgccactgtcatggaagcatattctcatttgcttatt

SEQ ID NO: 473123 - DNA, 1090 bp, Homo sapiens
agaaaactggaaactgcgtcaagggtgactgaaattctgcttctgaattcttggaaaggaactctcctcatatgaccgcagggagatgggcaagacccggtgtgagaaccaaatgcagcgcttgttcagagcctctctcacatggggactgagaggtcctgatgacaacaaggccttcctaggccctctagactcagccactcctgtctccctcactattgtcagatgtctccagactctaaccaccagtatttcaggcccaagggatctcagacttgtcattctctttagtactgcagcattccccagaggagagaaccagaaatcccgtagaaaatgcagaagtagaagaaaggctacactgtgtttcctccagacacttcatttactttctgatacccaggaatttctggaaggagaagagaatcctggaaaaagcaagaagcaggaagataagaggcaaagaagaagagagccccacccactggggcaagctggggccccagatgaaagagcaccagcctgacgaatccataagaacaggaacaacatgaaagtactgagggcccaaatcaccaattttgttctctgggaataataaagacaacctgaagtaccaaaagtctaggcaagttataacagttaaagaattacaattctattaaaacacaccaaagactaactgtgtgtttaacttgaatgtaacttttcttcactgattctaaaagtatcctaggatcttagagtatctcaaggtcataattgtagataatactgtaatggatttggctactgttattacgtaatcacaactacctttgttaagtacttactattatattttccagaaaccatcttaaagggtgtagatgttttaccttatttaataatcacaccaactttttgagttagatgttaatgagattattcccatttttcagaacaataactaaggcttaaagaggtcaagcaactttgttggcaaaaccaggatttgttccagtgtctgatgactctgaaacaattgctcttaactagtctatcacctcttacgtagggcattggctccaaatgcaagaatcttaaagtt

SEQ ID NO: 473124 - DNA, 1067 bp, Homo sapiens
tggagactcgctcattgctagcacagcagtctgagatcgaactgcaaggtggcagcaaggctgggggaggggtccccgccattgctgaggtttgagtaggtaaacaaagtagcctggaagctcgaactgggtggagcccaccacagctcaaggaggcctgcctgcctctgtagactccacctctgggggcagggcatagccaaacaaaaggcagcagaaacctctgaagacttaaatgtccctgtctgacagctttgaagagagtagtggttctcccagcacaaagtttgagatctgagaacggacagactgcctcctcaagtgggtccctggcccctgagtagcctaactgggaggcatccccagtaggggcagactgacaccccacacagccgagtacccctctgagacggagcttccagaggaaaaatcaggcagcaacatttgctgttcagcaatattcactgtactgcagcctctgctgctgatacccaggagaaaaaggtctggagtggacctccagcaagctccaacagaactgcagctgagggtcctgactattagaaggaaaactaatgaacagaaaggacatccataccaaaaccccatctgtacgacaccatcatcaaggaccaaagctaaaggaggaatttcaaacccatcgtaaagaagctaaaaaccttgaaaaaagattagatgaatggctaactagaataaccaatgtagagaagtccttaaaagacctgatggagctgaaaaccatggcacgagaactacatgacaaatgcacaagcttcagtagccgatttgatcaactggaagaaagggtatcagtgactgaagatcaaatgaatgaaatgaagcaagaagagaagtttagagaaaaaagagaaaaaagaaagaaacaaaacttccaagaaatttgggactatgtgaaaagaccaaatctacgtctgattggtgtacctgaaagtgacggggagaatggaaccaagttagaaaacactctgcaggatattatccaggagaactttcccaacctagcaaggcaggccaacatttaaatt

SEQ ID NO: 473125 - DNA, 984 bp, Homo sapiens
cttctggaactgctgagtggggaactagttctaaggaacaaggttagtgccccagcagttggagcagtttgccccccactgcactgtgggagcccctttctgggctggccaaggctgggaggtgtggagggagaggcacgagcgggaacctgggctgtgtgcggcgcttgcgggccagctggagttcccggtgggcggggacttggtgggccccgcactcggagcagccagccagccctgctggccccgggcaatggggcacttagcacctgggtcagtggctgcggagggtgtactgggtcccccagcagtgctggcccaccagcgctgcgctcgatttttcgccgggccttagctgccttcctgcggggcagggcttaggacctgcggcccgccatgcctgagccttccacccactccatgggctcctgtgcggcccgagcctccctgacgagcaccaccccctgctccacagtgcccagtcccatcgaccacccaagggctgaggaatgtgagcgcatggcgcaggactggcaggcagctccacctgcagccccagtgtgggatccactgggtgaagccagctgggctcctgagtctgggggggaatgtggagtctttatatctagctcagggattgtaaatacaccaatcagcaccctgtgtttagctcaaggtttggattgtaactacaccaatcagcaccctgtgtttagctcaaggtttgtgagtgcaccaatcaacactccgtatctagctgctctgctcaaggtttgtaaacacaccaatcagcaccctgtgtttagctcaaggtttgtgagtgcaccaatcgacactctgtatctagctgctatggtggggccttggagaacctgtgtgtggaaactctgtatctaactaatctgatggggacgtggagaacctttgtatctagctcaaggattgtaaacgcaccaatcagcaccctgacaaaacaggccactc

SEQ ID NO: 473126 - DNA, 684 bp, Homo sapiens
caccttgtgaccttaacatctgcaaagatcttgagaatctaagtttactcattgcttccttcaggaacctttccttacctctgtaatcagtcaaatcctccctactcctgggctactcaaactatgaagcatcctgacaccagcattaagttactgctgctcctcccagcaacccagagctgctggaggccacctgcattccttggcccatgctcccttcctccattgtcaaagccagcaaaggtagcatctgccaatatgacttctgcttccataatcacatgttcttctatgactctgaccttcctgcctttgtcttataaagaaccttatgattattttgggcccacccagataatccaggataacctccccatctcaaaatccttaatttattcacgtccacaaagtcccttttaccagaaggagtcctttctgggcggtggtgcttttgcctctctggtgacctgggacgaatgtcaaatgccacagcaaagcttggaaatattgcccaggtgttacgactctctacatatatgttccaaaaaagtcttcagatgacaaattaagattgacttagaaaactcagtagtggtcctaaacatcttaaataacagaattataattaaaaatacatcatttcctatattctactttcaccaaatgatatgtacaatcatttcc

SEQ ID NO: 473127 - DNA, 3667 bp, Homo sapiens
tggactggctgattttgggtcatgtggtcaaacctcctccagtcaactttttcatctgcagtgaagggcagagttattggccatagaggccgcctcttccagagtctgagggtgtggcagtggtacattacatcccttgcagctcccatgtccttctggctccagcaccatcagtttaccatggagattctcgacctccaggggctaccatgccacttctcatacacccctggaaacctcctttcacagcaagacactggggcctttggtatagagatttgctacagcgatccaagcagctacataaggaccctgtggtcagaaaatggagtcacagctggggggtggaatccctgtttaatctttgaggactggagcctgacagtggtctcagactgtctgatcggaatgcaaatttcctacctcaattttgcccctggtgagatgcttgccaaaagacacgcccacaagtgtgccacgtcagtttaccattgccatgacaacactaggaacaacacccaggaattaccgcctctttccatggcaatgacctgatgatccaaaagttactactcctttcctagaaatttctctgcaaaccaccccttaatctagatgaaattaaaaattaatggataatttttcaaaggtagaattatgattctcatactaatataaaatcaacatgtcaaagattttacttaaatgattaactaatgaggaaaggagtaagatacaactggttcaaaaggaagaatttaaagagccacagatatataggtaagaaatgctgaaatgaattaacaagtacagttgatgcaaaactggactccccagagggcaacaatcaattacaccccactggatacaatctatttgcatttctgtggatacagggaatttgcagttatttctagctttctgcaacttgcatagttgtaaaatcgcttaaagaccaagaaaggcagttataacccagtcatcttttttggccatttgaatgtcctttacaatttttcctgcaaccatgaatctatttcctgtctccatgaatctatttcctgtctccatgaatttgcctattctggatttaaattccatatcagtggactcatagaatatctggccttttgtgtctggcttcgcttagcataatattttataggttcattcatgttgtagcatgtgtcagtacttcattcctctttatggccaaataatatttccctcagtgaatagcgacagtttgacttcctccttacaaatttggaggccttttgtctgagtgctctggctgggacttccagtactatgttgactaggagtgactttagctcttacatttagatctttcctcccttttgagttaatattttaaaattgaggtataatttatgtaacacactattaaccagtttaaaatgtacaattctgtggtatttagtgcatttataatgttgtgaaccactacctctctctagtttcaaaactttttcaccaccccagaagaacaacctgtatccatgaaataatctctattagccccctccacaaatcccctgttaaccactagtctgctttctgtcttgatgaatttgcctattctggctattttatataaaaggaatattctagtatgttaccttttgtgcctggtttctttcagttagcgtagtgttttagagattcatccaagttacttcattgctttttctatggctgaatattccattgtatgtatatagtgccatttgctgatatattcatccattgacggacatttgggttgtttccacctttttgatattataaataatgctgctataaatatccgtgtacaagtttttatgtgggtatatgttctcattcctcttgtatgtatgtgtgtatatatattatatatatatacaaactttgtacatatttatacacacatatatacattacacacacacacacacacacacacacacacacacgggagtggaattgatgggtcatgtggtaattctatatttaacttttaaaggaactgccaaactgttttctatagtggctgctttattttacatacccaccagtaatgcatgagagttctaattcctccacatcctcatcaatacttatcttctgttttttaaaaaaaagttattatagccatcctcataggtattaagtggtatgtcattgcagttttgatttacatttcctaatgaccaattaatttttgcatatggtgtgagggaaggatccaacttcattgttttgcctgtgtctactcagtgctgtttgttgaaaagactcttctttccccacatagcaatcttggtacccccgtagaaaatcagttgatcatagatgtatgggtttcttcctgggctgttaatcttactccattaatcgacatgtctattcctgtgctagtattacactgtcttgattgctttatagtaaccaggaacctctgtagtaagttttgaaatcaggaagtgtagtcctcctactttgttatttttcagtactgttttggctagtctgggtcccttgaaactccatatgaattttacaatcgttattgattcctacgaagaaatcagttgggattctgatagggtttttgttgaacctgcagatcagtttggggagtttcactatcttatcagtgttaagtctactgacccataagcagggaatttttccatttatttagaccttctttaatgtctgaaacagttcatttataaggcccatccatgtggtcaactttctgggacttacattttgaacctatgaaacattcagggaaagaagttttgtggaaggtggggaagggtataatgaattctggcttgatgcctcattcttgaattctccagaggtgatgaggatctccccttctgagctgcaccctttacagaagtccttatctgtcccttgaacgcccagtttcagtttttccctcttgaactcttagcattctgttgttatgaaatctcctggatatctaattggatgtatattactagagtgcttctgtattctgacatcaagtttcattttaattatatgggagaaaaactaattcttttaattaaaccaacatggatattaactattatcattgacttctagcagataaatcttacatgcaaaaaacagggcaaatacctcctgcactccttgggttgcctgtggagcagcctctgggaactcagtctcaaggagatgaagggcccatgggcattcctagttccatggaggatggggactagtgtggagcaaacttgtcaggatcatttattcattcacttttagttgtatgtttgctaaatccttacaaataaggtgtaaaccaaaaataaaatcctaagcaccccctcgctacctacctgaaactgaatggatcccctctggaccaaggggaccccagagaaacctgaaaaactgaattcctggtgtattagtcagggttccctagagggacagaatatgagattatatatatattatatatatattattaagtattaacttacatgatcacaagttcccaaaataggctgtctgcaaacttgagatgcaaggagagccagtccaagtcttaaaactgaagaacttggagtccgatgtttgaggacaggaagtatccagcatgggagaaagatgt

SEQ ID NO: 473128 - DNA, 640 bp, Homo sapiens
ggtgaccctcatggggacagtacacccgggagattcatgttctccaggtacccggagctcacggactgaccctcttctcctgcctcctctggcctacgtgctccgggactagagaaggacctgactccttgcttcctactggaacacgcaaatcaagctcactgtggctgagggatggctgcccagccggctgagggtcatgttcagcagtttctgcttatctgtcccctacccccaaagtcagaggtggagggaagtagcagaatcaagtcaatttccttcatgattggaaaatattttaaatcaagagcagtctcaaccacacagccatacccttctggagactggaaagattgccccagcaggagtgcccctgggaaagtcctaaatcaagcacccagaaatactcaggcaagtacacttaatgatgttgatggaaatagggtagtgatgattaacagaagcaaaagagagataggagaaagaaaatatgaagaatcaaggaaggagaaatcaaagaactatagagagctgaaaaggtggcttggtaatttatttttcagtatgggtcagtgtgcctgataaactcaagagattctccccaagctcagaggaaaagggaaaataaattgagagagct

SEQ ID NO: 473129 - DNA, 670 bp, Homo sapiens
tcctctcttctgcaaactgcagcagtaataggtgaatgtcacaaatagaggccagtggagggtgggaggctcccggggaggcattgcccaatgcagggcaaaggttacaatgtcaggctaaggctttctaatgaagctcctggttgtcatgtggtggcagaggggagagctgaaatcaggattcgtgcatataaaagttgtgtggtttgtggttttgcttttattttgaatttcttcctggggagaagcaccaaagcatcttcagtgcttagacctggaaaggtcaacgtccatcctggagatccagtcacaaccacaggaccacagaagggcagagctgggagggcctgtggaggtcactccatccacccaccccactcccagaaccgtacaggctgggcagtccaggccaattcaagcattcccttctggttctatcaagaaagtctaggaggggagtggagagctgcagaggggaaggagggaggggatcagaaggaggaggaggaggagcaggaggaggaagtagaggtgaaagaggaggagagtggtagactgacagaaatttttgctcttcctggcaccctgctcctacccctggacctaactgagccttcccaggtgctatgcactgaatgtctgtatcctgcatgatgggattagtgccctt

SEQ ID NO: 473130 - DNA, 579 bp, Homo sapiens
cagggagtttggcaagttcagcctatatgccgtcctcagctgaagcactgagccctggtccagtcacttgtggccacagaagtaaggttggttttatgcattaccagtcacacagatatgctacagatatgcttttttgtgtatgccacagtcacacaatagttgtattgtgtctggagttggttcctgcctgtgggttcacggtctcactgacttcaagaatggagccccagaccttcgtggtgagtgttacagctcttaaagatggtacggacccaaagagttccatcataatgaatggatccaatatggcaaatacatcaccgagtgtaaaatccaaagaggaccaggggttaagtgggcacgatgaaaaggaaaacccatttgcagagtacatgtggatggagaatgaagaggatttcaacagacagaagctttaaaaattgtaactttttttctggagatctaggccacagaaaaagatggaaaatgcttagtgaattgtaaaatcttatgggtcatttctaactagattttttttttttttttactctaagcttctgtcattttcccgttggg

SEQ ID NO: 473131 - DNA, 588 bp, Homo sapiens
aggagccagacgaaaggaagctcagagatgtttgttattactgaccttctgaagcctacttccgacaactcgtcaaactcattctccatccagttttgttctcttgttggcaaggagtcagacccctcagctgcagatctgttggagtttgctggaggtccactccagaccctgtttgcctgggtatcaccagcggaggctgcagaacagcaaatattgctgcctgatccttcctctggaagcagctgtcagacagggacatttaagtctgcagaagttgtctgctgccttttgttatactatgccctgcccccagaggtggaatctatagaggcagtaggccttgctgaggtgtggtgggctccacccagtttgtgcttcctggcctctttgtttacaatgttgatctcagactgctgcgctagcagtgagcaagctccgtgggtgtggaacccgctgaaccaggcatgcgagggtatctcctggtttgacggttgttaagactgtgggaaaagtgcagtacttggtcaggagtgtaccgtttctccaggaaagagtaaaagcaacaacaaaaaaccctagaaagtt

SEQ ID NO: 473132 - DNA, 1122 bp, Homo sapiens
ccagcctgaatcagcttaggttggaaccggacaattggtgtagttagcaggattctgaagtgagtgagtcctcagcacctgatgatccctggttggccatgtggccccaacatgggttgcggtacttggtggcagctgtgctgtccagatgggccctggtggaaacatgggcagaggtagacaggtcccccatgagcatggagaaggccctgaagcacctggaagcatacaacaccgagaaggagggtgcctttgccagcagagttggatgggcatttttgactatgctatggaaagtgcatgcccagtccctgcgggatacagcacaggtgagcaggcagttggcacaagggaaaggtgaccatatcctgactgaatggctgatggcagccatgtggacagggtggaatgatgccagagaattatcaaaaactgtgagtaaatggcaatcatatgcagagctggtggaggacaccagagatcagaggccacatgtggaattggcaatccactggtaccccaccaatgtacagcaggtgttggtgctggtaggtactgatgcagattatagcctcgtctatgggaaacgggataagtttttaggcaaggctgcatacacagatggttatagaggccagtcagtgaaaatgacagtggactatcaagaactaaataaagtaacagcccctttacatgcagcagtcctgtctatcacggatttgatggaccacctgacgatggaattgggacagtaccattatgcagtggatttggctaatgcatccctttcagatgatatcgctccagagagccaggaacagtttggcttcacatgggaagggcgacaatggactttcacagtgttgccacagggctacgtgcatagtcccaccatatgtcatggtctcgttgctacggatttagccacctggaaatttccaaaggggatccgcctattccattacattgatgatattatgttaacctctgattctcctgcagatttagaagctgtggtgcccctcttgcaacaacatttggcagcatgaggttgggctgtcaatgaatccaaggtgcaagggcctgggttgtctgccaaattcttgggagttatctggtcgg

SEQ ID NO: 473133 - DNA, 1381 bp, Homo sapiens
attgcagccatggctctaaaaggacaagaagattatatttatcttttcaaggattcaacacatccagtggattttctggatgcattcagaacattttacttggatggattatttactgatattactcttcagtgtccttcaggcataattttccattgtcaccgagccgttttagctgcttgcagcaattattttaaggcaatgttcacagctgacatgaaagaaaaatttaaaaataaaataaaactctctggcatccaccatgatattctggaaggccttgtaaattatgcatacacttcccaaattgaaataactaaaagaaatgttcaaagcctgcttgaggcagcggatctgctacagttcctttcagtaaagaaggcttgtgagcggtttttggtaaggcacttggatattgataattgtattggaatgcactcctttgcagaatttcatgtgtgtccagaactagagaaggaatctcgaagaattctatgttcaaagtttaaggaagtgtggcaacaagaagaatttctggaaatcagccttgaaaagtttctctttatcttgtccagaaagaatctcagtgtttggaaagaagaagctatcatagagccagttattaagtggactgctcatgatgtagaaaatcgaattgaatgcctctataatctactgagctatatcaacattgatatagatccagtgtacttaaaaacagccttaggccttcaaagaagctgcctgctcaccgaaaataagatccgctccctaatatacaatgccttgaatcccatgcataaagagatttcccagaggtccacagccacaatgtatataattggaggctattactggcatcctttatcagaggttcacatatgggatcctttgacaaatgtttggattcagggagcagaaataccagattataccagggagagctatggtgttacatgtttaggacccaacatttatgtaactgggggctacaggacggataacatagaagctcttgacacagtgtggatctataacagtgaaagtgatgaatggacagaaggtttgccaatgctcaatgccaggtattaccactgtgcagtcaccttgggtggctgtgtctatgctttaggtggttacagaaaaggggctccagcagaagaggctgagttctatgatcctttaaaagagaaatggattcctattgcaaacatgattaaagaacagtgtctgacacagagtaagcatgctataaatgttacgcatgattgtcctgaatgtcggtattgaaggacatgtcagctcttatagagcagaaattgatttcatgtgaagttgtgaccactgtcacaccagggtgggagaaggtagcagaaagccc

SEQ ID NO: 473134 - DNA, 1033 bp, Homo sapiens
tgacgttttggagcgagtgaagcacacctgaagcctagtcccctttgtaaacaaagccaccaggaagtttgaactgggcggagcccaccacagctcagcaaggctgctgtggccagactgcctctctagattcctcctctctgggcaggctatctctgaaaaaaaggcagcagcgccagtcagggacttagagatataacccccatctccctgagacagagcacctggggaaaggggaggctgtgggtgcagcttcaacagacttaaatgttcctacctgatggccctgaagagatcagtggatctcccagcacagtgttcgagctctaataagggtcagactgtctcctcaagtgggtccctgacccccgtgtatcctgacggggagacacctcccagtaggggctgacaaacacctcctacaggagagctctggctggcatctggcggctgccctctgggacaaagcttccagaggaaggaataggcagcaatctttgctgttcttcagcctatgctggtgatacccaggcaaatagggtctggagtggacctccaacgaactccagcagacctgcagcagagggacctaactgttagaaggaaaactaaaacagaaaggactagcatcaacatcaacaaaaaggacatccactcagagaccccatctgaaggtcaccaacatcaaagaccaaaggtaggtaaatccacgaagatggggagaaaccagcagaaaaaggctgaaaattccaaaaaccagaatgcctcttctcctccaaaggatcacaactcctcgccagcaaggaaacaaaactggatggagaatgagtttgatgaattgacagaagtaggcttcagaaggtgggtaataacaaactcctccgagctaaaggagcaccttctaacccaattcaaggaaggtaagagccttcaaaaaaggttagatgaattgctaactagaataaccagtttagagaagaacataaatgacctgatgaagcttgaaaaacacagcacaagaactttgtgaagg

SEQ ID NO: 473135 - DNA, 673 bp, Homo sapiens
aaaaccagaaaggagctattcatactgactccaggtatgcctttggagtcatccacacctttgaaaatttgggcagagcgaggtctcattaacactgtagtccctatcttctcccccagaaagcaagaaaagctagaagaaataggagccaaagaaagccatgagggaaaatgggtactaccagacaagagagaaatgctgtctaagcccctcatcacaggcaccactcctacagtttccagtacaccaacatcaacctggggaccatatcctcatcaaaagttggagagaaggaaaactcgaaccagcttgggaagggccctacctagtgtttctaaccaccaaggccacagttcgaacagcagaaagaggatggactcatcacacccgggtcaaaagagcaccaccccatccagaatcatagacagctatcccagcgccaactccaaccaagagcagagcttctctgctgaagttggtccaatgctctatgaaatactaaagagcaaggatggactgccccaactagtacttgcagtttcttgaaaccttatattcattttactaaaggagttaccccttccaattgtcagctgaaccaatgtaatctagtacagattaccattgctgctccccagagttcttcccctccattaagctgtttctgtggtat

SEQ ID NO: 473136 - DNA, 855 bp, Homo sapiens
gccggaagagagtcacccacgagtcatcacttcttcttggatctcaatatgactgatgtctatataaaaaggcagaatttggaggtagatgtgcacacatggagagtgcaatgtgaatatcaagatgccatatacctgccaaagagagaggcctggaacagtgcctttcctcacagccctcgaaagaaaccaagtcttcatctcgcagcctcagctgcagtcactaccgctgctcctgagagcccttgcaggggctttgagacttcagagaagacctgccacctggagtctccagcagaaggaggagagggagtgtttgccaaaatacagcagcagagtccagtgtgcagatcacttcagagtcagcgtcttcacagtgtcctcagggacagagacctggccaagttgtgctccttccccaggggcgagggttttctccacacacccctcctccaagatcctatttcagtaattctcatctttctgaagttgctgcctctgtgattcttgaatgtttgctttcttttttgataccaatttcacatgactcaacctagtatttgcacatctgaatttaacagtaaatcataaatataatggtcactctaacaaagggagaatattgctcccttttcagtgatagacagatgcttggcctatcactgagatagagtaagagtaagagatttattgagggacaacgcttgtgagggataaatgagcagggctgtcagagcctggtgtagtagtaacccttgtggagaagggcaggaaagagggaaggaaggaagactgggtaggcaaagtcttagactggtttagctctcagaaaactttagcaaagctgtcgggtgg

SEQ ID NO: 473137 - DNA, 607 bp, Homo sapiens
gagttaatgggtgcagcacaccatcatgtcacatgcatccatcttctatgggtttcttttaaggttatttgctggggccctgcaaatcagactgacagaagacggcgtaacaggagaaaaacagatttttcagcttattatcctgtgcagggtacaaggaggaatcttagtgatgagacctactgaggaaatcaggagccactattgccgaaaaggcctttgcaaaagagcgctgaatctggctggtaacttgttcggagctttgaggatgggcagatttccagtctctctactaagagagcagctctcttctgtgatttattgcaaagatacaagtacatttccagtttcaatattattgcctggatgtagtaatgactattggctctttcaagcatgtaaacataaaaacaccagagaaggcagaaggtgtatttgtttgagaaatattattgtttggtccaactgttttgttatttttctccaaaaatatgacaacatgaacaagtaatgtgaaagtgccaagaaattgatgtttcatggcaaagccaacagtctctggaatgcttaaatcatgttacatagagctatcatttccttctccctg

SEQ ID NO: 473138 - DNA, 1331 bp, Homo sapiens
cagggccaccgaggcaggtggaatattctagaagagcaaattagcaaaataaattgaagagagaggcaatcaacacaagaggagaaatctccaatgtctctatcgtctcatccccggggaatcacgccttcccagtgcctacttggtctcacccttggtgcatcatgcctctccagtgcctggactgactaatctctagggattcctgcctccccagtgccttcacagcctcatctctagggaatcctgcctccccagtgcctgcgcggtctcatacctagagcaatgaagaaggcacggaatgaaaggtgatgtggatgcggctgcagatcctcttcctgcctgcaggagccctggtccatgggcaggtcctctcagtctcaccttcctcgtgtggcaacagggataaccattcgtacttcatgcactggttttaagcatcagatttcctcatgtctatagagtgccacattaaaaatcacttaaatgccagtgggctgtcctttttgtgtgtaatttttttttcaagctattttcttaagacattttgccagaaatggaattactgagtcaaaggaggtagacattagccacaaatgtcaaacttacttatgggcaattttaaaatggcctttttagtttcaagtactagtatttgaaaaaagatattcatctataatggatccattatatgtagggcaagcagtcctatttcttttaaacaactttctaaaaaattaaaacaaaaataaacaatcaacatcagaaaatgaaattatttaactttgattttcactagctgaatagtgcgtatatttagagggacaatatgtcacctgaaactttggaatcattacaaggagaacccgaaagtacagccaggaccatcacatatcacgtggctgttaagggcagagccgggactcgaacccagaaggccagcaaacagtgtgtgaagcaccgacgtcaaaggccattaatgcaaatgcaaattgacatttttcatcaaggtctaacagtacaccaacagatcattaaaaagctcgatattcatttcttcagtgatgaggttcatctggaagttaaggatttaatttgtggttttgaattttacctttttcctgttagagcacaaaagaaaaactattgcatcacgaaagttctctatcatgtgaatcgtttccatacacatacaacagtgaaatattgccaagcagcaataatgaaacagtcacccttttcctcacgatagccatatacattctcagctctccaattcgttgccaccattagctctgttttatttattgtgcctgaagcctgatttccaa

SEQ ID NO: 473139 - DNA, 613 bp, Homo sapiens
agcacgttgtcacctctcaagagcaccacagcaaaggcatagtggctccacagcatttcatgttctcatgcttttcatttgtttccagaacatttgggtttgcttgtgggagccattttaggatgactgctttaaaacccttgtcatataatttctacatcttactcgtcagcctattggcctttgttgatttaccttttctcgttcaagttgtgattttcctggcttttgtgattccaaggggctgcctgctgggtaactcggagttgttcaataccttaggcttttaccaactacctggacaaagtgaagggtatatttatagtgagactcgatcgtatgttgttaataccacaagatgggctgaattcacaaatagagcatttctgatggataaatttggacttaatgttgatgaacagaaaccagaacatgtggcgttcattgttcctagcttacgttttgtgcccatggctatcatctatgcctgggacattttaacctacatagagtagtgtggtttgcaatactttctcgaccttgatgttttcaaatttcatgttaatttttattggaacccattagcatgtatttcccacccccaattcaccct

SEQ ID NO: 473140 - DNA, 1157 bp, Homo sapiens
atcctttttggacacatacatttccctcaggaactcaccatgaggcagtttctggggatctaccagaaagcaaataaactaaagccagataaactttctggctttccaagaccttttatcactattcctgtctggttcacatctcactctgtggcctgtgcctattttaagttgaatccagaaactcaccctcttcaccttgtggcagctaggacacaggcctgtgagctacactcagttgatcacgggacccaaggaagacacagtcacaagagaatggtaacaggaagggctatgggagagtccactctgcagcgcatggaaagcagaaacagccagcttttagggacagtaggggccatcctagagcagggacttattccctgggttgttggtgttggtggcagtttgcatgttcaggagtggtggaagaattccaggggaacattccaggctgttaacttaaaaactgttcctgatgcttgggaagtctttgcactctgtccatgtgagtcttttccttcatatgtgagccctcgcctggcgagccagagaaaacagggtccagatggccgagaagactctcatgatgacaactcccacagaagagggggcctcaggactgatgtcctcatgaatgagctcaggttcctgtcctgtatccctcagagtggagaggggacaactgttgccaataatagtcttgggagtcccaagggtttgttaaactcaaaaggccccactggtcatgtaacagtccaagggtctagatcagaaggtggatctctacacacggagattcaagcagatgcaggctctttcctgtatcatcctgggggctacttcaccctctggggcagtgctgcccaagagaactttctgcagttatggaaagtctatatccatgctgtccaatacaatagccactcatcacagatgacacttgagtgattgaagaatggctagtgtgattgaggaaccaaatttgtcctttgatttaaatttaattcacttaaatttacacagccacatgtggccagtagttactgttttggacaacatggatctaaggcctttaaatcaccagcatgatcaaggctcgattgccatgtctaggttctaataagatatggatgtctcactgtctttcccagact

SEQ ID NO: 473141 - DNA, 1058 bp, Homo sapiens
tggagagggttggtcaacaagtagaaacaaacggcacaccaggagattatatcccgcgcatggcttggagggtcccatgcccatggagcctcgctcagtgctagcaaagcagtctgagatcaaacttcaaggcggcagccaagctgggggaggggcgcccgccattgctgaggcttgagtaggtaaacaaagcagcccgctgggaagcttgaactaggtggagcccaccgcagctcaaggaggcctgcctgcctctgtaggctccatctctgagggcagggcatagctgaacaaaaggcagcagaaacctctgcagacttaaatgtccctgtctgacagctttgaagagagtagtggttctcccagcacggagtttgagatctgagaacggacagactgcctcctcaagtgggtccctgacccccaagtagcctttctgggaggcaccccccagtaggggcagactgacaccacacagggctgggtttccctctgagatgaaacttccagaggaacaatcagacagcaacattcgctgttcagcaatattccctgttctgcagcctctgctgctgatacccaggcaaacagcgtctggagtggacctccagcaaactccaacagacctgcagctgagggtcctgactgttaaaaggaaaactaacaaacagaaaggacatccacaccaaaaccccatctcaacgaaacaaagctggacggagaatgactttgatgagttgagagaagaaggtttcagacaattaaacttctccaagctgaaggaagttcgaacccatcgcaaacaagttaaaaaccttgaaaaaagattagacgaatggctaactagaacaaccaatgcagagaagtccttaaaggacctgatggagctgaaaaccatggcacaagaactatgcgatgaatgcaaaagcttcgtagccgattcgatcaactggaaaaaagggtatcactgattgaagatcaaatgaatgaaatgaagtgagaagagaagtttagagaaaaaggaataaaaagaaatgaacaaagcctccaagaaatat

SEQ ID NO: 473142 - DNA, 922 bp, Homo sapiens
actgaatttggctttggtgtttgtcatacactatgacacactttcaagtgattgacacctatcagaggacccaagaggactggactgaaggaccagcagcaggaaagggcaaagctcctgacattgaaccacacacggtggtggtagaaaagccgggcgaggaacgtggtgcacctcagaggctcaccaaacggagagagggtgtctggcccatggtggtgggtagatcccaatccctgtcctggccccaagatgcaacctttaaccacgcaggatgtttagcacttagaccaccttctgaggcacaaccaaaggacctgcaaactctaagcgagcacttcagctttccaggtatctgctgggacactctctctctgatgtgggcatgcaggggtccactgaggcgattccagcctgtggaggtgcaccttggaccctactcatgtggtgagtccagagccacctggactgactctttggactggagcaaacaacctggggttggaagcacattctttcgatagacaaactgagagcttaggctacttaactgacttttaaaaggggtctctattaagcaatatattttgtttggttttctcaaagggaccaaatgtacacaggaaactcaaagatttagtgcccacttactccttttctgagccagtatcactagtgaaattataactaggaggagccacgagggtttaacattctagtgctaagcaaccccaaaattgttattttcacccctaaatttcttaagttggcttgcctgtgggcttatatttttattattttctgtaaattcctcatcctacctttttttctttttttctggattagacttctagtcaaatgctaccagccttcaaaataaacatttcaggaattttgtgtatgagggggtacaggatagaag

SEQ ID NO: 473143 - DNA, 1585 bp, Homo sapiens
gcctgaactactcctccgttcagcaatgtgaggcagcaccacagattcagaatgagctgcttgtaatctactgcaaacccttcctttgtaggcctcgtgcagcagaggcccacaccttgagcaggagccttagtatgcattggttcgccttgatcctcctggaaccgtgtaatgcggtccagctgtggtcgctatcctatgggacaggggtcatccgtgtggagaagggcacagaagagggtggtcagggagctggacaggtcattgacatgaaggttgaggggaaagacgggaaatgcaatccagaagccagcagagacctggagaaggcggtgtgcccagatggcagggacttgactggcatgaccaaatggcatagacatgctgctgcttcccctgttgtgcggaagacactaggagaaggcgaggcttcggacacctctagtcctggaacatgtgaagatgaagtggaaagggaaggatgtttctccagccatgggaagacctgggtgggggcccattctgccattaacctgctctgtgacctctggacttcagcttccacagctgtaaaatagttttatatttagtttcttggggtcctcatttctgaaggctttcatgttacataaaatatattaaataaatttgtatgtttttctcttgttattaatgtcttctgttataagggcttcagccacgaaccttgcgatggcacctgaacccgaggtgtgaagataacgatgaggttgacttccagaattgtatctttaatctgatccttctccaagactccagaactccgtgtacagttgctttcatctcagcctccacgtatcctgactcacactcttccacttaccctcaatcctgttctgaggtcacttagtagattattcagactcatgactctggcaccttctcttcctcagcttgccctatatccaatcctgttggttattctcctctgtaatacatttccaatctttttcctcttcaccatggctatttctctgacctagtcaggccatcaccatccttgctttcattgatggaacagcctttaactgttctacccatctttaatctctacccctttgtcctgtcaagaacctatatttctaaaacactaatctgatcacattgcccctcttctgacatttcttcatggctccccagtacaaatagaataaaatttaaatatcctaggcattcaaggtcctccattatttaaagataccctatcattctaactttgtcttcaaaacaccaagtaccccactcatgctgggccagtcaccatgccctgaatcctcctgcactcccttcactcggaatctctgcctctctctccgtttataacaccccatccttcctgtcacttcagacagaaccctcatgctgcctgcaccaggaagtcctcctagggctctcacaagctgagttggcctcttgctcctgtgggttccctggtgccttgctgtacctctggtgctttatattcttcatgcatctgcaccacctgatcccatccctaaagaactgtctgctccaaagacaggcgctccttacctgtggcatcttc

SEQ ID NO: 473144 - DNA, 655 bp, Homo sapiens
tttaatccttttttttttcctatgccctgccccccagaggtggagtctacagaggcaggcaggcctccttgagctgaggtgggctccacccagtttgagcttcccagctgctttgtttacctactcaagcctcagcaatggaggatgcccctcccccagccttgctgctgccttgcagttggatctcagactgctgtgctagcagggagcaaagctccgtgggcgtgggaccttccaagccaggcatgggatataatgtcctgggatacctcttcttctctgatgccttcaccccagaagcagtgcgcatcatgatgagctacttctggtccttctctttcaggtcccttctctatggccattgctgtgaactaccaactcctagacctgtgatgctgagaaaaactcttaaagagtctgatagtgaagaactggaaataacacaggagacgccaaatttggtgccatttggggatgtgagtaggggacatgacacaccactgagggccacaggggaagtatcagaatggtcaggaggcagaggacaggagtgaggggagagtctaggccttttgggggttgctgagggaaaggcaagccaggaaaccagtttaggattggctagtttgaataatttcaggggtctttgggttat

SEQ ID NO: 473145 - DNA, 522 bp, Homo sapiens
tttgtcaaagatcagatagttgtcattggtccccaatctttttggcaccagggactggttttgtggaagcaaatttttccacagaccagcatggggaggaaaattactgagccatccatgtttatgaatcttgcaccacctccagaaagaacagatcccgtgaccagactggtccgttttattgatgacatgctgattggacttggtgagcaagaagtagcaactactctagacttactgataagacatttttgtgtcagagagtgggaaataaatatgacaaaaattcaagggccttctacctcagtgaaatttctaggggtccatggtatgggtggtgacatcctgtatacagtgaaggatgggttgttgcatctggcttctcctacaacaaaaaagagatacaacacctggagaaataaccacagctgggcctctttggattttggaggtaatctgttcctcctttgggtgtgttattctggcccatttactggatgactcaaaaagctgccagttttg

SEQ ID NO: 473146 - DNA, 606 bp, Homo sapiens
agagaagatatttgaggtgacgtttccttgctttttcctgattcatgtgtccctacattgatttctatgcatctgatggaaaagtcacctctttcagtcgcgtcagatgtgggcacacagctgttcagctggcctggaatcctatctgccaggggcagcccgtagggatgtttcttgggcctgagatgtgggggcacagctgctttgctggcctggtgatgtgtctgctgggggctgcccacagggccatttcacaggtctgggatgcaggtgcaaagctgctcaggggcatggccactggaggagtgtggaatcataagcttgaattggggctacagcaaattcaagaagagctggaaaagatgaaaaaagaatatagaaatctgaatacatggatagataaagctaactatttagaaagcattctaatgccaaaattggaacataaggattctgaggaaactaatatagatgaggcatctgaaaacacgaaaagtaatcatcctgaagaggagcttgaaaatattgtaggagtaggatgagaaaaaagttaaaatattaactatgacctgtgaaaaggcatttttattagacattgtgaactat

SEQ ID NO: 473147 - DNA, 569 bp, Homo sapiens
tcctcatcaatcttaagacagaaaagtccttcctggttcccctctccccatgccaacgtgatgccttccttctctggtacccgtggaacactgaagtaccccgacaatcacaaacctggaattcctgttgaatttagggacaaagcagttctagggacaatacataggagagttcttgctggagtagggggtctatattggggaaacaggggacagaaatggaaaagcaactttggttatggcctttgttgcaaccttaccttttctggtggaaggccacatttggctgccacagctgtgatgcaagattctgttactagggctccttgtgggaagccaaatccacgaaaggccgtattggatggtaaatttgtcatgcatgcacggccctggaacctgaacagccagcaatttgtcaccttcagcgccattggtgcctggaatgtcttcagctgttatcacatcaaccacttcgggtagttcaagggccttggacacatcaattgatctaaacaagagatatttaagaagtagaaatcactctgggcagggtggtggaggtctgtaat

SEQ ID NO: 473148 - DNA, 590 bp, Homo sapiens
gagctgcttgatgtacagactattccacaccccctgttatgaaggaatatgctgactttgaggagtacaacaggaaaatgttattactctttatcttctggaaatcctaagcttgttgtagtcagtttccatttgctatgccaagaatggctatccaaaactactctctctgtgccaaagattggctaccctcattcctatgggacatttccagttagagctgcagaatcagtttctccattctgtctgctagtcaaagataattcttctattttcaaaatatctttaaagcacaacaacagggcattagctcaggctcttagtagagaaaaagagaattctcgaagaattacaactgaaaagatgctattgcaaaaagaagtagagaaactgaattttgagaacacatttcttcgcctaaagctaaataacttggatggagatccaaatatgtcctccactgacattgttgggcggggatgtgctctttaacactgggctgtcccaagccttttctgatggtactgctgatttggaagagagttgtcttattatagcctgaaaatctttattggttctggttctaaaac

SEQ ID NO: 473149 - DNA, 613 bp, Homo sapiens
aagagcttcagagacctgcagagatgtcggtactaccagctgcagagaggaacaaccctctccagggcttcctctctggtgagagcttgatacttgatgggacaacctgcctacagagaggagccacccactgcaggtctcctctgagctgtcgtacacttaataaagctcctcttcatcttcttcaccctttactagtctgcgtacctcattcttcctggatgcaggacaagaacttgggcaaaggcaccactagccacagaggtttccagccagaaaatcgacaccccaaagatgccataacacaagtcctcatgcccttgtgtggtcttctcaccttgagtctggggcattctctgaaaacaccaggcaccagggctaaaggaattgcctctaggattcgtttgttgcagcttcaacttgaactctcttcctcagccataggttcactgccagtgcctcgctctcatgtcacaatgacccaaagttggaaattgatagcctgaacctcactgagccaacacaaacagtttcctaagaagactcgtgtatttattaactgaagaaaaatgaataccttttttttaaccatgtgtctcggaagcccatgaac

SEQ ID NO: 473150 - DNA, 1188 bp, Homo sapiens
cctgccacgcatggattatacacaaagtctgttcaagtctgttgagggagtgaagggtcggggggcagcaatcccctgtttggcctgccagcacaatgaccagtacctagtagttgcagtagcctttgatgaacaagccagcaaatggtacttttcttccttatctgaacataccatttattttgacttagattatattctcctgccttttaaaaagatggacttcagcagaaatctttatgatattggggaacaactggacagtgaagatctggcctccctcaagttcctgagcctggactacattccgcaaaggaagcaagaacccatcaaggatgccttgatgttattccagagactccaggaaaagagaatgttggaggaaagcaatctgtccttcctgaaggagctgctcttccgaattaatagactggatttgctgattacctacctaaacactagaaaggaggagatggaaagggaacttcagacaccaggcagggctcaaatttctgcctacagggtcatgctctatcagatttcagaagaagtgagcagatcagaattgaggtcttttaagtttcttttgcaagaggaaatctccaaatgcaaactggatgatgacatgaacctgctggatattttcatagagatggagaagagggtcatcctgggagaaggaaagttggacatcctgaaaagagtctgtgcccaaatcaacaagagcctgctgaagataatcaacgactatgaagaattcagcaaaggggaggagttgtgtggggtaatgacaatctcggactctccaagagaacaggatagtgaatcacagactttggacaaagtttaccaaatgaaaagcaaacctcggggatactgtctgatcatcaacaatcacaattttgcaaaagcacgggagaaagtgcccaaacttcacagcattagggacaggaatggaacacacttggatgcagagaaagctacaacctcactgattacagaggggaacacggaaaggaggcaagcctatttacccccacagaatcctggaaaaattcagcaattggaagtacaaagtgtagatctctaaaccaacttggttccaagacactggcagcagatacagacttacctctggagaagctgaaagctctagctaaaatacatacagataatgacatctggagg

SEQ ID NO: 473151 - DNA, 1655 bp, Homo sapiens
acatgaaatgctgctgcaggcccctgatctgcagtctgcccacccactcaaagaccaggtggagcccatagcctgggcctcacaggccagagtctgcaggccagtgtccagctcagagccctcagtgccatcttcatacaggagccatcagctggcagtcctccctgtctcccccagggcttctggcagccctcagaccacagtgtctgtgcaaggtctggaaggctcagagcccagcctggacccaaacccagaagaaagactgctccttacagttaagaaggccttgcccctgcttctgccctcaggagcttatagtgtaattggaaagatttgccccaaaccatcaggggctaatacaaaggagaatgtggaagatggggagctgggtttcctgtttcctgcaactgtgacccgccctgctcttcagaatttacctgccttgtgtcgtatttgcacagggctgtcctttgtgactttgaaggtgacaatcagttaatccaataacagaatcctgctaaagtgctaacgggaaagggtgaaaaaaaggcacccatatccctcccttctgactcagctcccctcccccttccttgagactctgcccccgctgctatgtcttcatccatcagtaataaagcgggaacaatagggggtttctttctaattaaagggagcagttagtgtttccacttcaaagccctgagagagaagacttttgtttcttgggcctgggagctctgggagccccgattggattgggaagtggagctccagacccagccaagcattaagctcgtgaacctgagagccccccatttgcaggcagagaagctcaaatttaaaacaacaacgtaatttggtaacttcggctctgataaaacagttgggggaattccttctctcctagcgtctgaagccaatgttattacaggtggtggctttgactggtttttggtgctggagtgaggagtcagtcaatttagcacattggaacgcttgtttccatagctgcttccatgaattttgatagcctgagtctgttgctgagagactgttaaaagactaaccaatttctgtcctgaggggtgtgggccagacattagaacgtggtgtctcaacctagttgccattcctggcagttaatccagtgcctagtgtgtgaacggctctggattatatgtgtgtgtgtatatatatatatatatatatatatatatatatatattttttttttttttttttttttttttttttttgtgggttgtgggactgaatcaagtaaaggcatagcccagaggactttgaagagtccctgggcagtattccattagcggcccccagccaaaaagatgatactctctttgatcatttttagcaaatttccaatattaaaaatttttttcctgttttttttttttgcaaactcaggctgcctaaatgtacatttgttaacacaactccatccttgtattttaaacatagctatggaagaaaaaaaaatttactttcagatataaatagagccaaaaatgtgcagaaaatgtagagcacagtgaggactttcaatgtaatccttttgtggagaaaagtttccaaaagccatcccctcctcgaggtttcaaatagaagaaaagtagatgttttgtaaactc

SEQ ID NO: 473152 - DNA, 1524 bp, Homo sapiens
cccaacagctcattgagaacgggccaggatgacaatggcggctttgtggaatagaaaggggggaaagggctctgacaaggttcctgggccccctctgagatctctagaggacagtgcccttctgactggaggaatacttgccattcattccattctggcgagggcagaagcctcaggctggagcgtgtcctatcccctcgcctcaggcctccagacgcccctgaagtgcccttccatttgcccttctccatcccccactgagggccgcacagctcttgggtacacccagatgcagctggcagtgtgtcatgcgagggagatccctaaactagaagacctgggaactagatctagctctggtatttactggcagtgtggacttaaggaagtcacattgactttagagatctctgctccctctgctgcaaagggttgatatctgctcgagggtgatcactgtcttgacttcaccatagattagttccacctggttttgtactttgtgtaaagtaaaactgcagttcttttatatttgttgctgtgtagtatttcattacatgaatataacaccattatttatccatattgttgatgagtctttgggtagctttcaagttttgtattgtgaataatgctgctatgaacactccttttttaggagacagagtatcactgtgtcgcccaggctagagtgtatgaaactcttgtacatgtattttaacgaacacatttcttttggatgaattcctaggatggaactgttgggtcaaagggtatgcacaggcgcatctttaaagatattgccaagtagttttccaaagaggatgcgccaatttactttccagccaatgtttggtattgtctgtctttttcattttagtcattctggtgggtgtgtagtggcatcttattgatgttttcatttgtatttcttattatttaaaaagttgagcacatttttatatgatttttgccatatagagatgctcttttatgaagtgctttttcaagtcttttgcccatattgagtagtttgtctttttcttattaatttgtagaagttcttcatatattctggatctgagtcctttgccatatatatttgcaaatatctcatcccacgctgtggattgcctgttcaatctcttaatcatgtctttcaaagagcagaagttcttccttttaatgtaattcaacttatttatgtttccaggaagtatgttttggctggttatatctagtcatactggttaaatccagttttccatgctgtcttgtattttgggggaaacaaaaagatgatttccaaggaaaacctcccagttcaggtccagtggttctcctggaaacattttccatttgtaagcttgagcacccctggttcctatgcctggaaacctcccaaccctttggactttcccaggaatcaagattaattaaacagacagctcttccctcttccattttaaatctgattagcttactccagagaatctaaaaggccaacaaatatataaagagttg

SEQ ID NO: 473153 - DNA, 488 bp, Homo sapiens
tctctgcttcagacaccagcccacttaaagacctggcatccccttcatgaggcatcagtcatggcccactggctcccaaaatgtagaattcaggttccaggtggccatcagcatggctgaggatttgctcaagaagaaactgaacccagtccccaacttccgtgggcaacaggaaaacgccacagaaagaccaggtcgtagagctaccattccaggcatgagtttccctgggacaaacttgccatggaaaaggcccaagagaggaaacaaagttgcctccccacaaggtctgtcggtactgatctcatatgcgggtaaagaaggacccagcggaggaagaatgggcttagctgagcacattcacacgtatgagaggaaactttgccacagtgtaggaagaaccaagtgggtgtgggaagccaagttggtcattgtcgcagcaatccggatgcataagaagtaaagaggagagaaaaaattagtcatct

SEQ ID NO: 473154 - DNA, 828 bp, Homo sapiens
tccttcactagatttaccagttgtcatcagtttgccacatttcattaatctcctcctacctctttacatctgcttcctcctgcttcacatccaggacttggatacacagcacccctgacctgcatggatgccttaggaaatgtctgagcttaacaagaatctttagaatatgctctttccctgccaccgccaggtcgtgcggacgcaaaggctttggtgtgttcaagattgggcttcacccataacccactgccatggccgaggaacgcattgctgttggaggtgtaatggacgttaatactgctttacaagaggtgctgaagaccgccctcatccacaatggcctagcatgtggaatttgcaaagctgccaaagccttagacaagcgccaagcccatctttgtgtgctggcatccaactgtgatgagcctatggatgtcaagttggtggaggccctttgtgctgaacaccaaatcgacctaattaaggttgatgacaacaagaaactaggggaatggggtggctatgcagaggccaccactagggtccagctacttctgaccacactggaggacatttctctaaaggtcttaaaggagaatgagaacttgctaagagaggggccagctggagtttctcctaaggagaaacagattggaagtgtagaaggctttcaaccagaattcagctgtgaacatttgaccacttttcaaagacctctaacatatctggattaggttcaaaagaagctgttacttagagttcagtttggagcttggattgaacaatgaccaccaataaaaatgtacaggtgtttgcctgtgtgtt

SEQ ID NO: 473155 - DNA, 590 bp, Homo sapiens
gcagcacatacctgagattcatttcctctagaatatgcattggtatatctcctaatgctatccctcacccctccccccatcccacaacaggccccggtgtgtgatgttccccttcctgtgtccatgtgttctcattgttcaattcccacctatgactcagagcagtttgatcgtctgaagacttcttctctcaacttgtcaaagtcattctccatccagctttgttccaatgctggaccctcagctgcaggtctgttggagtttgctggaggtccactccagaccctgtttgcctgggtaaaagcagcagaggctgcagaacagcagatattggtgaacagcaaatgttgctgcctaattgttcctctggatgttttgtctcagaggagtacccggccatgtgaggtgtccatctgcccctactggggggtgcctcccagtttggctactcaggggtcagggacccacttgaggaggcagtctgtgcgttctcagatctcaagctgtgtgctgggagaatcactcctctcttcaaagctgtcagacagggacatttaagtctgcagaggtttctgctgccttttatttgg

SEQ ID NO: 473156 - DNA, 763 bp, Homo sapiens
gtggagagtctttatgtctagctcagggattgtaaacacaccaatcagcaccctgtgtctagctcaggctgtaacactcaccgcgaagatctgcagcttgactcctgaagccagccagagcacgagcccaccagaaggaagaaactcggaacacatccgaacatcagaaggaacaaactccagacgctccaccttaagagctgtaacactcaccgcgagggtccacggcttcattcttgaagtcatcagagaaagagatgtgaaaacaaaagcagggaccacagtgaatcagaaattagatgatgctactggctttgaaaatggagaaagaggtatgagaaaggcacacaggcagcttctaatggattcttctctggagcctccaggaggaatgaagctctgccaataccttgattttggaccaatgaggcacatttctgacttctcaccttcagaactccaagatgataaacatgttttatttaaagccactaaatctgtgagttgtaaaagggctgagaacgtgggcagcagttcagagcatcaggagttttgtgtagaaactgacacactcagaactggaatctagttatgataatggaacatatttgtcattagtaaaaaaaaaaaaaagtaatggactaacttggatggataggtgggaaagttgtgatacccagcagataaactggttataataaacacattcattctgttccttcaacataatataagcattttgacaattaattttttaaagact

SEQ ID NO: 473157 - DNA, 611 bp, Homo sapiens
ctcctcctttggctattgccatgactctgctcctcccgctagtggctcaggcccagggagatctgaattctatttctgagactggctggagttattggagatcctgtagggaaaccccacccactgagaaaggatgggtcagggttagacctgaagaggcactctcaccacagactgccacagctggtgtattttgggctcttaccaacaagatacaatattccgtctgtgaagagaaagaaataaaggacatccaaatcaataaagaggaagtcaaactgttgctgttcaccaatgatatgattgtatacttagaaaaccctaaagactcatccagaaagctcttagatctaataaatgagttcagtgaagtttcaggatacatgatcaatgtacacaaatcagtagcactgctatacaccaatgatgaccaagctgagaatcaaatcaagaactcaaccccttttacaatagctgcaaaaaataaaataaaatacttagaaatatacctaccgaggaggtgaaagatctctgcaaagaaaagtacaaaacactgctgaaagaaaccatagatgaaacaaacaaatggaaacacattccatgctcaagga

SEQ ID NO: 473158 - DNA, 1135 bp, Homo sapiens
cgcctggctgacactgtctctttttctctctctcctcctcctccttctcctcctcctcctgcctcctgattttctcagtatgtctgttaggtcggcttgtgtggaaggggacccaagtgggttgctgctgctggctcaggtggccagcttttattcccttatttggccccgctacatcctgctgattggtccattttacagagtgctgattggttcatttttacagagtgccgactggtgtgtttacaaacctttagctagacacagagtgctgattggtgcgtttttacagagtgctgattggtgcatttacaatcctctagctagacataaaagttctgcaagtccccactcaacccaggaagtccaactggcttcacctctcaatctcccatctaaacaggacaccccaactgttgtcgggaattgggcgatgaccgctttagctacttcctgctggatacttgatggcctcgatcctagaggaaacaaatttgacaaggagtttaaaaatacaggcccaaaggcaagtaatagcaagatggctgtcacaggacctagaaaggggtgaagccatgtcgcccaactccggaggttggtataagagtttgaaaggcgtcgtctgttttcagaagccttttcctgtaaatgccaggcagcatctcatactatccctgactggttagtgtaaaaagaacactcttcccctaagaaggtgcatcatcctcctttctcagcagtgaagaggtctaggccttgacggttctggagaggcactgatgccaaagagtctatttgggattgtagagtaagcatagatttcgttacttcttgcaaactgtctgagaaatcctttgagaatgtgtggtattagcataatacatgttacactgttaacttttagcaaactttacttttgttgaaaaccttgtaagtttggcattttaatttttctttgctattaataaaacctcgttcagtccatattaacttagaatttgtgtctacaatgataacaaggtggtattggagtgttagagggttatggagaagaccttcaattatcaattataggtttcaaatttaccctggcttttaaagaaatagggtgcactgttttttctttactacttct

SEQ ID NO: 473159 - DNA, 625 bp, Homo sapiens
gaaaggggtccgatggtactcactgcttggtgattgtccctttgttgtcaccaaaatgtgtccggaatttattgcttctagtgggttcttggtctcgctgacttcaagaatgaagccacagaccctcacagtggttcgtccggagttgtttgttcctcctgatgggttcatggtcgcgctgacttcaggagtgaagctgcagaactttgcagtgagtgttacagctcataaaggtgaagaaactaataaccagaaagatgaagcttcctctaaatgttacacaatttgtgagaaagtagttttcaaccctcaccctccttccaaactccacactaaagcaggtcctggtatctattgttcctctctttgtatccatgcgtactcgatgtttagctcccacttagaagtgataacatacagtatttggtttgctgctctggtgttaatttgcttagggataatgacctccagctctatccacgtttctgcaaaagacatgatctcattctttcttatggctgcatagcattaaatggtgtatttgtaccatatttactttatccagtcaactgttgataggcatcttggttgatttcatgccttcactgttgtgaatagtactgtg

SEQ ID NO: 473160 - DNA, 1776 bp, Homo sapiens
gattgccgctgactgatcagggtggtggttgctgaagtttgctgagagtgatggtttccagcttcatccatgtccctagcgggggagggatagcattaggagatatacctcatgtaaatgacgagttaatggatgcagcacaccaacatggcacatatatgctcaaggcctccctcttcaaagccctagtggggcgagaggaaagaggaaccatgacaattccgtatgtggcaaatcactcgacctccagtgaactcatttataatgggttgaaaatatccaaagatgggaagactgccgggaagatagcaggagatgctaaagagaaaacggcacccaagaagaaacaacacaagcataacagttatggcagcccacctcattttcaccttctctttgatttaccaccaccaccaccttgctgttccctggagcttcctgctttccctaccactgtctttcagctgaagccaatgtggagaaaaaaatcagtaacaaggttctgggttaggtaataaattataaaaattaaatgtttaatccaacgaagcaaattttagataaatgatggaaatagttactgttattagtaaggaaatatttatttatttatttattagggaaaatgaaacagctgcatatttaatcaattaatatgttaatatgtatgttacagaattatttttcaatccacatttagagaaagtataatgcctttaacaagaacacttgtattttgcaataagtataaaaataaaaatgcaaaaaggatgcttatgtaatttctaatgctaaaatagcactgaactatatcattggtggtatttaaaaccctaagaaatcattcaatgataatattaacaaatagggcatatctttcagtcagcttgacactactctagacacaagcataactgatattcctttggtaaaatgcagggcagagtctatgaaggaacatctgatgtctatagtaaaattaaggtcaaggacttggcagaatatgttacagattataacagatgttcccaaattagatcatatttttattaaaatctatagagatgttcagtcagtagaacctagaatcacagaattgtagaacaaatggtaatatttagaggctagtcatccccatcattttaaaggtgaagaaactgacactcaaataaggttaagggcttagcccaaggtcccagatttggttagcagtatttgaatcagaactgaagtcatttctgctatcacaggttgtctctcattggcaacaaatgaagaaatattttctttacatttcaaaaatttagaatatattatattatgtggtagtattagactaaggaataataacaaaatgaaccactgcattatttggatcttttctgattcctgctcctgaaaattgcccagttgttatattttctattaaagtccaaatggcaaggaatgttaccattcaccagacattgaacagatatcaaactaatattaaatctgcaatgcacataaaaaaattcagtagtaccaaatatcagcaaatattagcaccatgctagcatgtgggtggtaccttttaaaattcagttaataagtaaacactttcacagttgagactttcacaagatttaacattatccagagtttggatgcaatgctaaacttccatgaatcacaatagatttggcaacaaatgggcatatattaccctagcaaactcaaaaacaccacagtgaatttcacatgtgttcttttatggatacatcaagttgacaatac

SEQ ID NO: 473161 - DNA, 842 bp, Homo sapiens
cctggaggtatgaggtgtaataggcagcctttttcccgtgaactaccctgcagtgtgacttgtgccctgctgtggccagtgctgggttgtggggatgggtgctgggatgaccacattctttcccatagccctgctcagtgtctggcccacggcaggtgcccagtaagcactggcaagttaatgactgctggcctgtcacccagccctgcctgcttgccccctgctcaggagtccctggaggaagatggagaactaagtccagagaagggtacagtgggctggggccatagttcggaccagggagtcagtcctacctccatgtggcggcagcctgaagcctgcttcgcgagggagcacccaaccccgtttagagaaggccttgcaaatgatggaaaggcggggaagggtggtgtgacccagactgtcagtgaggaagcagtcctcagggtcaagatggggagcaaggagaatccagggcaggttaggagtgcgggcctgaaccctgtgaccagcatctacccaggaactcctcaagggcagcctctgctctctcccttgatgggaaaagacaggactgcagacatgcctgcaaaccatgggagtatctgtccatttcccttccatcaggtcatgaaggagtgagggcaggtgctgggagaggtgcgaggacttgagggaggagttggtaggagaagggtccagggaagaggagattgaggaaatggcccgtggagctgccctgagcccaggtgggcgcattcaggggcagagatggtaccagaggaaaggtgcctggtgttgagctggcggtaagtgttggcgccccaggtggggatccaccc

SEQ ID NO: 473162 - DNA, 492 bp, Homo sapiens
tggataaggatgaaggggtggccagcccctccacacctgtgggtgcttctcgtcaggtggaatgagagactgagaaaagaaagagacacagagacaaagtatagagaaagaaaagtgggcccaggggaccggtgctcagcatatggaggacccacactggcactggtctctgagttccctcagtatttattgatcattatctctatcaccatctcagagaaggggatgtggcaggacaatagggtaataatggggagaagggacgagcaggagacagatgccttcctcttatctcaactgcaaagaggcgttcctcttttactaatcctcctcagcacagaccctttacgggtgtcgggctgggggatgatcaggtctttcccttcccacgaggccatatctcaggctatcacatggggagaaatcttggatacacatcctgcacagccgtaaatccattaaaccttgagtcaacacagcacatgtttctgc

SEQ ID NO: 473163 - DNA, 552 bp, Homo sapiens
cctaactcttcaatgcccagacactgaagaatgtctgctagcatcaacgccattcaggaaaaccatgacctcatcaaatgaattaaataaggtgccagggactaacgctggagaaacagatataagcgacctttcagacagagaattcaaaatagctgtgttgaggaaactcaaagaaattccaaataacacagaggaggaattcagaattccagcatataaatttaacaaagagattgaaatcattagaaagaatcaagcagaaattctggagctgaaaaatgcaatcggcataatgaagaatgcatcaaagtcctttaatagcagaatggaccaaacacaagaaataattactgagcttgaagacaggccatttgaaaatacatgcctcaaaggggcaaatctaatagttattgcccataaagtggaggtagagaaagagataggagtagaaagtttattcaaagggataataacagaaaactttccaaacctagagaaagatacctatattcaagtatgagaaggctagagaacaccaagcacatttaa

SEQ ID NO: 473164 - DNA, 749 bp, Homo sapiens
ggtagcaaggcgggtgcgggaggcagggagggcagctggctgctcgcttcctcccccaactccctccccagcgtggccagctgcaggccataaacaagccagcacctggagggcgtatcgagacattttggcaccaaaataactaggagggtaagggctgtgctgacctctgctctccagggattggtcttccagcccttccctccagctctctcacccacgtagttccaaaggatgcgtgagccagcacacgggtccacacctcgctttgtctgggatcccatccaagcttcccaagtggagcctcctcatctaaatcccaatctccaggacccgaacagctggaatccttctgaacaaccccagatgctgggaaccttcatgtgtatggaacccataccctggccagccctctgtcgccatgttccatcccagaagcctgatccacagatggaccagagcctatgcatctccatcctctccttggccgccatgagcctgttcagtatctgtgccatcagcagcaggcccgggctgggctctgccatcgctgaccacggggtgttgatcctcccagccaaagctgagccagttggattctccttcccaataactgcccactgggaccaagagacgcagagctgggaacgtatggtgctgagctgcatgaagagccgccctggagagtgggtccctgacccctgaagcttctctgattcctgcttaccccaggtgtggcagctcaggtt

SEQ ID NO: 473165 - DNA, 1062 bp, Homo sapiens
gcaacaggacatctgaaaagccccgtgatgatggctctgggagaaactgggctaggaactcagagcaaataccatccgtatcataactccctaattcctgggcgtgacataggcttattccgggaagcaggaagagagctttggagtgctctcaatctgttttcaatggatactgtatctgaggaaaaggaggaggcaaagccgactccaggctgccagacgagcggctgggtgatgatggaaccattcagcacgatctcaaatatagggaaagaccagatatgtcctctgttctttccctttacactctgtgccctgcggggcttatctttatggactatttcaactgggcccctaatgctgtggcttctggctgggtttggccaagcagcagcaccagcaggggatcaaagagtaggaggagggagagatgaggccacttatccgtggctgcctctgtgccaggctgcaggcaaacagcggccacaggctctcctgctgcactctgggcgccaggaactgtccagcctgaatggctccccagtgtggctgatgccaaggcgcatcgctgtcccttgctgattttcttcaactttgcccacaccttgaaaatgactcataaaattgtcctcaagtaccctttttgaatgagctacttgtttcctacagcttttctgactattgtaagaaggatgacaaatgtgtttgttttctaccgctgctgtaataaactatcacaaactcagtggcttaaagcaacacgaatttattctcttacagttctggaggtcagaagcctccagtgggtcagcagggctgcgttctttctggaggcgctcggggagaatccatttctttgctgtttccatctcctctgggctgcccacattccctggctcatggccttacaaaattctaatctctgcttccgcagccatgtcaccatctcctactctgactcctgctttcctcctatgagggtccttgaaaaatagcaagtttgattttcacatccatatgtctgcaggagttggaggagatatggcatgggctgttggttat

SEQ ID NO: 473166 - DNA, 629 bp, Homo sapiens
ctcccaccatatgatatgctcctcctgcttcgcattctgccatgagtaaaaactccctgagacctcatcagaaaccaagcagatgctggcaccatgcttcctataatatagcctgcataaccatgagacaattagacctcttttctttatacattatccagcctcaggcaaaccctggggctcatcattcacaaatgtttattgaaccaggctctgttcagacccagagaacacagcagggaaccaaccagaccaagtccctgactgccgagaacagccatgactgccacgggaagcaattgctggcagttgtgtgctccgtatggcaaagtcactggataacagctgctgaccaaactgtgattggtggggcagctgggaggattcaccgtcaattggcagcaggtgggctccacagcccacatcataacctggctctggtggagggtggtgacatcaaggagtgctgcaaaggccaccatcattggccatggccaaaggaaccagcactggaaaaagggagaatatcctcctgggaagatggggctccactcgccccacagcagtccaccccaggcttccagaggaagcaagaaaatgatgttctttcattataatccttcactctg

SEQ ID NO: 473167 - DNA, 706 bp, Homo sapiens
gggctctgtagggaggcaggaggcagattacacgtgtccaggagcttcacgactgtgtccagaagcttcacgactatgtgtggaatcacgaatgaatgagtgtgccggcccgcatgcttacactgatttgcttcaaaacgaacaaaagcaagttgctaaagaactcacagacctggctcccagtccccgaagtgaaactaggtttggacctcttagccacctagtaactgcagaagccttgccacagggagccattggtccaggggcagtgcccagagagaggcaatgttccaatggaacctattaccacaagtatcaaaaacaaatcaaagccactgcctggagagcttgcataattatttcagatgtgaaagaaggcatacgtatttccctaactcatgaggccataatcacaaaaaatgtggccaatggcaggcagaagtctaatatggcccaggatccctgcccacagtgttcatgccctgagtctccctgtaccctttgggtgctggcaggaccaccacttcttctcatcaatagaatatggcagaattgatgaaatagggactgttacttccttgattagattacattatttcagactctaccttattctgtggcttctcctcctctttccaacctttgaatactgcattcctaaggtttgggtcatggtcctttctctttttaaaaatgatatttttct

SEQ ID NO: 473168 - DNA, 832 bp, Homo sapiens
tggcaccatctggcaccaaactccatggtctcattaaatgagcagtatgcaagcatttatcacttccctcttagtactgtgttttttgtatcaagccctcctcagcagagtgcttggctgcctacagcagtgagagtagtggttgcagggagcctgtccttggggcatgtgcaagtgcactacggccctgttgctggaggaagcatggctgctgacagtggctgcagctgcagactggggagcctctccaggctcccagccaatcccagtgaactgactgccttgcttctctctccttccatgcctgtggtgttttctgtcacttctctgctaaattccagtgttctctctcagatgctctattcaaagtgtgactgtctacttgttattttgatttttcatggaggaggcaagtgtcagatgctgccagttggctatcttgaaggtcctcctcaaactctatgttgatgatgtcacatttctttatactttgtatccattaacatattttatatagttattttgaatactttgttttaactcctatacctgcatttaaaatgatttatgcaccatcattgcagtatcatagtattctgtatttatctatatattcaattttatcagcaaactttatactttcatatgcttttgtgctgccattcaatctttcattttaatttgaaggacctcctttatcatttcttgtaaggctggtctagttgtgatggcctcccttggctttgtttatctggaaaagttttatctttccttcatttttgaagaaccattaagccagatatagtatttttagttggcaaatttttacttt

SEQ ID NO: 473169 - DNA, 840 bp, Homo sapiens
ctgctctgctgaagctgcaacactctcggattattccagaaatggatgtcctttcaagccccgctgtcagtttctttccgatgcataaggcgatttatggatgctttattctaagccatgtgccttcagtgacccagaactgacaagacttgagttcctggccccctgcaggtttctccacagtccattccctagcagccccctccccagggacagcctgaggacaccaacaccaagcaatagctctgtcccctgcagaacctcccatccttctccctccacagccccctcctactccccagctcccccaccctccagccccttcaaaacccatcaaagccccaggactttgagcactgctatccttcggagtgtcaggcaaccacaatactctcattccaagggaggccttcggaagggtggagtttcctgcttggttcaccaggcagtctttggttgtgggaatgaacctggtggtagaaaaatgaggaaacaggaaggttccagggaggcaagtggaaaggaagaagggggcccgcccggctgcattcgagagaatttaccgagtgtggagaggaggagtagcaggattttgggccctgcctcgcttgtgtgcgtgtgtgtgcgttgtaaactctctgaagccaggaatcatatcgaggttcgctcactattgtatcccccacattcagctcagtgcatgacacataatgactaagtattatttaataggtgaatcagcaaagaaatcagctcattattggggggtaactatccattggtttcttatgtttgtgcacatgttatgaatagagatactgactacttttgtttctgact

SEQ ID NO: 473170 - DNA, 660 bp, Homo sapiens
cgaattaatcggtgcagcacaccaacatggcacatgtgttttctttccaccccccccctcacaattcctttcccaaggtacagctgactgcaccattaaggatggaggataatcaaatggcattggttgatgaggaaaaagttttctctgcagaaaaattctggctaataaatgcagaaggaataatagaatttgaaaaatattattttgtaagctctaatgaaatatctggtgcagaagctattactgtgggagtacatggaaaaggtctcctcaagaaagttgtaaagggacctttagactgggatggtcctactggtcttcctggcatcttctggcaatgcaaaaggatccacgtggaggaggaagacagcattgaaacatgggttggggacgtggaggaggaagacagcattgaaacatggggattcttggaaattgggcaaacagttttcctggtcacatcttgcttcaatttactgcttctaccgctgtcttgatctcccttgtgtctagtatcttgtgcagatgcagacatggaacacagctcctagtacttgatcctgagattccctttgccaggagtagagtcgggggctggaaaatgttacagaagaacacagcatggctgcaacacatctccattttcaaaattccttt

SEQ ID NO: 473171 - DNA, 798 bp, Homo sapiens
cgccgtcttcacttctggaggctctcttgggggaaaacgtgataaacctgaaaagatccaggtcaaggaggttgctcttcaaactctccccagagcaagggtgccagggctcctgaagagaagactgggtattgcccaggctgtgaaaataggcagactcatgacctggggctttcctgttcacacctcagctcttcctgctggtgctcagcctttactggagaagtttaatgcaagtaaagcagactggtggaatgcagaggacgtgggttttgaagtcacgatgagtcaacaagaagtttacagcactgagaaagacgagtcaacaacagaaggaaaaaaatccagagaaaatggcacttgctgcattggaatgaaagataatctgcagaagaagtcaggtcgactttcacagtgcaaaaagccagcattatgtaatgaaaatatctcagtaaatttcatcaatagggacatgcgggctcattttccaggcctggttgctacttccactcatgcagctctgaaacccacctggctcactcttctaggtgaagatggatatgttcacactttgaagacatttttctaaggctacaagatctttgtaaagttacaattagggaaaagagttgtgtatatacctttcaaatgtcaatctaaaggcaggatgttgtttttgtttttgctgcttttcaaaacatttattacaatgtctcatgagagaagggggcaaagtgtgataacccaagaggggttacgtcctgtaatctgtagatatcagcttttttttgcctagac

SEQ ID NO: 473172 - DNA, 1245 bp, Homo sapiens
tacactgttaccccagaggcgggggtgacagaggataactgaagacaggaaatcctggaaaaggtgagaagatatgagaggatgggatccagaaccaatgtggaaggcctgggtttggcaagaggaaagacacttcctcaattgtaagggggctgggagcactggggagaaagaaggaggaggaggagatggcaggtggacgagagaacaatatggcggtttggaaagatgtggaagttcccagctgatgacctgcctttatgttctggctctgctggaccaagaaaaggtgggcctctccacagggctgtctcatgatgtggcagctgatgtcccctggggcaaaggaggagagttcaaaagtaggagggatggggtatcatgctacttaaatgctgtaagaggcaaaagggagtgccagcaggaatacagaagcagtagctcaagcaagcctacgatgatccaggtcagtttgcaggaccccgaagaatccattccgtaagttaataaagtagttttaccctctcataaatgtattgccttgtgaaatcattttagcacagcagacaaaaagggaattattttgttaaaattttcataattattttccaaggctatagtagcatagtttagagaagtactctaatagtacataatgcctgaaaaatcacctgaaagaatataatgtctccccttgctcatctcacagtttcaaatgccctgctaagactgatgtgctacaagcgatttacaatgatttttgcattttttaatcactgacttactacattttaaaacatcgatcctttatgtttcttttataatggtcttagtttagattttgtattttgaagatttcaatgcaaatgtcatccaaatagtattctttcttaccaaagtgggctacaaagcgttttgggctttgtttataaaaagttttattctcaatatgatttaaaaaggtagagatgagaaaatggcatttaaggctgatagaacagtttgagcaaagaggtatgatatggacaactcatctcttctgtgaaaaaggggctgtatctactgtctggctgattgtgaatattaaatgattaaatgagataaaacaaaatcaagatatattagtaagaatatataattttcaaggttaagagcaatactactatttaatattaatattagttcaataaatattaattcaaatcattttaatgaccggtggaatattttttaaaagatttaaat

SEQ ID NO: 473173 - DNA, 602 bp, Homo sapiens
ttgcagtgagccaagatggcagcagtacagtccagcttcggctcggcatcagagggagaccgtggaaagagagggagagggagacctctctttccttctctctctctcgcgcatgcatgcacacacacacacacacacacagacatacacatatacatgcacagtttgaatcagtatccaagtaaagtccatacatggaatatagttgatctctctcttaaatctaacactaccatttccccaactgtgtctgtcagtctctctttccttctctctctctcacacacacactcacacagtttgaatcagtatccaagtgaagtccatacatggaatatgattgatttcactcctaaatctctttttagtctttggtttccctctcctcctcttttttacttgcacataagacttcagcctgtttgtcctgtagtttcctacattctcaattttggtgattgcatccttgtggtggtgtttagctgtttctatttccctgaattttctataaattggtagttatgttctagaggcttgacagcatttatgatcaatttttttttttttttttgcctgtgatgagagtagtgggctgtgctatg

SEQ ID NO: 473174 - DNA, 604 bp, Homo sapiens
tgctctattatgtcccgggtatttctcatacttttttaaataatccatgctctctatagacattttagaaaacataaaagatcttaaagaagtcattgcctgtgagcagcagtatgactcttcctatgacgctcgctgtgacgtctggtccttggggatcacagctattgaactgggggatggagaccctcccctctttgacatgcatcctgtgaaaacactctttaagattccaagggctgctacagcgaatgaccacaaactcggtggattaaagcaacagacatttattctctcacagttctggaggtcagaagccccacatcagcgggtcagcagggccacactccctttgaagactctaagtaagaatccgtctttgcctctgccagcttctggtggctccagcttttccttggcttgtggcagtatgattccaatctctggcttcgttttcacatggccgcctttcccacgtctttgggtcttcttttctggtctcatataaggacatagacttagggcttatcctaattcaggataatttcatctggggatccttgccttaattacatctgcaaaaattcttattccaaatgaggtc

SEQ ID NO: 473175 - DNA, 1196 bp, Homo sapiens
cgccgagagtaagcgagggctgctagcacgggctgctagcatgtttatacactattgtgtcctaaataccatggcccctcaggtatttggccaaacaggctttcggattttggaagacatggagcatgagggcccccctatcagcagaaaagcctctggctacggtttttcagaaatatacccatacaaccagtttggtgttctcaaaataccctattctctgatggacctgctctccaaaatggtggttggacagccccactttgtgcgctgcattaaacccaatgatgaccgagaggccctgcagttctctcgagagagggtgctggcccagctccgctccacagggattctggagacagtcagcatccgccgccagggctattcccaccgcatcctttttgaagaatttgtgaaaaggtcagaccggccatgggtattcagacttgagggtgggaccattgccggggaaccatcctcttctaccgagtatttccctgtcttctgttcatatcactttcctatggtatataagcactggaagccattttacatatacctcattgacctgacctgggtcccgtgaccattcctagcttcagggagaggcttagaaagtggagaacaggactggggcacattgtcacccagtaaaaaactggtgttcatttagccagggagaagtgagtgtggaaatgggggaggcggggcctctcatttaaagtttatgaggaggcagcagtagcagtatcagaaacatttattaagcacctgttgtatgctaagtgctatctataaaaactctcccttcctgatggacctcttggcttggttcctttcagcttagcctttacattgaagtacacaggagctcaaagtgatttatcaccatggtgcctgctagaatccaaaattattccgtgaaggaaacatattatgcttttcttacttgattactatagatatgtcacttacatgtttcttcactatattttgaaaactgcctgtttacatatagtactgttacccatgtctttctgaactaagctagatatgaatattattatcataataaattaagatgttttggttgatggactgaaaatcaaagttaagttctaatattaatgatcagaatacattctgcctatttagaaactaacagttgctaaaaaaaaaaacacccacagatgtcc

SEQ ID NO: 473176 - DNA, 784 bp, Homo sapiens
ctgacttcagcgaagcgaagcaactttggaactgggtaatgggcagaggtaggaacagtttggagggatcagaagacaggaaggtgagggaaagtttggaacttcctagagacttgttgaagggttgtgaccaaaatgctgatagtgatatggacagtgaagtccaggctgaggtggcttcagatagagatgagaaacttactgggagctgcagtaaaggtcactcttgctatgcttatcaaagagactggtggcattgtgtctctagagatctgtggaactttgaacttgagagagatgatttaggatatctggtagaagaaatttctaagcagcaaagcattcaagaggggtcctggctgcttccaaaagtctacactcatttacataaacaaagaaatgacctgaaactagaacgtttatttaaaagggaagcagagcataaaagtttggaaaatttgcagcccaatcatgtggttgtaaagaaaaacacattttctgtggaagaattcaaggctgcagaaatttgtatgagtaaagaggacctgaatgttaatagccaaaacaatggaaaaaaactcctccggggcatttcagagaccttcatggcagcccctcccatcaaaggcctgcaggcttagagggaaaaatggtttcctgggctgggcccagggtcccactgctctgtgcagcctcaggacatggtgccctgcatcccagccgatctagcttcagctgtggctaaaaggggccaaggatatttgtccagcagatgttacttgag

SEQ ID NO: 473177 - DNA, 648 bp, Homo sapiens
tgacatcaaaccccagaagctcctatccctttgcttcctgggaattctacagacctgctgcctcatgctctgtgtgacggtggaatgggactccacaaatcatacttctttgccatatgactctccactggactcccaacaggggatgctagaggaaaactacaaggcacgagggagaagagggacttgcttcttccggtttgcttcttgttcctaccacggtcaccacagcaacagatcttcattctggcagcaatgcttgatttcagctgtagcagtagttccagtttgcagggtccccatactcccagaactagcctcagcaatcccttcagagaccagcatcagccggacaaataacgcgcaaatgactgtttcttcaaggacaaataatcaaaatggtcatttgctaaataaaatcagccccgctggccttacaataatgatcaaggaaaaccgccaaaaagcacagttacccaagaactttcatacaagatctaaatctgattttgcaacatttgaaacaatagttctggcatctcagtatattaatcttggatcttcctccagaatcacaccagtgtctgagtctccttaaccctcttctagttaaattgggtttaggtcttgatatctcatgaagaagga

SEQ ID NO: 473178 - DNA, 854 bp, Homo sapiens
gcagctgacccatgtagtatagcacaaatgcgaaagaaacctttgtggctccactgcagtacattgagctccacagagacagtgccggggcaagtgagagccggacgggcactgggtgactgtgtgcctcgctgaggaaaaataactcaacatgggcaaaggagaccctaagaagccgagaggcaaaatgtcatcatatgcattttttgtgcaaacttgtcgggaggagtgtaagaagaagcacccagatgcctcagtcaacttctcagagttttctaagaagtgctcagagaggtggaaggccatgtctgctaaagataaaggaaaatttgaagatatggcaaaggtggacaaagaccgttatgaaagagaaatgaaaacctatatccctcctaaaggggagacaaaaaagaaggaccacctaccaggtaagggactcacggaccagtcctctccagggcctctacctgaagcgacagcttttgggggagttcagagaataacagtaaacaagaagaggggcaaaatgaagatgcagcacagacatgaggctaataatggcttctacctcgtaattcagtcttcctcatctaaggctgcaccagacaacttatgtctccagtgcccacaagattcccatcaatcatctggccgtctttagttaaggcagtagtgcaagaactatcatttttggaacaccccctacctggtgtgattggcatgtactacctttactcctcaccacaaccctgcaaaacgatggttaccgttcctattttacagaaatcaaaacttaggtttgtgggggggtaagtaacttacttgcctgagatcccatggctcgatgtcagagc

SEQ ID NO: 473179 - DNA, 688 bp, Homo sapiens
ctgtcttcccctggagagagtgagagaaagcacacaagatagaaaccacagtctttttcaaacctcatctctaaagtatatctcctaatgctatccctcacccctccccccaccccacaacaggccccggtgtgtgatgttccccttcctgtgtcctggtgttctcattgttcaattcccacctatgagtttgtcaaagatcagtcaggaccttcagctgcaggtctgttggagtttgttggaggtccactccagaccctgtttgcctgggtatcaccagcggagggtgtagatcagcgaatattgctgaacagcaaatattgctgtctgatcgtttttctggaggtttcgtctcagagggactgctgtgctagcaatgagcgaggctccgtgggcatgggaccctctgagccaggcgcaggatataatctcctggtgtgctgtttgctaagaccgttggaaaagcacagtattagggtgggagtgacccgattttccaggtgccatctgtcacagctttgcttggctgtgaaagggaattccctgaccccttgtgcttcctggatgaggcaatgccttgccctgctttggctcacgctcagtgcgctgcacccaccgtccgacaagcccctgtgagatgaacccggtacctcagttggaaatgcagaaatcacccgtcttctgcatc

SEQ ID NO: 473180 - DNA, 599 bp, Homo sapiens
cgcagtgggatgcttttggattcgggacacctgggcccagacccagccgccccaccccggcgccccgggcttgtgcacagcaggagcctccgccccgcggggaagccggccccgcacctcccgcactgggcgctcagacccctggtgcttccacggcgtctgagggtttctcagccaccgaagggtgtctccgccgcacccaacgggtcccccggtggagagatttgccttcacatcagattaaagggggttccgtttggtgaaggcgcccaggctcatcccccacgtttccgcactgggtctgagatggaaagaaagcgggggaccagagcccttcttccaaagaacggaaagcgccccaccgcgacgccccggccccgcccaggggccctgcgagggcggcccggagaccccgcggccgctggcggggcgcggctttcccaggctcccggcgccacctggtggcccgtggcgcgcactgtagtccccgctcgggaggcccccttggctcggatcccactccacgtgggcggcggtaagaccggagttcctgaacaaaggtgaatgtcgttccaggaacctgccgcgtggggacagaa

SEQ ID NO: 473181 - DNA, 499 bp, Homo sapiens
tgattgctagactgtatgttatatctatttttatatttcatgttatgcatgtggattcctgctccttgcccctcccatgactttgtaattcagtccagagttcataatctgtcatacaatctcccttccctcaacatgaagtttctttttattgtagaatataccactctgttcttttattggtatataattaaatctctacttatagataatgctaaattgaggaagctcctaggagtggatgccaaaatgcaagggagactcctagagatgggtggattgatggaagaaaccatgaaggactcaaagggtagaaatctgatgatacttgcatttttacatcatcctagaaacagagtggaaaatgaactggaggaggataaaaccagagacagcagttaagatgctaggaaacatgggagaaatgatgaggtcccaaataaagagatgaggaaattgaatcaagttacctgctgagactaatactcaggtctcttaa

SEQ ID NO: 473182 - DNA, 720 bp, Homo sapiens
ttgccatctgctgctccttcgtctttttgggtgtgggtctttcagtccaagctcttgtccacatgctccctgagtccccactgggccagcctgcccagctcgctgccatggaggccgtgctgggagaactcccggcttctccttgttccaaggaggatgaaaaatcaggagctgtcaacaaccgcctggtaaccctgggtcggcaccattttctagttgcttgcaatcaaggattcagcgaggaaaccctcagcaatgactggagtgtagggtatgaggtagggatcatgacagatgaagctggagatgccagcaggagctggatcatgggaggacttagatgttttgctgagaagcttggacttggccctgaaggagacagaagtcaccagaagctctccaaggacctcaatccacccaataataataatgataacaacaacaacaacagtaatactagttatatttgttaaacatttgggtgctctgccctcatgaatgaacacctagttctgcctggtttctagtttttggcaatggaggtgaggagtgaaatttgtccttgggatggactccctgccctgctgcagccccaactgatagtctaatagagaagatggcacagtgactgtcccagtgaggtggagcagtcactccaaactcatcaactctactttctaaatagctccagactctacctacgtcataccctctctagta

SEQ ID NO: 473183 - DNA, 1152 bp, Homo sapiens
ccaggagccaggctgctgcctctctccgctctttggatgctccagccccagttgagccaccccagtttatgtcatacatcaaaaatatgagctgaccctgctgaaacctgtccaaaatacagacagatgagtaaaattaccaatcattgttgttttaagctaccaagttttgggttgaattgttatgcagcaacaggtaactacaacagatatatgtacctgaagtcaggtgctatcataatagagtcctacaatgtagacattggctttgggaccacacagcctaacagccacaaagaaaatgttagtgaaaaccttaagggccttgagaagattgtcaatgagggcattcaggaaaatcttggaaatattatagaaatcttaaagtcaaggggatccttgccatgtagtggcagaaagtttagcaacactgtagcctgcagtaacatggaaaataggaaggatcccttcttagagcagattccaatggggcatcggggtgatgttcagagaagtactcagaatcctcctccttcctgctggatcagggagcaggctgatttctgtgtgaggtctgaggagcggcgcctgtaggagccctcaccctccttcccctcactcatttattattgatcagtcattggccgaggcctccaccatgaaaggcacaggggacaggtgaggaagcaaagggtcagctagttttaggcactttctcagtgtccgcactgagagatagagtatataggtgctgagccatgcacacacacagccgtaatctgaattaagaagccagagcctttttaaaacttgcatcccctgtcctcctgaaaattgttaataaaaaaaggtgatgtagcaaaaataactaaggtattaaatcaacaaaaaactcctcttttcttttgacccaaggggctttagtcacatctataaagttctacttctttttaaaatataaagccagtgtagcaaaatacccagatttgatagtggtcaaatatttgtttattatgttgttctctgttcttatgtataagtatcttcatcctttttcttttgctaatacattttactttaattaaaccctaaggaatcagatctaacatttcatattcaaataattcaaagatcatagtatagataataaaa

SEQ ID NO: 473184 - DNA, 881 bp, Homo sapiens
caggacacttttgatgtacagtctctgaaattcagacaatggtgatggtggaggatgaggagaaagggggaaaaaaggggacaccttactagtcttattacatactggtataaaaatatcaatttgattactatttcctaaaaagggactctatagtgaagaacaattgtgacttgaaacacaactgtagctctgctaatggtttccagagctggtcataggctcttggagttagtgcgtcactaaactggtatgtgtttaggagtctatatagttcaagaccttactctaaagatttcttgtcaacagggtatggcttgtcaaaatgctattttattcgttccatcatttccatcctatctgacgaaagacattagtatttcagttttctgtgcaaatatggaaacatcatcatcaataccccttacacatatgcatcactttgtggttaacaaaacactttctatgtcacctggagctacaaatagcctggaagaaggcggggcacatttacagcatttgactcctggcagcccagtgcagggaggtgatctactcactggtaagtttggatgtttgatctctccaaatctcacgctgacatttgattcccagtgttggcagtggggcccggtgggaggtgtttgggtcttgagggtggatcccttgtgaatggcgtggtaccttcgtcgtggtaatgagtgagtgtgcactctgtttatttccctgagaactgattgttgaaaagacagtctggcaccacttcctctctcactcttttccttcctctcttgccatgggatgcctgctcccctctaccttctgtcgtgagtagaagcttcttgaggccgtcatcagaagcagatgccaagcttctttta

SEQ ID NO: 473185 - DNA, 597 bp, Homo sapiens
gatgtaagtgtctgtgtgaatcacctcaaggtgcttggcatatcgtaggcaataagaaaaacgtgctacctatttttatgttttttatgattggagacataaaattccaatcacggagggaacatgtctttgcttgcaacagactcaaatgtctgccaaactgctccgtgatgttttctgggagggacttcacagatctgacaagtggatctgactgccacactgatagacctggaatccctccagtgctctccaatgcagtgggatacaactgtagttcctttgacagtgaaaatggtttacaattgattgcagcaatggttgtgcaactctgtgactatagtaaccatggaattatatgctgtaatcccactgctacttgcggctgtgggaaaagcagtaccatgcaccgagccgtcctggggtgccaggcactgtatgggagtcgcctgagttacctaagcattccagccacaccaccctgtggggtgcaagccacgctttctatgtgagtaatgcaggtggggtcacaggactgttaactgggagaaatgaatgtcaaattcctatttgattccattgttttaaatcactgaa

SEQ ID NO: 473186 - DNA, 712 bp, Homo sapiens
gattcagtggcatttggtgagtcgagggcctgatcagctttgactcccagggggtccaaaggaaaagggactgcagatgtctccaccggcctcggtcattcagggaacccatggcttctcgcatcacacatggacccctgtggacattggcgcccatgtcggtgggaaggaaaaccttcaacagcccaggccatttgggctggaagcaactttctggcttagatccaccctcctctcctctcagtgggataatgaacagaagtttgccatcaacttgatgcgtgtcggattctccaaagatgagctatgtgcagcaaactcccttctttcaagtcctgtttatggttggttaaataagcagtggtgtgatctgtcacctccgctctccagccgggctgatgagggcttcccaggggaaggccagagacgcatcttgcctggaggtccctgcaaacagaaccacatcctatctgttggggatagtttaggtggaagaggattataatagcaacacattttaaagtgttgaaaatgtaggaaacaggtgaaaaacaaaataagaaaatgttttaactatccaaatttctatcattcaattattatggctttttcttttcatgtctttattctatgcaagtgacaagcttatgtacatttttctcttttatataattttgatcttatgatagggggatggtttatatgacatgtt

SEQ ID NO: 473187 - DNA, 876 bp, Homo sapiens
cgcaatggttcttttttgttttttggtttgttttaaactttcatttcgagttggctgaccatggctgccctggcaaataactcagttgaatccaggcaggtcagcccctaccaccaagccatgggactgcatgggatccaacagtgtgatgctgggagctcacattccccatggttggtgaggcagaaaattcacaagaacaaagctcttgccctagaaagatcttcttttcaatttagggtcaattccactttggggacttccagaagagtcacctttaaattaagaaaagagaaaaagaagctgttgcatataagccagggaaaaccacacacgaatgtgaacagcacccgcgttccacccagcagcacggattttttgtgggaaacttatacagagccccgtaagcctccaaggaggctccatgtggtctggctcagctgggaaaccatcgctgaacccttgttctatcggtctgcggacacgattcagtgtcttgagctctgtgggatcagctgtccctctgagctgagccagccctcccgtgagtggtgttcagcctccggggcccgggaccgggaacaagggcagaccagcctgcagtctgcatccagcggccaggtcaaggtgatcgagtttctctctccagtcacaaattccatcacccctggctccaggccagatctgcctcaggtactgaggatactgaaaccagacctgtcctaaacaccctactctatccagaaagagacactgagggaaattttattatgtatttgttatttattatttaagcagtcaaataaaatatcggaacataaacgctctaataaaagaaggaacaaaaggttttgaggatacagaagggggaagtga

SEQ ID NO: 473188 - DNA, 799 bp, Homo sapiens
attatgactgaacgaggagtttgagtcattccttgcctcctcccggaagcttttcttgacatcccagactgagtttcaggccctgctcattgcctgcccctcaacttaagtttttgttgcagagaaccacagtgaccactgataactctctttctcccctactagatgtggcctctttggtggcagggcctgggtctaagagtcatgtcccctgcccatggcaggtggcacacaaccttctctgcacttgtacccattatgtgtgggtcgtgctcactctgttgtctattgacagccccagtgatgcctgccatgtggggctccctgctgagcctggcccacggggataggggccagacctataccatctatctgctctgccatgtgttctgcgctctgagaggtgctccctattgctccctgtcccagactcactgcatcctgggttctggttcacttagtgaatgcctgggacgttcttcgggcaggtcattctcactggacatggcagccttgctcatctgtccccttcatttatgccacagcccctctcagccccttgtggtgagcagctcccagactgcttctacccatctgcttctgactgggggtgttggactttcattgagttttcttttaaaattgcctttatcagccgtctgcagtccatcatcacaaaggtttcttctggtcttgtagaagatatgcatcacattttatcctgaaatcagatttaactcaagatgaccactattgccatccttaaatatgtgtcatgaataactgccattttaagtgc

SEQ ID NO: 473189 - DNA, 748 bp, Homo sapiens
gttcccctttccataaggcacaccctgatctcccctaactagacatgatctcgccctacattgctcatgtgcccatctgggttgggggtcaggggctcaggtgcccaggacagtgctgcagctctagcatgtgatttgagcccaatcttggggcccacatcttcaagctgttcaggccattccccttcagcaccacatttacgatcagcttttccagtgcaaaatgaaaacaacgggcccctctttcaaaaattgcatagcattaaaccaagtgcaggatcctctgagcatggggccgtctgtgacttcctgggccacatatctgtgaggctggccctgcccccagggcattccgaggctttagagggaccaagatgtagtgggaaaatcaaggagctgtatgctgagctagacaaacctcagtcaattctcagttttgtgtgttactggttgtttgaccttgggcaggtgaagaaggtacctctatttcctcctttgtgaagtggagctaaaaatatcagtcctatggtgatattgtaaagatgaaatgaaatcaagtttgtagcgtgcttagcagagtgtatgatatctagtaagagctttaaatcttagtgtttcatagcagtgttgctggtgccctgccatggccacctgtccctccttagtacctaccaactgccttccaaatgctgccacctgcattgctaggctgatggcttttctcttgctgctgacagagaaataatta

SEQ ID NO: 473190 - DNA, 561 bp, Homo sapiens
ccccgctgcctgcaactgactcaactttcttcttcttatagctgaaataattggaccggggggtttctgagctgggagttcattgtcaagtcagctgtcgctgattctttatcaatgtgagagaactcagccatgcaaagacctttccctgctacttacctgcaaatcaggcagcatcagcatattagcagtcaatcagcattcattattcgtctgctctgtaccaggtactggcccatgtgcttgggaatagaaaggttactaagaggatctctgcccgaatgcatcaagttttcaggcaacagacagagcagggctttttacaatccccgggagccctggcaggctagtgtggggatgagtcagaaggcaccctccaaggaaatcacagcaaggggcgaagagtcaggcagatgccagagccaggacagtcctgtgtcctggccaagatggttggaccttagcttgcaggtcatggatggatatggatgggcttttagcagaaatgtgacatgctcaaacctgactgttagaaatttcctatgaaagacaagatgggct

SEQ ID NO: 473191 - DNA, 850 bp, Homo sapiens
gagggtccgcggcttcattcttgaagtcagctgtgactctcgggaaccttgttagaagagaatcgaggagcgtcagccacatccaaggccccttgctctaggagggtgcatctggaatcccatatatcctagggtccgttattatcatagcccaccctggcacatgcaggatgggctctctgatctttgagctgcttcaggctaaagccttccctgatctccacacactatctccaccctctcagccaaaggtgctcctcctccgtaacctccagagcgctgtgcaccggcatgccctgcttagtagagaaggctctggggaaaaatctgcttctaggttcattcaggttgttggcaggttctgttctgtgaggttggaggaccgacatcctggttccttgctggctgtgagccaggggtcattcttagctactaggggccaacccagccgaattccttggtctgtcccctccatcttcgaagccagaaatggaatgttgaattcttcttgtgctttgaatctctctgacccttccttctgccaccagctagagaaagttctctgctttaaagggctcaggggattaggttagatccatccagacaactatccctttttaggatgaactgtgttgctctcctgagagctgcaagtttttattctcctcttcagttctccttcatggaaactagggggcagctgacagtcataccacagagagtcaacccctccaaagaaaactgtccctaagaggaattccaggccagctgttgggagaacaatgtcttctccatcttgctttgggtattgatggccgcctcacagagatctttgagcccttccttaagt

SEQ ID NO: 473192 - DNA, 554 bp, Homo sapiens
tgtcaattacccagttacttaacttcctctgtataatccagacgtgggtaattgatctatcatgacttcccaagggacatccagcagacgcactgctccagcgacaaagcccatggaggttggtgttgatgggaagggcactcatgatgcttctcctgcattacggcagaggcaagtgtcctgccaggacacccaagatagtggggaaagtgagattcagggttcttcagctgcagtgcaagtaggacacatgcaggtgaaactcatctactgcaggacagctttcctgagccttaggggagcagctcctcatgaattgaaaagaaaggtgaatgaaaagaacattggtctgggactcagtcccagccaggggcatggattcagttctgacttgtttgttagcactatgtcttatcaagcaagtaacttaacctttttgggcctctgtttcctcctctgtaaatgagaggattatactagaaagtctccaaaaacttctgcagctttcacactttactattgtatatgataagccaggaataaagctcattctt

SEQ ID NO: 473193 - DNA, 1461 bp, Homo sapiens
tttgtcttcagtttatgtgtgtctttacagatgaagctgtacaagcatggtgccaacattgctcagcttctggggaggccttggggagcctttactcatggtggaaggtgaaatgggagcttgctcatcatatggcaaaagccaaaagcaggagcatggtcagggggtggtgtgccatacacttttaaatgaccagatctcacaagaacttagagaaccgctgaagggtgaaaagccaagtgcaaggagatcctggaggatgagaggccatttggacatcccagctccagccaaattgccggctgaatgcagtcgcatgagtgatctcagccacccaacgtggagcagaagctcctcccagtggagctccatcaaccgcagaaccatgacaagtaataaatcacatagctactgtgctttgagatggcttacaacacagcaatcgatagctgagctatgtgttaataagttactgtcttcattacatagggtgcttacctgagattttctcttatgaaagcattactgtgtgtacatatttacctttgataaagattcagctccaaatttatattcaactgaaatgtcagagggatgcctgacaccttgcaatgtgcttggcctctgagccatttaaaaacatatgtcaccccggtgcagctttgtcctcactgacatgtctaccaagaagcctgggctggctggtgttccaggcattgacttcaaaaaatgttgaatgaataacttgtaaatatcttatgtgtgtgtacctctgaaatgattaaaaaactctaaatgaaaccaatttaaattcagatatacttcaacatactaatgttaatgaaaaatgttttatataactacaaaaaatgagcaagctaagtactgatatggaaagggttcctagatatattattatgtcaaaaaagcaaatttcagaatgatgtttttggtatgctaccttcagagtaaaaggaggaaaatctatatgtgtatctgcatagacccataatattttaaaatctaagcacagggttgggaaactggcactaggggaataaacacaagaaggagactttccactatacactttttatactttctgatttttaaaccatcggaatatactaccatttgaaatacaatttaataagcaaaatttgaatctatttatgttttgcctttacacttcttttgcaactaatgaaaatgaatattttttcgtttgtgtgttgaccagtttacttcttccctgagtatgtttgcccatattgacatcttagaggctttgctttttttaaaaaaaaatcagcaaatgttaaatcttctccaccctttacagtggagatatttgccctctgtcacctgattttgctttcctttatgttattgcattttagagtgtgaagtttttatgcatttgtatctactcttacatgctttgacattgctcccttccat

SEQ ID NO: 473194 - DNA, 603 bp, Homo sapiens
ggggatacaaatgcccctgagagagcagcggtatactgggatagatgaggatggtcacgtggtggagaggcgtgtttttaggtaccagcccttcacctctgccgaccttcttgactggaaaaacaataccccatcctataccgaaaagccacaagctctaattgacttgctccaaactgttatccagacccacaaccccacctgggctgattgccaccagttgcttatgttcctctttaacagagatgaaaggcagagcgtgctccaagcggcaactaagtggctagaggaacatgcaccagctgattatcaaaacccgcaagagtatggaaggacccagttaccaggaaccgaccggcagtgggacccacatgaaagagaggatatacaaaggctacacggagacagggaagctctcttggaaggattaaggaggggagctcagaaggctacaaacattagcaaggtctctgaggtcattcagggaaaagaagaaagtccagcacaattctacgagagactgtgtgaggcctatggtatgtatactccctttgatcccgatagccctgaaatcagcacatgattaacatggctttagtctgt

SEQ ID NO: 473195 - DNA, 1098 bp, Homo sapiens
gtgacggttgaaaaaccagcaaactagattccactattgctactggaatgaacccactgccagggcaaggaggcattgctggggagacattgctaaaacaggaaacaaacaagaaggaacaggtcctccctcctcaagactcacagtcctctgtaacacataaaccatcaacactcactggaaaccacacggacagctcctcaggaggtgtggggtgccccactgcttgcccatggtgcttgctggccaccataagtggctcctggcatcatgccttactaaagtggatgctcagtgcatctactcaacaacggtgtgaagaagggaatggagagacaatgagtgggttggacttggctcacccttcctgctctaacatttggacactctgtgacaaatgcagaaggaattcactgaagccagctcagagtcctgtactgccaggcgtgactgcagaacacagcccaggcaagggatggagcagtaatgcaccgtggggtgggtgggggtccatgctcagccccaagatggaattctgtcccttcaataaagatctggagcagaaaaggagcatgcagcacccagcaaccacagagggtgaccacagagctgagcaacagctgaagctgtccagctgcttttctgtggcaagtctacccacatccgcaacagacaagggattcattcatcaagaccctggcttcatgagaagatcatatgtcagtgtgtgtttctgacaagtgttgttagctgaaagtgtggaccgaaggtgccccccagctcaccactacctaggccaccaagaaaagggaaaaaagaggctgaattcacacagccttgtgaagttcctggcaggaccaagtgttagaaacttagaaactacaaactgtaatataaagcaattattaaaatgaataatagtcgtataaactgggcatggatgaacgaatttattgcattttggaaacttttgcatcaggaggactcatattgtagaaaagagtaatcataaaaatggctgtcattttaaaaaacatgcctactgttgcaagtaccacatgtaattctatttaattttatcctcacaacaaccctttg

SEQ ID NO: 473196 - DNA, 685 bp, Homo sapiens
ctgtgatattagaggtgtccaagacacacggagccacggaatctcacaggtgtctgagaattcctcctcctgggactctcagaggatccagaactgcagccggtcctcgctttgctgtccctgtccctgtccatgtccatgtatctggtcacggtgctgaggaacctgctcagcatcctggctgtcagctctgactcccaactccacacccccatgtacttcttcctctccaacctgtgctgggctgacatcggtttcacctcgcccatggttcccaagatgatcatggacatgcagtcgcatagcagagtcatctctcatgcgggctgcctgacacggatgtctttcttggtcctttttgcatgtatagaagacatgctcctgactgtgatggcctatgactgctttgtagccatctgtcgccctctgcactacccagtcatcatgaatcctcacctctgtgtcttcttctataaaattgtcccctccattctaaggatgtcatcgtcagatgggaagtataaagccttcgccacctgtggctctcacctagcagttgtttgctgatttgatggaacaggcattggcatgtacctgacttcagctgtgtcaccaccccccaggaatggtgtggcggcgtcagtgatgtacgctgtggtcacccccatgctgaaccttttcatct

SEQ ID NO: 473197 - DNA, 710 bp, Homo sapiens
ccccctaggatattaccaataacatcacagggtgtccacccatggatccagaactgcagccggtcctcgctttgctgtccctgtccctgtccatgtccatgtatctggtcacggtgctgaggaacctgctcagcatcctggctgtcagctctgactcccaactccacacccccatgtacttcttcctctccaacctgtgctgggctgacatcggtttcacctcgcccatggttcccaagatgatcatggacatgcagtcgcatagcagagtcatctctcatgcgggctgcctgacacggatgtctttcttggtcctttttgcatgtatagaagacatgctcctgactgtgatggcctatgactgctttgtagccatctgtcgccctctgcactacccagtcatcatgaatcctcacctctgtgtcttcttcgttttggtgtcctttttccttagcctgttggattcccagctgcacagttagattgtgttacaattcactttcttcaataatgtggaaattgctaattttgtctatgagccatctcaacttctcaaccttgactgttctgacaccgtcatcaatagcgtatttatatatttcgatagtactgtttggttttcttcccatttcagggatcctttgtcttagtataaaattgtcccctccattctaaggatgtcatcgtcagatgggaagtataaagccttc

SEQ ID NO: 473198 - DNA, 543 bp, Homo sapiens
aatatttccttggcagtgtggacaaaattcctgataaaggtaaatgcaaatgcataaaattggaattgggggttgcccacttgttccaagagggtggggaagaagaactgggtggggaatgggtggctgcgtggagagctgggggaggggagagcccattccttccccagcatcagcagcatcaacaacgggtgtaacttaccaactggtttctgctcaagtcagcacttactgggcacctccccatgccaggcacagtgccctggtgggcaggtacaccccaccatgtggccctcccagagctctccactgggggttgaccttggagcctgccctggtatctgtgctccagccccttcgctatgagatgagcaccaccttttccatttctcagattgaagccagcggggaggtggggagagtggggccctggtcaccccggaggacctgccagctggacgcctgagttgtgcttggcagcctgcaatactggagagctgcccctggagggcgcaagggaatcccgttgctgcactcggacgc

SEQ ID NO: 473199 - DNA, 880 bp, Homo sapiens
aggtgaagtgtccagtacaacagcttctatgtgaccagctgggctttcagtccagacatttctacctctccagcttcccatcctcaagaatgtggctgggccagacccagactctgaggacattcagggacactgtgcctcgccagccctctgaagtgctcagaacgtatgtcccgaccccactgaatgccaggaaccatgcactgggaagtgggtggacaggagagacaagacatgctccttccccaagaggaggctgcaggcagcaagggaaacccttaggtaagctcggaacagccgtccaccactgggaccatgagctgcatcctgccttggggggccgctttggtgggagtgtgctgggcagagaagaagggaaggacatccaggcagagggggcacctgggcaaaggctcgaaggtgcagagtttgtccactcacttactgaaagacatcttgatagcttacaagttttggaaattcggaataaagctgctaaaaacatccatgtgcagttctttgtgtggatgtacattttcaacccatttggataaacagaatggacttgcagttgctggattacatggtgtgtagtgctatctcattgttttaacttgcagttccctaatagcatatgatgttgagcatcttttcatatgcttctttgccatttgtatgtcttcattgaattttgtagttttccttatatagatcttatacatattttgttaggtttatacctaaatatttcaatttagggggtgttaatgtaaatggcattgtgatttttttctgatatattcttattaaaagtttttctgggtacataatatatatatcatatatgtatctcatattttatatatgtatatatatatat

SEQ ID NO: 473200 - DNA, 711 bp, Homo sapiens
ggggcacagtgtggagaaacactcacctctttgaaaagtaacaatggaacaatttttttctctcctgggaggcaaagatgaaggcttatgtgccccagcgtggagccctcttcagctaatactcactgtctcacctccttccccaagtggcttaaaccagtcaaaggccacttttggcttcaatagaaaaaacctggaactggtgatcagcagcttccggataggatctcggaaattgggtgagtgggctcaagcatgcatactaagaggcaaaatggtggaatttaactggtatatggcctatggaaacactcaactggtaaggaaagaacgcctcaaggctgctgcagcaaagttccacagactgggtggcttgaagcagcagacatttattctgccacagtgcaggcagctggagcctgcagtcaaggtgttggcagggtttgttccttttggaggctcggagcgggatctgtcccatgcctctctccaagattctggtggctgccagcgattcccagcgttccttggcttgtgcctgctgcactgcaacctctggctctatcttcaaatggcaatggtccgtgtgtgtgtgtatgtgtgtctgtctgtctgtattctctccttatgaggacaccggtcagtggattagggctgccctactctagtatgacctcatcttaactgtttacatctgcaaagacacttttt

SEQ ID NO: 473201 - DNA, 3079 bp, Homo sapiens
ggtgaacgctgtcggttctgttttcagaacgtgcctgtcattcaggatctggccacttcttaccatggtcttggctgcccggggccatgcaactccatgaccttctggctctttgcttctgcccttggtcctcggccgagacgaacaagaagacagtccatgcaaaatattgcagcaggtttgtccatgctccctggaaggatgggagcttggtccacgtcaacattaccaaagagaagtgcaagtggtacagtgagagaatccacacagccctggcccggatccgaaggaggattaaatggctacaggatgggagtcaaagcctctttggaagattgcataatgattgcatctacattctcattgacacgtctcactcaatgaagagcaaactggacttggtgaaggacaagatcattcagttcatacaggaacagctgaaatataaaagtaagtttaactttgtgaagtttgatggtcaagcagttgcttggcgggaacaacttgctgaagtcaatgaagataatttggaacaggctcagtcctggattagagacataaagggccttgcaggaactcagcccgtcagtgttgctactccaagctcaggtcttgccatgggccactctggcagcaatccaatctaccaggaaatatgggcacaaacatcacctttgctgaagacaggcaccaccactgggtgtattgtggtggtcattgatgcagtagtggatatccaaggccagaaagtcctggattctggtgcaccaatcgaaagtcctgttggtcctgagactttgagcagaatcatgaacatcattggagagcctattgatgaaagcggtcccatcaaaatgaaacagtttgctcccatttatgttgaggctcctgagttcatggaaattagcgttgagcaagaaattctggtggctagtatcaaagttgtagctctgactggactgactgtggctgaatacttcagagaccaagaagttcaagatgtactcctgtttattgataatatctttcacttcacccatgctggctcaagggtgtctgccttattgggcagaatcccttctgctgtgggctatcagcctaccctggccactgacatggtgggtatgatgtggggaaagaattgccactaccaagaggagatctatcacctctgtacaggctatgtacctgctgatgactcgactgcctctgctacttcctttgctcatttggatgccaccactgtgctgccccatgctgtcactgagctgggcatctatctacatgtggatcctctggactccatctctcacatcatggatcccaacattgttggcaatgagcataatgatgctgctgaggtcatcacaggtcatatggggaagtcagtactcctgaaggagaccattaaaggatttcagcagattttgataggtgaacatgaccatctctcagaacgggccttcagtgatggaacccattgaagaaggtttggcagaagctgatacgctggctgaagagcacttattgtgaggggtctttttggcaaactaagcactcatctgctgtactgtccctctccttcccctaatccaaacagcttcaggtttcggtgtaagccacatgagaaccttgattgaaaacatgttctatctgaagagtatttaaggtttccaatacaatgtacacccctcagaaaaaaaagaatggtgtactgaagaccccaaccataagactctacctattttatctattacaactctattataaagtagataaaaatagatttatctatttttcttttcatctccatcaaattttgcttcatgtgttttgaagctctgttgtttgatgtatacacatttagggtcattgtcttcttggtggatagagaattttatcatcctaatgtccctttttgtccttagtaaattttctttgtgttaaagtctactttatataatattaatatacttatttttgctttttaaaattaaatatttgcgtaatacgttttttccatccttttacctttaacctatctacgttgttatgcctgaagtgagtttcctgtagacagcataaatcgggtcatgtttttgttcactcttcaatctctgtcatgtaattggtatatgtaggtgatttatatgtaaagtaattattcatatttaaggattaagtgtctcattttatttatttattatttttgtgtgtctcctctgtttctcatttttctcttttgtcttgccttcctatgggttatttgagcatattttggtgtttcattttgatttatttacactgtttttgagtgtattgctttgtatacttttcttaatagttctatgtatttccttatacatatatgtaacttatcacagcctattgtgatgtaacttatcacagcctattggtggtttgctacttcaagttaagtgtagcaaccttacttctatttaggtccctttacactcaccatttaaaatatataattgtctgaagtatttcctttgcatgcattatatgccatcttagatggtgctaaacttttgcttcaatcataaaatgtaactaaagaaatccatggtgttaaggattatctattatgcttacttttatatttactcattccattgttcttttttctgaaagtccaggcttttttcttttctcgttctctttctatatggaaagctttcatgaatgcttctttaaggaagatgtatttagcaactcactcagctagagtaagatgcatcctacgctgggcatgaacttttacagcttttggcacagtgttaggtcgtcatattctaggcatccaacaccatcctatgaacccccttcaaggcacagaattttgtctggttttgtaggttatgtctcagatctatcaaaatgtctggcacgtggtacttatgtgcttactaagtatctattgaaatgaaagggagtaaagctgatgaaggagccttagattggaagctccacaaacaccctgagtgccctgaaaactgcttttgctgataaagaaacacaggcaatctaccttctgaccgatgggagacctgatcag

SEQ ID NO: 473202 - DNA, 698 bp, Homo sapiens
atctggaatcttgtaggtcaaggtgatctaccgggtcagtggtccccaaggcagggctcatctccacaccagcgccgattttgagagctcctgttaggaggaagaggcccgagggggtggtgtgaatgggcacacgctccccgccagcccaacagctctccttcctgcgcagtggcctcctgaacatcctctacctgcacatgcctgactgcccggtgtccctgctccagtggctgttccagagcggcgagcgctgggagcctctgcttcccccgaaggtgtgtgtctctgggtgctgcctgtgccctcacgtggctttcctgagggacctggtgtacccagtggacttacggtctaacctctcagtgaatcggtccaagcccctcaacaagtgcttcctatgcaacaaagctaatttcttcaccagcggtcacaggtccctcatcccatacgcagcgggagggccgttcagggcccacggcaatcctgcagtgcctgcccccaatcccccacccaaggcccagaaggagcagtggaaagcagagactgcaaactcagttgcctacggggactgagtgagcaaagtctgagagctcctgcctgatgtaaaggggctgtccacatcaggtttggtgcagaacattttcatctccccaaaaagaaacctcttaaaatgtgctatatccataaaatggaat

SEQ ID NO: 473203 - DNA, 3233 bp, Homo sapiens
tgaagtgctttggctggcaccacccttcatagtatttgtagcaggttcctagccatgagggtccacagaacaaagctggaggcctggtatcagcccacagagttagaaaatgaacgcagtcaactgaacccaccttataccacaatcaaacttccaagggcatcaaagaagataaaagcgaaaaacaatctatccaaaggacagcaacttcgaagattgaaggaacataatccaacacagatgagaaagaaccagtgcaagaactctaatgactccaaaagccagagtgccttcttgactccgaacaaccatgcaaatttcccagcaatggtttttaaccaggatgaaatggttggaatgacagaaatagagttcagaatatggacaggaacaaagagcatctacgttcaggagaaagttgaaacccaatccaaggaagctaaggaatacaataaaatgatacaggtgatgaaaaatgaaatggtcattttaagaaagaaccaaactgacataatcgagctgaaaagctcacttcaaaaatttcataatacaggcggggcacagcaacacaaagatgggcagcagttagaaaaggacaggccccctaatggattctcaatgtttggttataaagtcggattacttgctggcacctaacattagactacttgatgcaaaacctccgttccagcctgatgctccattccatcaagctaattatcccaagctagaagcacagaggggtcacttatgtgtgggccttccctgttaaagcaatttttttttatgggccaaggaggaaagtcttcaatttggactcgtacagaggatttcctttgtcctgtgaaacagtcagatgttcaggaatgatcctttatttacacaggaagtttctaacaatagatcctgattctgctattaggtttcctctttctcatttattctaagagaatttgaaattcaaaaagaaaagagaagaactgtgaaaaagcatgatgtcttgaatgtgctattgaagtgaagattaacctttataacagggcatctgctatgccacagctctatgtgtaaagtctgtttactaaagagggcattaatcaagacataggcatccatttataatctctttgcactgttgctaactccagagtgagctactgtcattcttcaaacagcttatttagggaaaaaaatcaaatgtatttcagcctcgtatatatggttggcagtctgtcatagcttcttaaagtgattttctgattatatagaagattgacatgagaaattcaaaatcaacatatcttaaactcatgccggtgagtttgaatgatgatattaatccataagaatcaatttcttctgatttgctgtgcttgggttttacaacataaggaaaatgcatttggtgaaaacacttcttgctttgagtgaagagttattcaaaccttaatcaagcaagagcctagactaggcactttctcacatatgaccttatttatttaattctcacaagtatggtgtgagttacagataattctgtattacagatgaggagagtcaagctaagcgaagttaaatatcttcctgaaggccacatgctcttaagagaattgaaacacaagtattctaacttgaaagtcactgacttttctgctagaacactgtcccttctgaacacaaattgtcaggagggtaagattatatctcttgttgagctcatcattgctgttctcaatggtcaattttaaaatgcagcgccccccaggaaggtttctggaagcatactcttgttctctgttaattggcaaaccaagagttcttcttcaattcatggatggctttggtagctttcacacttgtgaacataaacagttcactcaggtgttgctctgatttgcccactgtgttttctctcattttaagtcaaccggaagacaaataaatactcatgacaagttgttaacagagtggaaactgctaattagagggtttaacggaagtggtgtattacgtagtatttgtcctcattgaatcttaatcagtctttaagtaaaagcaattacttaataaatgttgaaattaactagttcttgaaagcatacaaaggttttcgttaggaaaacctttgtaaacatcattaaaacaaatgtcataggacatttggaagacaaaacgtctttctggttcatagatttcaaatactgtaagacccataaaacagtgcagcttatcacctagccagtgtaaagtattgtgaaatacccagtggtgctgtctttgatggttaaaaagggtttttatttatcttttggggtaaattaactatttggaaaatatcaataatgagggacagtcttttgcactttgatattttctattgccttatgttaccactgtactatcaagcagaaaaatattatatccctatctgagtgatatatctacattaaagttcaatttcacctctgaagtgaatatgaattgtatttaatgaaactctaagagcagttgtacagagtgaaaaggccaaataatttggaatcaaatttgtcaagtaacattttacaaaagtgacatattttcttttttcattcttcatcatgctcacaattcaaaactgagtccaaatgtcacatcacctgttttgattcgtctcttctctgcctgacagaattaggctttttcctctgggctgaaacagccccttttcctttcctctgaaataaaacttgcagcatgatattgtaaattttgggtttcctgaagggaaatgattttctattactcatctttgaaccccctatgcccatcagagttcttggcccacagcaagagctcaacatgtttgttgaatgaataatgtaaattcccccaaagcacatgaactcatttcatgctaaaaaatttcatgttcaaatgtgtattagctagtttctgtaacaaataaactccaaaatttcagaggcttgaccaaatggaattttattttttattcatataacagcagtgtggttgttcttggtcagcaggagggtagctttcaaggactcatactcctttcttttatctctgcctttctctagggcctcagtcagagtcttaaatttgtgttgatttacatctttgtaatatatagaaatccctggatatattcttatataatgcaatgcatactgccttaggcaagccacttacctctcattagttcatatacttaatatttgagagtctac

SEQ ID NO: 473204 - DNA, 499 bp, Homo sapiens
cgagcatctgtgttcatcacattattgggcaggaatggggcttcctgagagccaaactgtagtgattgtttttgctcttctgagtctatccattcagcagagctatcaggctctgggctggtactggggagtgttgagcaaagattcctgtgatctgatttgtcctcaggccttttggccgtggataacagcatctgctcctgtggagctgtggtcctatagagaggaagcaaacttgcctgagggtctcctggttaagtattcaggtttcgcaggcagtgggcagggccatagagctgccaagagattatatcctttgtcttcagcaaccagggcaggtagaaaaagaccactaggtgaagtagagttgttcaaggccttgggagcccaccccttgtatcggtgtgccctggatatggagcacagagtcaggagattattttggagctttaagatttggtcactgccttgctgggttttttacttgtgaggggtctgt

SEQ ID NO: 473205 - DNA, 1787 bp, Homo sapiens
agcagcctgcctcctctttcctttcaacatgacagatgccacagtgtcctttgccaaggacttcctggcaggtggagtggccgcagccatctccaagatggctgtagtgcccatccagcgggtcaagctgctgctgcaggtgcagcatgccagcaaacaagtcaccgcagataagcaatacaaaggcattatagactgcgtggtctgcatatccaaggagcagggagtcctgtccttctggcgcggtaacttggccaatgtcatcagatacttccccacccaggctttcaacttcgccttcaaagataaatacaagcagatcttcctgggtgatgtggacaagaggacccagttttggcgctactttgaagggaatctgacatcaggcagtgctgctggggccacatccttgtgttttgtgtaccctcttgattttgctcttacccgtctagcagccaatgtgggtaaagctggagctgaaagggaattccgaagcctcggtgactgcctggttaagatttacaaatctgatgggattaagggcctctaccaaggctttaacatgtctgtgcagggtattatcatctaccgagccgcctacttcagtatctatgacactgcaaagggaatgcttccggatcccaagaacactcacatcctcatcagctagatgatcacacagaccgtcactgctgttgctgggttgacttcctatccatttgacaccattcgccaccacatgatgatgcagtcagggtgcaaaggaactgacatcatgtacacaggcatgcttaactgctggaggaagattgctcgtgatgtaggaggcaaagcttcctttaagggtgcatggtccagtgttttcagaggcacgggtggtgcttttgtgcttgtcttgcataatgaaatcaagaagtacacataagttgttttctaggatttttctcctggtgaacaggcatgttgtattatataacatgtcctgagcattcttgacagactcctggctgtcaatttatctgtggcaactatttgctgttgaaaatgagaagcaataatgttcatctgaccagttttctcttaaagccatttccatgatgatgaggataggagtcaattatattttttatttcagttactcctgataaacaacaaatttggagaaataaaaatatctataatgaagaaaaaagaaggccttcacttgagcaggaacaaagctgtgtgcccaaagtgattttaaaagaacatgaactggggctgggtatggtatttcacacctgtaatcccagcattttgggaggccgaggcagaaggattacttgagcccaggagtttgagaacagcctgggcaacatagggagactcctgcctctacaaaaaaaaatttttttaattcaaaagaacatggactgcagaattatatataacaacaaattttaaaagaaaacaaaaaacaagttaattttttaacaatgagagaatgaataagtacatggattgttcgtataatggaatactacacaacactgaaaataagctgagctatgatcatgtaacatgattatgtaaataagctatgatcatgtaacatggacaaaatctgcaaaaataatttgagtgaaaaagcccgttagcattgcagcctagatctttctatagtaatcagtattcagaggttataatgctagaaactttctacagatgttccttgtgttcgtcagtgcaagctgcctgaaatttgagttttaatgcctaatagaatttagccttacagaatcagaaat

SEQ ID NO: 473206 - DNA, 514 bp, Homo sapiens
ctccccagccatgaggaactgaatgcaaagatggtctggtcatcaacatacaccttttacacctctgcggcacaaaatgtcaacaagaactgtccagtctaccagcaagaaagacagagactgtggagggctatgggacaggctccccagggagaaggacctgcacggagctggaaaataggctacattggactggtgccagtatctcagagagactgtaattgtatcttgacaagaataaacactaacttaggactggactttgcctacctgatgggagaagaaaatgctcacaatgttacccaaacatcagacttcagtctagatcctgctgttcactgcacagaaaaacgatcactgagacaaggagtattgccagggaagaaggatttatttgcatgctgcagccaaggagaacaggagatcaggctcaaatttgtctcctcaactgactgaaatttggggtttatatagcagggaggaaatgtaaccacatgtgaaaaaataggaattc

SEQ ID NO: 473207 - DNA, 552 bp, Homo sapiens
actgccagcatgctgtcacctctcaataatagcaggcagtcaggtccccgtgttgcaggtctgctggagtttgctggaggtctattccagaccctgtttgcctggatcaccagtggaggctgcaaaacagtaaagtttgctgcctattccttcctctggaagcttcgtcccagaggggcacccgccagatgccagcaggagatgagttttatctataagcccccgactggggctgctccctttctttcagagatgccctgccaagagaggaggaatttagagaggcagtctggctacagcagctttgccgtgctgcagagggctctgcccagtccaaatttcctggcagctttgtttatactttttgtgcttgaaatccagcaccctggtggtgtagtgacccgagggaatctcctggtctgcaagctgggaagaccatgggaaaagcgacagttcacatgaagaatataagataatttatggccatattttaaaaccaccaaagcctttttaaaaccagtcaataactcatactttcttaaaaaataaggt

SEQ ID NO: 473208 - DNA, 600 bp, Homo sapiens
ctcccctagaggtttgagcagcagggcactgaagaaatgagtcacacccccatcacatgccctcaactactcaactctgccattgtgggaaagcagccatggacagtactgagtggactaggatggctgtgaccaccgttactctttatgaccactggctgacagtgaaggacttagaagtcctgaaagatgggaaggacccagtcctggcagcattcatcaaatgccaactgaagagcccttcagccctgaataaccagcaacaatacccagatttaggtggctcagaacagagaaaggaactgtttgtttgggagaaactaagggaagagaacaagtatctgtctggtaatccagagaattctcccagatattgtccaagactgtcaaggcagtacttctataaatctgcaagaatcacattgttactgggcttgaggtgccccctaaggcagatacagtttagatcacaacacctaagtcctttcgaatatctgcaaagccttctcaataaggacgggcacaaacaagcccagagagtgaagactacagtaactatctaactattcaatgccttgacactgaataacacctaccagc

SEQ ID NO: 473209 - DNA, 1568 bp, Homo sapiens
tggcaccacttatgtcccacattttaatccatccataaaatcaagccaaaatgcctattatcaaagacaggaggaaggaaccctgggagaggctggcaggcaatgaggcattaagatcagactggccacatttcacaggcaagactgccctgctctgtccaggtcaaacggtcaacaaaggccaatgccgtcttgaagaatgtggcaagcctcagaagctgctcaggaccaggaaagagtcctggtgctcagcaacactgtgcagagttcctagcttcctctcccttcagcccaaggtctgcaccctccctccatctactctcaatgcccttcttctgaagatctgctcagagtgggctagtcttctcgagggcctggtctctcagtggaggaagctcttcttggctgcatcaagtcagccatcttggctcagccgcaggatgctcttgggagttgagtctggttattcatgacctttgtttggctggatggtatacacaagtttggggccagtgcatacttgcttggcaaagtggaataccggtagagagctgtcactagatggcctaattctttaattttcctccctgtatgctcagactctgctctgaattaaggttaaatgaatatttaataaaattttctttaaaactctagaaaattattacctagtctagtaaatcctcatgacctagtctagcccagatcacagtacatgatttctagacttctcaatgtcttaatctcttaaactttcatttcaatatgtccctattaaaaaagaagacatcaaaaatgaaatattatttggatatggccttggcaagcaaaaataagactatcacctttcttactgtaaatattttatttcagtggattcgatcatagactatactagctttttttgcatttaactcatatttattttgccatgacatattttcttaaattactcttacctttgtctctgtattaagctttattttctcccaacttatacctaggcagtcagttttgaacttccaggataggatattttaaattaaaatgtaaaatacatagctgttcaaaaatcatacagagttacactttataaaggagtatacaacctcagcatgcactgaaatgacaaactataaaataccagacacaacagatttctattttagtatgcttactttgtcacaagctttgcatgtgagggtctttgcatacatagatgacctaatgatgtattgttttctagctgttgtagttatgcccgttgggtaagtactggtcaggcaaatcaataagcacagattacattaactactgtacaaggaatatggatcttgtaactaggtgtgcaaatatcactgaagcttctgaccttaactactcttttctttctcacttaatcacttaatcccattatatccacccaagactgcacagatgctttaactcaggaatatattggaggttaaaaaaaaaaaaatcttcatcaaattttcagaaatatttattcacagtgctgttctacaaataagatgtaaaaatagttcccacaaatataactaagtatt

SEQ ID NO: 473210 - DNA, 681 bp, Homo sapiens
actaaagcaaggctaaaacagctttgacctgaactcttctctgatggagaaagaccatgagtatccaggaatgatggatctggaaggagaaactgtgaggttcagtgagttagaaagattagaactttctttcctggtggagccagagggagagcagctccatgctgaggaaagctatagagggtgtagggccgaggaagaaacattaatgacagtcattacattcccccagactttcacatggaagtttgagtcatgggaagtaaatgtcattcctgaagatgtgaatttcacctaccgacatacattgagtgcctcatacccaatccacattgctaagcaccgtagaagcacagaggaatgcaagataaggtccctgtgctcagggagtgtgaaagatatgcacacacacatcaaaccaaaatacaaagcagtcggtacagaggaacacggaaggtgaagagaggctagtaaagtaatatatttttctgacatgttatgtgctttctgtggtgtcaaatcaaaattttgatttaataaataatttataaaattaggtcttactgtaaagagtgtttttcacttgtgaattatctccctcatttctgtcacctttatatcaagtaaaataagttcataagttccatggcaaatgaagaatgattatgtcattttgatgtt

SEQ ID NO: 473211 - DNA, 873 bp, Homo sapiens
aggcattgcccaactttctgtataactcaggtgttggctgtagattatgacttggcactactgggctgcccactacaactctaaggtgatctcagtgtttatgttccttccccaacatggagacagcagggtaacagctcttggtagtggttgtggccaagggttgcttgctggtctcctgggaactccaccccagagggatgcagtattccccttatcaccaccaccaacaacaaccaaacacagtgggacatggagtaaaaagcaaaagagacaagaaccttcaaactcccttcagagacctgccactcctggacaggcagagaagccaagggcccagagtctttccagggctctacagccccacaggtcaccttcctcccctgcccattcacaagctcattgttctctgatgcacaactcaccagacacttgcctgccctgcacactcttcctcttgaaagctaatgatctaaaatacgtcctccctcatgagtaccttgatgaacattctattaatatttaaatggcattcccaccctacgcatccagaacccccaatccatttttacagcattatttttcttccaaaatactcatcatcatgtgacatactatgtatttttacttctgtgtttaatgtctgtcagtcccttattgcaggaattactttttcttgtgttgtcttcagtatgtactaaaatgtctagtttatagtatgagcttaataaatatttgttgaataaacaaatattgagtatttatattcagaaacatactatgtctcttaattttgtcaccttaattttggtctttcaactaagtttttaaagttgttatgtaggtttccatgcttctatgtgaaaaggatgc

SEQ ID NO: 473212 - DNA, 613 bp, Homo sapiens
agcagcccactggggagccgtaggctcatgctatgttgcccaggatggactcaaactcctggtcttagcctctggtactctggtacttggattacaggtgtaagccaccatgccagcagaactttcacttttactgcgagcacagcggcagaagaagagagacccaaggaggctactgcagttgtcccagcaagaggtgatgataatggtttggtcgtgggaggtggcagtggacgtggtgaaaagtggacaaggtctgcttgtgtcttaagagatcaacctcctctccttgactgcaggtttctccaggggacatggtctctacttcagtctgtgagatctgggtctgaatgcttaggtccagaagctggaaaatactttccttctatgagagcacttttggagggcaccgtgggagtgtgagagagggaagtgatggagtttgaagacagattgggtttgaataccggttctgtcatcttagccacaatcccctcttctgcaaaatgagaataatagtagtgttaaatcaagtttagcctgaagctgcctccttatacatttttagtttggcctaaagatttttctgtacatcatgaattataacctaagc

SEQ ID NO: 473213 - DNA, 440 bp, Homo sapiens
cttaagaaccgccctcgggtgataatgctcactcacccaccactcacctcctgctgtgagacctggttcctaacaggccacagaccagtaccagtccatggcccagggattgggaagccctgctgggaaagaagaagaagaagaagaaagaagaagaaagaagaagaagaaagaagaagaaagaagaagaaagaagaagaagaaagaagaagaaagaagaagaagaagaagaagaaaagaagaagaagaagaagaagaagaagaagaagaagaagaagaagaagaagaagaaaagaagaagaagaagaagaacaagaagaacaagaagaagaagaagaagaagaagaaaaaaccttgacttcattttcatatggttctgctggcatctttgaaagccagcagctgcagctctacagcaccacaggggagtgacctcaagg

SEQ ID NO: 473214 - DNA, 682 bp, Homo sapiens
cctgtgtctcgcctctctgctgagagctagactctgtccatgtacctcattcttcctggatgtgggacaagaactcgggacctgctacatggtggagccaaaagagatgtaacaaaaatggctgaaacacgcccctttctctccatgttgtgggtgacaagaaggaaagaagacctgtggtcctttgggaagcccagacctaggagctcctcgagccacggctgtgacaagctctttggtgctctgcgattcctggcatctcctaccttctgtgccagctgtggaagcagcttgcggtatgcttggtccagagcagcctctgagggagctggtgcccgtgtgggagcctggagcttcccaacctgctgcagccactgtgcctggctgtgtgcagtggccggaccccaggcttcccttttcacacacccttgccgctccacacctggctcacccttggcaggcatgagatccaggcaggtagcacaagccaagtgcaacctgccaggccaagtgggaggaacaaggccagcaggcccaagcaaaacttgggcaaaggcaccaccagccacagagatttatggttggaaaagcaataccccgagaatcctgtgacagttatatacataattttttctttaaaataaactatttcacatcaacatatgtagaaatatatttgggg

SEQ ID NO: 473215 - DNA, 968 bp, Homo sapiens
ttctaagagaccttgctgttcatctcagctctctcctcgtcttcccaaccaattgttctgcaggcagccaagtctggaaaacttcaatgtttaatattaatgtctacatagaggaaaacgagcctatgaatgtggccaagaacagtagtcaaagatgcagaaggaaaccaggagcatactgtgccacagaaatccagaggagagagagctacgagaaggagagagagattgacaatgcaagagacctctggttaccactattctactctctacttctatgggaaaagttgatcattttagctctgattctaagacaaagttacagaatagacctggcttcaactctgaagtattccttggagagggcccatggaatattgcacttaacattaagagtcaaatatgcttcagtcaaatggggagttatgattcctacctttgagattcgttatggatttataggtaataacattggtcccttctgcaagaactactggctccttctgaaggcaggtaccttctttccacatcgccaatgacatgcagctaagttcacccataagaaagcggcattgattggctgtggagtaactgactgcttgaccgaaaccacacagatgcatcaacctgcagctgcaatgatttacgtgaaggaaccctgggctacaggaaatacacttggaaatacttttatcttctttcttaacatttcttcagaggtggatttttcatgcggttaatcagcttaatcttcattgcacctcacttgatgagctcttctcaaggctttgaatttaatgttgagtttatcattttggtattatttttgttaaaaggagctcccaaatttgaacaagtttcagatctcacaaaaactgggtctaccccttcattaatcatagactaatcagtatttagtttaatagttccaagtattaaatttaaaagaccttctcttacacttattt

SEQ ID NO: 473216 - DNA, 1056 bp, Homo sapiens
aaagtcatcacacgcagactatatcctttgatttagcaaaaaccaaaccatataagtgtggcacttcctctctctctctctctctctctgtctctacctctttctctctctctctctctctctgtctctctctctccagccaccatatgctgatagtgacatgaacaataaagtcaaggctgaggtggtctcagatggagatgaggaacttattgggaactggagtaaaggtcactcttgctatgctttagcaaatagactggtggcattttgcccttgccctggagatctgtggaactttgaacttgagagagatgatttagggtatccggcagaagaaatttctaagcagcaaagcattcaagaggtgacctcactttttatgaaagcagatcttcatagcaattcctctcatcaccagcccagacgcttaggaaagaaaaatggttttatgggctgggcccagagccacactgctatgtgcagccttgggacacggtgccctgtgtctcagccgctccagctccagccatggctgacagaggccaatgtacagctcatgccattgcttcagatattgcaagcctcaagccggggtggcttccatgtggcgttgggcctgtgggtacacagaagagttgaagtgtgggaaactcttcctgggtttcagaggatgtatgaaaatgtctggatgttcaggcagaagaagtttgctgcagggacaggtcctgcatggagaacctctagtagggcaatgcagaggggaaatgtggggttggagctcccacacagagtccccaccgggacactgcctagtggagctgcgagaagagggccaccgttgtccagatcccagaacggtggatccactaacaacttgcactgtaagcctggaaaagccaaaggcactcaaagcctgcccatgaaagcagccacaggagagcagccatgggggctgtaccctgcagatctgagctgcccaaggcctggggagcccacctcttccatcagcatgccctggatataagagattaataaaaggaggttattttggaa

SEQ ID NO: 473217 - DNA, 1450 bp, Homo sapiens
ctctccagttaaagagcaatttaataaggcttagtgtcacacggtcctgggctctagcttttttatagaaaatatgagagataaaagaagaaggcaaacacagtcaaatggaaataatcagctcaattcagaacgtgggaaattctacagaagaaaaaaaaccaggtgtcttcaacaagtagttggcatgggagaaagaagaggagaagaaaaatgtaaagctgtggtcccttgcagtgctctgaaggtgtgggctcctcttccactcaaatgctggatgcagatcttggcttggcactcctgggctgcacaccatagccgtggagctagctcaggctttatggtccctcccaaacgtgagggtagcagaggcagagaccttggcagtggtaatggcagagggccagagggtctttcacttgtctctcagggctgcaccccagcacaacacaaagcagttatcaatcagaacaatcagtctgaggtggggcggctgtgttgtgggcccaagctagacagccctgcctaatgatgagcaagaggatgggggtgctcacgaagaagacagactgggttccattttagatcttaattgttaagaaaaatatttaaaaactccagaaagacaatcagaagaacgaaatcctgagttgagtattagatgctattaagcaattattcaggaaagttggtaattttgttgtttgtgataataatattgtgcttgtgtctttttagagttcacatctataaaagttacatatggaaatatacacaggtaaagtaatatgtcatattgaatttgcttaaaatacttctctgtccaaaaaaaaaaaaaaaggaaatggcagggggtgatggatgaaagaagaaggaagaaggaagaatggagaatggcaacatgttaataattgatgaagatgggtgataagggctaaatttgagtctgaaaatattcataagatttagttaaaatagccattgcaacttaattattagctatgtgatattggacatgttttaaattttctgagctctgattttctcattaatgaaacagggataaaaatgtttttccttccatgatcgctttgaagattaattagtgtaataggcctgaataatgccaggctcctagtaagtacttaataatacaaaaatcccttgtagatgtcatggaatatccttaacactttgtttaaaccagtccttctaagtaagcagattccagctcagtgaaaaaaaaaaaacactgcagacagtgttccttttgaatccagatttaagcatggattcacgctttgtatccagaaacttggtgatatgattttgtatcccgtggatgttttttgaggacatggattctgtctcattctcacctgaattcctatataacagggtgctggctgtgtagtgaggctgtgtttgtcagctggctgactgaattagc

SEQ ID NO: 473218 - DNA, 794 bp, Homo sapiens
ctgtaggttccctggtctcatagtcaagatgagggtggacttagacccactattagactcaaaatactgcattttgcattgggggccagtttatctgctggtccagtgttctggggctgctcagatgtcacttggggctgctttagatcccgaatatttagggaaacatggctcaagccttcagtctcatggactatatgagcccagagctctccccacaattcctgtgaattctaaccttgggtcctcagggtcccatgtggacccctttgccaatgggatgcaaatttctgctggttcacagatttcctctaaaaattttactgaaagcttatcttctgccacttctgtgctttttgttggcttatttgtttcgttttttgtttttatttttttagtaaaaaataggcactataggcaggtcagctttccatattttccttttcccaattatgatgaatatagttttatttatttaattagctaagtatttttatgttggactttgcagcagcctcaagtattatttcagacttggcaggcagcatttcctgcacagatgcatttttcaaacgtaagatgtccataccattttgtcttgtttactcacttatcctaaacatattccagtgtttctccagagtcttcaataaatgtaattattaacacccataatctaccattctagctgcatttacaacaatcaaaacttttattttccctttaacatctataaatgcatttgcacaaaaagctgctcttagcctgtggttttaggtgagctgcctgggttg

SEQ ID NO: 473219 - DNA, 680 bp, Homo sapiens
gagttaactgcaacaggagagcagttcatgctaggaccaaagtatttgaaattggaaaacctcatcctcaagctgaaaagcctgaaacggtggcccaaagtgagaacgtatatccctggtttcccgctggaatgttaccttttcctaaaccacccagggccctgccccaccccatcctctgcctataaagaccccagattcagccagcagagaggagaagcagctggacattggggactacggctggatgttgtcgacttcagagggacagctcaaaggcaaccactttcttcggcaataaaatcccccacgtttaccatccttcaatttgttagtgtgacctcatttttcctggatgctggacaagagcttgggaaccatgagtgtggacacaaaaggctgtcacactggctcttttcctgctctggcaaagggcagccacctcacgcaaaaagggaaagggcccgctgaactgttgacacttaagcaacgctgggtctttagtcctgtagaatttgctacattctggatttggctggatttgttgtattgcatgaacatgtcctgttctttgtatttcctgcaaactggtggttagatctagaggcgtgatcagactcatgcttgattgatttattttgggcaagtatacccaagggtgttattgtgtacttcctgtt

SEQ ID NO: 473220 - DNA, 788 bp, Homo sapiens
gagtccatgtagcttcacgacgaactgcaggtcctgcagcagggagggctgggcaaccagagcttctcaagctgactcatgctcagctccattactctaggattcaaagacactgcccagtacctgttgatgttctgtgttgcaactgagagcacaatacagaaaagacccctgtctgtgccgcaagactgcatgttgtggtatgaagggcttcaatcattcaccattcattcaacagatgttttcgttagtgttgctagatgctggagacattatgtcgagcaaaacagatgtggccctggtgttccagtttggagaagacacagccaagaaaagaggccagtgcaattcaatgtgatgtgtgctgcaatagggcagatacagcgtattaggggagcacaaagagaggcatctgatccagctctggggagtcaggaaagacttctccaggaaagcggggatccatctgagacctgcaaaatgagcaggcattcaccagaagaaacgagaagcgtgtttaaggtagaacaaagagggaagcagtcaatgtttctgaagcatcatggaccaggtgtgtggtggagtcatgggagaaggatagagtgggcattatttaagcagatgctggctcatatcggctttgaaaaccttaggaaggagtgtagactttatctcaaaggtaataactttgtgatatcacccagatgttgtgggggagtggtctagagggaagcaaggctggggataaagaggctagttaggaggctgtgacaatggaggcaaaatgt

SEQ ID NO: 473221 - DNA, 504 bp, Homo sapiens
ttcaagcatatactttctgcctgtgtgcatgaaccatctctttagatgcctggtcgactctctatggtgtgtgactagtgctcgcctgcctccttgcctgggcttatgctgtaccacctgcctgaaatgctcctttcctctcctgtcccaaccaaatttcatctatctttcaagatccagcacctgcacagtgtttgggacatgcccgatagttgtcccctactggaagactgatggactaaatattgcaagaaggcacgaagacactaaaccagtggttctcaagcttgagtggcctaagacttccctgggggacttggtaaaagggtttcctgggatcagcccccagagatgctgcttcagcagtggttttccatctttgccaacattggaatcacctggggagcattacaaaaatctccaggctcggaccacacctcctgtcaattaaatcagaagctgtggacgtgggatccaggaacagtatttttgaaactgtgcagg

SEQ ID NO: 473222 - DNA, 689 bp, Homo sapiens
gaatttcccttatatcctatcctgagttctctctggtttctagcaatctccctgtccctgaaatattagttaaagggtatgagggctgagaggctctgtttctgctggtctcctagcctggcttcctcactgcctgtgactggccattctggtgacttcaagccttggagattaaagcccgtgttagtctttcagcacctgatgaaagcgcttaaccagatcatgaagtacattgggaaatcagcctccacagctggaggaagctctgaaagttgtccatgtgggtccgtggccgtgctgctggcagatgctttgatatacccaaaaaactgtgagtgcccaaaatgtgaaagggggatattctgcccccaaacatatacccttactgggaaacctgaaggtccagatcccagatcacaggagaaggatttgaccttacctggagctgagatgaatttagagagtcaagtgaaatacaggggtagaagcagcagcgagaagagccctgtgggcactttcattctccagggatgccatttctgactttgtctcacagggatcctttgggagggctgccagaggaactgggaaatgaccagagagaaggaaacttccagctgaactttgtaacaatttcaaccgagtgcaaagtttcctggacagaagttggggtcgggggtggttgaatc

SEQ ID NO: 473223 - DNA, 822 bp, Homo sapiens
tctgcatcagccaagccacagctctgctgtcatttttggtccacaatggccctgggctcactggcctctggtccacagggattgtgtttaacatccttgatcaccagtgaagcacagccaccaaccagtcagaatggttgtcatctgtgcacgaacaatgctggtgcatgccctgtgaacctcagccctgtgcctggaggatttccatccctgcttcagcaggcttctctagctctctgggtgtcattccatgttgcatctgtccttcttcctggaatatcagggagtaaggagaacacagacctgcattttagtccactcaaacacttcgaaaacactcgctcctcaagggaagtgacttttggggatttccacagcaagtgcttaataaggctttttttaaaaaaaacaaaaaccaaacaggccttgtttaatgcattaatattttaacagagcaagtctgggcctttcaagcaaatctagtcgctattcaacagtcaccttagcctttatgctaggtataaagagacagattttggattttgtatggaagatgggctttttgtgacagtaaaatgttttattttatttttacaaattataatacaataaaatcgactttttcttttggtgtataaaattttaacccatgtgtaaatttacgtaaccaccttcaggatacagatctatcactctaaaaaactcctgcatgctagttctttgtcttaaaaaatatatatactgatgtacatgtaaaatggaagctacaaggatatttgtaaaataaagtgtacattttatccatatgaaatcaagatagaa

SEQ ID NO: 473224 - DNA, 900 bp, Homo sapiens
ttttccttctgcttcctctacctctgtatttcactcagctctctaaattgactcagctccaggagaaattcaagatgcctgcagaaatttgcaagaagtttgctgaaggggtgaagaagtttgctgaaggggtgaggccctcatggagaacctctgctagggcagtgcagaagggaaatgtgggctcagagctcccacacagagtccctacctgggcaccacctagtggaactgtgagaaaagggccaccatcctccagactccagaatggtagatccactgacagcttgcaccatatacctggaaaacccacagacaatcaacaccagcccatgaaagcagctgggagagatgctgtaccctgcaaagccacaggagcagagctgcccaagaccatggaaacccacctcttgcatcagcatgacctggatgagagacatggattcaaaggagatcattttgaaactttaagatttgactgccctgctggatttcagacttgcatggggcctgtagccccttagtgttggccaatttcttccatttggaataggtgtatttacccaatgcctgtaccctactgtatctaggaagtaactagcttgttttgattttacaggctcataggtggaagaccttgccttgtctcagatgaggctttagactatggacttttgagttaatgctgaaatgagttaagactttgggggactatagggaaggcatgattggttttgaaatgtgaggacatgagatttgggaggggctggggtggaatgatatggtttggctgtgctgccacccaaatcttaccttgaattcccatgtgttgtgagagggaccccatgggaggattggtcccacgtgccttattcgcttcttttggtgagatcatgtttt

SEQ ID NO: 473225 - DNA, 479 bp, Homo sapiens
tcccggctgcttcagctccagccatggctaaaagggaccaatgtacaactcaggctgttgcttcagaaggtgcaagcccttggtggctcccacaaggtgttgggcctgtaggtgcacagaagtcaagaactgaaatttgggaaccttcacctagatttcagaggatatatggaaacatctggatgtccagagagaagtttgctgcaggggtggaaccctcatggagaacctctgttagggcagtgtggaagggaaatgtgggttcagagccccaacacagagctcccactggggcactgcctcgtagagcttgtgcatgtttgagcccatttgcccaactcctgaaattctatcggaaagctactgatcaccagcttcgggtattttctgtctattgggaggctgtcttttcgtggcgccagctgcaaccaattattttggagagacagtttaacaacaacctgaccataacctgatgg

SEQ ID NO: 473226 - DNA, 504 bp, Homo sapiens
acctaaaatggcatttattggcagaatattggtgcagaacagggatggccatgaccagcagactggctggattgcaggtggccccagcagggagactctcacagttggtgatgagagaagttcacactgtagattgaatgagagctcagaaaccttcacacctggagagtttggccaggccctgaaagacatcaagaagtctgcaaaggggacagaatccaggagagaatctgttaagaataaggagacctggagagtgcggaaagctcagaggcctaaagtggaggagtggggacaagaaaagaccatcagaggcaagcaggttgctggcagtgacagtggtgacattaacgtagagctggctgtggacacagcaggttctgggccctgattagggtgcccctcccaagctaaaagactaaggcatgaattaactgagaataaggtagtccccagtgtctaccgttgtcattatgtccatgtgtacccaatatttagttcctc

SEQ ID NO: 473227 - DNA, 550 bp, Homo sapiens
gcgtgaaattcatggacgtcacgagccggtccatcatccgcaatgtaaaaggccccgttgggttcttcaatgtaaaaggacgttgggttcgcccgcatggccgatgggaatggtgtaaagaatatccagctggtggctacagttccccctctggttttgctgccatgcatcctgggcgaactactggtaaagggccctctactcacactcagattgaccagcaacctccacggcttctcattgtgcacattgctctaccgtcctgggctgacatctgcaccaacctctgtgaggctctgcagaacttcttctctctagcctgcagcttgatgggccccagccgcatgtccctgttcagtttatacatggtacaagatcagcatgagtgcatcctcccttttgtgaatcatagtgaagagaaagacttccagaggttctatgcatctccttccttgaggtagccttgctgctaatatacgttatcaaatggatataagtcttatttaagatttccaaaagaggaaatttcataaatccattgctgaattat

SEQ ID NO: 473228 - DNA, 974 bp, Homo sapiens
ctgggtgttcattcatagccatccagggcgtctcagttggcttggaggacctggggcttataattgggcgccagggttgggggtggctgcttctgcggggcaccgcagccttggagaggtggctggtagttggagggcagcgagtaggcattctggtgggctttgcggaaggagggcgggggtcatggactgcagggcgtttctgaagtcggcgtggacggcttgctctgccagggagaggggccccccacaacgaggccatctccttggcccataatcctacttgtacttcatgcgccggttctggaaccaaatcttgatgtggtgctggctgtggtacagcaggttggccatctgtaggcgcgaggcccacgcaggcggcatggaagtggaactcgctgtccagccccacccactgcgcgctcctaggactccctgggactcgtgtcttcctcaccgccgctgccgccccctgttggatgcaaagggcagggtggtgggaactacatccctcccgcaccacttcgccccaccccaccccgattctggacaggttctgtaattgcttggcctgcctaagtgacactgtgccagtttatggcctcaggccttacgggaccagcggcttccacttcctgctctgggaatctggactctcggaacccaaatgccatactgcgaggaagcttcagcagccccagagacacatgtgggaaggagttagggtccctggtaaccagaacaaggaccgagttgtgggctttctgactctcagccagtgtttctttcactctattttgctggagctcagtggttccctggcaggtccagaaatccagaaactaggcctagagttgggaactgtagtaacctactcagttctctattctgctgtggctgagctgatacgcaagccacaagacaaagtccttcctcctcttccatatcattttcctatgtaggaggcatctttc

SEQ ID NO: 473229 - DNA, 515 bp, Homo sapiens
cacaggtaagcagctgacaaattctgccatgctttcaactggtcgtcagaaattttcagttgctcttgttttggtccaatatgttggtatttgcagggatgaagaaccaggaggccagctggttacagataagttccatattgactgggattccgtactcattgacatggataatgtcattgtagcaagatttgatggcagaggaagtggattccagggtctgaaaattttgcaggagattcatcgaagattaggttcagtagaagtaaaggaccaaataacagctgtgaaatttttgctgaaactgccttacattgactccaaaagattaagcatttttggaaaggtctacccagatgaaggtcataacgtatctgagaagagcaagtatcatctctacagcacaatcctcaaattcttcagtgattgtttgaaggaagaaatatctgtgctaccacaggaaccagaagaagatgaataatggactgtatttatacagaactgaagggaatatt

SEQ ID NO: 473230 - DNA, 628 bp, Homo sapiens
agctcctacagcgggctatatcatttgaggttgaggtaccactataccgccatggttccagataataggaactcttgctgtacttcttatcatttctaccatctgaccattttgttcacatcagctgaacatagtgtggccgtggcatgcatactgagagtggccactgttctatacaaattggcttatctgttaaccattttaaagtgtgaaaaagttccaaggtggaagaaccacaccccacacttgtcccactgttaccctgatgcttctgagctccccttcttactcaccacgggaattgctataagagtactcgggtgtcctccagctagttccaccctctccaactgttgctccagcaacccttcgacctggattcgagcccccacatatgggcgccgcttgccaagatcagctcagttggggagaccctaacccagccttgtgatttttaaaaaaacacaactgtgcagtttgaatatttaaaggtggtaactctggaaattagattctcctcattcccctgggtttgctggtgttaatttttgttaattttttagggctctacttgtctatttggtgacttttccaaactatttttacaaagattgtattccttatgctg

SEQ ID NO: 473231 - DNA, 813 bp, Homo sapiens
tgcaaccatacattttctctggcagggatgaaattggagctgaagaattacagaggcgatttgcatgtttctatatccttctgtcttgtgctcagaaagcctgtggttccaattaccagcttacagaaccatgtcagcggggaaagtttcccaaagggatacctttcattgccatcaaggagaggccaaagaagccatgggaaggggaaattatacctggaagctcaccgagagctctctaaccaggttaaatcaacagcacagaccgctgacatggcaggaagttcttgccagaatcagccagttgtaaatgacaaatggatccgggtctccaggcgtttggacgtgatgaagaagaaggcatatcatggaaacgtcctagacttggaactaggtgtgatagctagatatgactatgtcatcttcttggaaagagtttagtgcatttttttataagtagaatcacagaatctgggacagaaatgtactgacatgcagttcacaaactggcactggtttaaaataagcactgttgtatgtttctgaaattcataaatttcaaatatcttttattctgatattaagtcttttcacttttttggcattaaaactgcatttttaattgaatcctataagtggttttatgcttatatgtatcaagctacattagatagctctgcagtttacattatttaaagttttgctggtttgtgaaactccagaatctgcatattaccaaattaggtcaatatcttttactgattatgacggttaattttatgtgtcaagttggctgagctatggtcccagttg

SEQ ID NO: 473232 - DNA, 2403 bp, Homo sapiens
tggctccacatctcctttttgaagattttttaaatcaccattaagttgtggtggtttggatcgtgttcccacccaaatctcatgtcgaatggtaatccccaaagttggaggtggcgcctggtgggagatgatcagatgacaggggaaatttcacatgagtggtttcacaccatcccctttggtgctatttccactggtacctccctgtcttggaagggaagaagcaccttattactgctccccacatggcctagactttcttcacaagagggaaggcctcatcacccatgggcagtgctgaacgtccaggctttgcacttggcttctgatgacactacccagggaggagaggaaggaatgcctcattactgcagagtgagcaggaaagggagtccatgctccttacctggtctctacagacaccttggtgatggttgggtgagaaggggcttggggccttgtaattgcccggtagagttaaaagtcccagctcttttggggtcttctttgttatcccctgtcactctcctggtgtgggggttcaggcactttgatggagcctggaaagaatggaagtatcggttttccatgtagactttgctggattgagagaaatcccttcccttccttcccccctccctccctcccttcctcccttccttccttcttctctctctccctttcctttcccttcctttcctttcccttcccttccccttccccttccccttcccttccccttccccttcccctccccttcccttccccttccccttcccttccccttcccttccccttccccttcccttccccttcccttcccttccccttccccttcccttccccttccctttcccttccccttcttcccttcccttccccttccccttccccttccccttccccttcccttccctttccttcctttccttcagacaaggtctcaccctgtcacccagactttaactagttctgtttggataaacggaattctactaccccaaaacaagttgcaaacaacttttctcaattaatcacttgactgccctgtaaactgattcattatttttccacttttctgatctcagttagcaaccactctgccaacattgcaatgtcttttcttcctgaattcttctcattggatgtagtatatgttttgtccaatgactttcctgtatgttaaaaagtcacatggctaatcttctgtatatttatatttagttaaatatttaattaatttaatataataatttaatatttaatttatttaattattgttagtgttgaaatgacaatttgttacatacttgatacatttgtggtagagttttaggcactgaaaatacaaaattgagcaagatagacaagttccttgctcatatagacttcagcctagtagggaagactgatgaccaaatgattctataaattataatgaggaatccaataaagcttgctttgaagggagaaggaagagagtgtgagattcagcacatgttctaggctcttggtatattatataactccctttgtcctcctatttatcctgaaatatcatcttatgcctacttttccttcttgtaaccttttttttttcctttcaacccatggaaaaattttatagggtcagaatttagaattagaagggcactcagaaaccaggtgtcttcattttagagtagaaaaatacaaaaacaaaaccaagagtgaggtgacttgctcaagatcccacagctaacaaagagtagaactgtcttctagggtcttccactcatcagactccacctgtgcgttcttgtcctctgttgtctgagcactagtgtagcataatgtggacttaaaatttatttgatgcgtaccattcttcctcctcatcattagtttttcatcatgtgtacatccttcagttgaactagaagcttcctcagcacaagaacatactttttttccttctttttaatgtaccaatctacaggagagtttcttactcccctctggggttttgccagttttcaggaagatttagatttgctcctaggcaaatttcctcatctgtaaagcagagataataaaaaacttaaaatagtacttttttgtttttatttctgtaaacgagaccatacatgtaaagtttgttgtttaatgcctgatgttctgtaagtgatcgatgattatcaatgaaatctgttgctgtcatttaatcaatcctttgctcattcaaggtttatcttatgtaatgggaaccagttctttatgtcattttgtgattaaattccaacttattcttctttccagtcttctcagttgcaattaattatgtgtttcttattagttacacaagatttttcttgaacttatattaattcaaataattcatttttatctgtgttggatttccag

SEQ ID NO: 473233 - DNA, 838 bp, Homo sapiens
cagcaggaaaaacttcttgatattcactccactgaaaaatgtgggtgttccatcgaaaacaggggtccctggacatctgctagccggccctcgcttcctgtgagggctgcagggaggctccttctggctctcagcatccccagaaagggaaatctagagacacgcacacaggaaggatgccacgtaaacatgaagacagccatctacaagccacgaagagaggcctggaaccgatcggccctcacagcctcagaagaaacccctgccagtactttgactgtgttctttgcctccagaaccaggctgttgaaagaggattacccctgggtttggcagttcaaacgttgttgtgagcagtggaaagagttgagaatgatggtaaaaaccacagacaaaacattgagagtcaccgaggggtgggagtatggccttgcatgccttggggcagaacacctgtttttaacgtcttggctgaccactaactgggtcagggattttcagcactgtctgcatgtgagaaccacctgggaagctttagaaatcctcggtgcccgtgcagcgcccccaaaccaattaggtcagaatctatgtggtcgggaccctcgaagcagcatttgtaatccaaattcctcttatcatcctggctttggcactttccttcctggggttgaggccagaggcggaggcaagtccagggaatacgaagccgtggctgaggtcactgacgctaagcctggagaacctcataaggaaatcaatgggagcaacacccaggccgaggaaagaagacttaacaggagctggggagaaacatctgaaaacaaaacctgactcattt

SEQ ID NO: 473234 - DNA, 3794 bp, Homo sapiens
cagataggagttggtcaggtgatgaaagcagtttgagagaacgtctgtgctctttctacgtcaatgttaactttggggctgtggttaagatgtatatattttgtgtatgacctgcagtggaggaagatctttgatgatgaaccaactatcattagaagagctttttactctttgggcaattatattgtggcctccgaaatagctaaagaatctgccaaatctcctgtgattgtagacaggtactggcacagcacggccacctatgccatagccactgaggtgagtgggggtctccagcacctgcccccagcccatcaccctgtgtaccagtggccagaggacctgctcaaacctgaccttatcctgctgctcactgtgagtcctgaggagaggttgcagaggctgcagggccggggcatggagaagaccagggaagaagcagaacttgaggccaacagtgtggtagaaatgtcctaccagcggatggagaatcctggctgccatgtggttgatgccagcccctccagagaaaaggtcctgcagacggtattaagcctaatccagaatagttttagtgaaccgtagttactctggccaggtgccacgtctaactagattagatgttgtttgaaacatctacatccaccatttgttatgcagtgttcccaaatttctgttctacaagcatgttgtgtggcagaaaactggagaccaggcatcttaattttacttcagccatcgtaccctcttctgactgatggacccgtcatcacaaaggtccctctcatcatgttccagtgagaggccagcgattgctttcttcctggcatagtaaacattttcttggaacatatgtttcacttaatcactaccaaatatctggaagacctgtcttactcagacagcaccaggtgtacagaagcagcagacaagatcttccagatcagcagggagaccccggagcctctgcttctcctacactggcatgctgatgagatcgtgacatgcccacattggcttcttccacatctggttgcactcgtcatgatgggctcgctgcatctccctcagtcccaaattctagagccaagtgttcctgcagaggctgtctatgtgtcctggctgcccaaggacactcctgcagagccatttttgggtaaggaacacttacaaagaaggcattgatcttgtgtctgaggctcagagcccttttgataggcttctgagtcatatataaagacattcaagccaagatgctccaactgcaaatataccaaccttctctgaattatattttgcttatttatatttcttttctttttttctaaagtatggctctgaatagaatgcacattttccattgaactggatgcatttcatttagccaatccagtaatttatttatattaatctatacataatatgtttcctcagcataggagctatgattcattaattaaaagtggagtcaaaacgctaaatgcaatgtttgttgtgtattttcattacacaaacttaatttgtcttgttaaataagtacagtggatcttggagtgggatttcttggtaaattatcttgcacttgaatgtctcatgattacatatgaaatcgctttgacatatctttagacagaaaaaagtagctgagtgagggggaaattatagagctgtgtgactttagggagtaggttgaaccaggtgattacctaaaattccttccagttcaaaggcagataaatctgtaaattattttatcctatctaccatttcttaagaagacattactccaaaataattaaatttaaggctttatcaggtctgcatatagaatcttaaattctaataaagtttcatgttaatgtcataggatttttaaaagagctataggtaatttctatataatatgtgtatattaaaatgtaattgatttcagttgaaagtattttaaagctgataaatagcattagggttctttgcaatgtggtatctagctgtattattggttttatttactttaaacattttgaaaagcttatactggcagcctagaaaaacaaacaattaatgtatctttatgtccctggcacatgaataaactttgctgtggtttactaatctatgctgtcatcctgggtacatattgatttgtctgaaaagtgctttctcagattccccttttaatattgtgatgtaaaggagggaaattttggtaaaggaagttgaaaggtgtgagctggcaggctaagtggaatttgtggtcagagtgctttcagagaaaggggagggctattgttttattttacatatcatttcctcattacaaatattaaagacattttgtaattcattctttttacacctggactttttatatactgataggtatatatgacttacgagtattttgtaaaatagcacctcctaccctaaaactgatggcaagtaaccctttgcttggctctgctcattgcaagacgagctttggttttgttcctgtgatagaccattagttaccccaaaatttattcttcctttcttccatggtaatgtaatatttagcttggtacatgggtgccaataattcctagtgcatttccaaggctcccttaacagctggaggtgggcgactggctagtttcttgccaatagtatgtgagcagaaggaatacctgaaatgtcaaggggatattatcactttcccctttaactcttcatatcggctgtattcagaggtgatagccatctaaggaccaagagatgaggatgacactaaaaggaattagcttgccttaggtaaatagcaagggaagggtccccagagagccctcggcccaccagtcagtgcctcaccccacataatgtaaaaagcagcctggggaaaaaatcaagctgcaggcactgataagggaactagcacagggtgttgtgcctggagacatgcctacggctgcacagataggagagcctctggcccattcagataaaagcttgcacaaacctctggctcactcagatgagggaacaagtcctggcataaaaacacctttgtcctttgtatagtcagcaggctcccaggaaaaagtttttttctccttttgtgggcgtgggcacagtgggctccagttagttccagtgggcactttccttgccagtttttggactgtgagtctggcctctgtgaatcataacttcagcccctgattggtcccaggcaaaggtcctaggccaggctttctgattggtcctgggccagggtgcctggccaagctgagtcatgccttctccaagacagccggtagactaagcacattcattcccctttccagcccgtaaaacccccacaactggcctcatagtgggcaccccattagagctcccccttctgctggcagagagctttcttttttcgcttattaaagtttcactccaacttcacccttgttgtctgcactccttaatcttcttggaattaggacaaagaactctggatattatctcagacaacgggagactgttacatcttggtgcattggtaagattacaacacattttggtgcattggctgggaagaagggaattcatcagaaggatgattaagagttgacctttaactttcacctttacttgcatttctgaggcttcttgtctattccagtctagtttgctttcacagagggcctagccatcatgtgggattggaaggtcccagggcaactgaaggtttctggctggggctaccccctcagtgttatctgaaggcccttggactaactccagtcccctacagcccatca

SEQ ID NO: 473235 - DNA, 3702 bp, Homo sapiens
cgcccgccggctcctgcgcgggccactgtcggggccgctgctcgggcggcgcggggtctgcgctggggccatggctccgccgcgccgcttcgtcctggagcttcccgactgcaccctggctcacttcgccctaggcgccgacgcccccggcgacgcagacgcccccgacccccgcctggcggcgctgctggggcccccggagcgcagctactcgctgtgcgtgcccgtgaccccggacgccggctgcggggcccgggtccgggcggcgcggctgcaccagcgcctgctgcaccagctgcgccgcggccccttccagcggtgccagctgctcaggctgctctgctactgcccgggcggccaggccggcggcgcacagcaaggcttcctgctgcgcgaccccctggatgaccctgacacccggcaagcgctgctcgagctgctgggcgcctgtcaggaggcaccacgcccgcacttgggcgagttcgaggccgacccgcgcggccagctgtggcagcgcctctgggaggtgcaagacggcaggcggctgcaggtgggctgcgcacaggtcgtgcccgtcccggagcccccgctgcacccggtggtgccagacttgcccagttccgtggtcttcccggaccgggaagccgcccgggccgttttggaggagtgtacctcctttattcctgaagcccgggcagtgcttgacctggtcgaccagtgcccaaaacagatccagaaaggaaagttccaggttgttgccatcgaaggactggatgccacgggtaaaaccacggtgacccagtcagtggcagattcacttaaggctgtcctcttaaagtcaccaccctcttgcattggccagtggaggaagatctttgatgatgaaccaactatcattagaagagctttttactctttgggcaattatattgtggcctccgaaatagctaaagaatctgccaaatctcctgtgattgtagacaggtactggcacagcacggccacctatgccatagccactgaggtgagtgggggtctccagcacctgcccccagcccatcaccctgtgtaccagtggccagaggacctgctcaaacctgaccttatcctgctgctcactgtgagtcctgaggagaggttgcagaggctgcagggccggggcatggagaagaccagggaagaagcagaacttgaggccaacagtgtgtttcgtcaaaaggtagaaatgtcctaccagcggatggagaatcctggctgccatgtggttgatgccagcccctccagagaaaaggtcctgcagacggtattaagcctaatccagaatagttttagtgaaccgtagttactctggccaggtgccacgtctaactagattagatgttgtttgaaacatctacatccaccatttgttatgcagtgttcccaaatttctgttctacaagcatgttgtgtggcagaaaactggagaccaggcatcttaattttacttcagccatcgtaccctcttctgactgatggacccgtcatcacaaaggtccctctcatcatgttccagtgagaggccagcgattgctttcttcctggcatagtaaacattttcttggaacatatgtttcacttaatcactaccaaatatctggaagacctgtcttactcagacagcaccaggtgtacagaagcagcagacaagatcttccagatcagcagggagaccccggagcctctgcttctcctacactggcatgctgatgagatcgtgacatgcccacattggcttcttccacatctggttgcactcgtcatgatgggctcgctgcatctccctcagtcccaaattctagagccaagtgttcctgcagaggctgtctatgtgtcctggctgcccaaggacactcctgcagagccatttttgggtaaggaacacttacaaagaaggcattgatcttgtgtctgaggctcagagcccttttgataggcttctgagtcatatataaagacattcaagccaagatgctccaactgcaaatataccaaccttctctgaattatattttgcttatttatatttcttttctttttttctaaagtatggctctgaatagaatgcacattttccattgaactggatgcatttcatttagccaatccagtaatttatttatattaatctatacataatatgtttcctcagcataggagctatgattcattaattaaaagtggagtcaaaacgctaaatgcaatgtttgttgtgtattttcattacacaaacttaatttgtcttgttaaataagtacagtggatcttggagtgggatttcttggtaaattatcttgcacttgaatgtctcatgattacatatgaaatcgctttgacatatctttagacagaaaaaagtagctgagtgagggggaaattatagagctgtgtgactttagggagtaggttgaaccaggtgattacctaaaattccttccagttcaaaggcagataaatctgtaaattattttatcctatctaccatttcttaagaagacattactccaaaataattaaatttaaggctttatcaggtctgcatatagaatcttaaattctaataaagtttcatgttaatgtcataggatttttaaaagagctataggtaatttctatataatatgtgtatattaaaatgtaattgatttcagttgaaagtattttaaagctgataaatagcattagggttctttgcaatgtggtatctagctgtattattggttttatttactttaaacattttgaaaagcttatactggcagcctagaaaaacaaacaattaatgtatctttatgtccctggcacatgaataaactttgctgtggtttactaatctatgctgtcatcctgggtacatattgatttgtctgaaaagtgctttctcagattccccttttaatattgtgatgtaaaggagggaaattttggtaaaggaagttgaaaggtgtgagctggcaggctaagtggaatttgtggtcagagtgctttcagagaaaggggagggctattgttttattttacatatcatttcctcattacaaatattaaagacattttgtaattcattctttttacacctggactttttatatactgataggtatatatgacttacgagtattttgtaaaatagcacctcctaccctaaaactgatggcaagtaaccctttgcttggctctgctcattgcaagacgagctttggttttgttcctgtgatagaccattagttaccccaaaatttattcttcctttcttccatggtaatgtaatatttagcttggtacatgggtgccaataattcctagtgcatttccaaggctcccttaacagctggaggtgggcgactggctagtttcttgccaatagtatgtgagcagaaggaatacctgaaatgtcaaggggatattatcactttcccctttaactcttcatatcggctgtattcagaggtgatagccatctaaggaccaagagatgaggatgacactaaaaggaattagcttgccttaggtaaatagcaagggaagggtccccagagagccctcggcccaccagtcagtgcctcaccccacataatgtaaaaagcagcctggggaaaaaatcaagctgcaggcactgataagggaactagcacagggtgttgtgcctggagacatgcctac

SEQ ID NO: 473236 - DNA, 488 bp, Homo sapiens
aggccaaagatactagcagtggaacgcgaggcttagggagtgagtactctgtaatctatggaaaagagatgtgatctgcgtccctcccatcctctgtccccactgggaggcttggggcaagcccttttaaatgcaaacacaagacagcagggaccaaacaacttgctggggcctgaacatgacgctggcagcctcactggctttgtccagaacttacactcaactggagaaggcagaaaggcaaataaaccctcagaaatcaatctaaaagtggaattttgtgctactttgaaaaacaggcaatggagctgtgactgtctagggaggaatgggaagacttcacagaagaggggtaaactgcctctgaaggagatcagggtgaaggcagaagcaggaaggcaggctggacaatgtagggagtttcaaatcactgggtggttcccacctgggccaagggtgcagccctgctggagaggtagatgagagac

SEQ ID NO: 473237 - DNA, 562 bp, Homo sapiens
acttaacaaacagctgccattagacttgctgaggtaaaagaaccagttcagtcacatggcccagtgtaggatcatgatcacgtggtcagaacatcagcgagaagctgaacaccatcaacttaaacttgatcatctgacggctccctctccatgggcagcgggtctccctaggctgccacctgtgggccagtgtggatttggaaaaggggagatatgggatgcagaaagggagtgggataataggagacagggattgcagggatttgctgagggtggtcctttagcaaaacccagagatgtgaaagtgaccttcaaagatgtgggagtcatctgtgctgaaggcccctgtgtggagccagctgcagcagatgcaaactccctgtccctggccctttccttgggccttcccttcccacttggcccatatcctgcctccctgcttcctcctcactgtgctttcacacaggactgtggggagggctatgcgtcagggctgcgtatacactgcagatgttcatcccaaacagaaccctaggaacagtcatgaacagatgctgtctat

SEQ ID NO: 473238 - DNA, 708 bp, Homo sapiens
gagtgacaccatcatgactggatgtttgaaaccgactcccataaaaagtaggctttgtaatcgagtctcagaaagtctgaggctgcctaggtctgccggatgctcccattcggtgaccttgatactaaacaggaaaggaaagggcagctccatttgcccgaaggcttttaacagagctgacaccattggtggaactgaatttgtcattttacctggtctagaaatgaaccctaaacaaaaatcttcaagtatcagtaagctgaggaggaagctactggggctgttgaagtgcttggtgtcgaaacatctacgttggagggtgacgccgccaggccatatcttcttctgtctctattggctctaccgaaccagatcaactcaaggtgcagcctcagttgggcactgtctccttgtggccatgttcctggggaaaggcatcttcttcagctgggacagttgtcactattcacatttggtagcaacactgagtgtctactgctgagtattgctatgccaaatttaaaattgagcattttcaccttggatgatgtaaattatatgcttttgaaaagtgccatctgaattgcatttctgtttaaatctatttatcccctcatatttgttacacttacaatcattcatgaaagtgttcaggattcttgcaaggttgtgtgtttgtcaaaatgatgaaactctgcctcgtatctg

SEQ ID NO: 473239 - DNA, 870 bp, Homo sapiens
tgatactgccttcgttcccaagcagcctttccagtaaccatgagcctgggccctactctcaagactctgaagcctctcagaatggtggttttggaaaatggaaggtacctggatctacgaatgactgtgtcaaaggtgacctgcttgccaatccacactgggcttagtatgagtaagaaagaaatgttggttgtggacatggatgaaactggaagccatcgttctcagcaaactaacacaggaacagaaaaccaaacactgcatgttcgtactcataagtgggagttgaacaatgaaaacacatggacacagggaggggaacaccacacactggagcctgttgtgggcttgatgtaccagtggtggggcctctaccttatgagtggggactgggtgaaggaagggagtccccaaccttatattccccatcacgtggagctgcaggaaagtagaaatgctggtttgctgcacctccaaggggttccttgattgggaactggggggaactggggggaacagggagattcattttcttggttacacccacccagagtggagcttccatcttgctgacctgatgagcgtggagggagcacatatgtgtttttgcacatagaattattttgtgtgtgtgcattttgatcagttctgaaaacatttttgcttatttgaagtatttgattcacttatattaaaataaactttgctgaattaatttaccagctctaggagctttttgtgtgagtctttagggttttctatgtatacaaccatgtcatcagcaaacagcaacagtttgatttcctctttaccaatttggatgccctttatttctttctcttgtctgattgctctggctagcgatatgga

SEQ ID NO: 473240 - DNA, 612 bp, Homo sapiens
tggagaggatcctttagatattgatgggttccaatcccctccatactgcgtgcgtgacttttgtttccctggatccacacctcattaaatacgtcatagctccttggaaggatatcaagatgcatcagacgccatgtcaaaggctcccagaatttgagacttacatctcaaaggctgtcacatcccctgtcctgcagatttcttatagagaacaatacctgccttataagactggttctgttacagacttcagctcatactttctcaattataacactaagaatcgtcctttggataataacgcttatatcaaacctagagactacatatctgataaagtccagatgcatctggaaaccatttggaattcacgggcaaatgaagtcctgaggttctgtgatgccaagcagagcagccacagatgctcttatctgcttgtggaaaagcagaattcacattccttctaagcccagagctacaaccctcccagtcaatcactgcctgacacaatgttcacgtagtgtgaaggacttatttcaactttattttgctcttaagttctgtgataatggtatacccctgccttttggtataactgtacaaaagaaaaac

SEQ ID NO: 473241 - DNA, 585 bp, Homo sapiens
ccggagctcctgcgtagaagaccggtattggttacacatggagtccagggctggaggtgaggatgaccctgtacaggaggtgagcagacaggacagtgctttttatgcctgtctaaggtctagagagcttgggctttaccatgagggcgaggggaagcaactgaaagtttgtaagcagagaatcagtaatttggaaaattgttctaaggataaatgggagcagaaggagcagtggagtagaatacctttaactgagtctcctcagaagattaaaattctgaccgaagcctggctgacatggaaaggttcacaagctttcccactactctgccacctgggattcccacattatgaagattcacattccaccatctcctaccctcaggaatgtttccttccctttctaacttcttctttaataatcgcttgtcctgtggccagttttctcggaactcactcagcaaatggtcaaggaatatgataaattgataggaagatctaatgagaagagtatcactttctcacatcataggtttacattttggtagaagcttttttgaagacagagatgtttagcaaatggtg

SEQ ID NO: 473242 - DNA, 739 bp, Homo sapiens
tgcaacttcctgacaagatagcatcatgtctttgcaccttgcagctctgagatggtctccttgtgctcctggccctccacccgcagcagcaggagtccactggtcgtcctatggcttcactcacagtaaaagcaaaaggcctgacatggcccggaagtctccattctatgcgcccatccgaaacacgtgctccgccccttcccgcctctcctcgcctctcctctttcactttgttatcgtcctgctctacttcagcctgagccgcgccttctatgcagccatatgtgctcatctagaacttgaattcagacccaattccaaagctcatgcttcttctatctttctgcactcaaatacatggaagattacagtgggcagatggacagagaagatgctacctgctttcatcatggaacatccaggagggagttggcgtgttgagaggacgtctactcctggccctggaatgagggtgctcacctatttgtcataacaaattcttgggctataacactctccttactgtgcccatgaggaagtgggcttagggctcttgaaggaaaatgtacatctgtgataatgtcttatttttatctctcacatttctgtcttttgtagaaagacatgctcaaggttgtctcaaagaaaattatgaagtgatttatgtttgtccctggggtccccagctgttcctttttgtgtgtctttcttcaaattacacatggctcgccatttcccc

SEQ ID NO: 473243 - DNA, 1619 bp, Homo sapiens
ctgctacctccaccgctacagtgaacagtgagactgtacctccaccgccgcagtgaacggtgacgctgtacctccaccgccgcagtgaacggtgacgctgtacctccaccgccgcagtgaacggtgacgctgtacctccaccgccgcagtgaacggtgacgctgtacctccacccccgcagtgaacggtgacgctgtacctccacccccgcagtgaacggtgacgctgtacctccaccgccgcagtgaacggtgacgctgtacctccaccgccgcagtgaacggtgacgctgtacctccaccgccgcagtgaacggtgacgctgtacctccaccgccgcagtgaacggtgacgctgtacctccaccgccgcagtgaacggtgacgctgtacctccaccgccgcagtgaacggtgacgctgtacctccacccccgcagtgaacggtgacgctgtacctccaccgccgcagtgaacggtgacgctgtacctccacccccgcagtgaacggtgacgctgtacctccacccccgcagtgaacggtgacgctgtacctccacccccgcagtgaacggtgacgctgtacctccacccccgcagtgaacggtgacgctgtacctccacccccgcagtgaacggtgacgctgtacctccacccccgcagtgaacggtgacgctgtacctccacccccgcagtgaacggtgacgctgtacctccacccccgcagtgaacggtgacgctgtacctccacccccgcagtgaacggtgacgctgtacctccaccgctgcagtgaacggtgacgctgtacttccactgctacagtgaatagggacactgtgcgccatctcagggcagaggaaaggggagaaccagtgaccttcttcctctctgagtgtctgtctctcattgccacccatgcagaagggactcccttaaacacaaggagaagttcctgatgctggatgacaaggcaatgacagatacccatctttaccttattgagctctttgcagtatgtgctagcttcgtaaaaacattttcttccttcttcccaaaatgtttcattcccttctctgttttaacgattccctctctgtttgggccatcttttgggtcctttgtcactgctcttctttacttattggcattcctcggggtccagtattttcttctggacttgtctcttgatagaaaagatagtatagagctatgcatgtacactgtagtcactgagtgccaggtgttgctccgactgctgcacacattcaaacatggccttgcagaatggagtaacacagtgttactgacatacagcgtgctcagagcacacagcaccaatgccctcactttgcacatgcaggcggacgctccaggaagtgaagccatgaacgcaggttcacacagagaacagcaggggtaggactggacttcattttaatttgtttttcacgacatctttgaccatggacaatgtgctggaaggggaagtgggaggaaattttactatcctggtgttgactctttttgaagaaacgacactcaggaaaagtttgaggcctgaaagcctgcaatgaaacatcaaatattacagaatatgaatacaaggatatggattgggga

SEQ ID NO: 473244 - DNA, 517 bp, Homo sapiens
ttaagtgaatagttttgtttgtgactgaatatcattttcggcttcaatgcctagtgctgacatgagtttctccggatggcttttctataaaaagctaccataccacacccagtgtcctcagtacaattcatcaagccctaactggttccttcaagctgcttgtagcactttcaaggagataatgcaacggtcaccacttcacaaaagaggaccaggcattctaggagttctgaattccagatcctgggcagagaagtgcaagaggaagcccacattctggggccagctggtcagtgcaggcagcaccttggcctttgaccaggacaggggcagtgttatgtccccgcagccttgcggaaggccttgggtctcctctgtgctccaacatcatctcggcctggaccctaccttcagagactcagcttcctcaactacaaaagggggttattaagaggaccaagtgaatttccatgtgtcttagtccattcaggctgttctaacaaaatatctattgacc

SEQ ID NO: 473245 - DNA, 2055 bp, Homo sapiens
tctggctgcctgactggcagcgtctgcatgcatattgcctgggagctcgttagaactagggcagggggtccttgctcccagagctcccaagacggcggtgggcgcttccaagatggtggcaagccttatgttctctgatccggggttcttggcctcacggatgccaaggaatggaatcttggtccatgcgatgagtgttacagctctattagaagccgtgggtcatggaagagaaccatggaacccagaacaatggcaagcctttagcgcgatcgggagcggcaatgggcgcctcgctggatcaggagaacagcggacaccctgctggatccggagggatggaagtcagcggggttctgcggtggtggcaaatagcagtggtggacgcatcccttcacaccgatcggcaagtggcctgggcacacacaagtcagctcaggattatttcggctcttgtgaaaaaggcaggaatgagctcaccattaactttgtttcattgtatcagcagcagttccgatgcagagcgttagaactggaagctctgtgacttcatccagccattgcctgggctagctgtgctgcctttctttcgaaaatcttttagtaacacaagaaaatcagatgattgtatttatttttcaggtgatttaattaattccatttaaagcttaaaagaagaggtcttggagaatttttggcagcgctactctcatccacatttcaaagggaaaaaaaagattatttcctattctagagtttaggcttggggggggccttttattttaacagccaaaacattgtcttactgaagaatgaaagaattttgctaccaccagtcacaagatgtggggacagttagttaatcaaaaaagctgattgcagtatggaaaacataaaaaagattacatacatgccataaacatttgtggtaacttaaactatatatcaatttcatggatgctaagacacacttaaaaaaaaatatatatatatatatatataaacatctctgaaattgacattgttttgtaatcacagacaaattcaagatgtggttgtcattgccagccttcgacctgttagttagctcttcctggtggcacaactggtcaactgcaactcctcaatgttttagcctccaaccattaaaggactctttgaggaaggaatatgagtcctgactgttgttggaaaacattcccttgacaccttccagcaagatcaagaacatgacagcattaaaacatgctgaatgggtttccaaggggctacagagaattcttagaaacaattgtggagtgctctttgaagaaatgctgcattgctatcaccctcgatggctcaggggaggatatcaagttgaaaggcctctgtgactccagaaggaaaatgatgtatggtagggttggggagaatttttcctccctctatgaattttccctcccctgctgaaatgagctgatgatagattaacaggaggaaaggtatccaaatttattcacatgtgtaggaatgggaatcataaaaactaggagactcaaagaaaggccaaacagctgaagcctaaatagcaccctcttcatagaggagtgggagatagggtaatggaggcgattttgactggtaataaatgatcttcagctcccagacagtggcctgagacaaaattcttctgagctctgggggaggtggtgacaaattatgggaaggtgaggggcaacacttcactgttaacaaaggttgtcttgttatggagagagtttcacaggtaatatctgggagctgccctcagaagaatagaggaaaagtctatctgggcctggcgatgacttttagtcttttctcttctctgctgtttcctggttatttgatgagattcctaggaacaggttttaagacaattgcatttcttctgaaagaagtttcctcagtcagataaggacattccagagagagcccctccttatgctagggaagaggggtgtggcaagaaacaagagaagtttagaaagtgtgtaacatatatgtatgtatgtatatatatgttacatactg

SEQ ID NO: 473246 - DNA, 5798 bp, Homo sapiens
gtagcccacacagccctctgggtgtctctcgggctaccgtgtttccacccttctctcagactctcacccctccagtagggaatacagtcaatacagagctttccatctgtaccccttccccacctccccacagccccccagcatgggggctccatagggcagagctccgaggtcttcctggcacacagtacatgctcaggggtgtcagctggaggcacactgagtgactgagggcactggactctgcccactagcttcactgggttcagtgagaatggaagcgtgttgtcgggtggaatatctgatgtggggaagagaaagctggggacccgggaaagccagcggtgtgatgcggtcggagtctgaaggcctgacagccaggggaaccgatggtgtaaatcccgttctgagggcaggagaagccttttattctattcagaccttcaagggactagacgaggccaattcacgttggaaagggcaatctattttaacagagtccgctgattcagatgctaacctcatctggaaacatccacagatatactcagaaacagtgtttcatctgggcaccccgtggcccactcccattgacccccacaagggccttggatattccagtgggttcctggccacaagggagttttccatcataggagaccatcaagcaagacaggaagatgcctccctcagggagggtgatgtgaatggcattgaatgggagcttgcaccagagcaatttgataactcacaccagaaggaaagctatggaaaaaccaatcccagatgtggagaaaatactggaaatgaagcccctagtccaacagtcttccaaaaactgaattctgccaacaactatgtgagcctggacacaatcctcccccagttgagccttcagatgagatcccagtcatagttgacacctgattgcagccttgtaagagaccctaaaacaaaagacccagctaagtggcattcgaactcctgacccacagaaactgtgagataataaatatgtactgttttaagtttgttgcagcaactggcttcacagcaatagataactaatacataaatgcctacgaatatgtgcccaaagacatgtataaaaatttccatagcaacattcttcataatgccaaaatagaaaacaattcaaaagtctgtgggcaataagatggataaataaatctgtggcataatggaacactataaagcaacaaggaaataaccaaccccagctacatgcagcaacatgggtgagtctcacagacaaataattgaatttaaaaagcttgacacaaaagagtacgtactgtgtgattcaatttacataaagttctaaaacagacaaaactaatctgtcaccctgttttaaattagaatggtggttacttttgcaggaaggtagtgacagggaaaggaaatagggaagctattgagatcctagtaagagtcctgtttcttaatctgggagctggttaccgggctattttgcccacttttgtgtaagtgtaggttaaaaaaacactactccaaattcttttctagaaggttgatcttttcagtgcaggatgtgaatagatgtgtggttaggggagtgctttatctttgtagacacagtgttatacatcaggagggctttgcaaaacactgatttcaattgcctcatttaacagaggagaaaactaagggtcagagaggtaaagtgagttgaggaagtcaagcttcccataattgtcagagctaaaactgcaaagcaggtctcttactttaatgtaactggtttggatgtgagggccatctggctgtggcctgtccttcatggttctctaggcttgagtccctttcttcactatcccatgaaatagctgttgatgttgcaaactcaattaaagaaggttactttcccagatagctcagtgcccaactcagtattgtgctttcaactagtcaataaccaacaagaaagagcttcctggtacccttgtttttttcgagcttccaccctgttctatttcacttgaaccctctttgctgttggcttccagtcctgcttcttgcaccatggccagtgacctttccctgatctatgcaccgtctacttctcacccagtacaactgaaacttgatacccttccctggcattgaacttggcaacccttcttggctttgactgggattcatccctcagtgtgtacttgctgccagcagctctgggttacaaccttgaatgagagaactgcaggcatcttgctgggtcggctgtggccctagaaaaagaggagagaaagaggggagagaaatattttttcagtcaaggatctataaatatccaatcttttctactgagacctccaaataagctcttacatttcattctacaataacatcaattggtgtagacagagatgagaggagaaaaaaatggtgaagacaataatttcaatatttgatctccttgacagtcacacaccttcttgtcaagaggtattgccactttggggagctgacttccagggggaaccctcttgttctgctgtccaggccacctgggctgccattcagacccctctcactgctctttcccaagattgctgagtggggtgagcatgccacccttgtgctggctttcagggacagggtttgcctgcactctcccccttctctgtgttcctaagctgaggcatcccaacggggccacatttctctctgcagggacccagcagtctctgccagtggccaatcacactttcttgtcatgaacttctccagagctgctctctgaagtaccgctgggcaaaaaaaaaaaaaaaaaaaaaaagcttttccccagatatcctccatttgtttttcttttgaggggaaggggcttcaatggcaggatttctctcccacccatccattccagtcgtgttctaggctggcaagggcagatccatcccttacccccggcaaaacgtgtctaactggatgactgtggctgctcagcagagctgcagctattctggcagctgcaggaaagctgggggagggaagctgccagaactcaggcctggagatgtacccccaagcgatggtcatgtgcatggaccagttttgaatacttcccacttaagccttggaaggagctaggaaggcgtggctaggtgggcagaggacaaaacacagcttctcttgtcttgggctacctgttgggtgttttcatatggttgggctatgagggaaacagggctttggtgcccatcatgctagctgtgggcacagtgggaagggttgcaaatgtatgattagttaatgtaaacttggattttgcagaaagcagccaaatctgtggaagggtggcagctgctgcattgaacacatgccccaggaaagccctaaacttgtggaatctgcatattttcctcacccctgcctagaagggcagcgcagagcagtcattacaggactttcctggaggcatcaggaagccagggatggtgatttgtttagatttgtctgagtagttgtgggttgccaaatcacacagacagctgcagtcagttgctttcttcttgctgttcaatccacgccatgcattttatcaaccacatttctgctccaccctggatgtcttgggaaatcatcataacttaatggaaaggcagagccttgaatctgctccctttctgcaacatcgctgcgtttattcaactgtatcattagctggaagataataaccaaccacagcatcatctttttccaactttggcatttgtttattgaatctttgtaaaagcacaatagactctatgtgccattctctccactcttccttccagaagtaatggtgatgacagtgaggaagagaaatccaattatgtagaaactgcgaatttggtgtgatggaaattctgtgggcagcctggttttatctgtgcagaattcctttagataaaagcaaaccactttttcccctgaatcaggttggttttggggtgagtttccagtttggcttaaattgaatcatagaatcttatcatgaagtgaaaacttggaaataatcttttactatctttcattgtatagatgaagaaactgaagtaaaaagagagctttacattcttaaagatccagatcaatggcagcaatctccaggtgtaccagtggaagcagaggctctcaccagaagcagatgttggtgccatgtttcttgtatagtctgtagaactgtgagccaaataagccttttctctttataaattccccagcctgaggtattcctttagagcaacacaaatggaccaaggcagtctgagaaagggggccaaattcattcttttgtatgtggatgtccttagtaccgtttgttgttgaaaagactgttctatccccattttattgtcttggtacccttgttgaaaattaattgaccatcaagtaaggtttatttctcaactttcaattctattccattgatttctatgtccttgtgccagtactgtattcttgattgctatagctttacagtaagtttgaaatttgaagtgtgagtcctccaaatttattcttctttttcaagattgttttggctattatgtctcttgtacttccatatgaattttacagtcagcttgtcagttcccctcaatcccccaaaaaagccagctgaaattttgctagggattgcattgtgcctataggttaattagggagtattgccattttaaactattaagtctttcaatctataaacatgagctgtctttccatttgtttacatctttactttctttcaacaatgttttgtagttttcagtgtataagtcttgtcctttttattcctaagtatttcaattttttgatgctaatgtaaatgaaattgttttcttaattttatttttggattgttcattgttactgtatagaactacaactgatatttatatattgaccttatgtcctacaactttgctgaactcctttattagtctcatttttgtgtgaattctttagtttttttctaaataagagatcatgtcatctgtggatggagagagttttacttcttcctttccaatctggatgctttatatttcttattcttacctaatttctctggctactccagtataatattgaatagtaatggtaagagtggaaaaccttgtcttgttcttagtctcaaagggaaagtaatcaatcttttatcattaaatgtgatgttaatttgttttttcatagatgccctttattctactacttgtttgctgagtgttttattgttaaataatattgaactaacactacatcaattaggctttggtacaataacagtgaattataggtaaaaggatggtaagctcagactctatttactaggtagtatttagagaaatccaaagataatagggggacagaatcaaagacaaaggaaatttatcctttgacgcctgcagttatagcaaacagtaaacacagccttgctcctagcataaacgaaaacctcacactaaaggcctgtttagtgctcagttccttttacccagtatgtcatgtctggctttcaacaaaaaaaattataaagcatgctaaaagacaaaaacacagcctgaaaagaaaaagttaagcatcagaaccaaacctaggctatattcttccctaagaaatcccattcacacagttatgtcaattacgcaaggactcttcatgacttcagcccagtcctggattctaagttccagatccgttaatatgcaactgcctcatggatgccccaaaggcaacttatttaacacatttgagactgaacttgc

SEQ ID NO: 473247 - DNA, 534 bp, Homo sapiens
gagctggagccagacctttcatcaccagcccactcaaccattggtggttactagaggttcgtttcaggccagtaatgagtaatgagattgaattcataatgaaaagtctctcccaaccaagaaaagcccaggactggatggcttcaccgccaaactctaccaaactaacaccaattctcctcaaactatttcaaaaaattgaagaggagggaattctccctagctcattttatgaggccagcattaccctgataccaaaaccagacaaagatgtaacaacaacaacaacaaaactacagaccaatatccctggtgaatatgatgcaaaaaccatcaacacaataccagcaaatcaaatccaacagcatatcaaaaagataacataccatgatcatgtgggacttatcccagagatacaaagatgggttaacatatgcaaatcaataaatgtgatatatcacatcaataggatgaaggccacaaaccatatgatcatctcaatagatgccccaaaaaatggataaaatttaacat

SEQ ID NO: 473248 - DNA, 686 bp, Homo sapiens
gctgagacctggagaggatgacttaaacagtctgaattttttcaggatgtaggagaaagggaggggcttgggaaatggatgggctgagcccaccctctgctcagtcacagggcagtgctttgaaaggtgttctttggccctgggtccctggacctggccctcaaaccccagagcaagggataggctcctgcagacttgccattggtggtcaaagagcactggaggtgcccattgagaatctgtccacagggcatcctgagagggggctgtctggggagtgtgtgaaccctgcatactacaccagaataagtttacaccatagggtgagaaaacgaggcactgaacatctttatgattccacgagaggaaaagaagagggaagaaaaggaatacaggaaggcactagcagggtttgcgcagttatcaggaattcagtgtacgtgagtcttaggtgcacgctgggcaaagctgcacacgattttgatgggtgggggctgctgagaggtgcagagataggggcgacgtctggacattagctgtgttgtgggttgaattgtgtctacacaaaagagaagctcaggttctaacctgcttggtgcctgtgcatgtgatcttatttggagataggggctttggaaatgtaaccaatttaaaatgagcttgtactagattaggagaggccccaa

SEQ ID NO: 473249 - DNA, 766 bp, Homo sapiens
tgactcttgtatgtcagagaaaaacaaagacccttggctcaaccctccttttcccacatttcctaagaaaaagtgggctatacctgttggttctatttccactcaacccactcacactatagcctcttgccccaggcttctgcccacaccactgatacttccaccagactctgcttcccgccttttgctccacatggattctctctgtgccgtctcctccattcctgccaattcaatgcccaagaaatacgccataagagcatgcttccactttaatgtttcagttggttcattttattggtctcagtcttctcgtctacttatgcccatcaggaagagtccaatcacaagtgcgcagatttctcttgttctcttctacaatgaacttctgcttcattcactgttactgaattttcctttgccggcattgcactattttattgtgctcactaagtcactggcggtgacattcaagttctgcagatttccagcaatgccacagtactgggcgttggctgaagctaatctagatagtaatccaaagagttcaatgaaaagttgagaatcagaacattagagtgccaaatctgacattaccttggacatgaaatctattaagcttggtaagctgacttgcatgttttccctcctgcacatattaaagggaattttagcatttatttcctacttctccagccaaaagaaaagaaggttgttttgtgcctaggcatctgcttagagtattgctctatatctcatttctcat

SEQ ID NO: 473250 - DNA, 1458 bp, Homo sapiens
tctacagctcccagcgtgagtgatgcagaagacaggtgatttctgcatttccaactgaggtaccgggttcatctcactggggagtgccggacagtgggtgcagaagagtgggtgcagcgcaccgtgagtgagccaaagcagggcgaggcattgcctcactcgggaagcacaaggggtcagggaattccctttcctagtcaaagaaaggggtcacagacggcacctggaaaatcgggtcactcccaccataatactacgctcttccaacaggcttaacaaacatcacaccaggagattatatcccgcacatggctcagagggtcctacgcccacggagccttgctcattgctagcacagcagtctgagatcaaactgcaaggtggcagtgaggctgggggaggggcacctgccattgctcaggcttgagtaggtaaacaaagcaccgggaagctcgaactcggtggagcccaccacagctcaaggaggcctgcctgcctctgtaggctccacctctgggggcagggcacagccaaacgaatgacagcaataacctctgcagacttaaatgtccctgtctgacagctttgaagagagtagtggttctcccagcacacagcttgagatctgagaacgggcagactgcctcctcaagtgggtccctgacccccgaatagcctaactgggaggcaccccccagtaggggtggactgacacctcacaagttcggatactcctctgagacaaaacttccagaggaacgatcagacaacagcatttgcggttcaccaatatccgctgttctgcagccactgctgctgatacccaggcaaacaggatctggagtggacctccagtaaactccaacagacctgcagctgagggtcctgactgttagaaggaaaactaacaaacagaaaggacatccacacaaaaacccatctgtatgtcaccatcatcaaagaccaaaggtagataaaaccacgaagatggggaaaaaacagagcagaaaaaccggaaactctaaaaatgagagcacctctcctcctccaacggaacgcagctcctcatcaacaacggaacaaagctggacagagaatgactttcacgagttgagagaagaaggcttcagaagatcaaactactccgaaataaccaatgcagagaagtccttaaaggacctgatggagctgaaaaccatggcacaagaactacgtgacgaatgcacaagcctcagtaaccgatgcaatcaactggaagaaaggatatcagcgatggaacatgaaatgagtgaaatgaagtgtgaagagaagtttacagaaaaaagaataaaaaaaaaacgaacaaagcctccaagaaatatgggactatgtgaaaagaccaaatctacgtctaattggtgtacctgaaagtgatggagagaatggaaccaagttggaaaacactctgcaggaaattat

SEQ ID NO: 473251 - DNA, 724 bp, Homo sapiens
aagcacgcagtcgcagcagccgcgggatccatgctggaatgcaggtcaggtacagcccactgggcctagtgggcagggcatctcctgtggcaaacccaggcctgagcaaggcctgggcaagggtgtcaccagctgggggtctccagctgataagtgaccaagaaaaatcctgtgtcagtaatacccagttctattatattcagcatgtgctttcaaaccatcatgaaagtcaatgcattctaacaagccaaaaggagaagggagctgggaagatgcatgtaggaggattttataggccaggcctggaagtagtgcatactacttcttctcacatttctctggctagaacacagttacgtgaccacaaaagggaaatggatttgactgtatgctcagtaggaggaggaaatggagaggcccaggagcccagaattctggttttagctagccacaccaccccacaagtggtccagaaatctatacacacagaggacaatggcgagaacattcatcctttgctagtagctgatgctttggccccaaaccataaggtagatctctaaccctagttagctctgctgcctgtcagaactcccctttgctagactgggaaggttgaagtgcttgctttcccttgaacgttactttagctttcacttagctttttaaaggaagtgggaagaggactacctctttcatcatggaaaaagggtacttcttacct

SEQ ID NO: 473252 - DNA, 627 bp, Homo sapiens
cagacctgcagaagacggacctgactgttagaaggaaaactaacaaacaggaagcaatagcatcaacagcaacaaaaagaatgaccactcaaaaaccctatctgaaggtcaccaacatcaaagaccaaagggaacaaaactggatggagaatgagtttgatgaattcacagaagtaggcttcagaaggtgggtaataacaaactcctccgagctaaaggagcattttctaacccaatgcaaggaagctaagaaacttgataaaagattacaggagtggctaactataatacccagtttagagaagaacataaatgacctgatggagctgaaaaacacagcacgagaacttcgtgaagcgtacacaagtatcaatagccgaattgatcaagaagaagaaaggatagcagagattgaagatcaaagtaatgaaataaagtgtgaagacaagattcgagaaaaaagaatgaaaaggaacaaacaaagcctccaagaaatatgggactatgtgaagagaccaaacctacatttgactgtgagaacaaagacaatgtaccagaatctctgagacacagctaaagcagtgtttagagggaaatttatagcactaaatgcccataggagaaagc

SEQ ID NO: 473253 - DNA, 618 bp, Homo sapiens
cagtcacgcagccgtgccccgccaccatcacagtctggcggtaaaccacccacagccacacttccggtcagccggttccgcaggcagccgtattacggtggagagcgctgctcagcaagtcggaagcccaggtttcagaccccaccgtggtcagccagcagccctccgacatcatgggtctgccctacagtctgttctatgttcaactcaccctcttagggtctactttgcttacattccacttttgtgccaaagcttccaatgtcttgccccagcctcttatacaaattccattcccctcacctgagtgctcggggtttacacatctggcccctgatgacctatcggcatttcatcctacggagtaccatgtcttctgctccaggcatccatcctccaaatcatctgaccccttcccattcccatgcttggaaagaagatttaagagcctcactaatgtttggtcaagcaaagaatttttgtcaagacacaatgcaaacccctcctcctcggtgaagcattccagaattgctggacatacaattgttgattctctgaatctctatagctccaatcctgttgtcagtttgggataaatgtcacttataggagattgtc

SEQ ID NO: 473254 - DNA, 554 bp, Homo sapiens
gtcaattgtttctgctaatgctctcagctgctaccttttcatctgacgaaggacccagccaagtgatgaaacatataagccagaattcactctatgcttcatcagacaaatgcttggctttccgggggccaacacaccttctactgactgacatgtttctaggttctttaccacgccctgccacggtacacattaggatgtttccctgggtaaatgccaaggttctccctggaggggaaaagaaactcttcaaacatgtcaaagtattccccattcaagaagagaaaataaataatgaaaaagagaactggattagggctgaagtccctcaactagagttagccaaacactgccttcaagttcaaggctctgcacttcaaaatgccaccagaaccagcagctttagactattctcagtctcaagcaaaatgtcctatcgtgtaaatttacctgccgttttatcagaatcatttcagaaacaattgctgttttcaaagaactaactttgttttagtattcttgcattcaaatgattttaggtaaagtgtttccaa

SEQ ID NO: 473255 - DNA, 515 bp, Homo sapiens
cacctgcagtgttagcaccttaagctgagttccttgcaccaggatgctgtcacgcccagtcagtgtgagacggttcttggctgaaggactgaaaagcttggccaagcattggcccagtaatggcatttcagaaatccaccaaaatattaagatgctttttgaaaaatatccagagcactcatggaaaaagagagctttacagagagacagcgagagctccagagacccgcagaagattgccctgacgtcactagctgagtaccgatcagtgcatacatgtaaggatattactcaatatgtggaaaagaacagaaggaatgatgtccaaagctcacccaaagacaggaatcatttatgtttccaccagccagagtggaacaaccttgtaacgcatatggagtactcaaacgaatatttcctcaataataagttcaaattaactgagactaaagcctgcccgctttgtctggacatgcctaacaaagctttgagggaagcctcaaaagaatgaaacc

SEQ ID NO: 473256 - DNA, 576 bp, Homo sapiens
attcacaacttatgactaaaaaaaagctgttattccattttatggaaagggcaactgagacacaaaatcacaggcaggaagtgatcaaaccaggggttgaatccagagcaatctgtctccaaagcatgtgttccttccgctgcagcccatggcctccaggcatcctgcccagcagccggagccacgcagatgtcgttggaggaggagatgaaatgctgtggatgttagggaaggaaaaatccatttctggatgtggagaatccagggatgcacccatccttgaggaccagctcaaatgctatgcccggcaggacagcttctctgatcccccaactgcacttgagcttctgaggaaacaccccagtttccccggactcactttgtgacacttagtggattctctatgggagtttgggacagttaaatttgtgcacaactttgctttctctctttatgactcaatttggcgaattcctcctgaaaagaggccagattcgatcaacttttgtatcccatccgtccacaacatccccctaatgtcatgcctcatactaagtaggtgctcaataaatgttt

SEQ ID NO: 473257 - DNA, 617 bp, Homo sapiens
cagcagatgtacaaagaagcatgatgcccagctctgtgctgagtcctgcccatgagtttcccgtaatgacctctgaatctcatcacttagacctgatcactgatgagaacatcagactgtgtctccagaagaatgtccggcagaaggagactgctcaatacatgttagctgtcctcttctcctgctcctctttgtatcatcatcatcatcatcatcatcatcatcatcatcatcatcatcatcgtcatcatcatcacctgcatttagagctgtccagtaatggagccaactcttcacaaagcagtagacttcatgtttctagaagaatgctcaacccaaatggtactggggacatagcagaagtgtcttctttggcgagcttaaaccaagtttctaaatttgtttccatggtagaattcgggaccttggatccacccactttctccccaagctggctccaggtttgtacaagcatctctcaccaagatcatcaaactaaaggctcagccaaaacatgcatctttttagtcctcaatcgcagggtctgtgattatttcattgctgagtctcctgcatccatctgatcatttctatttcctttgttcccacctttacct

SEQ ID NO: 473258 - DNA, 858 bp, Homo sapiens
ctacaaggtggcctgtagggtcccttcagcaaggttctgcaaggggcatttgccctcagagctgatggccctgcgtctgtcaatgcaggttgtacatctccctcccttaggtaggaaggtgctccttaggagcttggtgttgggcctgtccactgagaacattcatcttccacatttgggcaagactttgctgaaaacaattgctttccatactctgttggctacagccaggaacagttcaaattttttggtgctcagagtctttagcaggaagatgctcagtaaaggtcattttccttttcatcccaacctttctcacacttggccactctcttgttcaactcccccacccagtgcagacctggacactcccagagagaaggtcacacctcattgggaagctgttcttgagcagttccagcttcaagtcatccctgaatctaccgctcattcagcatataactgctcttcaaatatgctaagtacttttctctcattataaagttgacacatgcattgcagaaaatttgaaaaatatagaaaacataatttggaaagcatccccaataaatataacttgcagtgatgagcactgttagcattttggtatgtttcttcctatttgtgcttgtgtgggcaggcataggttttacaaaattggaatcacattgactgtagattttgtatacagcttgttcttttcactgacattctgacatttctcatatcattaaagtctttgaaaacatattaaatatttttaatggtcaccaaattttctgtggcatggatatattgcaatgtgtgtaaggtattcttagttttggatacctagactgtttctaatttttcaatatt

SEQ ID NO: 473259 - DNA, 698 bp, Homo sapiens
tgctgaggttaactctcagagctgccaggaaaaccaaaggagagagtggctatgagaacccatgttctccatgaagactggcaagggggttcctgctgcctggtggggtatgctaaatgccgattggctgctcgtgatggagaaaggtggagagtgctctcagtgcgcagcacagaggatctctcgattgactggacgcatgctcccaccttgtggcaagggcccccagagggtctggggtgaggttctgagacagtggactttggtgtgtggggcagatcatcacaattatgggctacaaagggagaaggagaagaaagcagattgcagagccctgggtatggatgagaaagagctggctgagtctggactcacttggctgcatgattgtatttatgacaatggagggaagacagctgcagaaagggcacagattggaagggcgtcagagagaggcccgcagaggcagactggtggctctggggcagaagtctccagtcaacacagttgcatagaaactcaaggctggatgctaggctcgcgtcttcttggcagctggccttatacgggcacactgtcacaggcaccaggctctgtgtggataaatcttcaatgctgttacggttgcacgcgacagcaaacccaacccaaaactgcttaagcaaagaggacatgtacaagctcaagtgacagaagag

SEQ ID NO: 473260 - DNA, 490 bp, Homo sapiens
gttaatgtaaccttctcaaggttcctgctgcagctctcctgctagtttagcttagccttctggtttgagggatgagtcacatgtaccatcacttcccaggaccaacaggacctttcaggaaagctatccctgcttacacagagaattgcccttgcctaacactgaagcctggcagaaaaatgttgactgaggaattactctgtgttaggcgctgttgtaggagcaagggatacaatgatgatcaaggcagatgcagcccttaccttcaggtcgtggagtccggatacagactggaggcaggcagctgtaagatgtgtgacaaatgctgcgctggatcagcccatggtattaggagagcaggtaagggagggtggggacgggagcggacaacctggaggaagaggcacctaagcagagtccggaaggctgaggaggagtcagcaggtgaaagagaggggaatcatgacatgccacctcaactgtagggcac

SEQ ID NO: 473261 - DNA, 1772 bp, Homo sapiens
aataggaacagctccggtctacagctcccagcgtgagcgacgcagaagacgggtaatttctgcatttccatctgacggttcatctcactagggagtgccagacagtgggcgcaggacagtgggtgcagcgcaccgtgcacgagctgaagcagggcgaggcattgcctcactcgggaagtgcaaggggtcagggagttccctttctgagtcaaagaaaggggtgacggacgcacctggaaaatcgggtcactcccacccaaatactgtgcttttcctgcgggcttaaaaaacggcgcaccacgagattatatcccgcacctggctcggagggtcctacgcccacggagtctcgctgattgctagcacagctgtctgagatcaaactgcaaggcggcagcgaggctgggggaggggcacccgccattgcccaggcttgcttaggtaaacaaagcagccgggaagctcgaactgggtggagcccaccacagctcaaggaggcctgcctgcctctgtaggctccacctctgggggcagggcacagacaaacaaaaagacagcagtaacctctgcagacttaaatgtccctgtctgacagctttgaagagagcagtggttctcccagcacgcagctggagatctgagaaccggcagactgcctcctcaagtgggtccctgacccccgtgcagcctaactgggaggcaccccccgcagcaggggcagactgacacctcacatggccgggtactccaacagacctgcagctgagggtcctgtctgttagaaggaaaactaacaaaaagaaaggacatccacaccaaaaacccttctgtacatcaccatcatcaaagaccaaaaaaactctacaagccagaagagagtgggggccaatattcaacattcttaaaagaattttcagctttccacagcgcgggggaaccggaggctgcaggatggtcaagctgacggcggagctgatcgagcaggcggcgcagtacaccaacgcagtgcgcgaccgggagctggacctccgggggtataaaattcccgtcattgaaaatctaggtgctacgttagaccagtttgatgctattgatttttctgacaatgagatcaggaaactggatggttttcctttgttgagaagactgaaaacattgttagggaacaacaacagaatatgccgtataggtgagggacttgatcaggctctgccctgtctgacagaactcattctcaccaataataggctcgtggaactgggtgatctggaccctctggcatctctcaaatcgctgacttacctaagtatcctaagaaatctggtaaccaataagaagcattacagattgtatgtgatttataaagttccgcaagtcagagtactggatttccagaaagtgaaactaaaagagcgtcaggaagcagagaaaatgttcaagggcaaacggggtgcacagcttgcaaaggatattgccaggagaagcaaaacttttaatccaggtgctggtttgccaactgacaaaaagaaaggtgggccatcgccaggggatgtagaaacaatcaagaatgctatagcaaatgcttcaactctggctgaagtggagcggctgaaggggttgctgcagtctggtcagatccctggcagagaacgcaaatcggggcccactggtgatggtgaagaagagatggaagaagacacagtcacaaacgggtcctgagcagtgaggcagatgtatgataataggccctcttggaacaagtcttgcttttc

SEQ ID NO: 473262 - DNA, 774 bp, Homo sapiens
agggctcggcacacagcaggcgtctggtaagcggctgctgaaggagtgctcgctggctttacgttttttaatccccttagcccctaccttttcttaccatccaagcagcagtgagagttttgtacatgcactgcccttgcgaactcatctggtgtcaagtgtgtcaggtagtgttggatgggcacgagatcttctgggagccaggggagagagagacagcttggttatggacagagctctagagccacagctacacccgtcttgaatggagaggtacctgccggacactccaggaagcctgaaatacagggatgcctatgacccacagaaagccacaccaaccacgtgtccccttcccagtctacagagcaaatgtcaaagatctggccatttaaaagtgtatgaaaccgagacagccaagtgtaaaggggtccccagagaaactccaaatggcctgcgcactgggaggggtgcacactggggtggagcctcgggaagttggtgctgtttgcagccggaaggagcctggcccctcctcttcctgggattcagactgaacgtgggattcagtctgcgaggcgggaagcacactagcaggaagctgatgctggtgctgtgcttaatgtgcagcctgaagaaccatgagccaattaaacctcttttcttatacattatccagtcttaggtatttatttatagcaatgtgagaatgaactaatatacttctctattaagcttcattttcaggcaggctccctcaccccttctggagaa

SEQ ID NO: 473263 - DNA, 607 bp, Homo sapiens
ctcccagacacttctgagctgccatgggtgcccatttcacaggtagggaaaccaaggctcagatccagggagctgcatttatgtgcgcctccacccgtctttctccacaagccccaggagctcatgggcaacaatggggactatgggggagcccgtgccctgccttgccaaccctgccacaggcccacaggctccccctggggatgtggctgcccacctgcgaagctgtgtcctcatcactcaggtctgagctgtgcagagctggttccagtggctgcaggaaccacagtcgcagacctggaagaagcaaggatcctccccaagagtctgcagagggagcgcatttctgcccacaccttgattttggacttgtggcctccagaactttaacatcttctaccttcctatttattttcccctttttaatacaaacacatgcccattaaataagcaaaataggaaaaaattttaatcacccaaagccctaccatctacttaccagagagacaataatggcacaaggatatactgccaaattacactaacttttagtaatccaaagcaatagaaaaatctccagttttcaatttattcttcttagatttct

SEQ ID NO: 473264 - DNA, 2281 bp, Homo sapiens
ttaatcaaaggagactaagaaggagaggcggttgcagtaggaggaacactagaagagtgtggtggatggaagtcaagaaaagtaattccagaagggaatggcagcaagacttcatcattggcttttgcatcagagaatttgagaactgtttcattgagtgggccaggattaaggcccaacagaagtgggttgaagaggaaaagagaagttgcaacagctggtgtggacaacttattggaggcggttgctgtaaagaggagtggagaatagggaaggaggctagaggggttgaaggatattcttactgtgaaattcatactattttgggactcagactggctctcctttctcctcagcttgcagacagcctgttgtgggaccttgtgattgttcccttgctgaaaatgcttcagtggctctccatggcccttaaagtcaagtacaaagtctacaagcggaaaagtgatctgcaaagcccttcaggatctgaccccaggtcacttgtctagtcaagggatggctattttttgttgttttgcttttcagttcctcaaatattcaaagctttcttttgcctctgagcatttgttcctactgttccttctgcttctgtatctcttcatcttggtccgattagcccttactcatatccttccagtttcagtctaaatgtcactcgttccagaaaccactactgacccccccaagtctatgtcatgcaccctttcttcttggcatctgacacttcttggcatctgacacttggcgaaacttccctgttttgcagcttttacccactttgccatagctgcctgtttacttgtgtgtattctttcaaatactctgatttttccagagggcaggcagtgactcttcttcaatattgtattctcaacgcccggtggacaatgttggtactagacagtgttttgaacaaatgaataaatgaaggagagaagaaatgaattctcagtgatatttctgtaagataagcaaccgctattatttatattacacatttcaaataatcttttcaaaaacaagtataactcatctatggtaatggaaatcaaaatagtggttacctttggaggtactgatgaggaaaaggcacaagggaattttcaggggagcagaaaattatccgcatcttactctgggtgttggtttcataggcatgtgcagacataaaagttcaatgagctgcgtacctacaatttgtaccctttgttgcatacgttaacataaaataagtaaaaaaaaaagttataactacctttatctcactctaatactaaagatacattttaccatttgttagctcaaagaaatctgagatctggttttaaaagcaaccttgtagttctgtttaagattctacaatttaataaaattatctaaaacctccaagcacttagagtgggcccatgcagggccttttcttctacctttatagcccagagaaattccaaaccagaaaaggggctgggtttgatcttgtctgagcatcttgcgggaatcagtttcctttcaggccctccaataatgtgaaattctcttcctcctgtttttaaccccataagcaccaagcgaactgcacttccaaagcttgcctgaaatgagttttagcaaacccatgaaccctgttgatcaatagtcaccctaaactgaacccacttccaatagtgaccaaagaattcttctgaccaacaacggaattcccccattctcagactgacttcttcaaggagacttcaatgaactaagcagaattcttgtgcaatgaagccatcattccagcagatcagcatttagaattgcttcaagaacctattccatatttcaagagagatggagttagctttcctcttataaaatgaatttcatgtgtatgcttgcttatagaattcttgagttatctttatttatagttatttttactcctcatacaactgtggaatgatattggggctccagtgatgaggacatgcaggggttaccgggccccaggacaggaagcattctggcagtggctctgtcctcaaaatgatactgtgctgcagcggcttgggtcccagggactaaggagggacccagtggcctctctggagtaatgtagtcacagagactccaggcagctcccgcactgggctcaacactgcgaggctctcctacagctaggcttgcaggcatttgtggtgggaatgttgcctgcagggcatctcctgcttacatttcctactcaaggcggggcgcccttgactgtgagctgatcctgacc

SEQ ID NO: 473265 - DNA, 665 bp, Homo sapiens
cttcaggaaattgatatttggccagaaatttaaagattgctttttttttgtattagggagagagcagtgatgggagaaaaatttgcaaggtttatccacaggctcaagaattatccacacaacaatattgaaatcaagccaatttataaccctacaatggcctctaagcgttcaagtgaagaaagagttacacatctcccacttcaaatcaaaagctataaaggattaagcttggctatagctgccatagatagtgattcctctgatggatctgggcaaagtacattgaaaacctggaaaggttttaccattccagatgccattaagagcattcatgattcacgggaggagatcacattttcaacattaacagaagtttggaagaaatttattctaattttcatggatgactttgagggatccaaagcttcagtgaaggaagtcactgcagatatggtagaaatagttagggaactagaattagaagtggatcctgaagatggcaaaagaaaatcatgtggaacagcaaagggtgggaattctaccaggaatgaagatgagatgccactaagatgagagctaagatgagagccactgggtcatatctctgaaataggatacccatgatgtatataatttgatgatcacaagagatgaagacaata

SEQ ID NO: 473266 - DNA, 752 bp, Homo sapiens
aaaaccatagaggcatcagaaacaaacaaacaaacaaactacatgccaatatccctgatgaacattgatgcaaaaatcttcaacaaaatgctagcaaaccaagttcaacaacattttaaaaagatcattcatcacgaccaagtggtatttatcccagggatgcaaggatggttcaacatacacaaatcaatcaatgtgataccttgtatcaactgtatgaaagacaaaaacaatacaatcatttcaattgatgtgaaaaatgcatttgataaaactcaatatttctttacaattaaaaaactcagcaaactaggtatagaaggaacatacctcaatgtaataaaatccatatatgacagacccacagctagtatcatactcaatggggaaaaactgaaggaaacaaagtttaaggctaacaatggatatacatacctaggtgccgcctatacatgaacacacatgcttttgccaggtctattttttctaacttaaggtttttctgagggtcagcagaagataacctgaaaatttatgaacatgaatgagcccttttagaattgtatggctctaacatgttatttcctttcatttgcttctctttgataaaataaacccttagtttttcagccccctccatattcatctcaatgttgctagaaactagaatggtgttttgacatagcaaatactaaatactaaatattctaaatactgaatgtttaaatgaatgtatgtttatctcccattaa

SEQ ID NO: 473267 - DNA, 1136 bp, Homo sapiens
gggttataggagctgcgcctcttgtcttccgcactgtagccgagacacgcacgcggggtacctgcaatccgctgatggctgccgactgcaggctggtagttgagttcgtcagtctccctccaaccctgcatgtgtttaggactctgtgtttaggactctgtgtttaggcgtcccttgtaggaaccagggcggcaggctttcctcgggagcctggacgcctcaggtcatcatatagtgatgatgatggggggcccgccgatccagctgacgtgtggcccggactccccggtgagctgtgggtacatcccaggctagctgctgcaggaccgtcgcgccgctcaactccaaggagcaccgtttgctctggaatgtgtgagaatggcgccccctggtggcccgggagttgtgcaacgcggctgggcacgcagccagcgctcactgcaacttgtcactcgggtcacccttctccgaggccacctccacagctggccaccagaaggcacccttcacctttccggggcctccgtattcataagcgaattgatgactagggaaccgatttatgcatggtgggtggcgctgttgggtctcaagcttgcctttctctgcctagccccgggacctcctgaacccagtggagaggacccagcgctgaacatctcccagaagagatgggaacagctagtggctgaagggacatgcatcatattctcagtagcgcctttagaatttctaaaaaagaagaggctcaaaggcagcaatctggttatgttatgggtggagggtgtccaggttcttggcagtttgaacaaaggattggacaaaatgcacaaacaaagcaaggaaggaatgaagcaacaaaagcaaaaatttattgaaaacgagagtacactccacagggacaaaaatttaccacataagattatttctcatacaaaattattctcttttcttcttaatctttgttaccaaaaatacatctttacatctgtgactctctttacatctctttcacctatttactagtttctttttaccttctttcataaataggctttacataatctctgtattacatacaattctttttgtcaaaagaatataactttatgtcttccttatatttttttaaatgt

SEQ ID NO: 473268 - DNA, 1156 bp, Homo sapiens
ataaggagtggatgcctgtcaccaagctgggccgcttggtcaaggacatgaagatcaagtccctggaggagatctatctcttctccctgcccattaaggaatctgagatcattgatttcttcctgggggactctctcaaggatgaggttttgaagattatgccggtgcagaagcagacccgtgccggccagcgcaccaggttcaaggcgtttgttgctatcggagactacaatggccatgtcggtctgggtgttaagtgctccaaggaggtggccacagccatccgtggggccatcatcctggccaagctctccattgtccccgtgcgcagaggctactgggggaacaagatcggcaagccccacaccgtcccttgcaaggtgacaggccgctgcggctctgtgctggtgcgcctcatccctgcacccaggggcactggcatcgtctccgcacctgtgcccaagaagctgctcatgatggctggtatcgatgactgctacacctcagcccggggctgcactgccaccctgggcaacttcgccaaggccacctttgatgccatctctaagacctacagctacctgacccccgacctctggaaggagactgtatttaccaagtctccctatcaggaattcactgaccacctcatagcaaaatccagagatggtcaaatccctgctataaaatggcatagtatttgcatataacctatgcacatcctccagtacactttaaatcatctcgagattatttataatatcaatgtaaaggctatgcaaatagttgttaaacagtattgtttaggaaataatgacaaggaaaacaaagtctatacatgttcagtataaaagcttttttcccagatattttcaatccacaattaattgaattccctgatgtagaaaccctggatatgagaagccaactgtatatatacatatcctattggctctttctctctggagcactctaacatgccttccaaaacatttacaaagcaaatatgatcctgaaaacaaaatctactgtgaatattgttgcaaacttctaaataaaatactagtaaatttaatcaaaaaagtatattacaataacaaaacatggccaaataaggtttattccaaggatgcaataaaatttcaatactaggaaa

SEQ ID NO: 473269 - DNA, 1194 bp, Homo sapiens
gtttgttaatgggtacaaaaatacagatacataaaaagacaattacttttgcaccaacctaatacaatggcctgcagacaggtggggacctggtattttgtgtaagtctaaagactatgattgtcaggagcgaagctgcggactttcgcggtgagtgttacagctagctcttaaggcggcgcatctggagttgttcgttgctcccggtgggttcgtgttctcgctggcttcaggagtgaagctgcagaccttcgcgggccgcaggtggagctgcctgccagtcccatgccgtgcgcccgcactcctcagtccttgggtggtcgatgggactgggcgccgtggagcagggggcggtgctcgtcggggaggctggggccacacaggagcccacggaggtgggggaggcccaggcatggcgggctgcaggtcccgagccctgccctgcgggaaggcagctaaggcccagcgagaaattgagcacagcagctgctggcgcagggcccgccgagcccacgtccacccggaactcgcgctggcccgcaagcaccgcgcgcagccccggttcccccccgcgcctctccctccacacctccccgcaagctgagggagccagctccagccttggccagcccagaaaggggctcccacagtgcagcggcgggctgaagggctcctcaagtgccgccaaagtgggagcccaggcagaggaggcacggagagcgagcgagggctgtgaggactgccagcacgctgtcacctctcagagggaggagtgaatttaagagttaagagactgatgcaatagtccaagtaggactagtatagggaaagtgagaatggagggaagtaattggactcaagataaatgtgaaggtaatactaacaggccttgaagacggacagggtgtgggggaaaaggagtgatggtgaagaaggtgtggcggtgtcctttccctgagggaaggagcactaatggagaagcaagtctgatgggggtggggcatagaaaatgaatttgcttatggttaattgcttctgtgtactgtggaccatgagacagccaggtgaaaataatctagttggaaatgtaatcatggagttcaaaggtagttctacaggtcaggtgtgaatttaccaaatctcccaatttgtttatttgttttgttttgttttgtttttttagaggagggtctc

SEQ ID NO: 473270 - DNA, 1755 bp, Homo sapiens
tgcaagtcaggcccaggaggaggacgaggaggaaaataagtatgagctgcccccctgtgaggctctgcccctcagtctagcccctgcccaccttcctggcactgaggaggactccttgtacctggggaacagcagatgctgcctctaaaggccccaagttactgaggatgtccctgaagctctgactccagctgagatcaggcctgaggggaccctcttgggcattttccggtgcctgcaccaaatcaggaagctcctagtctgtgccccaagatcacgcctcatttggaggtcacacgaggcctggctggtgggtcctgccagggcactggatctggagagtggaggaagcactgggtgccggggtttgggctcggggccatgtacgcctcctcctaccccccacccccgcagctgtcccctagaagccacctttgcccacccccaccccaccccaccccaccccagctcaataatctgcttcttctagaaggaaggaaatcgtctcttccctctgtagcccccactgggagtgcctcagctgctgaggacagtgatctgctgactcagccttggtactcggggaactgtgaccgctatgctgttgagagtgccctgctccacttacaaaaggatggggcctataccgtgcgccccagctcagggcctcatggctcccagcccttcaccctggcagtgcttctccgaggccgggtcttcaacattcccatccggcggctggatggcggacgccactatgccctgggccgggagggcaggaaccgtgaggagctcttctcctccgtggcggccatggtccagcacttcatgtggcaccctctgccccttgtggacagacacagcggcagccgggaactcacctgcctgctcttccccaccaagccttgaggccacagcgaagaatgcaggtgtctgcccagttcactaggtcctggatgaaggaaccgtggtggcctagaccagtcaggggacagcacaggcactgctggaacagcaaaggatcctctcacatctacttgtgggcctagggcaccctgagagggactggcctaccttgcacaagttcacattcaataaacatttgttgaatgaattattgaatctgctaaatgaagcagagggagccttcaccactcccccagcctgggcccaggtacttaggccgtcgtctcttcactcccaggacagaccggctactactgcccactattggatattctgggcctggaatacagcaggtggcgtgtatttattgaaagagtgatcaaataggtcaagtctattctggattcctctaaagctgataacattcttttatcagggcctcctttgttaagtgaaaagtccaatccagtgctgtccaatagaactttctgtgatgatagaaacgttctgtatctgcatggtcgagtacagtagccaccagccactgggggtcattgagcacttggaatgtgactaatgtaactgagaaactgaattgttcattcacgatttaattacttttaaatagccacatatggccagggttccaagtctcatgccttcgcaagtgtgaggggcagtggggaaagctggagaggtcggcaggggctaggtctggaggagcctgggaggcctccataaggcactggggagccatggaggctctgagcaggggtggatgcaggagggatgatggtatcctaggagcatcactctcgttgtgtagtgctgaatgggccagaggggctg

SEQ ID NO: 473271 - DNA, 537 bp, Homo sapiens
ctccctcatgaccgcctggatcctcctgcctgtcagcctgtcagcgttctccatcactggcatatggactgtgtatgccatggctgtgatgaaccaccatgtatgccctgtggagaactggtcctacaacgagtcctgccctcctgaccctgctgagcaagggggtcccaagacctgctgcaccctggacgatgtccccctcatcagcaagtgtggctcctatcccccagaaagctgcctcttcagcctcattggcaacatgggtgctttcatggtggccctgatctgcctcctgcgctacgggcagctcctggagcagagtcggcactcttgggttaacaccacggcactcatcacaggctgcaccaacgctgcgggcctcttggtggttggcaactttcaggtgcttccccttctcccctgcaaaccttaaactttacctaacaaggcctggctgcctgcagtgtggcacctcaaggggccaccgccccgctggacctggctgtggcctatctgcgaagtgtgctggctgtcatc

SEQ ID NO: 473272 - DNA, 764 bp, Homo sapiens
aggaggtccagggtcagggtcagtgggcttcaggacctggcaaagccagagggcatgagagccagccttgcctacccactccgggctgggcccacagctgccacgaccctttgtccccaagggtgacaggagagcttgcaccagcccagatgcttccttctccaaagacatggacggagggtctcaggcttataccagccaggattattccagtgggattccagctctcctcctagccatgtccttcccgcaaaagtttgaagcgggtctggctgggtggcagtgtccggcagccatcctcggacttcttccccgcagcatggccaagggcaagggagagggaagggacgcaggccagggcatgacatacagtggcccaactgagtaccgaatatggacctgtttctctgcttttatgttgttgtctccagaacattcagggatcctcattcaagcagttgacaatttcatggagttcctcaaggcctttgtaactgacaccaggtgtcagcctcatcgtcatgatcaaacatgcccacccccaaacacaacagtctatttcaagcagcagggtagaggaagggcactgtaccccactttatggcccagcgcaggagctgacacaccccttcccctgcctctcaatggccagaatacactccccatagctgcccccaactgcaggggagactgggaaatgcagccttggttttgagcatccacgtgtccagaataaaaatctcaatgcaaaaggagacaataga

SEQ ID NO: 473273 - DNA, 866 bp, Homo sapiens
agagcatgtcataaggtgaaatggctggtggctccagctggaaacgggtgaccagccatccaaaggggtatggaatcttccagtgacaacatccctcgatcccagggtcacctcaaatggttaattcagtgggcgatgtttttaatgaagggcatagggtgtcgtctgcattgtaccatccaaaggtggagctgctcaaggtcacacacctggtacgtgacaaggtgaagatccctctgggcttgcctgttgccaactctggggccctggcatttggccagcgggagaggcagcatgttgaggagaaagagcctgtctggaagcctgtagcccggcttggagccctgctctacctccaccctgcatggctgatcattcctatccaatcccttcgcctcctcctgccccatgggatctcggtgaccttctcctctatttggggggaagttggcacggggcttaggatcagtatgagtggatcctttggtattcagccaagatgtgattttcccagacacagcttggcctctttaaggacaaaattcagtcctgctagagacttctcacacaacctcaccagccacgggcaccccagtcttcagctacacccaagtctgggatgcaagggggccttagcagctggctgacccaggatgcccaaggtcaccattccctagactctaggcatcatgccacatgctgcacatgctgcgtctttgagtccttgcagccgtgtgaggcacggtatcattactcccgttttacagaggaagctactgaagctcagagagtacctgagcagccctggagaaggagtgtcacttttcctccatctctgccactgactggctggatgcacaggagga

SEQ ID NO: 473274 - DNA, 1024 bp, Homo sapiens
tcaggggcttatagataaaagtcccatctccctgggacagagcatctggagcatctggggcagctgtgggcgcagcttcagcagacttaaacgttcctgcctgctggcggatctcccagtggatctgcctgctgggggatctcccagctggagctctgctaagggacagactgcctcctcaagtgggtccctgacccccatgcctcctgatggggagtcacctcccaacagggttgacagacacctcatacaggagagctccagctggcatctggcagatgcccctctggtacaaagcttccagaggagggagcaagcagcagtctttgctgttttgcagcctccactggtgatgcccaggaaaacagggtctggagtggacccccagcaaactccagcagacttgcagcagaggggcctgactgttagaaggaaaactaacaaacagaaagcaatagcatctacatcaacaaaaagggtgaccacagaaaaactccatccaaagaagggggttaattcaaactcctccaagctaaaggagcatgttctaacccaatgcaaggaagctaagaactttgataaagggttagaggaattgcttactagaataaccagtttagagaagaacataaatgacccgatggaggtgaaaaacacagcacgagaacttcatgaagcataccaagtatcaatagctgaattgatcaagcagaagaaaggttatcagagattgaagatcaccttaatgaaagaaagtgtgaagataagattagagaataaaggaatgaaaaggaatgaacaaagcctccaagaaatatgggactatgtgaaaagaccaaacctatgtttgattggtgtacctgacactgacagggagaatggaatcaagttggaaaacacacttcaggatattatccagaacttccccaacctagcaagacagggcagcattcaaattcaggaaatacagagaacaccacagagatactcctcgagaagagcaacccaagacacataatcatca

SEQ ID NO: 473275 - DNA, 682 bp, Homo sapiens
agcctagccctcatgtctgcgtgtggcagctgccactgccttaatacttttggaggccctccaaatcacaaaccttccatcaagcctaatcaccactcaccagcaaaggcaggctatgctatagtatcttccacatctatcattgaggctactgctctgcccccctccactacctctcagcaagtcaaactcattgccttaattcgggtcctcactcttgtaaagggactactcatcaatatttatgctgaccccatatcctgcaccaccatgctgctttatgagctgaaagttttcctcactacacaagggtcctccatcattaatgcctctttaataaaaactcttctcaaggctgctttacttccaaagacagctagaattattcactgcaaaggccatcaaaaggcatcagatcccatcactcaggacaatgcttatgctcataaggtagctaaaaaagcagctagcgttccaacttctatccctcacggcagtttttctcctcatctagtcactcccacctactccccaactgaaacttccacctatcaatctcttcccacacaaagcaaatggaggccctaacttactcactgctaaaaaaaaaaaaaaaaaaaaaaaaaggtaggggggactctgtatatttttaaatgaagaaggttgtttttacctaaatcaa

SEQ ID NO: 473276 - DNA, 2282 bp, Homo sapiens
agacatcacaactccttaggctcctcctgattatgacagtttcacaaactttccttgtttttgatgaccctgacaatttcaaggagtactggcaggaagcagagggggactggagattggagatcagagcagagggtggaactgaggaagagactggtaccaaaagggcccagcagggccaggtgtcctcggataagacaagcccagcaggtctaacaggtggaaacaaaacaaaatgtcgactaaaagtatgtggagtaagctcagcagctgtcaacactggattcaacagaatcacctggtttcttcatgtatgcatcaaagcctttgctgtccgccaggcgccatcttccttccagctgctgaacggtggccccatggtgcgcgcaggctggtgtgcggagcgtgcggaaccagcggagcgggatcggcgtgagcagcgtactggtaaaaatgaaagggttattttgatttacaagcagcaactgagcttggctctccccttcaagatatccttgcacaatgaaaaaaacaaatgttattttgctctataaacattatatttgaaatttttcttcacatgtcttttaaatcatctgtttggcctaaggcttcttgctacccctggctttggaatccctccaaacctggcctcactttatatgggttgtggaggatgccgattatttgaaattctctgttgaaatcagatttcttgcctccagccatatgtatataggggaaattaggctgcctgcttttcctaaagttgtgtcaaggtaatagcttatgctgtctcatcaaacactgggcagggcttagatgacatgtcaaccattttgaattttgcattaacaatctctgaatgaaataaaaactctaaattatattcagtttagggaattggatcctaggtgtaaagttagaaaattggagatggtttgttatttggatgagtttggttttgcagttagctgatgcttcgttttgtctatcaatctgtctatggctttttccaatcacctttttgaagtgtactttttaggcaataataggtatattttaaagtatagagttcattgagttttgtatgtatttaggtaaccacagccctaagcaagatataggacatttccatcccctccaactgttcctcatgccactctcaaagtgacaaggaagaacgcccatcagagactgtcattcttaggagaaaacatatcctttaaacccagttgtaacagtgtggcttccctttaacaaaagcaacgttcactgtaatgactttattataagtagacacacgcaggcagtcaatgagctcttgcaatgactggcagctcaaagaggaggaggggaagagccagtggaggtgggtggatggatggtgggcagcagtttattataaccacaatcagctcaggatgctggtattggcctcagagggacctggtttcctgtggtgttagcaaaagggataaattatagtcgacatctgcaatgaaggacggcaagatgacctggaggggaaaatgtcagatgtggtagaggtcagagagcctggttattcaacaaatgcaggtttgaagcagagatcaaaggcagctgccagagagtaaaatggtgttagaggtatgtgctcagtaataagtatatgggtgtacctaatactggtcacggtattgagccgtcaataaatcaaacaattctgcctgggcaaggcagagataggacttcatggtggtggatgtagtggatgacaggatgaaacaaaggcaaggaagctgctgattgcaattaaacagggtttatttttgatgagggagctggttgtgtctgtgagtgagctggtgagcaccgagcctggttagcatcattggttacgagggtagatgaggctcgtaagccttagcgcaaccttttgggaccagctgcagccaaatcccaaatctcagggtgctcttgccacaaagaaaaaattggtaactatgtgcgataatggacatgttaatttgcttggctatagtaacttttcactgtccatatgtacagttatgtgctgcgtaacgatgtttcagaacatatccctgttgttagtgacacataacgttgtatatatcaaaacatcatattatacaccttaaatatataaaataaaataaaactttcattttaccctgtttcttggggtctggaacgctattgttttattgagaattcaaaatatttatgccagactgtagtagtctatgtcctaaatggtggactgattgatgttcagt

SEQ ID NO: 473277 - DNA, 2255 bp, Homo sapiens
agctgaatctcctgaaggcatgtgttcagttgagaaactgtctgctgtggcagcagcccccataaggaccatgacgacagtttcactgcaaaatagcacccctttgacccggacatgtttcaggaaatggctggtcacagaaaacgctctgcccctaacactgaacgatctttcctcctttgaaatgaaagaagctgactcccataacatggaagtgcaaggcgggggagcaagtgctgttatagaagctgcagcaagttatccagaagatctagctaagatcattgatgaaggagtttggaagaagttgatttcaactttcatggatgactttgagaggtttaagacctcagtagaagtaactgcagatgtggtggaaggaacaagagaaatagaattagaagtagagcctgaagatggaattgaattgctgcaatctcatgataaaacttcaactaatgaggagtttcttcttatttatgagcaacgaaagtggtttcttcagttggaatctattcctggtgaagttgctgagaacattgttgaaatggcaacaaaggatttagaatattaccaacactttgttgataaagcagtggcagagtttcttttgaaagaaattatattgtgggaaaaatgctatcaaacagcattgcatgctaaagagaaatcctttgtgaaaggaataattgctggattgctgacaggtgcatgtggagctagagcagtcacctccatctggcacagacatgggtggttactgagatatttagcatggagagagagatttggagacacagattcccagggaggagtaccatgtgactacaggggcagagactggagcaatacagctgcaagcggaggaatgtcaagaattgccagcaaccaccagaagctaggaagaaaaaggaagactcctctctggggccctcagaaggaacatgatggccaataccttaattctggacatctggcttccaggactcagtgcaagaatggactaatacagaaggctttcacaggaaagtttaggagaagagtaggggactcctcataccagaggtatgaggttcttttcactagagagtacaatacagaagatatcaatgctagtaattctaccaggaacaagactgtatctcatgtttactttgcatccccacagtttctaatatcttgttctgcatggggtggatgctccgcaaataccgattgactaatgaattaattctatgacatagccatgcttatcatgatacctcaaatggaccacacaatcaattccagaattataaggtttctgtgtaaataccaattatcactaatttattcccaaactgtcagccagacatgtaaacattctctcaagtacaaccagtacatgtgaaaataatgtgacctatctacgtcccttttgttgggaggagcctagactacaagagaatgctgacgcatggctctctaggtatatcctctgtgtgtcctaggagtatacaaaggcctaccaagtggtttggaggatgctgttcaaattattaatggctacaaattcccacatgttgcgggagagacccagggggaggtaattgaatcatgagggccactcttacccatgctattcttgtgacagtgaataagtctcatgagatatgatgggcatatcagagatttccacttttgctccttcctcattttctcttgctgccgccattctcaggtatgtctttatcagcagcataaaatggactgatataatctcttaaggtggaatggaataattagtaaagtgaagaaaacaatttgcaagctttgtagctttctgcgtctttagtcagagtacgctgtttacctggttggctgcctctcttatttggtcccttggtggcagggtaagagggaattaaactttgctcattttggtagaactttttaaactttcagatacaagctgaaaactggtctcctattttatagaaacatagatattacattttgctttcaaggagaataagtctgtagacagatcttatatagttgggcacaggagctattacaaaatatgagaacactattgtgactgtttcctctaatggtctcttagccttgctttgttcctgaattttcatcatggtcttaattactggcatggaccaagttattgtctccccttactctccattcataggttgacatccaaactgtcaatgtgatggtatttagagatgggttaccctttgggggtaactaggttt

SEQ ID NO: 473278 - DNA, 934 bp, Homo sapiens
caggccatctggatgtatatctgtagagagaacggcagcaagtggaatggaaatgtcacttcagccccgaagcttcgtaaatatcaggaaagaagacagtaccaatctcccagcccacagctcacaaagccactctctcttccagcaggtattaaacattaatgaccatttctataataaggggcgagaatggctctttgctatagagctgcccaatcatttgagttgtgttagattttcaacagcagcacgtttcacaattttttcctcttccttttatcactgtgagaatcttcagcgtgaagagaaccctcctcaagcacttcttggagtaaacataggtggtaacacaagtccaaaaacgagctttgcccttactaattgccatggaagtccacttggacactttgttccatccaagcccaacagagccatggggtctaagctggcatttgcttctgttgccagagctgttgtgttgatgcttttggagctgcatggtcggtgtgcagcctcaggaatccagtgagattccagggaagggaagaaaaggaggaaggacaaggaagtcatcatttgtttctggtccatttgatactggcaaagaaatgtgtcccctctgaataacagatgtccaagagtgtttaggctgatgggaagatgaacagatagcagagtcacgccttgtgaaactcaggcatggaatatgattgtgccttagtcacaagtcacaaggagactgaagccaatctaataaaaggtatggagaggttgtacaacattattaatgtaagtaatgccactgaattgtacatttaaaaatggttaaaatgacagattttgttatatatattttaaatttaattaatttttaaacattttaaagattaataatgtaacatacccaaagccattgcattatatacttcaaatc

SEQ ID NO: 473279 - DNA, 1002 bp, Homo sapiens
agctcaggtctgatttacagtgggtccagtgggcccttggactcttcttttggtcatttccctagtgccagaatgcataataggcatagacatattaagtggctggcagaatccctgcactggctccctgactgtgccaccatcaaggacttgaaagatgcagaggtggtaattcccaccacatccccattcaactctcccatgtggtctgtgcagaaaacagatggatcttggagaatgacagtggattattgtaagcttaaccaagtggtgactccaattgcagctgctgtaccagatgtggtttcattgcttgaacaaattaacatatttcctagtaccaaatatgcagccattgacttggcaaatgcctatttctccattcctgtccataaggcccaccagaagcaatttgccttcagctggaaaggccagcaatatacctttactgtcctacctcagggatataccaactctcccgctttgtgtcataatattatttagagaggtcttcatcacttttcgcttccacaagatattacactggtcccttacattgatgacattattttgattggatccagtaaactcgtgtcatgggagtttgttgcacagattatttcctcacccagtttgagacttaatatttgcaataacgatattttttgaaatcaaaagcacaatgagatacttaagatataaaggacaaaataaattttgtgattgacacaagatcacttttggggtgccaggatattttacaagaccgccaatagtcctgttgcctatccaggctaccatttctttctgttctggatcacaggaaagattgtggccaacttgtggattccacagccattaatagtactgtttggaacactactcagtaggtcagggactcttcctccaataagattttcatgcttggctgaaaaagagtgaaagccgttagtgcacttgacctttcccagggagagttggaaatcatgaaggacagattcc

SEQ ID NO: 473280 - DNA, 816 bp, Homo sapiens
agggtcctgtgggccttccttcgcaatgtcaccaaatggggatatgctgcctggttcatgtgtgaaggagcgcatagattacctgaaattgggtgcttggggaaagaaagctgggagacacatcggactcacagagagcttggagtttagggatctcttagcagtccttgcactgaactgtgccttcacattaagcaagatacttattctggcttcgcttcagtacctccaaggggaaaagagatacaaagatggcctcttgtggagaacaaaaacatctattcagagtaacaactgtttttggtatgcacagaatttaaggtgcttaagaagatgggaagccctacaacattatgccgttggtctaaaagcaccagatgaaatcaggtcctttctcatgttgaaccgaatctgggctcctcttctcaatggtcctggttctctgttctaaagatggatttctaataatgcatctgtgctccctcttctaggtaacagcctccgaacaggtaaacgcagattgtacatttctcttcagtcttctctaaattaagcagaattgaccttcaaatattccttaaagcacacagtttccttttgaggcttataaatttgacattgctcatcttaaagcctgctcccaaatgattgtgaccttgtaactaaggtttgaccatcatgaacagtgattgtcactctatatctgtggatctaattcaaaatggaaaatttcttggaagtcttatattttaccacattagtctatgtatctgtatttttaatttaaaattaatatttaaaattacctagtgtatt

SEQ ID NO: 473281 - DNA, 1961 bp, Homo sapiens
agtaggctttggactgcctcacccagaagccagagaatatgagaagctggccatggaagaattctgccatcaaagcatttcctgcattgatcaagtggttggaccccagagctgccgtggccaaggcctggcttcggttcgtgttgactctgcgtggtcctgcagccacagtccacgcttacttctgccaggggtccactgggtcagaaagtaccccagagacaaagtatcccttgagagaaagaggcgcagatttttctcctccttctgaaaggaaacgctcggccaccgctttaataaccatttgttgccacctgctggccactggaccaaggcactccatgctggaaacaggagtttggctaagagttagccaggccccagggagctgcacccaaatgcagacagcctgtgttttctccaaagaagtgaccttgggaggatccacaattattccattcattaagccacacaagaaggtggattttataaaagagatatacttcattcatgcattaattagtcaactgcaaacacttttggagctacatgcagcctggtgtccccaaagcagccagagtcgacctttgacagcatatgtcagatggtgtcacccttcggctcaaaatgctgcagaggctcctcatctcacagagaatgaaagtcgaggatgcgtgttgcgtcccccttccctgggctgctccctgacctcatctcctagcagtttccccatctctcgccctgctccagcctgccagcttcctggctatgcccgagatcaccagtcccattcccctcagggactgcgttgctgctcactctgcctgcaatgctcctgcacagatatctgtctgcatctccttcaaacgccacctcctcagtgaaacccaccctacctgctgtgtttaaaattgcaatccccttccagctgtcctggtccccttttatcctgctctgctttttctttttcctatagcaatttttacctgatgacacattaaacaatttacttattagttataacaatttacttatataaattatatatatcttatttatataacatataagaaaaaatatataaaaatatatattttatataaataaaaaatatacatctttttacaatttatatattatatatgtttacatgtataatttattgtatatgtttacatatataatttattgtatatgtttacatatataatttattgtatatgtttgtatattatatataatatataatgtttatatattatgtatgtttatatataatatatgtatttcatatataaatatataaatatatttatatatacatttatatatattttatttataatatatgtatatgtatatataatatatgtttatatataatatatgtaaacatataatacatgtaaacatatatgtaaacatatacagtcaaacatatatgtatatatataatatataaccatatattatataacatatgatataaaaataaattgttaaaaggatatatatcttatttatgtaatatataacatatgtaatatatataaaaataaattgtaaaaaatatatatttttttaatcatccatctcctccaattagaatgcatttttcctgagaaccaggaatctttgtctgctgtgtttattgatgtattccaaatgcctagaacactgcttggcacatagcaaaacccagtgaaaaaatttttagtgaatgaatgaatggaatgcatggaaacagggtctgaacagacacaaactaaaacatcaaaataaatattctgggtagaaggatagcaggtcttttcattcatctgttctctaatttctctaaaataaattcaaattacttgaataataaacttttaaatgaaaaaaacagtttactcctgaggataatattaatagtagttttagtaattttttttagtctatggtttcaactgttcaccttt

SEQ ID NO: 473282 - DNA, 1530 bp, Homo sapiens
ccaggaacccacagcaggcgtcccagagccctcccggccctaggcttctggtgtggttctgcccatgagcctggctgcgccagagccctcctgctgttttccaagctcacgctgcagccctcgctgactctgagccaccccatagccattcaatacactccttttccactgaaaaggcagatagtgagaaacgttgatccaataataacatgaagtccatgaaagcctgtggctatgaagaatgctgagccattgaatccaccagagatagtaaagggggccttgaaatattctgaggcttgtagaagggtaaagtaaatacctaaggatcccatgacccttctgtaaatgtgacgcaacgtggtccaaccactgctgctatgggaactggaactgcacatttcctgcctttcatcttcagcgtgttaggaacgaatataaagatcaaactttatattgttcattggttgaactcgtctatagtcctggcagtggaccacataaagacaggaactggaaatgtggaccaaagtcaagggcagaaactctctcacaggactaggactggacctgagcaagactgtgtcaccacactgggcagagaatatgagaagctggccatggaagaattctgccatcaaagcatttcctgcattgatcaagtggttggaccccagagctgccgtggccaaggcctggcttcgacccagagaaaaagggagattgtgaagcaggacgggggcaaatccatccctgcccctggaagaaacaacaccaagcagttatttactgactgcctactggatgacaagctgtcagccaaaagctaaggatacagcgcaatttttacctgatgacacattaaacaatttacttattagttataacaatttacttatataaattatatatatcttatttatataacatataagaaaaaatatataaaaatatatattttatataaataaaaaatatacatctttttacaatttatatattatatatgtttacatgtataatttattgtatatgtttacatatataatttattgtatatgtttacatatataatttattgtatatgtttgtatattatatataatatataatgtttatatattatgtatgtttatatataatatatgtatttcatatataaatatataaatatatttatatatacatttatatatattttatttataatatatgtatatgtatatataatatatgtttatatataatatatgtaaacatataatacatgtaaacatatatgtaaacatatacagtcaaacatatatgtatatatataatatataaccatatattatataacatatgatataaaaataaattgttaaaaggatatatatcttatttatgtaatatataacatatgtaatatatataaaaataaattgtaaaaaatatatatttttttaatcatccatctcctccaattagaatgcatttttcctgagaaccaggaatctttgtctgctgtgtttattgatgtattccaaa

SEQ ID NO: 473283 - DNA, 588 bp, Homo sapiens
ttattatgatggaattggtggaaatgaaggaaaatgttgtcctggtgttaacctttgtgggaggaagccttgagaaccatcctcccccgcagcaacaggtgggtgttcctggaaaaggctggtttgttggtggtggtggtggtggtgtctttggtggctgttcacccttccacagtaaacatgcttgggaagcaactttgccaaaagccttcggacagtccagcgtcaacaccgcaagccaagtggtaaggcccgcggggacagaaccgtcggaccctggtggcgaatctgggatggatgaattctggaatcggtgggcactggaaggacccgacgcaggtgatgggatgcagcgcttccaggtggtgaccccggctggacgtgcgtgggtgcgaactgccacccgggctggggccagcttgctgcgccgctgcctccgcaagccctcccagcccggagctgaggaaaatttatagcggtgtggattgaatttttgttttaagtctgattgtgttctttaatcttgctaagggaatcgctaagggtagccattaaattattttgtgtcgtttaatttgattttcccat

SEQ ID NO: 473284 - DNA, 1067 bp, Homo sapiens
cttaaagaaaggacatctgaaccaagtcattactgatgttggcttaaagccaaaatgtccccaaataaagttgagtctgatgggcatgttgtgccaccacagaatttgggaaaggtactgatgcaggatttttctcatccccttcatctgactcacagcaggggtgccccccctacttggcccgccacacttgcactcggtcccttgtgggagggaacacgtgagcaagtgagtaaaggatccagccagcagctctgggcactgacacaggagcaagcttcatgcaaggcccatgaccagaccaggtgcgaggatgcctgtgaccctgaagccgcagagagggtgttacagtgctcctttagttccaccatccccagtgtgatggatggtggcatgttggcagctcagttggccccttgtcttgttgcatggggcagctgtcctccaccagcaagagcaaggaccactgtggcagccttttctgggtacccctacttggtgggtcccgagctcttttccagcatcctaaaagaatgaggtcacatggacagttgaatattggtgaaggcagagaattgtattgagtgatgaaaatgcctctcagcagagaggggatctggagagggaacagaaaggacaggttgtcttcccctaagtcatgttgtctcttgcctaaagtcaggccatctcctcctctactgactgactctggggtctttatagacacaggatggggagtgtgtgctgattggttggtgagtatgcaaaaaaggttgaagcaaagatatcactcaaaggtggaaggaagaacacacaggggaaaaatttaaatttatatcccacaaattagatgtttatttgttctccactcacaacttattgactagaaaatgtatattaacgtatagtggtaagaagagaaagttgattacaacggggcatggagaaaatttggaggtgattaaaatattatgtgtcttgattgttgtgtgagtacagtgtacatatttgtcaaaacttgataagcatacacttaaaatgggtgcagttcattttatataaattat

SEQ ID NO: 473285 - DNA, 958 bp, Homo sapiens
agctgtgactaaaaggggccaagggcagtgcagaagggaaatatggggtcagagcccccaaacagagtccctactggggcaatgcctagcgaagttgtgagaagagggccatcaccttcttccagaccccagagtggtaggtccaccaacagcttgcactatgaccctggaaaaactgcagacactcaatgccaacccatgaaagcaaccaggagaggggctataccctgcaaagctacaggggcagagcgacccaagggcatgggaacccaccttttgcatcactatgccaataggtctaaaatgtatttaggagttaaattcaaagacaaactttccttgggcaaaactgagagacgtaaagaattgctaaaagatcagagacaagcaaaatgcactggatggtgctgcttggagactagaaagccttctagagaccttagctatgatgagtcagtaataggaaatggtgatcttccactgtgctttccataatcccacattgtttcaatgtgtctgaattcttttcgctcttacattaatttttatcttaacttttcaactctccaggatttctctcccttctaaatcttgcatcatgctactcaatacaaagggcctcagggcttggagtcaattaaacatgcttcggaatcctgtcattcataagttctttttgtgtactgttggacaaaagcacctgaccgttctgaacttgatttagtaggcatataaaatgtgaatggttaataatatcgccctgcaattgtgattaagcaaacatgtcagttcaattttatttagaaaaagcacattgtttagtgaattattatttttaataatatgtagatctcaaatttgctaagagcttttattcttttctctgtatgatacatatgattcttccacgaatatttccatttcagtcaccaattatagcactaagttttcccaagtt

SEQ ID NO: 473286 - DNA, 782 bp, Homo sapiens
actaattaataactctggagtagatctaaaaatctgaaaagagtggggtgttgctgaaaagatacccgaaaatgttgaagcaactttgcaagtgggtaacagggagaggttggaacagtttggagggctcagaagaagacagaaaaatgtgggaaagtttggaactccctagagacttgttgaatggctttggccaaaatgctgataatgatatagccaatgaaagctgggctgaggtggtctcagatggagatgaggaacttgttgggaactggagcaaaggtgactcttgttatgctttagcaaagagactggtgacattttgcccctgtcctagagatttgtggaactttgaacttgacagagatgatttagggtatgtggcagaagaaatttctaagcagcaaagtattcaagaggtgacttgggtgctgttaaagacgttcagttttataagggaagcagagcataaaagtttggaaaatttgcagcctgacaatgtgatagaaaagaaaaacacattttctgagcagaaattcaagctggctgcaaaaatttgcataagtaaggagtagcctaaagctaatccccaaaacaatgggaaaaatgtctccagggtatatcaaaggtcttcattgtagtccctcccatcacaggcctggaggtataggaagaaaatgtggttttgtgtgctgagcccgtggttcccatgctatgtgcagcctagggacttggtgctttgtgtactagccattccagccatggctgaaagggaccaacat

SEQ ID NO: 473287 - DNA, 517 bp, Homo sapiens
aataaaagccaaaatgtcttacccaagcaacagtatagttaccctacaacctgagctgagtaacattagctgggtgctctctgactcaccaagccacaaagctgggtgtgcacagcactactccaccatcatatggagcagtgggtatgtaattgaggccaagcaggccctgaaggcacaagttatacaaagaagtgacacaaatgcctatgatttcccctcctgctgctacactgccttctctctccctgcttgtgtgtatagcctcattgtagcagtttcctatgataagttgacagaggcatccctgaaggatggcaaggaaggcaaatcttcccagtgggcaaaacttcggacagtctacctggttgtgcactttacttggaaggataaatagccatatgtgtgactatataccatttcatgggctgtaacaagtggtttggctggatggtcagggaatttgaagaaacttgattgaaaaattagtgagaaacaaatttatgaaagaggattt

SEQ ID NO: 473288 - DNA, 1362 bp, Homo sapiens
gctagcatggctgacaagtggggagtcggtagtactccttagggagcagtttattggggggatgaggtggtcccctggcctgcactctgtccacaacttgagaaggacctgccctccatgtgggaattggcaaagtggaaactgccctgcccgaggagtcccagccctcaggccaaattggataccctgtcaagtacagaatggtgagattatatccttacttcctgactttcttccatcaggggagcttgtcccattctgcaccccatcccccatatcaaatctgggtctactggaaaaggagtgtgagcatccccataaaacttatggaccagttgagtcttacctgaacctagggaatattgtggcaagactgtattataaaagaaaatatttttttatgcttcgttggttcccaactaaaagcaatgcagttctggagaatgtaatccaaagggctgcatttgggaatcaaattagttcccttaactgagaattagattgaacagtaactggtacaggatggctgctaaattgtattctttcacctaaattaattgaaagatgtttatttataagcaagcatctgaaataaaataattaaagaaaatattttaacaggagtcttaagactgtatttgtccatgattgaaagtttatgtacctcacagagcaaaatatcatatgaaatttacatcaatatttttttctgaaaataggaatacatagtttacatttttatttagtaggtctagttcaaaggtgtttcttcactgaattaacaattttaaaggaaatttagagccacagaaaaataggatatttacaataaaatgattgtaaaccggatgatttatgctgatgctttccacaaatgtgccaataaacctatatggacattattgctgcaatggcaaagatcacttttacttctatactttaaaaaattaggatataataaaactttcatgagtttctatgtagtgctgaaaaagtaaaaaattacattgtgtacaaccaaattgtgatattccttccaaattaaacaaggaaactctaagaccacaaaaatgaccaacttctttttcttttcactgacatattttctgagcgatttttccttccttgccaatgaaaactctactattgcttaaaacttccacctcctagtttaaaatattaaaatatccaatttctgaatttttccaatttcttaaagacagccaatcaaaaattggtgttcatgggttttttgtttcatcatggctgattagaggcattgctagcacacctctcccacttggaaggacaaaatagtgtttagaaattcacgccataaacacttcctttcaataagtgatt

SEQ ID NO: 473289 - DNA, 541 bp, Homo sapiens
agacctggagaactaggaggaaaaaatggtttcatggaacagcccagggccttgctattctgtgcagcctcaggacatggcagccttcatcatagcctctccagctccagctgtggctgaaaggtgcaaaggtacaacttggaccatcacttcagagggtgcaagcaccacgccctggaagcttccatgtggtgttgagcctgtggggccaccattctccagaccccagaatggtagatccactgacagcttgtaccgtgctcatggaaaagccacagacacccaatgccagcccccgatgaaagcagccagaaaggaggttgtatcctgcaaagcccagctctccctgccagctcgtgtgtctgtgagggtcatcaggtctcctgcagctaagatcctggaggtccatggtaagaatgtgccattccttgccttttcagcttactccttcactaggagttgctggaggcctggaagcagtcctggtgctcgctagccccatccggggtttccagctttctcccttttcagctcagcatcc

SEQ ID NO: 473290 - DNA, 871 bp, Homo sapiens
gtgctggcacatagtaggtgcttaacaaatattaactgaaaaactggatgaatgttttaagccccgcatgcattaggtatttgtcctaatgctctctctccccttgcccctcagccctcaacaggccctggtgtatgatgtgccccctgtgtccatgtgttctcattgttcaactcccacttatgatagccttgaacgctgtcttctgacacttcaaggcaacaagaatggcattcttccaatatcaagccacgagctgtcacaattcatgagctttggactttgggcatcatgggatatctggctgtggaatggaagaaacactttggcagacttcctgattattcacgttatatattttcttctctctaaacactgtgatgaagtgggagctgtgtgcttgtggacttggcatgtccacaatggccatggttggagtggggcaatgaaacctcttgcaaataccatgatttcttctctttccaaaagtattctaaggaaaatttgttcaaaaatatgaagtagaaggttttaaatgcactgtcatcaaaggaaaaagtaaaatctttgtgtatatcataactaaataaccacatgctttaaagaattgatattaaaatcaaatataatttcccttttaataacatgagagacttcacttaatacatatgaggctgacatctgagtctttcatgctactcctgtcgtgacaactgtattaaacctttccagtgtgacacttttcaactctgaaaataatatgactgcatccatgtagagcttccattttcacagagttgacagaatgcggatgctgactgccttacctctgcagactgtctcaagctatcccaggctgtgaaaaacatgc

SEQ ID NO: 473291 - DNA, 646 bp, Homo sapiens
gcattttcattttgcactcagccctttggcattggtgttttcctgccagacaggagccaagaaagcagggatatacccaaactgcattggaggaaagatatgagcatatcagaaacctcttctgcagcctattctctcatttggctcttggccttgctccaccttgcgtccccattttcttctcttaagaggatgctaccaaattcgtgctcctcaaagcaactggatcataacaatcatgcaatgatacatcaggaccctcgacctcacaacattttgtctaccatatgcttaaaagaagactccaagttcttcagcttttggactcttggactttcaccagtgatttgccaggggcactcaggccttcagccacagactgaagtctgcactatcagcttccctacttttgaggttttgggactgggactggtttcctggctcttcagcttacagacggcctattgtgggacttcaccttgagattgtgtgagtcatttctcctaataaactccccttcatatgttcatctatcccgttaattctgtctctttagagaactgtgactaataaaatatcttagcccaaagtaagtgaatttctatttagggctcatacaagtgttactggtcagcaagaggctttc

SEQ ID NO: 473292 - DNA, 1430 bp, Homo sapiens
tcatcacagcaggtgaacaaagtctcgatcctgtagtggggaaatggggaagtgtagccggtggtggcagaagcggctgcaggaggagcagtggcagccgtgggtccccatgtgccctgcatcgtctgtgccccatgtccgagagagagagagagagagagagagagagctctcacccctcaccactccacgcctggcttgcatggcaggcatgggatccaggccagtggtgcaagccaagagcagccttccaggccaagtgggtggaaagaaatcagtggacagagcaaaactcgagcaaaggcccaactggccacagagatttttggccggggaaatgacacctcaaggatcccaggataacgtctactgctctactgtgtttaaaaagcactctgttatttgggcctacctaactgcatgtgatactccactgagagcatgcactggaaataaccatttcatgattctagtctaatcatgaagctaattgcagtggctatggattttttaagtttattttgtcctatattagtcattactgactgtataattttcaaatattgggctagtagttggctaggattacatgaacttttagtaggcctgtatactgtattcataaatcaagcccaacctttgaatactatcccattggtgattcgatttcaaaatatgaattctggggagacacaaacattgagaacatagcccttgacatgaatttcttcagatttattgtgttttgggtttactcagatttttgaatttttatgtttatgtctcttgcaaaattagggaatttttcactcattatttcttagattatttttccaaattctgcttttatctctccttctggagcatcaatgacacaatatattgttataatcccacatatctctaagatactgtttttgttcctttttaaaatattttatctgtatggttcagattaatttctgttattctgtcttctagtttactgatttttttaccttgttatcttcctttcattctacttttaagttcatctattgatcttttaatttcagttttcagttctaaaatttccatttgattcttctttatattttcatcttctttgctgaaactttctatttcattgttacgactcttttttttttatgtgtttcaattatgtttgtaattgctccttgaggcatttttatcacggattctttaaaatcatcaaaaacgtctaatatctcctacttttaacatctattcattgttctttcttcattcagtttgagattttgctatttcttggtatgataaatgataatttatattgaaatctgaatatttttatattataagactggatcttaagccttctgtttttgttggcatttatagtagtctggcaaggggaagggggtagcttactatttcaaggtggaggt

SEQ ID NO: 473293 - DNA, 603 bp, Homo sapiens
tttgagccaggatgagccaggagaaggaacttcacaagacaatgtcatcagttaaggcaggaattggccatctggatgttcatgatgaaaatgccctcttgaggctgaattccaaaatggcacataaattagcacaaaatccgtggtataaaatccaggtacctctgagtttacttagagttccattcaaagaaatgatggctagtgggccatatgccaagtctgagtctgacagtcatgagcagagctttagactccagcccactgggcagctgaagcttattattcttacaacagtcaacaaaaatggctatttctgggaagcactcctcttttcacataaagaaacccaagtgaatgaacatgagaaatatgggaaccattgcctgccttccagtcgaagcttgggtccacctaacagttcccaaacagggttttgagagtcaatcctattagtatatgaggattgaaggagtaatttaaaataatcaaaataccttcccactcttctccaactccactctctcaccctaaagaaacaatgatgttgaatcctggatttcaagcaaaatgttacagaaattcaactgtccagattttcaa

SEQ ID NO: 473294 - DNA, 610 bp, Homo sapiens
taagtgccaagacagcagcacagaccaagtgccctggggctccaaggagggagtgagcacagacagccgtgggtttcagggaagacaacttcagggagggaacgcctgaaatgagccatgggtccattagatggacttcatgttagagcaggactcagggagagatactggattgcatcttcaatttcccctggtcaggtggtgcttcagtctatgtttcccggccaaatggtgccactggcttggctccatattgaggtggggtctcaggctgtgctctgtgattgggtggggctgcacgctgtgcgtagcagttggttgggatcacagttgggtggagcttctgccttggccctctgggcaggcaaaaccacaggttgggctctgcagccaggagatgttggtattgaggacaggaccagaaggaaatcacataaaatcactacttcaaactggtcctctgaggaaatcaaaataggacaatccatttccatggattcccaacttccaaaagtattctaattttcccagacatggctttcttatttaaattaaaggctcagtttcctgtcttcttttcctgcctaactccagaaaacttctaagggag

SEQ ID NO: 473295 - DNA, 810 bp, Homo sapiens
acatctcataccaagcagtgggctctaagggcagagcaaaggttggcctgcagctttctccccttcctgctgcctgtcaggagaggaaatcgcagctttcagagggacctgacacagggggaactggatagcaccaaggggtcaaggggccaattagcttcatacaatggggaaaaaaaaagactgtttcctagacttggactgtaccccaaactcagcccgccttgtccctggggaaaccagcattctttgctgtcaacaagaacagctgaaggaacgcagcaggaacacagggccaatgagagctgctgggcccagatgccgacgccgactatggaaagtcacggaaggctcttctgttcctcagcgttccaatccaatttgcggaaactgtttatcaggtttctatgcagacaggattaacgtggcttctcaattcccgttccccacattttgtgacacagaagaccctggatgcctgaggaaggaagactccctttcccctcggctctaccctcctgttaaaacctcacggttcccaggtaaacaaatgattctgattcatgagtcttgtttgagaatagcagagacgttcagagttttgtgagattagtcctttgttgtccaaatctataatatgctagtttttctctttgtatatggaaaagcgtgctttggcaaacttcattacaacttaaatatgttactattctgtactggtttttccttctctctaacctcctcagtagaagccacgttttaagtattcagaatcttttcacttcctgtattttcaagcagttatttctc

SEQ ID NO: 473296 - DNA, 593 bp, Homo sapiens
tccacttatagtgaggggcctggagatacacaggttgttgggttttttttggtggggggtgggcggggggtgagcgggtggtggcggttgtcatgtgtatgcgtgtgtgcatgcgcttgtgtgcgtgcacacgagccaaggccacctgtgaagtcactgacagagaacaaatagctgaagaagcaggaggaaaatatgtttcagtgaaagtgcactcacatccagccaccccaccaggccccacttcccaagagacacagttcctgtctggccacatggccttcacagagacatggtttgccacgacaaaaacatgtcactaccgaggactgaggcaactgccttccagggactctattgagactcagaactatgctctccaaaacagagagacttctttagagcttcgagaactcccttctattgactcaaacggtcaacctcttgatgtcctacctgttttccccaaacttaattcagctgctgtggggtcctagccaaaccataaatcctaaactcattaatataaatattaacaaattaatggattggccagataggtttaagtccaagatctacaaaatactgacttc

SEQ ID NO: 473297 - DNA, 870 bp, Homo sapiens
ggtcctgtgaagacagtagctttactgaagaggcatctgagcagtggaaggattaaatggctgctctagagttctaaaatatggaagaatgtgagcagtcgccagataatataattttcattcacccaaatatcgagcacaattcaatgaagaaaatgcaacttttgccagtgatcctgctgggatgggcagctggtgttgttgactggcctgtagctcttcccccttgtcctgaaataactcggcattccagtagaaaacctgcatcatgttggtcgagtggagatgaagctggtctctcttcaatccctactacaagatgtcatgtgacacaagctgaaccaatcagagaatcccatcctggtgaaagtcattggtggaaagataccctttctcacggaggagatacggtgtcacccctaccagtgcaaaacgaaaaactagcctacaaggagctgccaacgtttaggggttacgaagatgacaaacccctggaaaaaggagcaaagaatgagcaaagaaataagataataagacagtgcaacgcccttggagagaagcccctggacacttctagaaatgattttgaagccgttggagtaggcttcaaggacaagagcagctcttctggtcccagaaagttcagcatctcttctataacatctacgccgactctctcctttttggtcaattctgagaacattcagcaatagctaactcgaattcagttgctccttccaacaagaacatggaacttctttatttgttctctctgtgatccttggcatgaacaacattaaaaatatctgatataaaagtttccaggacaaatgtttctatttcattcgtgatgacatcttaccatttttt

SEQ ID NO: 473298 - DNA, 618 bp, Homo sapiens
agcagtctcgggtggacatgcagcggctgacctgtaggagagtctaaatgaagccatttcagccacgatatgttcaatttgaagttgtacctagggaagccctggcagaagacacaggagacgtacggaatgaagcaggatttaagacagacgacaacaatgggttgggggttggtttgcgagatactactctcttactcagttgggggcagtgtgtgcatatgtttcaaccaagcaaggagcgcatttcatggcccgaggtcccaccctggacctaccgaatcggaaactctgggggcggggccaagaacctctcttctaacaaaccctccagcgattctaatgcaagttcaagtttgagaaccaatgttctagagccttgctcctccaagtataggccactggaagcttactacatgcatggaatcccaggccgcccctcaggactgttgaatcagaactgcagtttaacaagatccccaggtgatgggtgtgtacatttaagtttgggaagcctggtgattttcaggtgagaagtctaaactttttaaagacaacaatgggaagcagctgaaagttataaagtggtggtataactgatgagcgccccaggaagaa

SEQ ID NO: 473299 - DNA, 1380 bp, Homo sapiens
aggcaagatgggtcaaagtcagagtggtggtcatggtcctggaagtggcaagaaggatgacaaggacaaaaaaaagaaatatgaaccttctgtaccaactagagtgaggaaaaagaagaagaaaacaaagggaccagatgcagtcagcaaactgccactggtgacacctcacactcagtgccggttaaaattactgacattagagagaattaaagactatcttctcatggaggaagaattcattagaaatcaggaacagatgaaaccattagaagaaaagcaagaggaggaaagatcaaaagtggatgatctgagggggaccccgatgtcagtaggaacctcggaagagatcattgatgacaatcatgccatcatacaaggatcttctggaaactggctgctcggtcctgctcaaccacaaggtgcatgccgtgatggggtgctgatggatgacacggatcccctggtcacagtgatgaagatggaaaagaccccccaggagacctatgccaatattggggggctggacaaccaaattcaggaaataaaggaagctgtggagtttcctctcacccatcctgaatattatgaagagatggttgctgaagagcatgaactatccatcatgtttactgatgaaattggagccattgggacaaaaagatatgactcaaattctggtgaaactgtggatctagcacttatcagaccaggccgcattgacaggaagatcaagttctccctgcctgatgaaaggactaagaagcgtatctttcagaatcacacaagcaggatgacactggccgatgaagtaaccctggacgacttgatcatggttaaagatgacctctctggtgctgacatcaaggcaatctgtacagaagctggtctgatggcctcaagagaacgtagaatgaaagtaacgaatgaattcttcaaaaaatataaagaaatgttctttataagaaacaggaaggcacccctgaggggctctatctctagtgaaccacagctgccatcaggaaaatggttgggcgattcctcgacccctgaaaaggatgaggttgggggagttgcccagaggaatccctgttcccgttgatttttattagcaaaatatcccatgtcttttggagtacgatgtgtaagtgcccatagggtggccttagtcagtcactgtgcagcagtctgttcccaatggagtgtgctctttaacaaacatataataataatctgggtctctgtccattgctagctaattgaatttcatattaggatgcttactattatggctaaatcaagggaattgacccttatctgggggaaatatgaccaacttaattcttggtggtgttattattgacattgccaatagcatat

SEQ ID NO: 473300 - DNA, 797 bp, Homo sapiens
ccagaagaaacactttccctaagcggcagaaagagtgggcaggttgaggagggctggcacagaaaggatcatcttgaatgcaggtctggaaatacactgttggcagcagcacaaggatccaagaagtcaaagaaggggagatggcccatatactccgagccagaacacaaggcagtcggggaccaggccccaagatcccaaagcagtcacccagtccaagcccctcttattctttgtgtccactgaggctcagccctggatacccagagtccatgaacttagaacaaagagaggaagaaaacgagcttcagagaagcattgagacaggaccttacagtagaggcaaaattaaagtgttgactggttgggttcttatcaggaggctctgggaaaaatccacttccaacgactttcaggtttttgacaaaatccagtttcttggagttataggtctaagtcgaaaatatcagtgcaaaaataagtccaaaggaaataatgaaaatgaatatgaaggaaagagatcctcaggttgggtaatggctctgtactgtttacaagtggcacacctaaaacagaatgaaacgtaaaaggcaaaatgtatgtttcattctgttttaggtgtaccattttcttttgcctaccactgccatagccagctcttcttcaatcttgtttaactactgtatgttagaataagtgaatacacgaatgtatgataagcaatttgtcatcatgactccctagtcaaagaatcacacttggttatactgtcccaccaaccatgaattggaacagag

SEQ ID NO: 473301 - DNA, 662 bp, Homo sapiens
ctagaatttagagtgcaggacctctggaatgtgagagatcagaggaggcatattgcccgatgctgaggtttggggtatgatcgaaactgtcacccaggtatttctaaaagtatcatgggtcccaggcactgtacctaatggaaaagtcagccctgggcaggtggagaggggttatacctatggaaaccggcaagtgagccttcaaaggagctctgtgggagcacagtgctctctgggaccccagagcagggattctcaactcaatgaggcatgcagtgagaagtgctaccctgcccagggaagagacttcatggtgaagcttaagccaagtgttgaagctgaaaatgaagaagcaagaaatgaaagcctgtgtgcagaaaaccagaagctgctggatgtgggtgcaaaaagtaccgagcaggaatggtccgagatagagctggagaggtggatgggtccagacagtgacgagtctcatgagtcacttgactggcatggactttgtcctggatggacagtagggatctatggactttaaaatgagaagaggatgatcagatttcagattaggaagactggaaaatacatgtattcatcaaatcaggcaaggagtaagagtgagtgagtgtgtgtgtgtgtgcttgtgtgcacacaagtatatt

SEQ ID NO: 473302 - DNA, 560 bp, Homo sapiens
ggtcctagcaataccaggtgcttaggcaatgtgcctgctcatgactgcaaccctgaagggatcctggaaagctggatgcctttgcatcctggcatcatggctggaggcaccagtagaggacagaattttgctcttctgctgcatgtgtggctgtggctttggtcctcactggacttcacagtactggctccagttcagcctggtctctgagcagaacaagcttaagcactctttgggcctagaaagaaattgtttggaagaactcatggaaaaatacaaattctgtttgtttgcatatctcatccctgttttattggtttatttgcatttgttagctctggacattgtggaaaggagtgaagaaactccagggaaagcattatcagaatcagcgagcaagtggactaggagacgcagctttcagcatctgtgcatttctcctcctatcaccaccctgcataaagtctcaggctagcttcaacttttccagtgttcttcaataaataaaccaaataaaagcttatttaagtctaaaacaaaagctcatggactctttgtgg

SEQ ID NO: 473303 - DNA, 596 bp, Homo sapiens
ttcttcactcagggcatgaggatgaaagaggaggagtttagtgactctgtacataatacatttgaccatatgtggagaaccaaggaacaaaatgaagctggttggttgctcctaagttcagcggacaaagtgatgaaagaaaatgaggaactcagggattctgtctcccggcttcagaagcaaatactgagcctcaaatctgcaaagattgctctgactgagagtcttatctcctatagagaaaaagctgaaattgtgggaaaacagacacaagctctaatcatggtaaccgtgcaatgggtaaagggaaataatcagacattttgggaactactggacactggctctaagctgacgttgattcccagggacccaaaatgcccttgcagtcctccagtaaaagtagggccttatggaggtcatgtacttaatggagttttagctcatatctgacttatagtgggtccagcgcgtccccggagtcatcctgtggtcatttccttagtgccagcatgcataattggcatggacacacttagaaactggcagaaccccgacattggctccctgactggtgaggtgagggctgttacagc

SEQ ID NO: 473304 - DNA, 732 bp, Homo sapiens
tcaagatttccaggttgctctggggtcatgctgatacaagagatgggttcccatggtcgtgggcaggtccgcccctatggttttgtagggaacagcctccctccaggctgctttcatggaatggcattgagtgtctgtggcttttccaggcatgcagtgcaagctgttagtggatctacggttttgggccctccagactgttccaaccactgcctattacccagttccaatgtcacttccacattttcaggtatcttttcagcagcaccccatttctggtaccaatttagtgtattagtcaattttcatgctactgataaagacatacccaagactgagaagaaaaagaggtttaatggacttacagttccacatggctggggaggcatcacaatcatggtgggaggcaaggggcagcaggcaaagagaaagagagcttgtgcagtgaaactcctattcttaaaaccatcagatctcatgagacttattcactatcacaagaacagtataggaaagatccacccccatgatccaagtatctcccaaccaggtccctcccacaacagtgggaattatgggagctacaagatgagatttgggtgggcacccagagccagaccatattggcaacttactaaatggtagaaaatatttgtgagccatatatctgataagagagatcaatgtatcctttgggatatgtaatatattcttatattactgaatttgggt

SEQ ID NO: 473305 - DNA, 644 bp, Homo sapiens
gtagatatttagcttctctgcacaagatgggaccatggcaagtgtctcctactctgccttttccacatggttggggagtccttaggcaatgtacaatcatggtggaaggtgaaggagaagcaaggaccttcctcacatggcagcaggagaaggaagtgcaagcagggaaaatgccagatgcttataaaaccatcagatcttcaatcagtgagagctcctgttgctccacatccttgctgaagtttggtgtagccagtgctctggattttggccaatctaaaatgtgtgtagtgatatctcattgttgttttaatttgcatttccctgatgacatacaagctgaagcatcttttcatatgcttattcgtcacctatgtatcttctttggtgaggtgtctgttaaggtctttgacccattttttattgacacataataattgtataaacatatgaggttatgtgatatttgataaatgcatattatgtctctcacctgaataccttcaagataactcatctcttttctgtctcttttgccctctgcaatctctcccctaaaaaattagtgattttttaaaatgtaagtaatattatatcactcatctgctgaaaatactttgtcttattcttattgttaaagtaaa

SEQ ID NO: 473306 - DNA, 598 bp, Homo sapiens
tgtgatgataacaaagaaggaatggtgaattttggagcaatgctaagtgctgtcaggaccagctgctctcccccagaatcattgacacacggagttaggcaagcgtacagaaaccacaaagcaacaggaaacattataataaatatacagattaatttaaaagaatgttatacttttatagaaggaagtgaaaaacagataacccagtttgtggttacttgttgcaaaagacacaattctcgcttatcctgttttttccaaatggtggatgatgtagcaaatcagctgactcttaggttaaaaaagaaagccaggagaatgggctctgtggttactattgatgaaaaggccacgagcatcttctatgtgaacagataccgcaaaattgctctaagtggttgtgcaaatgcacacaccctgtcatgtatcagagttcctgttgttcaatatcctcgctaatgtattaccagactttcagattttagttatttagccttgtgaagaccatgtttgtttccctttcactttccgtcataattaaggcttatcccacacattggtaaacactagaaaacattgctgttacctcaggaggatg

SEQ ID NO: 473307 - DNA, 685 bp, Homo sapiens
caacgatgtacacgtacataatgccactaaactgtatgaaaatggttaaaatgaacttgagtgtaggaactttacataccctctccaaattgcaagcacctgatctgatccatggatctccaactagtcagttggagaactcagtatggctaatcaaggagcagtcctttcggccatatcccctgcttcttcctgccccggcacagaaaaatgactgcatgtttgaaactctgaagggctcccataggacttcctgtcaacacaaacatactctccccataagcaaacttctcctttctacttcatactctcagttaattgcaaagaaacagagtaaacaaatgtccagtggtattttaatgacacagatacgtccccattcggaacagcaggaacacgatgaaaagtggctgtaccatctactctttgggcctggcatcctcccaacccctctccaccccagccctgcactacacacttctaaggttggctgcctgggctgcctgctctccgtggcttcatgcttggattcttactcctcttttgatttgtcaaatttgattattagaccaacaatgggtttacctttgacctcacaccctgctgaccccctgaatgtggggatccagttttcactccagaccctaactcaggccctggagatctcaacagtagttcactgatc

SEQ ID NO: 473308 - DNA, 586 bp, Homo sapiens
ctcctgcagccagactcctcctcttttgcctctgagtcatttcctctttccttcatggaccccagtggtgcacgcaggcactggctgtggtaggcgggggcagggtgatctccaggccaccagggaaatgcttaggctgtggagcagtggccttgctactggagagtatggggttgctttcagtgggagtagccatagaggagaaggactgtgtgtatggctgaaggagtggaccctgagcactgggcaggcctttcaaggtgccagtcaacttcagtgtaaaccaacagctttagctgggagaggcccagtgccccacatggccctgcatggcacacaggaacagtggcaggtggtcatggagccagtcttgcgagctaaaagcaaccacatgctgttaacagattcagatgggctgacttgcccaaaggggcaccgtaaacgggatgataaatacatccccaagtgcatggaatcaggcaaaccgggttccttggctcaccaactcagccgccatatggtctggagcagcttagagtttctaggcctctgtttcctcatctcataaaataagtgtaaaagcaac

SEQ ID NO: 473309 - DNA, 662 bp, Homo sapiens
ggggcacatgctgatgcccctgtgtgggctgctctggtggtggtggtgctgctgctccggctggtactgctatggattgtgtgccccagccccccagatgttgcgccaccagggtctcctcaagtgccgctgccgcatgctcttcaatgacctgaaggttttcttactgcgcgccctcctcaagcgcccctgcccatgcacggcgacccccagccccccggtttggcggccaacaacacccttccggctctgggcgccgggggatgactggggtggcccagccacagagccacctgcctcgctgctcagcagtgcctcctcagatgacttctgtaaggagaagaccgaggatcgctactcactgggcagcagcttggacagtggtatgaggaccccactctgccgcatctgcttccaggggccagaacaggtccaagactatatgatttgctgagacacttcttggcagactcaaatttttctatgttgaaaacaggcagaggtgtgttgggagaatccaggagaaaagaagtgtaaaaatatcttggaaggaatttatatataatgagcatgtattttgataacagaaagctgtattttattgaaaaaagaaaaagaaaaaaatcattggcaatattgtgaaataccctcatgtgatacaa

SEQ ID NO: 473310 - DNA, 767 bp, Homo sapiens
ctgctctattcccttgttccccacttccctttacggtgaacactccccctctgcagctctctggaccctcttctccacccgggacgtaggactggttgctggcacagggctggggttgcagacttccatgggtgcattggtggaagaattaggtaaagacatgactcaaaaacaggatgtgtgcagagggaaaactctcttttccaatttatgaagcccaaggaattggggtgataaaaggtgctccctttggtagtaggggtcaaatgggattagtatgtggcctgctcacagtcagatggctaatcagcccagagccagaagctgcttgcaggctaatggccaagcctatctctcagcactgcctctgcagcaggcaaggcttggccatgtgtggctgtgtggctgtgtggctgtgtggctgtgtggccgtgtggccgtgtggccgtgccgctgtgcgactgtgtggccgtgcggccgtgcggctgtgcggctgtgcggctgtgcggctgtgcggccgtgtggccgtgtggttgtgtggctgtgtggttgtgtggctgtgtggttgtgtggctgtgtggctgtgtggctgtgtgcttgcttgcatgtgagtttgcaagtgatgaaggggaagcgggtagctgttaggggctgaattgtgttgtctcctaaaaatatgttcaagtcctaatccccggtacctgtgaatgtgacattatttgaaaatagggtctttgcaaataaaatcaagtaaagatgaaatcatt

SEQ ID NO: 473311 - DNA, 1363 bp, Homo sapiens
ctcccataaaccatctgatataaactctggattatgtttctttagggagagttgagtcatctccctgaaatgagagaaggacaggctctggcctggtcccaggcattagagggccccctccaactctccttgtgtccttcctatggggcaagagtctgctgggccaaatgcatgtgcccacatacagcccagtcctcttcttgacatgcttcaggtccaggcacttagaactgtgggattgcctatttcagtgaccgtgggttggcttccagtgggcagcaatctcttccaaaagctttctgtcaggactaggaacttccagacctctgagaaggcagctgctgaaggaaagaagccacttaactggtcagtaaacactgaaatgtccattaatagaatggatgagtccattgttggagagcagggcatcctgaacgatggtcccagtgagactgcacatggtcccagaaagaatctagccggtgttaacaaaagaaaggagggcatggatgttaggttggaaacaacagatttcgaacaccttgactcactaagatctttcttaggtggaaaggctaaaagtcgtttttggttcccttagaagacaaatagaagtttgattttttaaaatgtgtttttaacataatccatcatgagcaaataatggagttggattatatttttttaaactatagtgacattccttttggccgaggttttctaggctcagctaatagtcaatcaaataagttaatttgtgctaagatgtgaagatggcaatgacctggtccagggtaggcgtatgccccaaccccagtgctggcttggacccatgggtactggtgacttgaatgttaatgagcacattcatgtccccttcctagttaattgtaaaccactgggagaggaactagatctccagtcacaaaaaatttgagaactgctctcctaacccaggggaatggctggctgctaagatttctctgggtcctatcattggcaggagccttgtttaaattttatatcttcatcagagtttgaagttggtatgaagtttatatgaacagtaaatcctaaatctaagcaagtcagatactaagtgccttgattctggcaaggcccccctaaagcctgggaggtagaaggtgttaaggttataagatccagttacctttacacatagcatcagaggtaagggcagccccacttgaaattgaaaggaggtatgacccacagcaaggcgatatataattagagtcattttgctctcacttttatgtttaggaggagacttatcttatcaaagcatatgacaaaaataagtaagatatagaagcaataacagaattttaaatagcagtgt

SEQ ID NO: 473312 - DNA, 852 bp, Homo sapiens
ggaagcaggatttaggttctgttcctgaatctggtgaaggatgagcatttcattgtttgctttcctttctttacaagaagaatctaacttgccagacacggcttaagtgacgtgtgactggagaaggcccatgctcagggggatagattttaagatgcagctgcctgttaatggacttggtgaaaagactggggagcaaggcctggtggaaatgaaatactgtgaagagctgatgtggggcagccagtgcaccacgcgccagttcatcggctctccacgcttccctgtgagccgtcatcctcgtgctcattttgcagatgggcaagaggccatggcgtgtccagcatgctctggcaacttaccctgttggtctctgaagctccccaccctctctgccttcggggcaaatccaggcatttgcacaaatttgcacggctcagggtctgtctgcctcccctccggggccttgcttctcacagcccgcttttctctgcaagcttcagtggaacggaaaaggatctatccccgggttgctgggcagaaaagaagaaacaggtttaggcagatgaagtgctcaggatagtccaggaagggccacagggcttgagagggagacaggcctggaaccaaaggcaaacaaccccttcatcattgtgcctgggctagtactgactcagctgcttctgtgatttgcattttggggtggattgacaagttagctatttgaggttaaggttatccctgaaccattaaaagaaaagaacaagaccttgtctgataaacctgaaaacttgaatttggtgaatagagatgcatgagatgttatgctctttgggattctgaaaacccgat

SEQ ID NO: 473313 - DNA, 611 bp, Homo sapiens
gccacccgccagtcatagcaaacaggagtactctttctgtgctaaaatgaagctgtataatgcagccgtgtggcaaaaggagatctgtgaatgaaaatggggcagttggagaaaatgggttcagctatgaagataacagcatttctgacagagtgctgaaagctgtggctgtctttaagactattaggaagactgaatttcctgaaattgatctccagaatgattttgtgtggccggaaatgttcattgaacagagacctaaaggctttggagttgaaggaactgcattttgtcttactctgaatttcatagaccatgaaactgagtttctgagagaaactgacttggagggtgagttcgcaccctcgtttgttgagttcctgtcgctgcagcttaatttgccttcgcaccttcctttcacgctcacaagtgtctggtttagacaatacgttacacgaccaccaacagtagcagcagcagcagcagcagcagggctaagactgctctccagatccacttctcccactactttactgttgttttttccttaagtgtgctgtaacttattctgtttctcaaataggaatttgaaattgttttttaaaaaataa

SEQ ID NO: 473314 - DNA, 612 bp, Homo sapiens
acctcaatacgatggcagcaaagcccctttccacagaggagctgcatttcccaacaatcagcagggaagaatgcctcagtgccccagatcaaacatctttccctggagagcactgtggccagttagagaaagtattcacgttcctcgccaaacagtactgggaccaccacattaggaataatcataatttaactccagttatgtccactgtcaacgtcgttgatgtcaatgatggggcatcctcatcaattactacagaagatgctggcaccaattctccagatgacctgcatactaatatcccaggcctttttgtttttactttgctctcttgctggcaccataactttgtagtgaccaacatcaaaaatgtcacatctcttctgaatcctagcatccagagagttcaaattcaagctgaaactgatttataattgctatgatcttggtggttaagaacttgggtttgaatccggctccaccacttattatctctgaaacttagtttccttatctgtaaaatacagattttatgaggctgtttatgttacaataattcctatgtcacagttgtgttaaaggtgagcttccacttgaattgtattcgcttgg

SEQ ID NO: 473315 - DNA, 993 bp, Homo sapiens
tttttatcaatgggcatttcagttcttttcatttttcactgccatgaatactgctgccagtgtcttctgcaaggcctttccccacaggttgctggagactttatcactgttgcaggaggcccagcggcttcgccccagaggccaccagtgccacccaggctacaggagtcaggaaagaagaagtcagtgctctaaagagcctccaggaagtgagttgtacaccgaacctcttcaactcatggaagacacataccattatgaccttccaggctccagttcacttctcaagtttccagttccttggttgcagaatgaaataaccattcccacatttcagagtacttctagacttctggtcagcacactccaacaggtggtgtcagccaaagtgttttctatgacagtggcagcaggatccatcatcacttgcacatgccagcagcagcagcagtgtggcaaggtgcatgctagtctgctgcagcaaggtgctagcagacactggagtgattcaggagatccatggcgagagcaggttgctccttgccagatcaactcacatgttctcccagtcactgggggccaagaacaagttctggtgtacagcagccccatgtgggatttccagcttctttctccttcagcccagcttctgtgtcttccctctgtccactctcagtgcctttcctctgaagatctgttaggagcatgccagtcatccagaggccttgttcctcatttctgccagagtgttgagcaggaaacgagcagatattcctccggattttgtcctaggaaaaagtcatcttataatgagactttttctgatcaccagaactattcctaaatcaacagaaactatggccttcaattataagcaagatagcaagatgatgtatctcagttgaaatgcagttgcttgaacttatgccaaaatactaagtttgaatttgtgagtgcgatcaacttttagtaacataatattttagaacattc

SEQ ID NO: 473316 - DNA, 659 bp, Homo sapiens
gagccgaaggtctcatgtgcatggggtattcagaactgagttgcagtgaaaaaaccctctatccttctacccatctgtcctgttattgtacctcttctgtgctggaagccgaccctgtgaagtcccatgagaacagagaggtggtagcaccagagactggtaagggccacatcctccagaaagtacaggtgaccacctttcattccaaaaggaaaggcctttttattcttttggcatttcaaccgttactgtgtaagttttcacacacacacacacccacaaaaaggcataatacctgtaagaaggaaagcagtcctctagaattgaagtgtttgaaaaaaagctatgagctcaatgttttggaggaaatcccttctatagcagtggaaagaaggcagctcactttggactttgaatggtaggaccgtatctgctattcagtttttgaaatacagctgtgccatgtgcactgaaccttcacactgggactcagctgccatgcttcaccttgggtataatgatgacagaggttgagaaaggtgactccctccattgatgtatttcgccatgattacctcccaccaaatgatactaatactcctgaaaatacttaacatttataaaatgtttattttctgattcatgccaaagtacttgta

SEQ ID NO: 473317 - DNA, 556 bp, Homo sapiens
tgattcatgcttcaataaattcaatttcaacaaaacataattatgattagaagcagccacgagcccctgaagaagcaggccgaatgcagcaggggaggtctgtgctccagtcctggatttgtcgtttcctttctgcatgtgctggagcaaaccacttattgtctgtcagcctcagtttcctcatctgcatgcactgatgaccataatcctggcaatgacacaactttgctgaggaagtatacgatgcaggcctgtaggtttgagcctccaagggctccaggggctgtacagtcctccaaagggcggtgggaaaaaggttcctcaggttttgagggtgtgttctgcagccctgctgaggaacgtttgtgtatcctatgtgtgctggtgcatttattagaggatgtggtagtgatggcgttgggcagtttccaaagtaccatttcctgaaattatcttggccgcagccaggtatgcgactcgcagttgcaagcccagggagaaggtgagctgccggggagaagtttacagtagggtgggtcgttcggaggagtgccaa

SEQ ID NO: 473318 - DNA, 589 bp, Homo sapiens
aatttaggacattctcctttgaaaaactctctcaggattttcattttcatctggaatgaaatgcggacacccatgaatctggacaaggctactgtatttgtgggaaatagtgccctttccacaggccagcccagccccatgggcagtcaaaccctccctttcattcgcatcctgaagcagcgccctcaggctacctggccttcagatcatagcaagaagaaaccttggaaaatcccctcttctcctccacacctcccagagatgcccaaaaagcagtttaatgctttttcacagcagttcctgaggcctgcatattccaggcatgaaattgacaagagcaattcagctttcatatgggagcatatgaggtcagctcagcttttggcctctgcaaggagggatgtagaaagtctccccacaggaatatctggtggcatcctgacaccaagcctccttttatgttttcaaaattttttaaagttttattttgtttttaattgacatataatagtcatatatatttatggggtacagtatgttttgatacatgtatacattgtgtaatgataaaatcagagtaattagcata

SEQ ID NO: 473319 - DNA, 766 bp, Homo sapiens
ttagtgggtgcagcacaccagcatggcacatgtataccttttttcttgcattcttttctttcttgcttaccctttggccatcagagatgagagtgaggtgggctgggagttagccttatggcaaactcccctcttgctgctggtcctaccctttgcctccagctctccttattccaggaaacattggggatgttctgcctggagctcttccttatctttcctgggccacaagctccttcacaaaggggtcagaacaggatttacttcaatgtggtctctgaatcacagacattctcggaagttcctgctgtgtgtaccagtatctctagagtttattgctgatttaatatgttccaacactgccacaggaagctctgtgtgcaacagctttggacggtttcgatttaatcaagaggaagatgaaagtgggtgtccatttctttcaactcctcggctctttcaccatccatcatagtcaatgtgtggttactcaggacacagcattaatgatagctgtcaaaataatagtctgtgggttagaggtcaagaaaaatatgtaaaagacttcagggtgaaccagatgataaagtagctcatttagtcatttaaatgctagcctagcatggccttggtgagatcagggaggcatactgtttgcaaagtttacttagacaaagaaaaaagtttttctcatactttttcatgaaatgatattatacttgcaataagaggcaccaactttagtagaaacctgaaatatgtttct

SEQ ID NO: 473320 - DNA, 1167 bp, Homo sapiens
gtgggggtgtatgtggggggacctgtgggtgtgtgggtggtgtcaggggagcctggatggagccccaggacagcctgctgagggtggaagcctggatggcagatgctcaggtctgactgctgggctgcagggaagaaagaaatgccaagctgaactcgcaggtagggaggaggagaggtgggacagtgacaggtcactaaagaaaaagcattctgagaaaagcctgtgctccttacggtatgctgcaggggctgagcctgcgtccctgctgacaccctctgggaacccccatcgcaagcctcaccttgttgcttctcactggggccgttttcggttggcgctgcttctctttgttctgttgtcccccagtgcagtgaacccttacattatgggtttctcttgtagttctaacctctaatactcaaccattacatcttatctcgtcttctaaattactctaaaatccaattataaaaccctctctccttcaagagcacacaacttgccacattactgaaatgctgggctgctcttttgtttttctaaattaataataactataccattttccgtctgctcttaccatgggactcttttatatcaccacataaaatgcatattatgattctttttgcttcttttctgggctgcaaaaaagcgaaggatgattttccaaatattcataaaagatctgtcagttggtttttagtgtaaaaacatttgaaactacaatccttaaagaagaaagcatcttaatatttatcagttaaaatttcactattgctttcttttgtatgggcaaaatagaagtctatcatttttaaggttttaagagatttgaatgaattttatgtgttagttaaaatttttatggattgaaaacgcttagtttcactaagatttcaaaagcacaaacgatttttaaaatctaggtcccctcgtgagtttcttgaatttacaggagggcagtgactattcttaaatatagattcaacttctataagttatcaaaatatttcaggaagagagaacatgcccagaacatataagaaaaagctttaacagtatcaggaatatcctcaaacactttttctgacaaaagacaaaactgggttaaaatcccatataccatatatttagctatctgactctgggtaaattatttaa

SEQ ID NO: 473321 - DNA, 498 bp, Homo sapiens
taatgaatggtcaagccacactcatccagctgtctgcagcttctggatgaggaaagtgaggcacacagagaagttacataaactgctgaagataagaaagttgtcagtggacccaggattcaaaggcaggcattctgccctcctgaacatactctatgccagcttcttatgtgataaaaacaaggatgtgtttgttagtgtttttgtactgttacatcaagtactaattcaagaaactctcagttgcctcttatatactggacttgaaaatcttctggtcccaagcattttggataaggaatactcaagctgtgtaagatgctttgggaagccaacacagatagccaaatttgctcagtgctcccctgtgcagctgctccacagctggtggctctccggtcacctccccccaccacttccctgttgaagggggcctggggagagtcagaaggtgctacatcaatgtaagacatttcctccctgcccctcagctgtgcc

SEQ ID NO: 473322 - DNA, 1317 bp, Homo sapiens
cagcacaccggcccatgagaccatacagcatctttgtgcaaactagaaggaggcccatcccctgggcagaccagccccagggacacacagctgggctcatgcacagtgtctttgtggaaatgatcgatgaaatattcagatgtgttacagaatgggaaactgtggcaaccagccttgcagtgaccctgtccaaccggagctccatggagccccaggagccctatctctgcccacgatgtcagcactgcccctgcacagcagggcccagtggtggcctgagagggagcagagagccccttagtgggaagggacccttagattactctgctggggtgaagaactgcacccccagcccttggccccagctcccaccccagctgggctgccggtactctgtcctggggttgcttcctgcctctcgggaacacaggaagccaacattgttgggatctaaatggccttttcctcctggacttgggtcggaaaatgagcacatagcctcagtgtgcacctgaccccggcgataaccactcgcatgcccggtccggcttcagctccttccatggccggcacagaggcacaggcctggccacctgcctgctcaccggccactcaccctgccctgccagttcatctccaggacctgggctggaggtatgcagtggttaatttaatgaatcaacttgtctaggccacggtacctagatattcggtgaaacactattctggatgtttctgagaaagtcggttggttttattttttagatgagattcacatttaaatcagtaaactatgaataaagcacatgaccctccataatttaggtgggcctcatccaatcagttgaaggccttaataaagaaaaccaacctccccaagcaagaaggaattctgccagcacacggctctggactcgagctacaacaggcaggggtaccccacctgccaacctaccctgcagattttgaacctgccacagctctacaatcacgtgagacaattccttaaataaatctctttttttctacacacatcctgttggttctgtttctgcagagaaccttgactgatacaaggtgtctcaggggatggtcgggggacatggtgtggctctgaagtaagaacaggaagaaaccttccagatcaagcttgtccaacctgcaggctgcaggccacatgtggctcaggatggctttgaatgcggcccaacacaaattcgtaaatttcttaaaatattatgagtttttttttttgcaaggcaggggggcacataagatggtttcttatatgcacccaactctttctttcttattttt

SEQ ID NO: 473323 - DNA, 1324 bp, Homo sapiens
gtgcctatccacctgtctcacatatcctcccaaggggcagtatgtcctcctctctaacgtgcatccgtcttgctgtaatctcaagtttgggcctgtcaatctgctggcctctcactttcagatcgatgaaatattcagatgtgttacagaatgggaaactgtggcaaccagccttgcagcccgactaagacaccccccaccaccaatgccacccaccccttcctcccttcaactgagaaaggggaaaaacccaggttccaaccctgggaacatcagacactgctggggagacagccagtcttgaccctgtccaaccggagctccatggagccccaggagccctatctctgcccacgatgtcagcactgcccctgcacagcagggcccagtggtggcctgagagggagcagagagccccttagtgggaagggacccttagattactctgctggggtgaagaactgcacccccagcccttggccccagctcccaccccagctgggctgccggtactctgtcctggggttgcttcctgcctctcgggaacacaggaagccaacattgttgggatctaaatggccttttcctcctggacttgggtcggaaaatgagcacatagcctcagtgtgcacctgaccccggcgataaccactcgcatgcccggtccggcttcagctccttccatggccggcacagaggcacaggcctggccacctgcctgctcaccggccactcaccctgccctgccagttcatctccaggacctgggctggaggtatgcagtggttaatttaatgaatcaacttgtctaggccacggtacctagatattcggtgaaacactattctggatgtttctgagaaagtcggttggttttattttttagatgagattcacatttaaatcagtaaactatgaataaagcacatgaccctccataatttaggtgggcctcatccaatcagttgaaggccttaataaagaaaaccaacctccccaagcaagaaggaattctgccagcacacggctctggactcgagctacaacaggcaggggtaccccacctgccaacctaccctgcagattttgaacctgccacagctctacaatcacgtgagacaattccttaaataaatctctttttttctacacacatcctgttggttctgtttctgcagagaaccttgactgatacaaggtgtctcaggggatggtcgggggacatggtgtggctctgaagtaagaacaggaagaaaccttccagatcaagcttgtccaacctgcaggctgcaggccacatgtggctcaggatggctttgaatgc

SEQ ID NO: 473324 - DNA, 579 bp, Homo sapiens
catctggatactcaataaaggttgcccaagggatggctggatgaatgggtcaggattctcgggcccagagcaggctcctggtctcctctggtctcctgtctgcctcctttctctccttctgtcactctcgtgttccatctgtgtcttcttgtgagtctgtctcgtccactcctcgggagcctcaagtcacttttctaccctctttcttcccccaaaaggcaggcgctcactctccctgtgcctattcctctttctcaccaggccacctgccttcctgggtgttgagaagaggccagcgaacctggctgcttctcggtggttccccaggcagctcaggggtcagcgttctcaggcttatgattcctatttgcctgtcactccccggctcccagaattttgacactgttgtcagaggaatgagggcctccttccagttctggcaccgccactttctagctgtgtaccatgctaggtactagggatgtaggcatgaacactgacaagggcctctgggactggcattctggtaggaaaagggggacctggagggaagacggactgagcacctaccaggtgctg

SEQ ID NO: 473325 - DNA, 634 bp, Homo sapiens
agtggactctctgccctcattgccccatctccagggcaggggcaggcttggacttgctcatgtcccgctatcccgtgctggcagaacacagaagctttgtgtggtcttccaggatccccttgaatgcgcgctctgctgactatagtgccccagggttggaggaagaggaaggagaactagagaaaggtgcaagaaagctccagggtgggccttctcagcacttaactgctattaaagttcaaccttcctcagcaactccctccccttcatcatcactgagttctctcacctgtgggtcgcaggtgaaaggtcgatgcatcgcaatcccagcagctgcctctgcttccttggttcctggaaatccagcaacatctctgcttctcttggctgaggttcctttacccccagggcactcaatgagccagcttccaagtccctgccttcatcctttccccatttcccctagcccagtaaagccctctgtctgcgcccctccatctgaagaccttcgaggttttcaaggctggtccaatccagtctgcccccagactgaaggtactttagccagactgtagaaggcagctgcgcagtggtaactggtttagaaatttccctactctgcacaacaggcctc

SEQ ID NO: 473326 - DNA, 711 bp, Homo sapiens
ccactctaggctagctttttcacaagatggcaccaaaagcgaagaaggaagctcctgcccctcctaaagctgaagccaaagcgaatgctttaaaggccaagaaggcagtgtcgaaaggtgtccacagccacacaaaaaacaagatccacatgtcacccaccttccggaggcccaagacactgcgactccggaggcagcccaaatatcctcggaagagcgcccccaggagaaacaagcttgaccactatgctatcatcaagtttccgctgaccactgagttcaccatgaagaagacagaagaaaacaacactcttgtgttcattgtggatgttaaagccaccaccaagaaccagatcaaacaggctgggaagaagctctatgacattgatgtggccaaagtcaacaccccgattcggcctgatggagagaagaaggcatatgttcgactggctcctaattacaatgctttagatgttgccaacaaaattgggatcatctaaactgagtccagctggctaattccaaatatatgtataacttttcaccattaaaaaaaaatgtatatatattaaactgtatttgctattctggaactgctttttctcacttagccatacaattcagacatctttccatgccagtacacgtatattcatcacaatttttaaatggcaatataatattttataagatatgtacaatagttccccc

SEQ ID NO: 473327 - DNA, 547 bp, Homo sapiens
cctgtatctgccagcaggccaccttctgaagcactaagatgcccaggcctcgaagtcctctgcacaagtcagcaggacttgtccaacagccacccttgactcttcatccacttgctccatccactcacaacaggtctggtttcaaaaagaacccacacctccccgcccttcctggagctcagaaaatgagcttccagcctccaggtttgctggcctctgccagagcccatgccctgtgggcacatgtgcctgaaggaagccgggcccctggtggaggtgccttgctaggggggagagggcatggatcatatggcattcagaggctttttcagtgtaaggaacatggctatgcttcggtcagcgatagccccagagaaagagttaagctgctgaccctgaagggaaagccagcagcgcagctgtgcatgggagcagccagatcaagcagctgagacagagcagaccgtgtaagagagctgctgatgagagagctgctgaataaagctgtatctcacctacctacagctccttaagtgttctttcagct

SEQ ID NO: 473328 - DNA, 704 bp, Homo sapiens
attatgactgcctctactatgtcatgcaggctgtcagggcagtaggggaaagccggcagtcacaggcctcaccaagctcccatgtaatccgaagggccaatctcactcccaccatgcccctgccaacagcactaagtctgtttccaggcagtggctggagatttccttctttctgtggccttttcccagcacctctggctgccctgcagaaggacccctgtgtggccaggcaaaaacggcttgcttggggacctagtgagttcccagggcatttcccgctgcttcctctacccctgtatttcgctcagctctctaaattgactcagttccagagatgtacctctacaaatgtgtcagagaagaagaggagttctccatgtgaagaatggtgggaagagtgttccaggctatggaaacagcatctagagaggtcctggatcaggaaagagcctagacatacaaggaaatggaggacagacaatgtgggtagagcagagtacaccaaaagtggaattagagatgatgctggagcaggagggaagaccaagccatacaaagccctaaaaacagaccagggaattggttaagaggagtcctgtttataatacaccgtgtaccctctttgcaggcaaggtctcatttaatttatttttaaaagtttggaaagataaagaaatcaaaatacactgctagcctcatttatt

SEQ ID NO: 473329 - DNA, 1930 bp, Homo sapiens
tgcagataaaaagtctctcaggtgttgctttaccagccagaaacctctgtggtcagcagcaccttctgcctgagtattgcttgcacccactgggctcgttctgcccactctgtccggcaggctgtactcagctcacgctaccagccaggatcccatacctgctaaacgcaaaccaggcgcagagctgcgaggattgtgtaggtgagcaagcgcggggtccacccactgtgcacagccaggcgtgctggctgctgcagcagggcaagcagctccaggtgccagcacaggccccgtgcaaggctgtgactgaaccagatatactgcacgcagcttctgctgcaggcacccgtacctggacaaggggaatgcagtggcacctggaagcctggaggcagcaggaaccgtagaaccccaaagagggggtcgcagtcctggctcggggcgcccctaggtctgggctccccagaaggctgcagctcttcttctcgttgcgcaatttggagcaggcaccaggagtggggagaggccaggcagtgggagcaggcacacccaagactgtggggggcagggggccttcctggtcgctgagagttcagggatactggattccacatctgcgactgggcagctgcagctgtgccccggagggcagggctcccacccttccaacaaaaacggggcagggctcccatctgttcttggttccctagctccaagcggcgtgcagccctgaggtaattgaatcattggggcaggtctttcccgtgctgttctcatgatagtgaataagtctcatgagatctgatgattatataaaaaacgggagtttccctgaacaagctgtcttctcttgtctgccaccacgtgagacatgcctttcaccttttgccatgattgtgagggttctgcagccacgtggaactcctgctgcagaaatttgcctaagtattgaggtgccaaatgttaatcatgaagacaatggagagaatgtctccaagacctgtcagagaccttcgtggcagcccctctcatcacaggcccagaggtttaggaagaaaagatggttttgtgggccaggcccagggtccccatgctgtgtgcagcctagggacttggtgccctgcgtcccagccactccagctgtgactaaaaggggccaaggtccagttcaggctgttgcttcagagggtggaagccccgagccttggctgattccatgtggtgttgaggccgtgggcacacagaagtcaagaattgaggtttgggaagctctgcctagatttcagaggatggcagtgcagaaggggaatgtggggttggagcccccacacagagtccctactggggcactaactagtgcagctgtgagaagagggtcaccatcctccagaccccagaatggtagatctactgacagtttgcactgtgtgcaagagaaggaaagggcactttctataaatccagatgtggactacacgccctctgaggacagggcaaagtacgggtggttcttatggaccaaatgtggatcctgggtccctcttggatccttccctagaaagaccatgggatcccaaaagagaggtggcctgaaagatgacagggagcgaagaggagctggagacaacatagtgagggccggggaagaggaggacagccacagtgggaaaagaggaccagaagctatccatgacttctccccgactgtcggcttcccagcctgaagcagctcagagctgggagactgacagaagctccaaatcaggtaaggatgtggagttgtgattaagacactaatctaactatttaattactaaaatatccctgataaaatcttctgccccaaaacttgcttcccctgctgaattcctcacttcacctaattgcaactccatccctccagttgctcaggtccgcagccatcaagtga

SEQ ID NO: 473330 - DNA, 983 bp, Homo sapiens
cactctgtaagtgaggaaaccagggtccaggcagacatgcccaaggctgccccatgcttttctacagcttagtgcgtttgctcagatgctccaatgctccttattggattttattcccaaaggaatcttatgagagaaaacatgtgtgtagatgtggatgtggatgtggatgtggatgtggatgtggatgtggatgtggatgtggttgtggatgtggatgtggatgtggatgtggttgtggatgtggatgtggttgtggttgtggatgtggatgtggatgtggttgtggatgtggatgtggttgtggatgtggatgtggatgtggttgtggatgtggatgtggttgtggatgtggttgtggatgtggatgtggatgtggttgtggatgtggttgtggatgtggatgtgggtgtgggtgtggttgtgggtgtggatgtggatgtggttgtggatgtggatgtggatgtggatgtggttgtggatgtggatgtggatgtggatgtggatgtggatgtggttgtggatgtggatgtggttgtggatgtggttgtggatgtggttgtggatgtggatgtggatgtggttgtggatgtggttgtggatgtggatgtggttgtggttgtggatgtggatgtggttgtggatgtggatgtaccatgttccaaatggtgcttgttattttctgtactcactacctgtagccctcacaagaatcttgaaaggcaggaaacgtaagattgttcccatttcacaggctccatctggataagtaacttgcctaagcctacacagctgaaagggagtggggccagggttcataatcaaatctgtttcatccagaagcccctactttctcccttgctctttgatgtctgtgtctttattaaatatcaagacaaataatgttatgaaaagcagcatacaagttcaaagaagggagggatggtagggtagggtctcctctggtgggggtatcggatttc

SEQ ID NO: 473331 - DNA, 715 bp, Homo sapiens
gagacaaggtgagttcagtcgcagcgtgttgcctaggccgttggactgccatcgggcaagtcatgtacccggaggagggaggatgtgacacatcaaacatcaccacatcgggaggcacgcacgcatggactttctggggcttctgggtcaagatgtttgactgtgattttcaaaaatcctttgaaatgacaacaggctttgcctcccagaaactccttaaaaggatagtaaagaggcttaacagggaggatggagacaaacccggtgcttggaacaaccgtcccatatctacaagagtgatcattttcatccagggagaagctgataatggcagaggattctaccccagccactctttgttattaatcagcttagaccttcatcaaactatgaatgaaaacaaaactcacaggtcacctgcagaaaacagtacaaaggagaaggaacaatacgaacacgaacaacaaaagatcccagagaaaaaagaaataacttagggaatgaaagaaaacattcaaagtaattacaattagtatcctcaaaaaaaaaaagagagcaaatattttctcagtaaaagtaagacaaactgctaccaaaagggagaaatcagagaacaagaaagagttggttgaattttttttaaaaaagctattaccaaaataaaacaacaacaacagaaaggcaataagaaaaaccatgaaaaatctcccagagc

SEQ ID NO: 473332 - DNA, 734 bp, Homo sapiens
gcaaagaggcaaggagagaacagagccagacctggtcttttcctttgctgctttcattgcaatttgcaacagtgtcttgtgattctgcatctgattaatgcctaagaccgtcaggctcctgcggacggccaccccagcctggggaaagcagctgttggatgctctgcaggatgtctggaccctgcccttgtgggaaaacgacagcagcgtcagcaccaataacaacatctcctctacacatgcaactgatattcccctgttttcacaatgctttggcgaatgcctactttctgaacgtggtactggattccgctggctaacgttttgcttagcatcttctgcactgatgttcatgagtggtgttagtgtgtatatctgcaccatctttattaggctgagttatcaatgtaatatcaacgcttcatcaaatggatttaggatgtttttcttcacattcagtgctctggaaaaatctgtgcctacatcaaccctcagaaaaatttgaagtcagagagtgcccctgcttcaaaataactctcttatatatatatatatatatatatacatatatatattttctgtatatatatatatatacatacatatatatattttctgtatatatatatacaaacacacatatatatttcctgtatatatatatacatacatatatatcttttctgtatatatatatatacacatacatatatatatatatatatttttttttt

SEQ ID NO: 473333 - DNA, 1414 bp, Homo sapiens
tttctggaatacatggcaggttgggaatacctgccaactcctctgacaaggacgggattgaggctgcaatggggcttccccttcttgagtttttcagtcttgaggtaatcaagttggtgtactttgaaaatcaacccatgcagaataagaaccttcctggagaagagaccacacccccggtgggcctccgccaaggcactcagttccctggcatcggtctgcttgttagccacggtgccaccccaccccaacgagaggtgcttctcagaagtggtgcagcacccccaccctcacccccacccccacctccaccctcacccccacccccacccccaggctgtctcctcacatgcttactcccaaagtattctggagctccactgagcaccgagctgggggagcagctcaggggtgacccgggaggccatgttgtcttggggacatttgcatctcacatgtcccaggatgcaagtgtgaggcccctgctgtctgtgctcctgatcatctgtaagccctccaccaatgaactgatgccaactctggctttgagctaccagaaccaatgaactctgtgtccaagaagtttatgtgaatgtctctctttttgctaataataacttccccttactccttttccctcactgggtgcacctgtgacttgtcatagtgtattacggattgtaatcctcttttctattcccctccaaattcaacatatttggagacatttttctctgatgtctttttttttttaggttgacatactttttcaagattgttttgggtattctggggcccttgcatttttatgtgaattttaggttatcttgtcaatttcagaaagaaagcagctagaatttttatagagattgtattgaatatgtaggtcaatttggagggtattgccatcttaacaatatgaagttttataattcacgaatatagaatggctttccatttatttagattttctttaatttgttttaatgttttgtagtttgtagtgtacaagccttgcacttttttcattaaatttattcttaaatattttattttttgatgctattgtaaatgcaattgttttcttagtttcaattttggtttgttcattgctaatgtataggagtacaattgcttttgtatgttgatcttgtatcctgcaaccttgaagaacttgttattagctctaatagtttctttcatggattcatttggattttctatgtacaagatcatgccatctgcaaatgctgatagttttacttattccattccaatctggatgtcttttatttctttttcttgcctaactggcatagtcagcccttctagtataatgttgaatagaagtgccacctctcaaaagagagctcttaaaacgttcatcttggtgcattttaaaaacaacgtgggg

SEQ ID NO: 473334 - DNA, 544 bp, Homo sapiens
gtggagagtgacagtagatgaggctgtgtaggtatttccgaatgcttacaatgatgtgctttccttcagagatacttcatattagttccacaacgtgcctgtcggcactctcaggcaacaagtcaggcccttcttctgcaggtctgctggagtttgctggaggtccactcctgaccctgtttgccagagtatcaccagcagatgctacagaagagcaaagattgctgcctgctccttcctctggaagcttcatcccagaggggtacctgccagatgccagccagagctctcctgtatggggtgtctgtcaatccctgctagatgccctgcccagagaggagaatctagagaggcagcctggctacagtgctttgccgccagtggatcttagcttgctgggctccataggggtgcgagctgctgagcaagaccacttggttccctggtttcagccccctttccaggggagtgaatggttctgtcacattggcattccaggcaccaatggagtacaaggaaaaaaatcctgcagctagctcagtgt

SEQ ID NO: 473335 - DNA, 537 bp, Homo sapiens
ggatttactgatccactggtagcaaagctgttaagtgtgcaatgagtaaaataaatataaaatcatggttcttggatcaattcattattgcaactacccagatcaaaggttattcattagaatcatggactggaggctttctggtttgctggaaagccccaagtagagactttgtccagggacttacaggcatggacattgatttctctttccaggtgaacctgacagctatactttctggagttcttggaactcatgccgacaagaagatgatgtatgtgtttgtcggagagaggcaggacagcaggcagctgctacttgttccaaccaaacctcatgactgctacacaaagatggaagatgttatagcatgtacatacacatatgctgatctgaagactcccagtaaatggagggagtctcttcttccaactgaacatctgtaagccagcggttgcttcacataggctcctgctgcggtttcttattttcttattagatcttgaaggttgtttaatgaatttgatttcatttggc

SEQ ID NO: 473336 - DNA, 924 bp, Homo sapiens
cagagctgcaatttctattttaatgttagaagacagaaagggacaggaagtttttaaagataactctagtactggtgtgaagagtgaaaagtgtggagaaattggagtaaagaagccagccaaaacctaccaaaaccaagatgctgccaagagtaacctctggtcctcctcattgctacactcccatcagtgccatgatagtttacaaatgccagaaaactgccctatatggtctaaaagggagaggtatgaatgtcaggaagttgccctgtatggtctaaaagggagagctggaatgcacaacgagatcctaaaggctgttccaccatgttggaaggacactggtccctatcttaggtcttttggtggggccttcacaatatcatatcccatgagggaactaagatataatagctattattcaggaactagagagggtgggacttgtgcctcttgcacagagcccattcaacagccagatatggcccatgtgaaaacccaacagcatctgaagaatgacggttgatgactgacaactaaataaggtgactccagccatgcatactactctcccaaatgtggctcaaagcctggaaagactgactagtttgtagccagactgactagtgttcagtgcatgggatactgtcttggatttagcaaaactttatttagcatactcttagacccaaagtcccaggacctgattgcctttacctgggaggacaaacattggtcctctcaggtgctcaggtgctccccagggacacttacctatccccatgatttgctgtgatttaggggcaagagaccttgccattttgggtgacaagtccagcattcactggaaacattacgtgcatgatattctgctaaagtttatggatttaagtcttttgcagaaggctacctagaacgtcctag

SEQ ID NO: 473337 - DNA, 765 bp, Homo sapiens
tccctcagaggaatccagcctgatcgatgctgtttggaaagccgaggtctacaggtttcccaatgtcaaagacatgtcaaatgaatgaatggatgaaatacgttggtgcttggtatccctattatgagatgctgcacttggtgagggttgggaaagacacaccagtggacagcacagtgcttccttcctctccaaaaacttgtgaaatgagtgggcatgacatcatcacaggactggaggacatcaacaatgtcaggggaatacagacctgtcccctgtcctgtgggagcttaaatctcatgaagaagacagacaaagataatataatgacccagataaaatgtaaacttgtggaaagtgtagggaaggagagagctgtgtttgctaatgagacagaagtgactttctgggacttctgggaatccctgcagcttgcaactggaactcttgaatggaacacttgctcttggagtcctgaggggccattgaaggtatccaactactctgaggctcccatgctggagagatcccagaatctgcccgcataggtaaaaacatgctcccttcttgtcattgaattttaagctgtggacacaagtcttatgagttcatctataaacataagcatagaaagcagtagaagccacacctgtggtgaggagctctccatatggggttggtaagtaaagcaataatcatgggtatgctttctgagagaaagtatagcagaaagtagaacaaaatcttgggggaatgcccacagtt

SEQ ID NO: 473338 - DNA, 791 bp, Homo sapiens
aaactaagttgtcattggaattatagcccgcaaaaaatttccacatgttgtgggagggacccagagggaggtaattgaagaatgggggccagtctttcccatgatagtgaaggaatccagtgtcagctttctacatatggtgctctgtcccagggagatgggagttttatctctaaacccctgactggggctgctgctttttctttcagagatgccctgcccagagaggagaaatctagagaggcagtctggctacagctctctgtggtgggctccgcccagtttgaacttccctgcggcattgtttacactgtgaggggaaaactgcctacccaagcctcagtaataatggatgcccctccccccaccaagctccagcatcccaggtcaacttcagactgctgtgctggcagcaagaatttcaagccagtgaatcttagcttgctgggctccctggggctggaatctgctgagctagactacctggctccctggcttcagcctcctttccaggggagtgaactgttctcgctcactggcgttccaggcaccactggggctgcagcagtcaatacttttgaatttaagtgcttttggcaaatgctgcccaagatggcacccaacactgggaatgctcaaagctgagtgaaataaagacaagcctctacaccagcccttcagggagctgccaaacaggtcaaagcacacaaccacagctcttaagaataagctctgaattgctccctctaacactagcaacctgtactggaagtgcagactgccatcttcac

SEQ ID NO: 473339 - DNA, 682 bp, Homo sapiens
gtccaggctgcaaattcattgggtaacaaatggagacttgcattttatttgtgtgtctgacatttggacatgcaactctgcatttggttaatcataagacttttgctggtgaaaacctattaacatccagcagaaatggtgtttcacagaagatgtttgggaaacactgtattagaggctcttcctttgggctgtttcttttcatcctggattttgaagaagacaggaaaatgtgggaaagtttggaacttcctagagacttgttgaatggctttgaccaaaatgctgatagtgatatgtacaatgaagtccaggctgaggtggtctcagatggagatgaggaacttgttgggaactggagcaaagatgactcttgctatgctttagcaaacagactggcagctttttgcccctgcttaagagatctgtgggactttgacctcgagagagatgatttaaggtctctggcagaagaaatttctaagcagcaaagcattcaagaagtggggtataaatgtttttggaaaatttgcagcctgatgatgtgatagaaaagaacaaccctttttctggggagaaattcaagccagcttcaaaaatttgcataaataatgaagagccaaatgttaatcaccaagacaatggggaaaatgtctccagggaatgtcagagactttcatga

SEQ ID NO: 473340 - DNA, 919 bp, Homo sapiens
cgaactcactttctcagggaaaagataggcgagtggggagctgtggcctttctcgcccgaggcttgcatctgccggcagaagggtaacagacgatgccgcgcagccggcgctgttccaagcagctccacctgcctgccgccatctggatcaagtcgaccttgatcccaatcgggcgggagggaaattggatcagtaggctctttctatcaatcttggagaacatcaccgcttcatcagagcagataaaaacaaaggcaggtaatgaacacgaagccgcagaagcagccccaggcaagtctgctgagagaaagaggaaagtcaattcccctaacagactgggctcaccttgacggagaactcagtggaatcctagacctcaccctttcccagactgattacccatgctccttggggcagggattggtggtctggatagaagatcaaaccagccacaacattcccttaagccaaagcctgatccagagcaaggccttaactctcttcaagtctatgaagactgagagaggtgaggaagctgcagaaggaaagttagaagttaacagaggttggttcccaaggtttaaggaggtcaaaatatcaacattaacaggagtttggaagaagttgattccaaccttcatgaatgattttgaggagttcaagacttcagtggaggaagtcaatgcagatgtgatggaaatagaaggagcactagaattagaagtggagcctgaagacgtgactgaattactgcaatctcacgagaaaacttggacagatgagaagatccaaagctggtgggtgagtgggtgggtgtatagaagatgttaggctgccactgagaattgcttgccaggaaccttgtaagggtcatgggaagttagttactaggcctaggttaatgctgaaagatgctgt

SEQ ID NO: 473341 - DNA, 978 bp, Homo sapiens
ctcacttcaggctctgattcctcctatgtgtcatggtgagaatggacatagtaagaaaagaggaggagtgtgggttctttcaggaaaccaacagcaggttcgttgaaaagatcaacgcagttgacaagcctatagctagacaaagaaaaaaagagaagatgcaaatcactaaaatcagaaatgaaagcaaggacattacagctgatcttctagaaattaaaagaattataactgagtactatgaagagtggtatgacaacaaattagataatctagatggaatgaacgaatacctgggaacacacaaattactgaaactgactcaagaagacatagaaaaatcaacaaacctgttacaatgcttggaagtggaattaccacttgtttatgatcaacagataaaactaagcaggggcctcaccaaagcccggagtgatgtcaagaaccacggcaggtgttattcaggaattgttcaaaggggggaaaaatccattcccatgaggcaggtgcatcagagagcattgacactcagtctccctgcagagcattgcgaagctgatctcagacaaacgcagcccatggaagaatgctaagtgctcgtgattggttaaaactcaaataaaaagttgaagtggagacgatatatacctgttccaaaatacagatcctcatttgaaaatggaaaaagaaaagaaatggaggcattgtgtgatatttgcctaaatataactaaagagatccatttatttttagtgtttgattaaaaaccctcaaaggaaaagagaaattttgatctttgagaagagctgtttcatcacaggatgccaccaggacccatttctggcaacagggagcacgaaatgatgcctccaagtgtaagatagaggcttctaggcaggaagtgatggaaaagggctctcttatgaggaagggtactgtggggtgaggggatattcattgcatggcaaagaaagtatt

SEQ ID NO: 473342 - DNA, 1432 bp, Homo sapiens
tggatagctgagctcgtgtgcaaaagagagggcacagccgttatctggtgtatctaaagatgaggtctttctagctggcatatgctctggaggaagggagattttacctcagcgtcaactcccagggagctgactcacacagagaaagtttccggtagtcttttcccgtctctctgctgcagaatcaaggaaaccaacagcaggttcgttgaaaagatcaacgcagttgacaagcctatagctagacaaagaaaaaaagagaagatgcaaatcactaaaatcagaaatgaaagcaaggacattacagctgatcttctagaaattaaaagaattataactgagtactatgaagagtggtatgacaacaaattagataatctagatggaatgaacgaatacctgggaacacacaaattactgaaactgactcaagaagacatagaaaaatcaacaaacctgttacaagtagggagattgaatcaggatgagaaaatcattctttagcggtagtgagtggggtggactcttttaaattcgggacacattttccaatccagggaattcgtatgtaaggtgaaaactatttgcaatcgtagaggaagaaggaacgcaagacggtggaagcatgccaacctattaaaccgcaagtcagagatcaaaccatgtacttgaatctctcaagttcccggcttaaccctcttccaagtatcctcatttgaaaatggaaaaagaaaagaaatggaggcattgtgtgatatttgcctaaatataactaaagagatccatttatttttagtgtttgattaaaaaccctcaaaggaaaagagaaattttgatctttgagaagagctgtttcatcacagggtgaagttgtttcctgagccctttgatctgaaatgaccttgcgacctggaaccagcagacagcctgagggaggcagtgcatgttctgagccagggcctcaggaggcctgcagctgccattctgcttctgttggaacatgacctccttgagaacactcccaggcctgactgcagggtggggagaccacacagagcagagccgagccaccgggatgaggcccctagatcacccagctcccagctgaccacagatcatgagtgatcccgtttctccctaggtcaagggtgatgttttgctcagagaaaactgaagtttggattgttccagtcctgcatcacatcctgtttcaggctgccctaaaacaaaaccagaaacaaccatcaccacaaaacaccataccttcaatagtcttctcagtgttcagaataaaggctctggttttcccttgggctcaattttcatgattgtgtctcctttgtcaatatgtttttcatcttcctcactttcaaactgcacttcctgtccagaaacactaaaccaaaagttgtatttaacttttcacacagaa

SEQ ID NO: 473343 - DNA, 681 bp, Homo sapiens
aatcaacaaagaactatccaaccccaaagatcaaactgccaaggtgtaggctatggtgaaggtttgattggggcagggatgttggaaggctttgtcttaggacccagtggtggcagcagtgagcagatcacgcctgaccttggactccagatactgtgttacagagacagtgaagaatttaagatgcagaagcagattgcctttaaaaacttatgtgataaaacccagatggaagaaccatgccaatctcggagccctagcaagattcacaatacacatgggcttagagcaccctccagtgctgagacagctgcagtgtccgtgggctcatggaacataacagtctgcttagaacctctggaagacccaccgaagaaggtcagacacaaacaaagccagaatatgaatattaaaatatggaatccctccatgtggagaacatattgcatgtccataagcataaagaactttcagagaaatgtgacctcaccaaacatacagaataaggagtcagagactgaccttaaaggtatgaagatatgtgatcttgcaaacaaagaattcaaaatagctgttttaaagaagttcagtgagtatcaaggaaatacagagaaattattcaagattatcagagaaatttatcagagatattgaaataatttttttaaatttaacagaaat

SEQ ID NO: 473344 - DNA, 1010 bp, Homo sapiens
ttacccccgacaggccccagtatgtgttgctccccaccatgtgtctgtatgttctcattgttcagctcccacttatgaatcttagagaaaaggctgttagttttcctccactcaggatgatactggctgtgggcgattttttatatggtgtcaattgttattccttattgctctgtgcagcagaggatcctcactccacggccactgccaccacagttccacagggaatactgccaggctaccaccaatgttcaatcaaggcccaaggtcccttcagtcagcttgtggtgaacgttaccaggcctaggtttacccttcagggcagtaagcttgccctcttgtccaggaaaggtccagaaatgtcatccaagagccagtgcttggcactggtgaccctaagagaccacttggtattctgccccattgcagctgccagacaaagtcactttactcttctctctgcttttctcaagcagaagcagtgcctccccatagccaccacagctgtgaatatgatgagtgacacctgaagtaagcacctctcagagtgtcacctaaggcccatggcatgtactaactgactaatgctgctgattattcagggcccaagggctctttagtcagtaagggataaattctgtcagaatgtggtctttcccttcaaggtagtgggttttcttcttgtccacggtaagtctttctatgtggctacatcttaataccactgctttactcgtatatttaagcagaaaggattggacatcccttttctgttttggtgggctggttccagaacactatataatatattagagccatgagaggtgttaaaatccttaaaatacagagccacaatccctctctaataggtttgggaaatctctacctaacaggagataacaaagtaagcagattcctgaatatcacacttgcttctcatattttcctgaagaatgtggctgaaataaatatcaccaatgaccattataggtttcactttattagccatc

SEQ ID NO: 473345 - DNA, 671 bp, Homo sapiens
ccatatgacccagcagacacaatggcacttgaggtgtcattggcagataaggatgctgtttggatcctttggcaggcctccataggtgaaccacagtggaggcctctaggatttgggagcaagacactcccatcttctgcagataactgctctcctttagagagacagctcatggcctgttactgggctttggtggaaactgaacgtttgactatggatcatccagtcatcatgcgacctgaactgcctatcatgaactgggtgctttctgacccatccagacatacaatgggtcatgcacagcagcattctcctgcactgatggcctcatggggagttccctatgatcagttgatagaggaagagaagactatagccttgttcatggatggttctgcacgatatgcaggcaccacccgaaagtggacagctgcagcattacagccccttactaggacatccctgaaggacagcaatgaagagaaatcttcccagtgtgcagagcttcaagtagtgcacctggttgtgcactttgcatggaaggagaaatggccagatgtacaccagtcaaatgtaggttaggtcttttcacatagtcccatatttcttggaggctttgtttgctccttttcattcatttttctctgatcttgtcttcacactttatttca

SEQ ID NO: 473346 - DNA, 2431 bp, Homo sapiens
ctttgatcatgaagggatgcttgccatgggactgtggctcacttcttcagtgtcctacggctcagacctctacggcagcatacagataggcaggctgtgtggctccaaccccacggcagtgtctaggggtgaatgtttacagctcctgaagccccagtggtttgccgtctataggcagcttgtgttaaccagctcaattagacccccttccttatcacaaggacagaaggaattcttagaagtagctctcagcagagaggggagccagaaaaaagatggttttcccctggagtctggccacctagcctggcggactgctctggccaaactctgcggcattctgctggtgaatggtctgccatcaggccgaccaggggctgtccgcatgcttccgccaggtgtgctctccatgatcagctgcttgtgtcttctgccaatgtgttcctcacaacgtccagccatttgtgtgtctgcctgctagtgtctcgggtttttataggcccaggatgggggcctggcaggccagggtggtcttgggaaatgcaacatttgggcaggaaatgcctgtcctcacctaaggtctgtgggggtggagccctagccagagaccacccttctctacccagcacttcccttcccctcttcgtgccatttaaagggaccatgcttttcccttccctatagtcccctatcataatgactgagccttaacatccttattccataatgtgccattctcgaaacaaaaaggccaatagaaagggccaggaaaaaacacagtaaaataccgaaacttatcaagactcttcaaataaaagattgagtcctcaatttttaatgtgaataaagagagcagttctcacaacaatcaaatggttcttgactgtcagggcttgattagcattgcacaggatgaaggagacagaagggttgtgtgcacgcagggaacagagctcagagattctgaagagaggaaaggattatacttaataatggatatatttttgaactccttaggaatgttttcttgccttgtgactgcagagcactgtgggattttgccattctgtctttccctagggtcttatcatgagatggttacctaattagcacacagcacattcttgcctatgttctatttgcactgcagatgctttcatttcatacatcattcacaacctgcagcaattataaagtggtaaatgaccttatgcgataattacactaatagatctgtattgtttcatttggaagactgtttggagaaaataggtgtctgataagcacagaatggttgcagttatattctttctttaaatctgcaacagaaagcaagcaaaaagataactttcggtcataaaagttgcatcatatacccaatctgaaaaattcctaggtagagatttctctttagaaggaatataaactttttgcaagtatctcaatgttgtaccgttcgtttgaccaacaatatttggatttatcaattagcattggcattttaataaatcaatagtatccttatctgctagaatcaggaaaagagagattattatttctcctaaaactactcaaaaatcagtcttatactaactgtaaaattcagtggataagatatggttctaatctttaaagtggctgaaagctaaacaaattgcaattttcaaaggaagtgcacacataaaatatgaatgctaatatagaagaaaatgaaacaaaaataaatggtcagtgttggtttcttccttcctcactctcccactcatgcaatgaggcaccttacgaagttgtattgagatggtttttagaaagaatttgtatcatatgaacatactaataaaataacctaaaatttgtatagctaagtaaatacatatgttttctttgttaacttgatctcattttattgccttttaaattgagcccacaaaactctttacccacactttctggatttgttgcaaatgtgtgtgaacactctttgaagcttactctataatatattatttaaaatatactttagcaactaattaagtgtaataattttaaaacaactttctatacaagtctaatcttcataaaacatgaattatctacactgatgcaatttacaaaatactggcttagtttcaattttacttggtactgaccagaagcttaaaggtgagagatgcatcatagtatttttctgtaacttaaatcattgttggtggatgaaaacaataattaaaatgataaatgtgatagagtgaagaaaacactttatacttaggaaagatgtgttctaatcattgtatagctaatgcttcagtggatttgaaatgattaaacaagaaaaacttttagctgtactggtagtgatattctgttgaaaattccatcataatcatgatttgcttattaggtattctgtgttactggtttagatctc

SEQ ID NO: 473347 - DNA, 1279 bp, Homo sapiens
taggctccggcactttccccttgataactttttttttttcctgaaggaaactggtttgccctgatgccggaacagcacatttcaggttagtctacaccagcatttctccattagagatgaccgtcacctttcattggttttttcacccttgcttgccacagaaaatgcaaacatgcaaacaaatgaatgagggcatgccccctctaaggaaaattcaaatcctgtatgagcattcacgaagatacggtttggaattggaacttatgtttaaaagggaagcagagcataaaagtttggaaaattttcagcctgatgatgcgacagaaaagaaaaacccattttctgaggagaaattaaagcagcctgcagaaatttgcataagtaacaaggagctgaatgttagccatcaagacaatgaagattatgtctccagggcatgtcagagaccttcacagcagcccctcccatcacaggctcttaggcctaggagggaaagatgttttcctgggctgggtccagggcccctctgctctgtgcagacttgagacatgaaagagataagcatatatacattttatacatttgtatacatataaaatgccctttgtgtcactcatttctgtttttccttagtgtttaattcatatctgtctttcgtgctagtgaaaacagaaacatttagttcaaaatcactttttaattcttaaatgttcggtattgttttctgatggaatgaactgttcaaggtcacactgctactaaataaaactggtattttgacaaaagggtttttaatttcaaaacccattattttttatagtaacctattcagtttttttattatgtcatagaagccacaattatctctaaatgaatgcttcatatttacctaataacaaagcaatatagcatagaggtaaagaggacagactcaggaatcagatagcctggatttaaaacctgcactttctattggtgtgacctggtacaagttagttaactttgtatatttaaatttctccatttctaaaattgaggtaataatatctgccaaatatagtgttgaaatgggattaactgagttaatgcatatacaaaacaatgtaatggtttctattggtaagtactagaaaaatgttaacatatatgttacagtcatctagtatattttataaaggaagatgaagtcagaaattagatcttcataaaataagatttattaaaacatataattacaagaaatttagattataatgggaaaatatttttaaagtcatat

SEQ ID NO: 473348 - DNA, 2969 bp, Homo sapiens
gtttaaacaaacaaacaaacaaaaaaaggaacacaaaattatggttacagatatttcagcaagacgaaatgggaaatgtagaaaagtcaaagaggcagagactgaagaatttgtggtggaagtagcaaataggaagctggagtatttcccagagtggaagggatttacaaatgctgacagtacttgggaaccagaagactacttagaatgtcaagagttaattgaaacatttcttaactctcaaaaagctggcaaagaaaaagatgatacaaaaaggaaatgtttatctgacagtgaatctgatgatagcaagtcaaagaaaagagatgctgctgacaaaccaagaggcttcgccagaggtcatgatccagaaagaaaaattgccacagagagaagtggtgaatggatatttctcctggaatgggaatattcagataaggcagacttgctgcaggcaaaagagacaaacatgaggagtcatcaaattgtaattgcttcttatgaagagcgattgccttgacattcttgacgagaagatgaagctcaacaattgtttgcattgcattttacatatgtatgatatatatatatatatatatatatatatatatatatataatctggatcttggtttttttaatttactaatgtgaagaaatctctacattctaatgaaaaccaagtttgatatgtttgttttcaaagtagtattgggagatttgccaggagatttttttttttttgcatcaatcacattggttaatttcaacaaataaacgaaactttctgtagttgctttctttatcagaaaagaacatttgataccatggcatattttgtcctctgcactagagaacagcgttgttaatgttgagggaaacttccttagtcattatacaatcagtacttgtgtttaattcgtatgcctaagaaccattctgagttttatgttttgtgtgtttatgcttaaaatacaaatgtaaatggttttctttcttggtttatttttaaactatcatcaaaacaaaaaccatgggtatgcccatggtcctgggatgccataattctgtgcaacctaagaaataaatcacttcaagttaaattgaaatttttcctgaagtcgtaatatttcaaattacatagatgattctataattaactggataatttaaaagcatccacatcagaacacacatttctacctatattcatataaatgtgattctttgttttccaaatttctaaacggaagattttttattactaccaacaacctcctcacttagacaaggaaactagacaaatcttgctgttttaattggctaagcaagtgttagtcaaatagacatatttaaagattcctctaataagcctttcctttagaaaaagctgtaatccttgtgctgtattgattaaaacatcatgatttgtggaatgtctcagtcttggctcatggaaaactaatcagataagtttagaaaaggcagttaggacctgctggcataaatgggtaaagagacgtgtataatgtaaacaattgacctgcatgtgttttcctttacccaactcattccttacatgtaggctcatttttttcagtatttgggttactggtttagcagaagccaagaaaatcaacgaaaacaatacttttgtaataatcaggatgttatccaggtgtatattctttatttgaaatactggtgtacagtagtcaataaatagcttcacattcctttatgtatataaatatataatatgaatatttattattcatatatataaataatatgaatatatattatttatatatataaataatatgaatatatattatttatatatataaataatatgaatatatattatttatatatataaatatataatatgaatatatatatttatatataatatgaatattatatatttatatataaatatatatgaatatatatacaaatatataatatgaatatatatttatatacaaatatataatatgaatatatatatttatatataaatatataatatgaatatacattatttatatataaatatataatatgaatatacattatttatatataaatatataatatgaatatatatattatttatatataaatatataatatgaatatatatattatatataaatatataatatgaatatatatattatatataaatatatatatgaatatatatatttatatataaatataatatgaatatatatattttatataaatatataatatgaatatatatttatatataaatatataatatgaatatatatttatatataaatatataatatgaatatatatttatatataaatatataatatgaatatacattatttatatataaatatataatatgaatatacattatttatatataaatatataatatgaatatatagaatatataaatatataatatgaatatatatattatatataaatatataatatgaatatatattatttttatataaatatataatatgaatatatattatttatatataagtatataatatgaatatatattatttatatataagtatataatatgaatatatattatttatatataaatatataatatgaatatatattatttatatataaatatataatatgaatatatatattatttatatataaatatattatatatttatatataaatatataatatgaatatatatattatatataaatatattatatatttatatataaatatattatatatttatatataaatatataatatgaatatatatattatttatatagaaatatataatatgaatatatatattatttatacataaatatattatatatttatatataaatatataatatgaatatatattatttatatatcataaaataatatgaatgtatattatttatatataaatatataatatgaatcctat

SEQ ID NO: 473349 - DNA, 1292 bp, Homo sapiens
ggtggagctgcccaagccttgggagcccaccccttgcaccaagtcaggtgccctgcctagcagcagcattgcttttggcagcaggatttctgttggcaacagcccttcccacagccgcagccacacgagctgcaggtacggcggcagcagcagatcacgggagtgctgcagcagcctccacagcagccgcggcagcaggggcagcagctggagcagcagcccacccggtagcacctgcaggtggtgcagctgccacagccaccaccgcagccaccaccgcagccaccacctcagccaccactgcagccacaacttccacaaccacagcaacccatggtgtcagtagagaggactcaggtgaaagttggtacataagggcctcccccagcagaaggaggcatcagacctcctcacctctcctgagtcctcctcacttcacctgagtcctctctactgacaccatgggttgctgtggttgtggaggttgtggtggctgcggtggccgctgtggtggctgcggtggtggctgtggtggtggctgtggtggtggctgcggtggtggctgtggtggtggctgtggtggtggctgcggtggtggctgcggtggtggctgtggtggtagctgtggcagctgcaccacctgcaggtgctaccgggtgggctgctgctccagctgctgcccctgctgccgtggctgctgtggaggctgctgcagcactcccgtgatctgttgctgccgccgcacctgccactcatgtggctgtggctgtgggaagggctgttgccagcagaaatgctgctgccagaagcaatgctgctgctaggtggccggcctggttccacccctgcccaggagctgtgggaaccctcactgtctcctgctggcaaggctctgcttaaccccattctgtctaatcctttttctaacctatctgtcaccagcagatccccttggcttctgcctcatgtgccttgtgctttgtccttctgggatcttcctttgcccacacacggcaccaacttgcccagaccacacaatgtgaaacaaacgggcaaccgagcagccggtgataaccagataaagtcagagccaaccaggaaacttagtactttattattttgtaatgttcaatctttcctaaatagtcagtcctggatttcaccatttttctgttcactgtctgtgtgcaatcttttccattgcttttgtctatatttgctctttaaaatttcccagtaaaatgacttggtatgtcacaaaaatctcttcattagtcattttttttttaatc

SEQ ID NO: 473350 - DNA, 562 bp, Homo sapiens
ctccaggcttaggcctgcccacgcactaatggaatgtttatttggaatgatcccattcggtccaactgactctacctgtcaggcctccatttcctgccccagacaacgcacagaagaggcccatgcggtggagaccccgcagtccctcttggaacttacgctgcaggttctgatcaacaaccaccaggctctgcagggggctgcatgtcccccaggatgtcggtgtggggctatgaggagtcctcctgctctctgttttgtctgcccagtgccctacatgagacactcgtataatgtctatgatgcccacagtagagacataagggccagactccctcagttggttcctgctacttccagacctgcctgccctgctggtgccatcgcgattatggaggcggcgaaggccccgagctctaggagcccacgctatttattggtaatccaacaaagaaaccggcagtgagaatgtgggggtcaaaagggcagacacatgatccacagctgtgatagtttagtgtttatatggaccatgttctgctacttgagataatgcgaatac

SEQ ID NO: 473351 - DNA, 661 bp, Homo sapiens
ctctccacagctgggctctagcatcatggatggtgacaagacaagtgcaggccattcagaatgccagcgagattgtggcccacagccatcagctgtgtgctggtgtcccagttccctattccctgatcatagcagagtcagccacaggcctagtgaacagttctgcagtgttgctttggcagacccacctgaaaattctgctcagaatctgttctcgcccactaatgatttggaaaacgtacttcccgacagcccagcggaagccagctttacatggcctttaagatcacctcgaaaccccactggttcctcacaccacagtttccagtgccttcatctttatgactccatcctgtgcaaagtagagtcatctggagagcttttagaaaccactgatgtccagccccatcatccccagccagatattcccacgcaaagcattcctaagtaaggccctggcacttctcccagtaaacgtaacaggcagccagggaatgcagtcataaaaattctttgaacaccaatcgtcttaggtcttacaatagtaatgttatctataggagcaattgaggaggttaggaatctggtggcctctgactgcatgactcctgggccataatttctaaacttgtggctaatttattagttttacaaaggcagt

SEQ ID NO: 473352 - DNA, 867 bp, Homo sapiens
agagctccacatctttctctggtaaagaacggcacaaacccaaggtatggtaaatgagcaaagatacctcagtgcccagagaaagggggacaaaggagaaaggacgggaaaagcggtcattggatgccatttctatcaatcatctgggtataaaagagcaaaaacagcagtgaacctggctgaatttggagagcttgattggagacaaacttctctgtcagcctcatctaaggtgagggtggaaggtgcactcttcttagatgaatgtctggattcaccgactggagacctagcaagtctaccaggctctgggttgctactggtggttgtctgcacagagtcctgtgatgtgaaccatctgtggatctctcagccgtgggtacccacaccagttctagtagagatggcagggggactgaaatggactctgccccattccagaccaactgagtcagaaacgccaggggtagattcagcaatctgttttgacatgatcttcagaagattctgatgcatgtaaagtttgagaattacttctttagggattaatagagcagcaaggtagaaggcccctgagtctccagacaactttatgaagcagagataacacatattttgtatattatacagcagagccacctctcctccatagactgcccactcttacatgagagacaaattctattttgcttgagccgccagatttttgtgttcctttgttgtagcaacttagcaggcactctaattaaagctgtagaggaccttttgacttctcagtttataaccagcccactttaatggggaaataacaagcaaaattttccttgaagagctatgaataatcaaacagtatttacagaggagtac

SEQ ID NO: 473353 - DNA, 600 bp, Homo sapiens
agatcagtaattctcaaggagtcttccctcagtgacacatcatgacacattcccataacagcagcaaacaagaatgtcctgcagagggccaaagccagatagacttacacgaagcacactggagtctttttgtttctgtccaccctatattttggaagctccagcaggaatgtggcccgaatttaaacactgggctggtggctggtgtctgggatgatggagatgagaccacaaaggtggtcaggagtcagatggagaagggcctgggagccaccctaatgactcagttgtatggctacaccaagatacaaatggtatcagaaaacacagcctttagctgtgcattatgtgagcaaagagaaatccagacagccctggagactgacttctttccaattttggtaactgaggagacaataggctcagcagttcttcctgaacttaaatttctgaattcttaataaacttgatctagtttattgttgaagctcttaattatatttttatatcattcattaaattcttcagttccacaatttctgtttggttctttttttataacatctatctcttcattaaatttctcatttagatcatgaa

SEQ ID NO: 473354 - DNA, 661 bp, Homo sapiens
tgagggtggagccctcatgaatgtctctctcactctctctttctctctctctcttcctctctccctctctctctcttcctctctccaccccccctctctttccttctctctctctctctctgttctaagctacctgaagctggaggtggagtgatgcaaacacccctgtggccaccaccactatgactgctctagaataccgctgtggataccaattattgggatgtgatcaatatctactgagtgatagtcaagggccctggactccctgtgaggcctgcacttccccagcaagtatccccattcctgagagagtgacacatttaataacaaataaaaaccacaatgacatatggagaaagagaccacagaataaaggcaaaggcatttttcccataaaggaaaataaaacaggaggcctgcattttcattttgcacaggaccccactaattgtgttcctggactccaccctccaacagctgaaaacaaacaagcaaaccaacaaacgaaaccttcaataccagctctctcccatgcccttcacagcacacttgatagagtcatctctatgcactatcttcctttctcctccattcagtcctcagcccacagcaaaccaactttagctgataccattccatagaaacttatcttgttaac

SEQ ID NO: 473355 - DNA, 633 bp, Homo sapiens
tcaatttccacatctgtaaaatacagaagaggggctgcaaatggagccgcacctagcaccccatgctcccagactcattctcctcccggttcactttgctagaaaataccaaaagcattttagggagaggcctgctaggacacttatgggtcagacggaagctccggcagtgggcacctgcagccgctgacatctcagtaagaagtgcaggcaaggatcaaaaccctgggtcgagggacgtgcctgctggcgtggaaagtgcaggctctgagactagtgagatttggttacgatgtaccaagctggaggtgctgactcctcagtttccagatgccgcttctgtggctgaagttttcccagaatgcagctctgctcctgggctccaacacccagaagttcctctctctagtccagtcagctgcttcttccatcaccatatagaacctagaagaacactaaggacagaagggaagatgaagacccatcgttaactccctcaagcgatctttcagagggaaacagactctccactctcaatattgaccttctagttcctgtttttattctgagagaatgtttctgttcctgctcctcaaaggaaataggttttatttggttggctttgccttcaat

SEQ ID NO: 473356 - DNA, 750 bp, Homo sapiens
ctccaacagacctgcagctgagggtcctgactgttagaaggaaaactaacaaacagaaaggacatccacaccaaaaccccatctgtacatcaccatcatcaaagaccaaaggtagataaaaccacaaagatgaggagaaaccacagtagaaaagctgaaaattctaaaaatcagagcacttcttctcctccaaaggaatgcagctcctcgccagcaacagaacaaagctggacggagaatgactttgacgagttgagagaaggcttcagaggatcaaacttttccgagctaaaggaggatgttcaaacccatcgcaaagaagctaaaaaccttgaaaaaagattagatgaatggctaactagaataaccagtgtagagaagaccttaaatgacctgaaggagctgaaaaccatggcacaagaactacatgacgcatgcaaaagcttcagtagccgattcaatcaagtgggagaaagggtatcagtgattgaagatcaaatgaatgaaatgaaaccaaatctacatctgattggtgtacctgaaagtgatggggagaatggaacgaagctggaaaacactcttcaggatattatccaggggaacttccctaacttagcaaggcaggccaacattcaaattcaggaaatacagagaatgccactcctcgataaagatgctcctcgagaagagcaattccaagacacataattgtcagattcaccaaagttgaaatgaaggaaaaaatgttaa

SEQ ID NO: 473357 - DNA, 697 bp, Homo sapiens
ggaaaaggaagctgctacctctggaaatactgaaatggtggtagagcacctctcagatgttttatgtttggggatcgtgccagtggcatcatggctttcattctttacaggaacaagcagcaagtccaatacatacataggaccaatatccgcccccagattcttccctgagtccagagctaccaaaaccatcctccttctgaaaatgatgagaggagttaaggtgagcctcctagctgccagggattctggagacaaaacacatgcagaaggaatagacaagcccaaggcaactaatatggagagttgccagttatacagttggctccaaatatattcagacttagcaagaaagactactcagggaccggcatatttactttattggaccagttatgtcaagtctaaagctacattttcctatgaaacctatggggaagaattctgctttgactcatttagcttctgtgtttgctggaatccttggcattccttggctgatacagaagtgtgttaacttttaacatgatagtcattctgtcgatttctccttgtaaaatgctagaatcttttctcttcatatttttttgaaactatattgttaggtgcatggaagttcatgactaatatagtttcttggtggattgtacattttatcaatatgaaataccatttttaccccttttaatgtttttat

SEQ ID NO: 473358 - DNA, 727 bp, Homo sapiens
aaatcctcaccttcaagcacacgtattcacacactgggatgtgctcaagtgattcggtctaggttgataaccttgtagaaactcagttccttcctgtataaaatggaaacaagggaagagaaactaatcatagagattacttgtgatggaagcaggcacacaattccatgtgggctctcaaggctccacgaagcagtgtgatccctcttatgaaccctcccatgaagcagtgtgatccctcttatgaaccctcccatgaagcagtgcagacgtccagatcagctgggagcacaggaggcaaacaaaagactgcaggagctgcaggtgacttcagccggagccaccgagctctgggcatgttcaagcgcagaggccgcccttgctcctcgttcccgcatttcagagtggactctgagatcctgcttctggctctcctcagagtcctgatttcccacagctgtcttcatctgagtctcgttcacaagcctgacctgctcccgatctccaccccggcccagctctgtgctcctgcttggccaaggtcctcctctccggttgacccactgggctccccggtgccatgaaacttgctggacagttaatgttacctgaaaagaactgagaccattctgtgttgaaatcccaattctcttcctttccaaactatattctctgtggttattttttagatataattcctatccaagaagcttggggttacattgta

SEQ ID NO: 473359 - DNA, 1072 bp, Homo sapiens
cagtgggaaatacgccagaatctgagcagaagatgataaccatttacacacattacctgcttctgtgtggtgcagaaatcagtgattttaatgggaagacagaaagaaaagaagaaaaagacagaaaggaagaaggaaggaaggagaaagaaagaaagaaagaaagaaagaaagaaagaaagagaaagaaagaaagaaagaaagaaagaaagaaagaaaaagaaagaaagaaagaaaaagaaagaaagaaagaaaaagaaagaaagaaagaaagaaagaaagaaagaaagaaagaaagaaagagaaagaaagaaagaaaggaaagaaggaaggaaggaagggcagaggagaggagagaagagaagagagagagagggagggaggaaggaaggaaggaaagaaggaaggaaggaaaggagggagggagagagaagggaaggggaagaaagggaagggacaggaaaggaaatgaaaggaaaggaaaagaaaagaaagaaaggagggagggatagatggagggaaggaaggaagaaaagagggaactagggagaaagggaaaggaagaaagatgagggcaaggaaggactttctaagaaacaagcacttaattgtctatatgtattgccttgtaactcaataatttttagcacacttattttaaattcattgtcaagttattcataaatttttatttctgaggttgattatggtagatgcattttttcctttgattgaggctttaatcacacttgtagcttttattttcacatagttttgatgtaaagcttggtaaattttaatgtattaatttttctcaatttttaaaatattttttctttatgtttcttatttaagaaaattttcccttccccaaagttacaagtattcttatatttgtttctaaaagtttaaatgttgctttttaatgtatttgaaatgtattttttattataacatgaaacaaagcttcaatgttgtgttagttcattcttacattgctatgaagaactacttgagtgatatggttaggctttgtgaccctacccaaatctcatcttgaattatactcctc

SEQ ID NO: 473360 - DNA, 2630 bp, Homo sapiens
gcggcttccctgagcagaagaagcttccctggctccatcattgatcatcaccaagaacatgggtttttacttctttgcatggtcctgttccctagtgtggctactgccattactcagtgttccagctactcacctgcggggcaacttgcccttcatagtcctcgcaggagggcactttcctgccaagtctgggaaaggacctgctaatctgagcaagcagccaccccgaggccaccttgctggcatagattcacgaccttgctcttcccagctagcccatcaggagaaccttcctgcagtccacaggccacggaggtcctgctcacaccaccctgactcagcctctcaagcagcctatggtgggtacaggaccccaagatctattcccgttttcacccagagcccccagtactccccatcagtttcagccacactgggctccctggctcctgccttgtggctcctgtccctttcacacagggatccttcgtaacattgagaaaaaaactaagggtataaaattgtctttttttacctcttaatatctgtgtgaccttgggtacttcatgtcagttctatgtatttgatattcatcatctgcaaaataataacagtgacaacaataataattaacaatgaattattttaaaaatgagagaatgatacacagctttttaaaacaataagaaccaattaaatgctaacttatgattactatttatacagattcagttagttcaccccgttagaacacagacagaattccaaaggtttaactgagtaagtaacctaagtagtggatggcagtctgtatcctcagattgttcatttactggtcaatgtgcagatacggggtttacaggacataggagaaagacctcacactctggaatgaaatactgttatgtgaccttgggcaagaggtttcacatttcaaaatatccatggatgtttacactaaggggttaaataactttcagaattgtcgtggtcatagaatgtgatgcccaaaatacagtgtctggctcaggttaggactgcataaatatatattttcttcctcactttggatagaactgttttcatgagtgaagagatctcaagcaacttttaaaattccaagttgaatagagtatcattattaacaaataacactactagccttcctctcccctcctttgccaacactctaattgtttcattgatttcagactccatttgtgagatgggaatgccccatgagaaagcctcaacacaatgctgtttcctcacaaaataaagacatgcctatttgattgaaggagagagtacatttactagctcctgatggaagccaacttgtctcctctcatatggaccttcaatgtaaatgtgtatctcttttataacttacataaaaactagctttatgcttgaaataatagcattagaatagctttagggagccaaaagtcctggttttaattttactttgacaactcttattcctgataccatgggaaaatctttatcatttcatgagcctcagtctactcatctacaaaatggggattaaatgggtcaaaatatgtaaaagtttataacataataactcatacattgcaggaagtttataaatgtacattttctatcatcttcccccgtaagaccatactttaaatttaacataactatatagatcccataatgactagcaatatgccctgcacaaaatatactcttgagaaatgtttatgaaattaaactaaatttaaaatatatagagagaatacaaatgtttttaatacatcattattttaaattacaaaaaatacaagcttaagtcctaaaattaattttatatattttgaattttatgtattataattataactaaaaatccacagtgctcaaactttttttgttgttgtcgttggttggttcattttttttttcagccaatctcacatgaggccacagagtgtcaaggaaagaataaacaatttggagccaaagttgaatttaaatttagcatatttcattggctcaaagataccattaattatgagatgaacatatacaattgttacaaagactgtactgccaatacactaaggcatgattgctaatgcattaagtgcacaatgaatacttatttcagagaagttaatatggaagaaaacatgacccaatgaaatgttatttaacttacttgatccccattttctccatcagaaaaataagtctaacaataataactaagaggatcttgaaagaatcacatgaagaaagggtatgacagtccacttcaaattataaaacacggaaaatattgtttatagacaacaatctcacttgatgagaagctcagtttggagatatgtaatgtcttctatcttcctgatctatttttcattggttgtttatgtaatgccatgaccaagaagtaacaggttttgtgtcagtttcactgtaaaatgacaacatataatcatgatagatcacctgaatttgtgttactttgcctttggagtaaacttcttaaagattttttttttcttaatctagtttccagtaattattcaaacacaaaagtaattgtttaattattattcaagaaaaactttatatcctatttaggttactcattt

SEQ ID NO: 473361 - DNA, 1064 bp, Homo sapiens
agattgctggctgccagacccacccctgtcttcccttctcgggccagccagcacctgaatggtctctctcgagtctggcttccccttgggcatccttgtcaacgtcccctccaccctcttctccctgaggtccactcaactctagttgtgggtccttgtttctcactcagctctgcccttccttgtggagacgtcttcttgagtgaatatgaatatgaagtgtagaagattgacatccaaagatccatgaagtcagcatggcgtgcgattactcatatgtgcctacaggcacagagaacgggcagctggtcagggctaagggtatcggtgaaggcttcctccagcaggtgatttggatctttggagaacctcctagcgaacatggagcacctcctagtgaagaagggaataattactttgcttccctgagcctcgccatccacacaaataaagcagggatggctgctgagggtgaggctttctctgtcaggaagcattctcataggagcgttgaaaactcagactggatgaggcaactgatccttcacatgtaccagtcattctgccagcaacattatttttttctctccaaaccttcatgcttcaattttgccttgctaattcttgcttacccaagaggactgcacttagaaatgtcatccaggatttctctgactcctccaggttgttaaatgaattttcaatttaccaataagaaaatcacagtactggactgtgctaaacctgactcgactttgcgtttgttgtataattaatatgaattgaatatacattgattttgttctttggactaatagagtaattttaaaagaaaaacttgtttcagtaattaagcagattaaaatagataatatatatttcttgcttaatcagtccaataattgagttccactggtttaaattctcatctacttcgtatttaatcaaagttaaatgctatgttcatcctaaaactaagtaatgcatggacagtatatttaacctaaaaaatcacattacaaaaattaccattagcatagatgctttattcttgcttaaagttc

SEQ ID NO: 473362 - DNA, 646 bp, Homo sapiens
agttgagtcggacaccatatcttccaatgggagtcccttttgccaaccctgagctttgcagcggagaagataaaaggcatgttatgctgactccttcattgccacgtcagcagctggaaatctctgtggctgccatggcctttttccaggacttagctcaggcccactggggtcactttaccaacttggtcctgcaggctgccctcggcttgccctccagccaggatccctcacctgaacagggactccgtgctcagcctgtggatggagcaggcatgctgcaagcagcttccatgttgggagccagtggagtcccaaggtctcagctcccaaggaatgcggcatctgttcactcccaaagctccacaagtgggactatgttacaagcccttttattcctgccactcacagcttggcaaactgagggtatgttacagcttattcattcctgccacctacagctcagcaagtttccggttctcgttcggcaacgaagaggaattaaggtacgcagatgtcagagtgtgagtaaggcagagaagaattttattgagtgacaggaggaaagctctcaagtgcaagaagggaccctgaaggcaagttgccctcagctgcaagtggtggccccaaaatgggtagccatctg

SEQ ID NO: 473363 - DNA, 537 bp, Homo sapiens
agctccagcacgtcacaccttcgcctgtcctctggtgggcctagggaatgctagtgtttgtcaccctggttagtcagcagtcaaggtctgctgactcagaggctgcaatgttgggttttgtacaagtccctgatggaggattggtccctaggcatgtgacacatagcctaacattcttcgctaggggtgacagatcttgggatagcgaggagactgttctggattatttcctgaaagattcgcagctacgagtcttcaaaactgtcgactcttacccggtgacactctgcttcttcttacccctccctgaaaatgataatggaaatgttcagaagattagaggcagacatgaacaaatgggtgaactcatgagcagaaggacagaagcaacagagagctcattacacaattcttcatgggagctcataaaaaacgaggaagtaggcggtctgaaaagcctgttagagaaagcagacttaggtttgcactttgaatttaaaaaaggatgcaaataatggagggaagataagaacattt

SEQ ID NO: 473364 - DNA, 820 bp, Homo sapiens
ggccacattcactgagagtgctatactcatcctacctgggcatccccacgtcctccctcctcgtgactcagatcatcatgtttaattctgctacgcccaggctcacagaacatggagttgtttcattttgtgattcctgccccacttctccgtgcaccctccaagggctggaacagccaggacatgtgtgccctacacaggggctacagtgggctttctgactcatggaagaagaatcagcagggcgagctctcagaacaagcagtgttctgctgtgtgaagatgagaagggcatctatccaggtggaaggaagagagagtaaagccctgggggatgagaggatggggaaggggagtgaacctgttaagccctatgctgcagaactggaatttcagctcaaatctgcagacacaaaagccactgccttgccctgtccagcccacactccaggcccaggaaccatagggaggaagtacagaagaaccgtgggctccatcggagagccaggtatgaggcttctgaggaggcctccaggacgggcagtcactcatcctgccgagaacaagctgaaggaaagtgtaatgagtcttcaagaaaagaaagctcatgtgctcagaagattacggttggatcaactaatttctgaagacttagtagatcgcagcactttaaaacaactcaacctccagaggcagcagtgaatgactttcaacccgtgtccttaggcctggatgattaagagcaggaacgctggacccagaagacctgggtttaaatcccatctgcagaaagtggagaatacgactagagctgtgagga

SEQ ID NO: 473365 - DNA, 1139 bp, Homo sapiens
ccagccagacagcacacttccccatcacaaacagctcctaaatctgattctaagacgttattctcagcgagccacatcccatctcctgtcttgctacgtcgtgcggcagcacctcccttgctgctgctcatctgtgccatgtgcacccccgccccaggacctttgcacctgctggatccaactctacacaagtgtcctgtgtcagaacaagaccaaggatgcaaccagcacatatgtcctggctatctgcatggtgccttgctattctcccgctctgcggcccaggaagagcaaacaacgtacagttccagggccacgttcaaggtctccaacttcttgccagtagctgcctggaaagcccacctctgtccttttccttccacgcaccttcaagactcaggcattattcctgcctccccagccggggctgccttcctgggctggcgacttgctcaccccagtgccagctctcagtgtgcaggtgagcattgcagatggcctctcaaactcggctctcacacatctggctactacaagcccctggagacaggaaccgtctttcatctgcgtgtgctcaacaacacccaaagcttcacgcacaacaaaattttgtagaatgaggcatgaccaaagctatagagggggtgaggcagattgtgcttattaatagaaaacttattttttggctcaaagaaactgatttttgacaaaaggattgtgtgtgtgtcattccttcactgacttaagagctatgattggcagccactggtctgtggctgaacagcctttgagttagttgaatgcattggttaaagatatagactccaggctttttttcaaatacatggaatctgtattctgggaagtagactcagaaacctgtacttttgattgtgtgattttgatgtttgtttggtacgtttagaaatgagatttctgttttatgaaacattatattatcttattaatgctataatattggtatgctctctcagttaaagaagtttgttaactgaaataatgatataaaaagaagcttttttttttttaattacctcaaacttgagtttgaaaatttgctgtcctggaagacaattgtttctcttctccccattgtaaagttcacaatagctctgtcc

SEQ ID NO: 473366 - DNA, 577 bp, Homo sapiens
gctgcttccaagatgataccttaaatgttatccccttcacatggtgggaaggacaaaaaaaggcaaacagctcccttgaacctctttgtcatgggtattttgttgcagcagcaggaagggcctgagacaccaggtgtggtgcagaacagggccaatggggtgcagcttgaaggctattcaagcccccagcttcacactcctcttgctcataaccctcctttccctgctcctccaaactcactctgtgccagccaaaccagcccatgtgatgccccaagccctggaacctttttggacctgcacactcttgcaagtgcagtttcctcagctgaggatgcctttggctccctcaggtgcccagaggtcaacttcgagagcctccttctgtcctatttatttataaaatgggctaatattagctattgtgtagcattagctatcaagattaaagcagaaaacacatatagaggccttggcactgagccttgacacctcagatgacagttccacactgctgtttactggactggaaacagcccatggctgtgctttctaaatatacttctatctcatcagc

SEQ ID NO: 473367 - DNA, 623 bp, Homo sapiens
gactttatcataactgtgcaacttgatgttgccacggatcctgccagagctgacattgcttcttatcagaaaagcgtgggctgcccctatacctcatggttttccagagagatcacgtgagacaaactacatggaagtaagaggaagactcgctcctggcccggtaaagaaggcaccacagtgctctgtgtcggaaaatagcatgtattactccacggacaccattactttgaccatccccaagaacatcagcccccttctcaatggggctggccacttcaaggacctctctaaagagatgggagtgagtcttcacaaactgtccacagctgacattgtttctaggcactatgaattgaagagtgatggcaagacaatttctatcaagattcctcttggtgcagaaggtggttattacaagcttgagctcagagggagaccctgactctaaaaaaaaatgttattgctcaagacaggacatcagatctcctactttcttttggtttaaaagctagtttcaaggaaggatctgactttagaaggagcaagaaatttagggatctgaaaatgaatattaaactgtttttatagaaaattttaaaatagcaaatcctgaagctaag

SEQ ID NO: 473368 - DNA, 728 bp, Homo sapiens
agcagtgctggtcagcgctcctccaacaggggcagactgctgaggggaggggaggcggagggttgcaaggacctggctcagagcagtcagagctgctggttgagagaatgcttgggaatatgaatggtttggtggtgcctgtacattttattttctatagaaggaattggagggctattagacatgattctctgagtgctagtctgccccaagaagataggaatatcacttccctgacaagtgagaattctctggcatctctgagaaataagtggcagacacttttcccaccaggaaggccctatgaaggggagaaagctggaaatcccaggcacatttggaaaaatcccatggcaaaggataccaatgccactttcacaagcaatatctgcttccagcatggcgatggaaccagagtagtgacagctgaaggagcaggcctggagcggggaggacaggagctcagggaggagcttaactcacactctcatgcagtatcctccatgaaggtgtacccattgttctcatggccccaaatggctgcaagaactccagtcacctcatccacattctagggaggaggttggaagacaaaagggaaaagggcatggctcccctttttaaaaagactccctggaaacataagagaatgtataggcttacatctggttctaaaagttggtttctctacactagttgcaagagaggctgggaaatataatgtgttt

SEQ ID NO: 473369 - DNA, 517 bp, Homo sapiens
atgtacatttctgtgagaaaggaatgtggttctgcttagacatactctgatgaagtcagagaaggtggagaacagggatgttctcctggatgctttgataatctctgccttcagtccacatggaatgccacctaaagtggccaaagcagcagccttgtcccacgggaaatccagccagtcactggaggaatttgtgacacaccaaggatcagggccagcggtgcatgtggcccactttgatggggagcctggtttcatcactgtctttgttcagaatttgcagcataggagaatacttgattttattattgtttttaaattctgtacaacaaaggacccccatattgttagcaccaggggcagactgctcccctgtggcaaactgcccctcttcatccccttagtttaccaggcgatgacacagcggccactccctcccacttgttttcctagagattgaagaacaattgtatcccatgcttgatctgactgatatggaaatgcctgatgaccattt

SEQ ID NO: 473370 - DNA, 490 bp, Homo sapiens
gcagctataatcccagagagtgcttctgagaatacatggtaggaaacctttgtgtggttcctgggcataaagacccatggaaagaaggtcgtggaaaagagatactggaagctctgacttcctccatgtacatactggacctttctccttcacccataggtagatactgctcctttaggtctaatgcctgtaccatagcttcccctcccttacaagacctgcgtgacttcacaatccatgtgagtaatgtgatctgtacctgggccttacattccttcacttcctcacttggtggcctcacctttctcttttattttagcacccactcttcagcatcacttggaaccacttcgtgtcagagatctggtcagggtctcatccgctcaagaaacgaatgctttgtttcacaactcctgttcttctgtttcccagagacctctagttccttgatctgtctgcttcctgccagttaatcagctccccttttctt

SEQ ID NO: 473371 - DNA, 1312 bp, Homo sapiens
gtgatcaatctttagaccttctgagctcaaattgcaccgattgatggacatcaatctgatgacctcatcacctggttatgatgtcttgaacagatttaaactacaaagcacggcacagatattagttataaatactaccatcaatgttttggggatgagagagactaaaggtggagaacttctgactcctttctttggcaaagactggggcttactggtaggtcctacagagatggatggcggccacacagggcctgttacccaggcagtgcagaaggcaaatgtgggctcagagccccaacacagatttcccactggggcactgcctagtggagctgtgagaagagggccaccctcctccaaatcccagaatgatagatccactgacagcttacaccatgcacctggaaaagctgcaaacactcaatgccagcccgtgaaagcagccaggaggtgggctgaatcctgcaaagccacatgcgtggagctgtccaagactgtgggagactactttttgcatcagcgtgacctggatgaattaaggacaacacaagctaccaagttcagagctccttagaactgaatgtttccaatttctagtctctggctacacctgaagggaattcttgggatctaaatccctattagcaatggaatgagttataacatgttttattttcatgctgttcattaatttagccatggaaatgatgtttattcattaaagtattcaagatatgtatatgaagaatcgtaatcccctcacaagcttgactaagttctgatgttctgttctaaggttgggaacacttgcttttcccacactgttgagctgcctagtttttgaggggaagaactataaacggaagggacagaagaatacctctgctgcattttaataaagcagaactaccgatgttaaatatacttcttgaaatggctgaactaaacccgggtggctcagtgcttaaggtctacttttcagtagaaaatgtgtatttttttaacctcttctcattccaactatttgaattctcacccatttcctggtgcacacagagtgctataccctgtactgtgctatgccatgtcccggcttgtctctttacctccaaccacttcatgctttcaaattcctatcttctcatcttcccaaattaaaattctcatctcttcagtatggtcaactcttgttggaatagtaataagatgactatttcacctttatgtattaaaaccaaatatgctttcagaggactaaccatttttaaaagagaatgtaattaccatcagtatatttttgttgtagcat

SEQ ID NO: 473372 - DNA, 706 bp, Homo sapiens
cagcatcgggaatggacctccagcaaactccaacagacctgcagctgaaggacaggactgtagataaaaccacaacgatggggagaaatcagagcagaaaagctgaaaattctaaaaaccagagcaactcttctcctccaaaggatcgcagctcctcaccagcaacggaacaaagctggacagagaatgactttgacgagttgacagaagtaggcttcagaaggtcgataataacaaacttctctgagctaaaggaggatgttcgaacccatcacaaggtagctaaaaaacttgaaaagggattagatgaatggctaactagaataaacagtgtagagaagaccttaaatgacctgatggagctgaaaacgatggcacgagaactacatgaaacatgcacaagcttcaatagccgatttgatcaagtggaagaaagggtatcagtgattgaagatcaaattaatgaaacaaagcaagaagaggagtttagagaaaaaatagtaaaaagaaatgaacaaagcctccaagaaacatgggactatgtgaaaacaccaaatctacatttgactggtgtacctgaaagtgacggggagaatggaaccaagctggaaaacactctgcaggatattatccaggagaacatccccaacccagcaaggtaggccaacattcaaattcaggaaatacagagaacactacaaagata

SEQ ID NO: 473373 - DNA, 793 bp, Homo sapiens
cctcctgaggtcctcgccagaagacaagctgatgctggtgccatgtttgtacagcctgcagagctgagtggagggtgctcctgtggcatggagaatgatggtggtgcagggcctgagactggccttgatcctgagtcaggaggagagacttcctcagaaccagaagaaatcagtcaatgggggcagagtggatggagaggtacccactgttcatctgatggacatttactgagcaattgttcagcaccaagcttgatactgaaaacagtggtgactgagactgtgaccacctgtgaatatttcatcaagtgcaaaagagagaaacaagcagataccagggtggctttcagcacacagcagggtaaccacaatgttagagggatgtatgtcctctgtgtacactgcagaggacataatgaactgcactggagaagggtgggtgtgagggaaggatgcacagaggaggaagtatatgagctggacctggaagccagagtgagatttcaccaggtgctgagtcgggctggtggtagggaagaacataggggctgggaaaaaaatttatgcccagggattggcattcacaaagtaatgttggcctgaaatgttgatatttacttgtgcaaatccatgaagagcaaccactttggacttggactgaccaatcaccaggttcccagaaaccagtcttccagttctgcagaaactataaaacaggagcagacaaaagaagaaatggatgacaactactaggtatctaccaggtcaagaactctcttgtctcatcactgcc

SEQ ID NO: 473374 - DNA, 778 bp, Homo sapiens
aggaaaatgaaggaaactgtcatagaagaggtggcattgagtgggacaatgaatgacaggttcttgaagtcgcctttagaacgtttgggctgtgtgagcttgttccttctaacagtcccctctgatgcaggtctgctggagtttgctggaggtccactccagaccctgtttgcctgggtattaccagtagaggctgcagaacagcagagattgctgactgttccttcctctggaagcttcatcccagaggggcacccaccagatgccacagagtttgagcgctgtgctgggagatccgctgcactcttcacagctggcaggcagaaatgtttaagtctgctgaagctgtaccctgttcccccaggtgctctgtcccagggagatgggagttttatctataagcccctgactggggctgctgcctttgtttcagagatgccctgcccaaagaggaggaatctagagaggcagtctggctacagcggctttcccaagctgtggtccagtttcgtgcttgaaacccagggccctggtggtgtagatctcgtgagacttattcactaccatgagaatagtattggggaaattgtccccatggttcaattatctcccactgggtccctcccacaacaggtgggaattatgagagctacaactcaagatgagatttgggtggggaccagctgaaccatatcaataactataaaattatttataatttaataaaaaagttattaaaacagattttaataacttagttaaagcctctggatccagc

SEQ ID NO: 473375 - DNA, 579 bp, Homo sapiens
ttctcatccgagagggtttcagttattgcgaatatgctcatacgtgtcctctggagcgcatatacaaaggcttctatagtatatacagcaagtctagaaagactggtcaatgaggtttgttgtcaactgggagagccctggtactccattcccaggatcagccatcagggtgcagacattgcaggtcaaaacgtcgtctcagactttaccctccaaccattgagaaaacatctctgcttagtgccagagatagccccacctaacttggtggaagtagcagatattaatggcaaaatgaacttgtctggtgatggctccgtcacattaatgtctgatggacgaccccaggaaacaagtatagaacgaaatagagcaattaagcccaaggtcttggggtatgggacaagacagccagacattgaaggaaccactaagatttatcaatgttctttctcctccatcacagggtgtgttggcagcttcaaaatatgagccttgaatgactctagttgagaacatagtgaaagccatcgtataacttgcaaaagcaaaagtgttttgtgtctcttcacatgccat

SEQ ID NO: 473376 - DNA, 508 bp, Homo sapiens
cctacgagagcttctgtggagctacctgaaggggattttacatgtgcttgtctgacatcgactcccttggaggtctctttggtaccgacgttcactttcactctactgccttctgcccatctgctattcaattcttcccacccttgcccctgaactacatggcagtggagcctttgcttttacgcacacaccaagtatctcccaactccagaggtcctgagcttccctcacagggtgctggtgatgcagtgtcagaagagaggaagataccctgctcagccccactcagccaagaagaatccagcattggcttcacaagccagaagagctctcttttcttcaataaagatggaactcatttcctagggtatagtgagagaccatctaccaggacagccaaatcagccccatctaccctgaccatcagtaatgtggtagacacctgagctttcaggtcattaattaactaattaatttgtcaacctaatattttgtgagtgattgatat

SEQ ID NO: 473377 - DNA, 595 bp, Homo sapiens
cttcaaccatcaatttataaggcatcaactcatcacgcatgcaggctgctcatgtgatgatcaatgcacaggaatggttagactgctaatttcaccccacaagaacgccctgagttccagcgctaatcggaaggataagtgctttgacagtaaaggtgagggagcagggaagattcaggacaacctcatgcacaagagaatttcggattggcagcatcccaacccttcaatcactcaagatctgtccaatatttccttttgtaataaagataaaggaggaggagaaagaaaaggaggggataaaagcagcagttatgatgatactccaaataaaactgagttaatacctgggaatttcctgtcatgggaagttggtgagcaagtttttgtaccccttaaaactcaacagataggcagttactgctgcttcctttcttacctagggcagattccaaggaaggagagaggagagaaatgcttgttgcctggttgccacagtttatagtagcctattttttaacccaggtagagcatagtctatacattccattttactttctgctaagtcagtgagtggccttagtaagtggaattc

SEQ ID NO: 473378 - DNA, 664 bp, Homo sapiens
gacagctcaagggggcagtcattcctcaagcaggctggtgctggggtctctgagcctcatggtccccttacacagcccctgcagacttcagcaggacagtgtgtttgggacccatgtctggctggtgccagaactcactatttccttccacttttgcccagagataactctgctggagaagaagaaagaaggagaagaagaaagaagaaggagaaggagaaggaggaagaagaagaagaaggagaaggagaaggaaggaagaaggaagaaggaagaagaaggagaagaggaagaggaagaggaagaagaggaagaagaagaggaagaaggagaagaagaaggagaagaaggagaagaagaaggagaagaagaaggagaagaagaagaagaagaagaagaagaagaagaagaagaagaagaggagaagaagaagaagaagaagaagaagaagaagaagaagaagaagaagaagaagaagaagaagaagaagaagaagaagaagaagaagaagaagaagaagaagaagaagaagaagaagaagaagaagaagaagaagaagaagaagaagaagaagaagaagaagaagaagaagaagaagaagaagaagaaaatgatgattgaatgattggtgcaggatcaagtgaaaattagtagtgatgtctgt

SEQ ID NO: 473379 - DNA, 715 bp, Homo sapiens
cagttcaatctcagactgctgcgctagcagtgagcgagcttccatgggcgtcggaccctctgagccatgcacaggatataatctcctggtgtgccatttgctaaggccattggaaaagtgcagtattagggtgggagtgtcccgattttccaggtgccgtctgtcatggcttccctttgctaggaaagggaattccctgaccccttgcgcttcctggggcatcgctataaagatacctgaagatgtgaaaatggctttgaaactgggtaataggcataaattcaagagtttggagagttcaccagaagagaagaagatgagagaaagtttggaacttcttagagactggttaaatggttgtgaccaaaatgctgatggaaatatgaacagtaaagtccaggttgatgaagtcttagatggaaatgaggaagttattgggaactggagagcccaccccttgcacctgcatgccctggatgcaggacatgaagccaaagacgattatttggagctttaagatttaatgaatgccctgctggatttcagacttgaatggagcctatggtccctctcttttggttgacgtctcccttttggaataggaatgcctgtaccaccattgtatctgggaagtaaatgtctttttaaaaaaaatcttacaggctcataggtgcatggaatgtgctttgagtctcagataagattttgggctttc

SEQ ID NO: 473380 - DNA, 544 bp, Homo sapiens
gtctcctcctcctcctccttcttctctctctctctctctctctctctctctctctcccatgatgtggcttcctgtgacccaaactgcagtgattgatgtctctcctctgggtctagccacccagcaagtctacctagcttcgggctggtactgggggttgtctacacagagtcctgtgatactgtttacagctaaaagaagggaattatatgcttttcacaaatctccatgggccaatgacttgcatgtagagttctattaccctctttccaaaaagaaacatgtacttccccggcacagaagagaaagaagcttcttctggcccctcctgaaatttctccctttgcccagaaactactccctgggacagccacagcacatattggctaactcttcacattgtcaaaacatctggggtgacaaatgcatttacccattcaaattattttcccctgaagcaatgccaaacatctgcctaactagaaacagctgtgtattggtttgcttgggctgccataacaaaatgccatagactggtgacttt

SEQ ID NO: 473381 - DNA, 638 bp, Homo sapiens
ggaaaaaaaagtactggtcagtctgaaccaggtcaagttaactatgaaagtagcaaatccacaacacaaactgtacaaactggaagccactaccccgatctgtgaaaagcggtggaaggaacttggctactgggcaggtgtggttgtacagtacattctcatggcccataccaggttcccacggagagctgcacagtcagccctgcagcattcacaacagtgcacggacaagattccgatgcagctcagtacccgtgtgtctgacgtgggtcctgtggagcctgctgggaggaagtgggtcttcgaagaaacagggaccccgttctcaggtatcattgtgctagaagacatgccagaactccaggcatccactcacagctgtcaacactgtacgtccctgaaccagtgtcatctaagaatcagccagcaaatccaaggtcataaagatatatccctgttttcttctaagaatattatagttttagctcttacatgtaagtgtttgagccattttgagttaatttctgtatatggtgtgagataagggcccagttgcattctttcacatgtggttatccagcaccatttgttgaaaatatgattctttccctcattgaatggtcttggcacctttgctg

SEQ ID NO: 473382 - DNA, 521 bp, Homo sapiens
ttgctgagattcgagcataacgatgagggagtggggctgctgtttacagataaacagagacctgctgcctgttaggatcctggtaacaaaattcagtgagaagactgaaaacacaattgtgtttacagatcagcagcgacatgccaatgtcatgttggcggtggaaggcaaaggtcatgtttactgcaagcagaggtgcctgagctgccacaggggctgctggcgggggattttgaggaggaggaggagggctgcagcagcagtggatctgcagtcgcctgacccacatggtctttcttcctgtgtcattgacatgccaatgttatcccatgatattcgtgattccctctgcttggagcatgctgcccacagttgctggcccagatgcctccttccagttagtccagcctcagaaagttgttatgttcccagaaaggccttccttgaccgatgtatataaacagcatcctccttgtaacccatgcatacaggttttatcttatgtatttgtttatgtgtct

SEQ ID NO: 473383 - DNA, 612 bp, Homo sapiens
cagggctcctcctagccacccccaggaaagaggaaatagaggcagaagcaagatgagcagatggaaccagccatgcacccagtccactgggcaaatgccagcgaccccacctgtaagctgccaggccctgtgcaagatcaaaaccctgcagtctccaccacctgtgcaccaagcagcccagccctgctgcagcagggtgtgcatgggggtgagggggagaagcaagacgtagtgaagtggttctcaaagtgtggtccaactggcagcgtcagcatcacctggaacctcattggaaatgcagattcttataccgctccaggcctcctgagtcagaaatccaacaagtgctccaggttaaagcagatgctacgccaggagcccagtgccgtgcctgtcacagcaactgcctgtgaaacagtcgatgcatgtcattgctgtgactggtcagggctccgagagaatggagaggctctgaagactaacccaggctgcctctctaactgcctgaggcattgactggggcatagagggtggtgggtccatgaacagcaagaggtgggaggagggaagcaagttctccaggagtccaagtgaaatacaatgagggtatct

SEQ ID NO: 473384 - DNA, 876 bp, Homo sapiens
aggcgcggccccttacctcggagcgggccggagcggccccaaggagcatggcgaagacgggtgctggtagacaagttcagtggacaaagtgatgacagaaaatggtgaactcagggattctgtctcctggcttcagaagcagatactgaccctcaaatctgctaagattgccctgagtgagagtcttgtctcctgtagagaaagagctgaaattgtggaaaaacagacacaagctcttaccatgcgagtggctgacctgcaacaaaaggttcatgcacagcctcgccagctgtctactgttaaaacatttgggggactactggacacaggctctgagctgacgttgattccaggggacccaaaacataattgtgatcctccagttaaaggaagggcttatagaggtcaggtaattaatggaattttagctcaggtccaacttacagtgggtccagtgggtccctggactcatcctgtggtcatttccccagtgtcagaatgcataattggcatagatagcagctggcagagcccccacattggctccgtgactggtaggaagacagatggatcttgtagaatgacagtggattatcataagcttaaccaagtggtgactcctatatcagttgctgtaccagatgtggtttcattgcttgagcaaattaacatatctggtacctggtatgcagtcattgacttggcaaatgcctttttctccattcctgtccataaggcccaccagaagcaatttgcctttagctgtcaagaccagcaatatacctttactgtcctactttagggatatattaactctttggctttgtgtcataatcttatctgagagactttgatcgcttctctcttccatgagat

SEQ ID NO: 473385 - DNA, 799 bp, Homo sapiens
ggtactgctggtgtcacctgtgggtaggacaacacagacagccagcatgggggagcctgccgtgcctggggcattctgggaccaggtgtgggtctgtagaggttcgcgaagctttgcttacactcacttcaggtccacagacactgaactgtgtgctcagggatggtttcttcccctggctcctcaggacagagacatgaccagagaggcggctcccccgtcccactgtagatgctgcttggagtctgaggcatactgggctgctctctgggctcttggtctgattacaactctgcgactacacacaaggtctgcaccagacaggtctgagtcaaatggccacacctctccatggggctgggtgattcggtctctgagctgtgatcatttctacgggaaccgaattccatgtagttttggatggttgctgggtgtcagctacaagctccattggaaatcacattctgaaattatcatgtgttagtgcttccagtttctatggcaccttccctttgtgaattaaaaataggatatgatttatatgtaacagctggttttcttcaattttgaggggtcaaataaaatgttttaatatatactattaatatattcacctttgtactgacacaatcggaaaatatgcttttgtaattgtttttttaagtggagcaaggggcataggagggaaagtgctggcaccccttggtggtgacagccctgggtgcctgtgggatgaccgctcagtgaaggctttggaaccagctgtgccccatttgtgaaagctgcagagacagtgcct

SEQ ID NO: 473386 - DNA, 460 bp, Homo sapiens
ccaccgtcctccagaccccagaatggtagatccactgacagcttgcactggaaaagctgcagacactcaacaccagcccacgaaaatagctgggaggaaggccgtactctgcaaagccacagacgtggagctgctcaagaccattggaacccacctcttacatcagtgtgacctggtagctggcaggcagaactgtttaagtctgcagaagctgcccccagagctaccccttcccccaggtgctctgtcccagggagatgggagttttatctataagcccctgactggggctgctgcctttctttcaaagatgccctgcccagagaggaggaatctagagaggcagtctggctacagtggctttgcaacactgtgtaatggtgaacacccttcccccgaccaagctcaggcatcccaggttggcttcagactgctgaactggcagtgagaatttcaatac

SEQ ID NO: 473387 - DNA, 586 bp, Homo sapiens
tcagttaaggcaggaacaggccattttcacttcttttgtggtggaatgtcatcagttaaggcaggaactagccatctcgatgcgaacctgtgttgatcagatgaccacagggtaccacaaccatatagcctcaccactattggtggcaatacagcatatactcagttttcaaagagttgctctaagtttagaccaggttgaagtgagaaagggcatggaggaagaggagaggagaggaggagaggagaggaggagagaagaggggaagagaagagaagagagaaggcattctgggttgcacagctttgtgtaccagattaataagaaaaaatttcagggcacagtacccaattttaaaataattgccattttgaggaggatcctcaatccttctgggccagtggaaaagtcacagtcctccactgctggcgtggaagcctcccagctgggaagagtgggcaggaccattaccgctgcccacgtggcctccaccagcaccacagtgtgggcggcttcatcgctgctgagcctgaccctccactaggcctctcttaacaccgcccctgcacagggagagggtcgcatc

SEQ ID NO: 473388 - DNA, 492 bp, Homo sapiens
cgagtccttggacagctatgtttcaaccctgagaaccaatgggcaactttctagatggacttgtaaaccaaaatgtatccgagacagatctcaatcaatttagaagtttattttgccaaggttaagaacatgcctgtgacacagcttcaagaggtcctgatgacatgtgtccaaggtgaactgtgcaagacacggatcagaagatcccactcggaagcccaagccactgaggccttgggccccaaccacagagccacacagattctcaacacccacttggctagaattggcctcagcctgagagtttcttgggggagggggtaccataaccactgctgtggctgcctgaagtctaagccatctgagctttttaggggaggggccgcagtcaacactgtggctgtagggccttcctgcaggaactccaactccagtgaggagctcagggacagaactctgatctccctgggcctgaacccctagggggaggga

SEQ ID NO: 473389 - DNA, 1610 bp, Homo sapiens
ctcactgtatttgtggtgtctcccgggtcctgcaggagcagtccacttccttcagagggtctgtgggtcgtctcctgaatttctggttcaaagagagagagaggatgtaatggcgcacacttggaagcttattcagaaaaggcgaatagaccaagcacaggtgcaagggccaacacactcttgtattaagatgattgaaattgtctctacaccacacaaatatccaagaggatactccctccttcatcatcagcagcagcagcagcagcagcaacagcaatatcaacaacatcaacatcttcatcatcatagctaccgttttagtgggatgcatgtgcacaacgtgcaggtactaaccggcattggcagtgctgttggtgccagtgatggtgctgaccacagcaagaacactgggggtgagttcagttgttactgtggcacgattgtccatgttagcaataatgtcagctgtgctagtaaaagcactggtttgtattcaaaagtcatgttcctgccagaagcattggtagaggtgctatggatgacagcatcaacattagcctcttcagcatctttggctgtggccattaatatcagcttctaggcgttcatggcattttttttaaaattgcctatctcggtatcaaataattgggagagacaaaggcaatgaatgtatttatagcattttttctttcacagaatccttctcttttgtccttttgaaatctcagtctaagtctctctgcttttctttttctttgtgaattcatctcagtgtcagatgattgcaagcatggacacacaccattgaaagtcagtagggaattcatcatatgatgctattattagctatgtttaaagcagcacttaaacagtgcgtgtttctctattttgcatttgccaaaaaagccaaaattagagaagtatatgagaaaaaatggctagagaaggataaatttgaaagcagataaattatgacacatattttataagaaaataattatgcaaattctaaaacttctaaaattgttagtattctgtttcatcttcatgtggagaacacatggtcagagaagccatccctctctgaacatccttattaattccactgagttgctataggaacagcctctgttaaccaccaatctatgctgtatcatcatgagatccacttttttgtatcttggcttatttcacttaatataatggcctccagttccatccatgttgctgaacacgacagaaaagaatgtaatatacatacataatggaatattattcaaccaaaaagaagaacagtacatgcatatgtgttcgtgtgtgtgtacatataaaaagatttcaatgaaaaacaattagtctgagacttaccatcttagcatgctatcattgcacattatataataaataatgactaaacttagcctggatctgagaactgaagccaatatattttcctgttcttgggctaaaaatattctaaaacatttcctcgatcgtgaacaatactaaaaataagcagataattgaacaaagacggtagaacaggcctctgaattttagcactattgacctttggaccagattttttgttgttgtaaagggct

SEQ ID NO: 473390 - DNA, 818 bp, Homo sapiens
aaggttgttagtgtgggagtttgtcctatgcagtatgtcatccaaaactgtgattcacgtttgttgctcacaaagataaccacaattggaaattctgtacgaatttcagcatatcttctccaactcctcttcctctttgtcttcttcaaattcttgtttttcttcaaattcttactgtctctctctcattattattttgttgctccagtcccatggaattgccaaaggttctgctgtttttctgtttccagcagcagtgttctccacggaccaagcccagattctcaggctccacctgcatccaaaattgacaaagacccccaagaacagcctcaaatcctcaacttatattttttaccagaatcacagaaacatcatctcctagagccagaagaggttccaaatgaactccacgtaacactttacgggaaattagaaaacactgtcaggttaactctaactggttgaacgcagactttggaaccagactgcctagtttgaattccatctcttacccttacctactgattgaccttgggcaaattaccaactctgtgcctcatttcctcatctgacatcagagatactagtagtatctatctcatagtcttatttcaaagattaaatgaatttatctttataaagttctaaagcatcagtccctggcacataatgcactcttcagctcaaattaaattactctcctctcctggagttgtagaaagctactaagtacccccttcttgttataattgttctgacacttgaaacaaatacactttctgttatccttggtgatgtcaacatcatattacttc

SEQ ID NO: 473391 - DNA, 469 bp, Homo sapiens
accagcagtgtataagtcttccattttctccttgccgacataatgatgatagcatcagagaggcggcagcagggcaacgggctgtcccatgcatgtgtgggcatggacagcgtggtggcaatggagtctgtgcatgcccctcacaatttggcagggggaggctgcaggttggtgcacgttagtggagaatggttgtgggcagacttattcactatcatgagaatatcactggaaagaccagcccccatgattcaattacctacccctggggcccttccacaacatgcaggaattctgggagataaaattcaagttgagatttgggtggggacacagccaaaccatatcattccatccctggcccctccaaatctcatgtcctcacatttcaaaaccaatcatgctttcccaacactcccccgaagtcttaactcatttcagcattaacccaaaagtcttcagtccaaag

SEQ ID NO: 473392 - DNA, 741 bp, Homo sapiens
tggtacatccactgacagcttgcatcattcacctggaaaagccacaggcacacaacaccagcccatgaaagcagtcatgggtgctgtaacctgcagagccacagcagcagagctgcccaaggccttgggaatccatcacttgcttcagtgcatcctggatgcaagacatgaatcaggtccctcagctgccagtctgttggagtttgctggggttccactccagaccctgtttgcctgggcatcatcagcggaagctgcagaacagcaaatattgcagaacagcaaatattactccctgattcttcctctggaagctttgtcccagaggggcactcgcctgtatgaggtctatgccctgcccccacaggtggagtctacagaggcagcaggcctagctgagctgcggtgggctctgcccagttctagcttccaggcagctttgtttacctactcaagcctcagcaatggcagatgcccctccccccaccaggctgttgcctcgcagttagatctcagactgctgtgctagcaatttaattccaaagtaactggaaaaatactttgcatgatttcaatacttttgaatatatttatgcttgttgatggccaggtaatttataaagaaaattaaaaattatgaagaaaataaaactcaagaccaggtaatttataaagaaaaagagatttaatggactcacagttccacatggctgtggaggcctcacaatcatggtggaaggc

SEQ ID NO: 473393 - DNA, 513 bp, Homo sapiens
catcaacctcaaagatcgaagatgaggaaaaaccaggacaaaaatgctgaaaattccaaaaagcataatgcctcttctccatatgatcgcagcttctctccggtaagggcacaaaactggatggagaatgggactgataaattgacagaagtaggcttccgaaggtggttaataacaaactcctctgagctagcggagcatgttctaactcaatgcaaggaagctaagaaccttgataaaagtttacaggaactgctaactagaataaccagtttagagaggaacataaatgacctgatggagatgaaaaacacagcacaagaactttgtgaagcatacacacgtagtggaatcaatcaagcagaagaaaggatatcagagatggaaggtcaacttactgaaataaggtgtgaagacaagagtagagaaaaaaaagaatgaaaaggaatgaaaaagcctccaagaaatgtgggactatgtgaaaagaccaaacctacgattgattggtgtacc

SEQ ID NO: 473394 - DNA, 1335 bp, Homo sapiens
tattttcctcctcctcctccttctttttttttttttttttttttttttttgacatctgagtttaaaaggaggaagcacggggccgctccacatctgattggctgtagtccactctctggtactgtgctgacgcagctgacagtgctgagatgattaaaggatttcgagaatctgtgaagaaccaagtacagatatttgaatttttggagggctcagaagaagacaggaagatgcaggagagtttggaacttccgagagacttgttgaatggtttttaccaaaatgctgatagcaatatggaccacaaaattgaggctaaagtggtctccgatggagatgaggaacttattgggagctggagtaaaggtcactcttgctatgctttagcaaagaaactagcagcattttgcccctgccctagagatctgtgggactttgaacttgagagagatgatttaggctgtctggtagaagaaatttctaagcagcaaagcaatcaagatatgacctggctgttactaacaacatacagtcatatgtgttcacaaagagatgggctgaatttggaatttatattaaaaatggaagcagagcatgaaactttggaaaatttccatcctgataagaaaagaaaaaacccattttctggggagaaattcaagccactggctgcagaaatttgtataagtaatgaggatccaaatgttaacagtcaaggcaatggaaaaaatggcaatgcagggggatatttggggctggagcccccacacagagtccccactggggcactacctagtggcgctgtgagaagaaggtcactgttctctagatcccagaatggtcgatccactgacagcttgcgctgttcatctggaaaagcttcaggcactcagcaacagcccatgaaaatagccaatggggctatattctgcagagccacaggggttgagctgccgtccaaggccctgggagagtgctcttgcatgctcttgcatcagcatgtcttggattcaggggcatgtggcaagatctgcagccctctcctgggacatgcagagagtgatacttctccagaactgctggggcttactgacatctatgatgcaactttccgttaaagcacagcagaaattttcctattttgaaactcaactttctcagatgtaaaatgatcccagaagtcatcccagccaggctttatcttggcaaagaaacaactacaacaatcaaaagctaaaagtcaagaacaaaacttggaaaaaatcaacaccctaattatgtacagcattctagaaaatttcaaatcgtttctctgttatcacattatatttgatt

SEQ ID NO: 473395 - DNA, 727 bp, Homo sapiens
tgaggaacctctgggtcaaacgccagacaagttgtcttgcagcaaggcaagctggtctgctagagccagtgccctacaaccctacaaccctttagaattgtttccttcctagtttcacgggccgaaaaccaaggtgtcggcatgctggtgtcttctggaggctctaggggagcgtctgttccctcacctcttccggcctctggaggttgctttgactattagggattaaactactatgaacatatttgtatgtgtgcttctcacgggtaaagtgcataggagtggacttgctgggtcacagaagaccacattgaacattctggatggcctaatgcctaagtgttgcctaatgcctaagcgttcaacccatgaccaggtgtcccactcacaggaaacatgcttataccagcaggcccccttgtggctcttgtctgacctatgcccagtttatttctaccaagatatccattgtgtaagagagctttcccttggaaagaagttagattcagggccaatgggtagggggagccattctagacatacatgctcaaccagaaccagaaagtggagagcaaaagagagagtgaggggcctgtgtgctaaagcttttattggactccaagatattatccaggtgggtttccatgggagttctaatttgcaagtttaaattagacaagctggtgcaaaacaagctggtgcaagttctatgtggccatgctgttaa

SEQ ID NO: 473396 - DNA, 606 bp, Homo sapiens
agcagcttcagcagacttaaacattcctgcctaccagttctgaagagagcagcggatctcccagcacagcactcaagctctgctaagggacagactgcctcctcaagtgggtccctgacccctatgcctcctgactgggagacacctcccagcagaggtcaaaagatacctcatacaggagaggtctggctggcatctggcagcttcccctctgtgacgaagcttccagaggaaggaacaggcagcaatctttgctgttctgcagcctctgctgaaaggaatagcgtcaacatcaacaaaaacgatgtccacaccaaaaccccatttgaaggtcaccaacatcaaagaccaaaggtagataaatccacgaaggtgaggaaaaaaaatcagcatcaaaaggctgaaaattccaaaaaccagaacacctgttctcctccaaaggatcacaactcctcgccagcaagggaacacaactggacggcaaatgagtttgatgaattgacagaagtaggcttcagaaggtggataataacaaactactcccagctaaaggagcatgttctatctaacccaatgaagggaagctaagaaccttgaaaaaaggtt

SEQ ID NO: 473397 - DNA, 570 bp, Homo sapiens
gtcagtcttgacgtgttgagccagtttgtaagcgactgcagggcggcagctgcccaaacaatgagaatcctgggtcatgattataacagcgaactagcattttttgttcatctacaaaatgccatccttagaatatcactccaggcaagcttatcacaaatgaggaaatggagactcctagaggctcctcaagaggagagagtagagatcctcaagaacacatttggttcccctgtgtgtctcatctacctaaaacagagtctgcctacaacagcatttaatgaatatttgctgactgaacgaatttcagaagaaactgaagaacgtgggccaaatacaggacagtgtcaatgcagaaaagggacaagatataagaaatttaaaaagcaccaagagagagaagggagtggccaaaaaacaagtttgagagagtctgcctatcacagatttcatgcagcttacaaatttgtgaatggtgtttgagtgaaatgagagataggacaatttgaaaaattggcctttgtaccgtataacattctattaaaacacttcacatttaaattgtgtgtt

SEQ ID NO: 473398 - DNA, 642 bp, Homo sapiens
acaaattctcataactttcctcacctcactttctccccatcttttctcacactgttctctccagtgtcagggagtcgaactactgtgctggagtctggattgaggatgaagttggggaatgggcaccagtcaatgtccccgctggtcctgggtgtcctgggctgtggcctgctgactcagctctggccggcctgggaagcccttggatcccttcatccacttgagaagcttccacacagcctggaggatggactgccctgtatcaagctggcgagaggaaggacagagcagaaggagcctcgtggagcccctccagcttccactctgggagggcaggcacgtggttttattgtcccacgaagactgcacacagtgagggccaaggtgattccctacaaggaaatcagagcatggttgggaagtgacactactgagtgcctcccaccattaaacaggattcagtatagcagatttggcgctttctgtgatgaggtgaattgccactttggtcttctttcggtttctgcaacctcttcgcgtgtggtgccagggaatgctctgccccagaaccgttgtttggctgactcctccttgccattctggtctcagttgagacgttgcctgccctaagcgggctctatt

SEQ ID NO: 473399 - DNA, 747 bp, Homo sapiens
tctcgctgatcccacagcttttgtttatagtcatgcttctaccctgttggagtcttatcagtggcttcctactggctacagtttggattccttggcttggaggttgcatcattccccagctggccccatctccatcttccaccacacctcttcacaaactctatgctggtctgcatcctgtcccagtaaaccctagaggttcagaccaagcccagctgtgtgctctttccagctgccacatgccaaatgcagcggctgcctgctcagttttctgtccagagcacagtgttccctcactacagggatgctcttcatggtctttgaatggatcaacagaagcaccttctccagaaagcaagtcctgcttcctctgcatggaaggtggccctgccttatggcagttcagcagctcctgcaaagtttctactgttcagtttggggaacttcctccaccttggacagaatgctgcctgcaggactctggctggctttctgccagaaacctggagcaaggggctgcctttggggtagagggctgaagtggtctctctgcatgtgagctcatatcctgttcattcccaggaatcctgacatgttcttcctctatccacacagcctaaccattttccaagtcttctgctcaattccccctcctccattaagccctccttgatcactgcctggaagccctctcaccttgaggtcgcacagcagcattgttatttacttcctttcattgttgctgtg

SEQ ID NO: 473400 - DNA, 636 bp, Homo sapiens
ctcatggctcaccacttgctctcctccttgcccctcaccatgaacgtctttgacatgaggctagctgcctctccttccttctgcttaaacattctagagaatcatccaaatcaccaacatcaaagaccaaaggtagataaaaccacaaagatggagagaaaccagagcagaaaagctgaaaattctgaaaaccagagcaccttttctcctccagaggattccagctccttgctagcaacggaacaaagctcaatggataatgattttgatgagttggcagaggtaggcttcagaaggtcagtaataacaaacttgtccaagctaaaggaggatgttcgaacccattgcaaggaagctaaaaaccttgaaaagagattagacaaatggctaactagaataaacagtgtagagaagaccttaaatgacctgatggagctgaaaaccatggcacgagaactcttcagtagccgatttgatcaagtgaaagagagggcatcagtgattgaagatcaaattaatgaaataaagcaagaagagaagtttggagaaaaaagagtaaaaagaaatgaccaaagcctccaagaaatgtgggactatgtgaaaagacaaacctatgtttgattggtgtacctgaaa

SEQ ID NO: 473401 - DNA, 926 bp, Homo sapiens
agtgttgctggctttgattttttttttttaaagaaagagacttctgcgggctctctctctctctctctctctctctctctctgtattgtgaaaggaggacatctcagagggtcccacgcgcacagagccttgctcattgctagcacagcagtctgagatcggactgcaaggtggcagagaggctgggggaggggcgcccgccattgctgaggcttgagtaggtaaacaaagcagtcaggaagctcaaactgggtggagcccactgcagctcaaggaggcctgcctgcctctgtagactccacctcttggggcagggcatagccaaacaaaaggcagcagaaacctctgcagacttaaatgtccctgtctgacagctttgaagacagtagtggttctcccagcatggtgtttgagatctgagaacggacagactgcctcctcaagtgggtctctgacccctgagtaccctaaatgagaggcaccccccagtaggggtagactgacacctcacatggccgggtacccctctgagatgaagcttccagaggaactatcaggcagcaacatttgctgttcagcagtattcactgttctgcagcctctgctgctgatacccaggcaaacagggtctggagtggacctccggcaaactccaacagacctgcagctgagggtcctgactgttagaaggaaaaataacaaacagaaaaggacatctacaccaaaaccccatctgtacgtcaccatcatcaaagaccaaaggcttcagatgacaaacttctctgagctaaaggaggaagtccaaacccatcacaaagaagctaaaaaccttgaaaaaagattagacgaatggctaactagaataaccagtgtagagaagtccttaaaggacctgatggagctgaaaaccatggcatgagaactac

SEQ ID NO: 473402 - DNA, 677 bp, Homo sapiens
ctgcgcttcagtccagccttgcacaacaaataattatctggtccaaaatgtcaatggtgttgtggatgagaaattgtgatctagacatcacatatgatcacttcttccatatgctgatgttcctgcagacaaattctgatctgatgtggaaaggtgtaatacaagggtgtgaataccaggaggcaggatcattggcagccatcactggctaccaccactctccagtggtttcatcttgcaattggaatagaaagcaaactccttgccatggtcttcaggtcctacctgatttagcctcagcctcctcctacctcatgtcccaccatgttcctcttcttccactaggctctagccatgctggctttatgtctcctgaacacacgaacttgaccctgtttcaggtctttgtgaatgagtcagtgcaagtttccttccagattcctgggtcataggctccagagaggctttgaaaatgggaaggcactaaatcaggatataaattcctccagtttgagaggaaggtgatatgaaatttcagagtaaaaaaaaaaaacgattttactcaattaacattttcttgatggtaactcatacatgtcatacatgtgcatctttaaccaagacttgtcctctacctgcagcttattagacaacatattgtgcacattgctgaggtc

SEQ ID NO: 473403 - DNA, 814 bp, Homo sapiens
tcacggggatctggtgatcattgacacatccagcagccagtaagatggaaggcagaggctacaatttgggatacatgaagaatggctttgaattacagacagtggcaaaacactttgggagtcctagctggctaggagcagtagggacgtgcgaagtcaccaatgtgcctctcagtgcttcccaggggaccatggaactgtgtttgcccccagagttcaggcacaagcaggagcttcctggggggacatggagcagtgcctgtgccacagacttctggctgaagcagggccactgggctggaagctggcaccgagccttgtatggtaatggggagtggaccaatatgacggttcctcagcaccgtgactgcagcctctatcagggcatagcagttggtgctgggctgctccaaggttcaaagcctgtggaattccctatggacttgagtgttgcttctgcaaaaaatccaggcagttctctgggagctgacagcagcacggcacaagacaggagtctagcaacttacctgtacttgagcagtagatgggacatcaatgacaaagaagccttttgtaatcttcgcaacagatccatgactaatgggtaaaagttacaggatggcatatttaggctcactgtatctaaatttaaagtaagtacatttaaagtcatctattttccgtgttaaagaattttgaatttattatttaggcagtagtaagctacagatgggcttttaagcaagagtatattggatttggagaaggtagggaaaataagataaaattattaccttagaagattgttgtaaat

SEQ ID NO: 473404 - DNA, 608 bp, Homo sapiens
aaacggaccaatcggctctctgtaaaatggaccaatcagcaggatgtgggtggggccagataagagaataaaagcaggctgccctacccagcactggcaacctgttggggtccccttccacactgtctgcagcttcactcctgaagccagcaagaccacgaacccaccgggaggaatgaacaactccagatgcgccaccttaagagctgtaacattcaccaggaaggtctgcagcttcactcctgagccagcgagaccacgaacccaccagaaggaagaaactctgaacacatccgaacatcagaaggaacaaactccggacccaccgcttttaagaactgtaacactcaccgcgagggtccgcggcttcattcttgaagtcagtgagaccaagaacccaccaattccggacacactaacttatgccattcattcaacatttaagtgactgaatatttgactcaattcgctgcttcagtggatgggccattgtagacctgggcagcaactccctgggtggcaagtccaagatactggcttatgtttgcatttatcacttgtgttttagattgggcttctttatctatgtgccttctttagctcttcct

SEQ ID NO: 473405 - DNA, 632 bp, Homo sapiens
ttgtttgtttttttcttgatttaggagcaggagccggaacgtgaagcacatggctattggaggtggaaaggagtgtcctgaacttcttgagaaagaggcctgcattgttgaaggagaacttctgcagcaatgtcccaggagagttccaactggcatctggtgggtgcccctctggggtgaagcttccagaggaaggaacaggcagcaatctgctgttctgcagcctctgctggagatacccaggcaaacagagcctgaagtggacctccagcagactccagcagacctgcagcagaggggcctgacttgcaaaaatgctgaaaattccaaaaaccagaattcctcttctcctccaacggatcacaactcctcgccagcaggggaacaaaactggatggagaatgagtttgacgaattgacagaagtaggcttcagaagatgggtaataacaaactcctcccagctaaaggagcatgttctaacccaatgcaaggaagctaagaacctaaaagtttaaaggaatctcactaactagaataaccagtttagagaagaatataaatgacctgatggatctgaaaaacacagcatgagaacttcatgaagcatacacaagtatcaatagctgaatc

SEQ ID NO: 473406 - DNA, 3841 bp, Homo sapiens
cagctccctcgctcaggggagtcgcagcagtaaattggttatgctaaacactccacctgagggcttcaatctggatttttttcacatctctagacctgtggaaaaggcattatgtgtgggacccgccccgttgccctctcagctctgcaatatcccttgctctacggactgcatagtatcttcctggtcagcctggggcctgtgcatccatgaaaactgtcatgatcctcaggggaaaaaagaaatccttccattaggaatcatggaaggcttgtggctgttggttattcagagtacattagaaaatcagccagtgttcacagccttcacacccttccatcgcgtcatgacaggcagacaagggaaccatgatcggcaggttggtgcttgtcaagtaaagctaggatgcctttcagaggaatttaaattgggatttagaacgaggcagcgccatgtcctcatggaatctacagggcctgcagggcattgccctcatttggtggagtctgttccttgtgaggatccaatgtgctaccgatggctggcatcagaagggatctgtttccctgatcatggaaaatgtggcctgggacatcgtattctgaaggccgtctgccagaatgaccgcggtatgacccagtgacccactagaggtgttaggatgttaagtatcagccaaataacacatgaccacccttcaatagatcattctcatgaggaagagaagcacagcctttcttatccttgaatatttatgtttacatcgagtgacacattgctgcaaagtaaggtgccgtgacttaatatgggtccacatactccatgacagaacactatttgattgtacttaaatgcaatacagcaaacctagagatttcttaagagtttttaatttgtcaaaaaaacagagaacaaatctcttggatagtgttcaacttatcaatataaaacaagtaaaagccaatgtataacatgcctttatatattataaacaaatgtcatcttgttaagaatccaggactgaaacatcctgcaagttaaaaaaagaaccaaacaaaactaggtggctttttgtttatatgacattagagttgaatcagctatagacacaatactaacatttccaaagaactgtttttaaatacaagttgtcaagatttacaaaactattaacaatgatgtctttcctcaatcagcaagcacctgtattctccctgttggattgggctgccaaaacagacatcaataaacctgttttcaaatcttgctcatggtgcttgaaatctcagccagctttagcaccagaattattcccatccttgtttaaatcaaagtagataatggctactgggtcgtgacaaatggcaggaatcattatttacatatttaggtgaagtagccaatgcaaacttagaggtgaaataactcacctagagacacccaacttagaatggcaggctagaattcaaacccaggtctatctgcttgtaaattagtgcctttagcagtattcatagcagtagaaccttgatcaaatatattgatggtgatacatttctagtcatttaaaaatttcctcagtttgtgctagctctatggaaaccaaaaacatctcagatgctaaaacatctgttcagctcaattatgctcatttcagttcaattagcatttattgactacttactatgagccaagtactgttctaagaagtggggattcagaaatacataagatacatcattttctttggccaaggaggtgatataatgggttaaagacttaagacattatgcaaccctgaatttactgagcagctgtttccctccatttgttatgtctcaggaaaaaatgcatgtgtacaaataacctaataagtgcagtttaactgcctagaaaaattagaaaattattcttttaatcagtaggccagatagaataagataaattatcagaaatatctaatgttcttaaattgcttccaaataaactatgccttgcaggcaataattgtcaatataattattaatgatataattacaatttgacctcttaagtagacatccaataaaataatccttatttcatggacatgtttcttttttattttaatgcagaggaaaaaggagtacatgtatttcaaatgtctgtattcttcatctttttttactctgagcacacaacttgacttaaatgtcactattattgttctgaagtgttgaggagaatttgacaatgatataaagtgatgtttggatttttgaaacatttgcttaagttcactccttgtgttttgaaatatctcagcatatattttatttatatttaaatatatcttaagtgaaagtgtgatttctttctgaattattagagattggctagaaacatggcagtgccaaattgagtgttgtaataactggtagatttgttttcccaagtacaagaattcttagatgttgatgagctctacaaatttttcataaattccaaaatgtagaggatccaaagacaagaactggcaatatcatggttgctataatagcaggcatataattcagacaaaaacagaagaggttaccaaccaactcaagaaaaaggcaagctcatcttgctttttgcatactttattcaaagtcaagcttcctagaggcctgagctgaaaaatgtgttagagtgaaaatggtttgccatggtctgtaactttcaatatgttactgtcacaattatatcataaaaactagtaggagcaaatactgtaaaagcaaaagattgcttatgcattaagtagactaaacatctttccctttacttctcatttacttcttcatccaaaatttattgagacctactatgtggctgacattgtgccggatgtttgcacaatgttataaacagcagtctcaccttcatcatggtgcattatactaaatggatactaaataatatttcagccacaaggtaattttcattgcatcatacaggttgacaggatgttatagtgctagactctcagttgttacttcagtaaacattcactatggaaaaattgtgctatagaactgtaggtgaaaactagtgttggtgttgtatactaggacacactggttggagaattcactctatccaaaattataaaattatatgttctaatacagaagtttcaactctctttttttgtgtgtgtgcatagagcaatgtattttctgttccttcctgaaaatttgtatttttaaatacaaactgaatacagcaccacaatctatacaggaaaaagttaataagatgacttcagcaaaattaaaactttctctgcagaagacactgtttagaaaatggaaaaaaaaaagactctaaaaggacattttcaaatcacatgtgtgacaaataatttctttctagaatgtataaggaacttacaaaactcaacaataaaaaaaaatcccaattaaaataataagccaaagatttgaaaagactcttcaccaaagatatacggatggcaaataagcacatgaaaagatgcatcattagtcaataggaaaatgcaaattaaaaatacagtttaataacactacccacctataagaatgacaacaattcaataaagaacagaaagaaactggttataccaagtgctattaagggtgtagaacagttagagcaatgtagaactctcaaacattgctcatgggaaggcaaaagagtgcagacactttggagaacagtttggcagtgtcttataacatctacacttgccatatgattcagcaatttcacccttaattatttacccaagagaaatgaaaacttgtagtaatcttgcatagcagctttatgcacaatc

SEQ ID NO: 473407 - DNA, 808 bp, Homo sapiens
aaaccaggtcttcccaggcctgttttatcatgtggggatagtcctgaaattcctgagtgtccctgtatgggctgtggaaatgttgactgctccaggaaactagaactggcttgaagtcaggtgtaggtggctgtgaagtatgtggaccagaagataggaaaactgtgtcatggaccctagaaattcgcagtggctgcagaggaagtcttgtgaaattccctgccgaatggactgtgtgctgagcgagtggacggagtggtcatcctgttcccagtcctgttcaaataaaaactcagatgggaaacagaccaggtcaagaactatcctggcactggctggggaaggtggaaagccatgtccccctagtcaggctctccaagagcatcgtttgtgtaatgaccattcctgtatgcagcttcactgggagacatcgccttggggcccttgttctgaggacacattggtaactgcccttaatgcaaccattggctggaatggagaagccacgtgtggtgtaggcattcagactcggagagtcttctgtgtcaagagtcacgtgggacaagtaatgaccaaaagacttaagagaaaaagagagagaaagggccatatcatggagagttcaagtattacccagtgagtgtttatgtctattaactgtctgtttaaacttgctagactggtgttttttcaatcataattttttcaggtgctttgtctccatgaagctttgggtccattacttatttcaacatctcagcttatcatatgaaaatgaagattataatgctcatcattgctgttaaga

SEQ ID NO: 473408 - DNA, 884 bp, Homo sapiens
ctgagcaccagtattccttgatagagaaacagctagcagctatatatgccacccttcaggcttgtgagagtatggcaggatgggctgcagtcatcatgcagatgacttacccgatagtgggatgggtgcattcatgcataacaatcccctggactgggatggtgcagacatccactttagcaaagtggggcacctacttagaacagcagagtacactgagtacaagccccttaggagcaaagttgcaagaggtcttgggatctgtagtcctaatgcacaataaggccatggggtctgaggcacccctagaccctgagccttcactgtttaaggaagggtgtcccccattcccaatgggacatggtatatggatgggtctagccaggatgctgctgctgcctggacttctgttgaagtccagcctagtactgacaccatatggtttgatagcaggtgtggatatagtagccaatgggctgagtttagagcagcatagatggtgatcaccaaggaagcgacacctatggtaatctgtaccaatagctggatgttctaatgaggcttgaccttgtggttaaccacctggaaaatacagaagtggctagttggccaccaacccatgtggggccaagccatgtgacaagacctgtaggtggaaggatgacctcctccaaccaagcatgggacaaatggtaacctgttgttgcctgccccagtgcccctaaaggaggagcataaatttaatccatctatgtcttttaaaaggaatgtaaatttaatctatttacattcaagttaatacttacatgtgaggttttgctcctgtcatatttgtctttaggtgaaattgtctttaggtgaaattctgttgtgttgccattaga

SEQ ID NO: 473409 - DNA, 1588 bp, Homo sapiens
cctcctcctgcaagctggtttctgattcagcagctctgcgatgggacccgataatttgtcattctacaaaggtatccagtgcttctgctgccgctctgaggaccatactttgagaagcactcgcctaacagggaacattgctgagatgctgccagattcccaaagtactgcagattatcattcaagctcaacatggctacaggtctcgagacttactgacaaggatggagactggtgtagttgctgctgttcaggctctcaccagttcctcctgatgctgcctgagaaggcagagattcctcaggtgaggcacctggtgcttctaagtggaggaagaagcttcatggcctgggttgcctttgtcttctgcccacccaattcctcttggtggaggaggaaaatctcaggcccagcagaaaaggaaaactcttcctgtgctccttcattgccaacagggctcccagtcaatgcccttcggtagagctgattgcatgttccatgacagctggatcttgtctattttactcactgcagtattcccagtgccaagcacactacctgcttttcaaatgaataaatgaatttcactcattcaaatatggaagcccaaagcaaaaagctccttattctaaaagtaataataattaaataatttgaaaatggttagttttaaaattattaggacaaatttttaccaattatatttttattaaatatttggtcattgcttgttctataaaaatgaaatgtatctgaaatgttgatttggattatattgcatgttcataatctcaaatgttacgtctctacatactatctgcaataggaattaaaaaatgcatttccagagtgtccttttacatagtgccttatacaggggagtgcttactaatattagataataatcagagatcaagaaaattttcttcttggctttgttcttgtgttctctttcatcaatgaattagaatatgctgattaaaaccatgttaaagaactcctagaaagaagcaaaagcatctgtgactagtgtatctctacttcatttcaattgtggtctccaaatttcatcttacataagtattgtcttatgtacttatttttagcagcttcttgaattatataacacagggcaaaaatgcttatttctcactggatttgtatgacttctagtaaattaaattccagagataatttggaaagaaaaataaaaagtatatgtagcctgttccataggattttcgttagaacgcccttgagaatattgagtgtgtgtgtgtgttacactatcaccttacttaaattcttaaactagagttgtttcctctttctattcactgctcttgggatcaaccaccctcctacttccttgatttatcctaggattttaactttttgtaattttcctttcacaaggatatggtttgaatgtcataacaactcaactgttataaaatattttaaatccaaatatcagagaaaagcatactgatatttagctttgaaaaattttatgtttgagttgtaaaatttggttagtatcaagttatgcatggaaacatatataatttatataaatatataaaac

SEQ ID NO: 473410 - DNA, 3546 bp, Homo sapiens
tgctcatcaaaaactttattttccttgctctgggagagaaaaaaaacctagtatgtccggagttggttccttccggtgggtttgtggtctccttgacttcaagaatgaagctgcggaccttcgtggaggattcaggcaaacaattgcatctaaagatgcaattggacaaagatcttctaagcttactcgtgtgggcctccattcctcacgggctattgagctgaaggcctcagtttcttactggctattttttgctacagaactgcctcatgacaggacagctggcttctttaagatgaaagttgttactgataatttgaagggcaggggtgaaactggcattgaagtctacaaaaaaagtgaactgttttatgtagtagagacaaaatatgacaaaacagaaagtcaattaggtcccggtggcaaatggtggtatcattttttcctggcatactaagattttaaatataatataaaaagagtaaagtttgaagaaacattacaatcatttttttcaataaactttccaaataagaaataccttttatgccatctttgaagggaaattggatacctacagtaaaggacaacatactacttcttaaaatagaccaatctctaaactggaaagtttaagtttttgatgttaccagctaacgttgtagataaacatctctgtaactgccaagagggaaactatactttcatttcttttcatgtctcttgttcaagcacatgttattttaaaattaaaatagcataaatagtaaaacaaattctttagttgcatattgatgatttaagaataaattgtgatttcagaactgtgtaaatggatataatacttgcttattaacggtgtgattattgtagcaactttagtggactcattacttggttggctcatcttgaccttgtagtgaccgtaaacaccaatgtattttatgtgattttataagtgaatactaccaggctggtttctcccttcttgaacttttttttttttagcataaaagaatgaattaaaaatagctgtgttaagtataaatacattgctttacaaatttctagtcattcagcattatttaacaatttgaattgtgagagatagagaaatagttttgatgactgaatcctagcatttactccttctcctatccaagatttcccattaaaatagcatactaaactggattaatttaaaaacagaaaaaaaatggattcatcgtcaaacaaacattcattacccacatggaaatctttatcaaagttagtttgtggaatataacttgaaccaacattgtaagtatagcatggtagattccaacttgaagttaaatatttatacatatataattgagctgagaacacttatcacgtggccagttctatgaagcctggaaaactatgtcttttatttatctaaaggctttcgaggccaaagagaaggtaagaaatagcacttcatgtgaatattggagatgagagagtatatggatactctgtattccactcaacattttttaaacctaaaactgttcttcaaaataaagtctattaatttaaaataataatcttataatgtccattgaccaaaattttcactaaaaaatgggtatgcaagccacagacagggaaacatatttacaatatataaattaaatatttatttttagaacatacacagtatccctgcacatttttaaggcaatcaacccaataaaaatggtgaaaatgtcaaatacctgacagaagatatatcaaatagcacacagccaatagaaaaaaaacaaaaacaaaaacaaaagtaatcaacataattaatcgttgggggaataaaaatttaaaacaataaaaacagtcagatgccaataaaatagctgaaataaggctgacacactaaatactggcaaggatttgcagcaactggattgctggcaggagcgtgcacaacaaggccagagaaccattttacagatttatgtctgcttgtattacacctattgctcagaaataaaccagggggagaaaaaagcctgctgtaatacacagcatgaatggatctcatgaaacattttcattaaatcattcagacatactaataaaaaagcagtttctcttacattcctaggggaaaaatgcaaggaggagaaaaacaaacaaaagaaaaacggaggtgacattaaccattagtagatgtaaagtattgttattaagctcactaattcccactgtatcccattgggatggttatcattgcccacattttatatgtggagaagttgaaatttagagataagttcaaaatcacacaaaggagacaaagctggaaattgacatctaaccattctaatggaaaaattatgttctcgttatggcagaattgttctttcaaagcaattattttactaacgaaagagaccaacaagaatcattatgtttctcctcaatatttagtaagacctcacttctttggagctttcagataaatgaattaatataactaactaaaaagcatacatttagaagctttaaatgtaaattacgcatatgagtttaaacatattattttaaaacatatttagtagaaaaaagaaaataaatttagcaggaagtaggttgttaaaaatttatttttattagcataaatctggatataactctatttggctaatcagtatttgatgagggtgcctaacaaaataaaaccagtcattaatacatgttaacaagcacttgttatgcttacagttctctgaaacccactgtaatgaacaagataatattcctgaaaccgtggagattacagttttacataaactgaagggaatggggagagaaaggggatactgggtatctgttcaataggctctaacttcttgactaaatattcataagaatataaaattgtctaggttgaagttattatttttatgtgagtgatatgactaaatttttaaatgaaattactatatgtatacaattacaaagataacatatttttagacatttatggaaaactacattttctaggattttgaaaatatattaatttttcactctattgattttaaatcatttagaactctaatattaagtaaaagaacactattgtatttgaaccactatattcataatttattaaactatagtctccaacaattgtttgccccaatatggaaaaaaaatcctatttgcaataattagctttagtcataataaatgaagcagatttattgttagaagactcagaatccctctttggaaaaaagactgtttcgtatcttccacatgtgaatgctaaggctgtccagtggaatgttttccatgaatcatgctctgcgaggacattccttctccattacccccattagctacatccaaagaagaaacaggataaaataccagttataagtcaatgttaaaattcagactatttcatagggcaataatatatgaatattatgctgcaaaaggagtaaaatttagaggaaagaatattaattgaacaaaaatgtagaggaacaatattaaattgaaaatatc

SEQ ID NO: 473411 - DNA, 570 bp, Homo sapiens
gttttgaaatttgccaggcagtgtgaaaagaaaatatggggtcagagcccccagacagagtccccactgtggcactgactagtggagctgtgagaagagggctgccattatcaagatcctggaatggtagatccacggacagcttgtactgtgctcctggaaaatcttcatacactcagcaccagcccatgaaagtagctaggattggggatgtaccttgcaatgccacaggggcagatgttctcccttgtgggatgcaacattcaagaaactcttggaagcagcaacgtggccctcaccagaacttgggagacttcctagccttcaaaagtctcccagacatttctagacacagcctggacatgaaaggaactcacttcctaaaagggaaagactccacatcctggatattggatgacatctctcgacccacttggggccagggagatctcaccaccctgaagggaaggacacaagcctggttgttggttgttgtatacaagatgtacacaaaatctgctgattatagaacccttgggccttgagtgaacataaatggtagcctctcag

SEQ ID NO: 473412 - DNA, 632 bp, Homo sapiens
aggtgatttcattgaccccaattttggaagcaaggagaaacaagcatggtcgcattaccagccaagcctctcaaagctgtagaggtgaaagctgaaggtgagggtaattcagaagaggaagtgtatgggaagagaatgagttacggttgtggcttcaagaccatttgggatcgcttccatcagtgttgtaacgagctcttctatgcagtttgtactcactgcaaaatgtaccgaagccaagagcaaggagttggtaatctgggcacccacagttgtgatgaggcatcttcagttcattcctctaaagctgctgcaccccttggacaagggccaaacctttataaagccaaggaagaatggtggaaaagcacatacgtctttgtggctccatatgcaaatggactggtgcatgactcagtcgtagagagccaaaccaactatggcatggaacagatggcaggatttagaagattctactctgtatctccagcacctaatataattggtgtaaaaaatttaacatacacaaacttcaaactataggagcgagagaaaaaatatataaagatgttaggttgctgactttgaagatgaagttaggggtcacaagtcaagatatgaaggaagcctct

SEQ ID NO: 473413 - DNA, 1424 bp, Homo sapiens
ccaggtctataaaaccggaaattgcggttatgtttggactgaagtccactgaagaagaagagactacacaattccagagtttaggatgtggattagtcggccaaagctcggagaagtttgatcgtctgaacccttcttctctcaactcatcaaagtcattttccatccagctttgttccattgctggagaggagctgcattgctttggagggggagagcaccccaaatgcaatccatgggccattgttgtctgctctaccttcaaaaggggtctagaacctaaacaattcgcctacatctacgatatccctggtccaacccaatctcacctccatcttggattttttttcatatcatctatcccggaattcctacttccaccattccctgctgcagaagccagagggattgttctaaaatccaagtcaggtcatttcactcctcctctcagtggagcagcgattcactaactttccattgtatgaataaaaaagacaatgttctatcttttttttcacttaagctttttattttgaaatcattcatcaagtggtattttatcttaacctaagatgtctttaataaaaaggtatcaatgatgtgataattcaattcagaagcctccagagatttgctcatgttatatttgtcacacaaaagcagagatctactcaagtggaatgtgaatcactgtgttcatttatatttagcactattaataaactatgaattgaagatatgacaagtacttcttaacatggtttatacaatacataaatataaaatgtttaatatatattaactataatgatacatttatgttatatattttatgatacatttaatttaaaagtacagcaattaattcatcttggatgtcaagtaataatcacatctctgcaactttgtagttaaattttatgtttccttctttccccccttccttctttctttttgaacaccatgaactcctcaagatgcactgttgtatcattttaatatataataaattgcattgcttttagcatatgatgtgctttcaatattttgtagtagatgggataaaaaaattataatttaggtctaccaaacaattttatgtctttacaaaaaccctggtgggattttctaggttataaagattgaatgaatcctttcataccctgcattggaatgaggagtactaaaagctaaaactatccaataaacctacctcctttattttacagtctcttcaggcttgcagtatatatgaaaatacaatgattacttagtttgttgcatcaagaaggtttagagtattctcttagttattctgaatctttccatatgaagagtgtaagataggtatttacacaggtatcaggtatttggttgtcatttcctaccgttactgaaatgtagcatttgaaaaattattgctc

SEQ ID NO: 473414 - DNA, 533 bp, Homo sapiens
cgtaatcaatgttgtcctttttcaaagctgcatgatgcaaaaagccgaaggctcgtttctctgcaccagaagcgtgttatattccaaggtcctcagacagctccccttcgccctagtgaagtatactcctatttatttgcaaaaaaagctaagtgtaaaacaggcaggttcttcagggggtattcctgaagtaggcgttgttatcataggagatgacagttccttgggtgatattgcccctgaagaccctttaatgggacaagatgtggaggtggaagacagtgatattgaggatcttgaccttgtaatatcttattgtactgtactgagggtaactgacactgtggatggcaaaactgcaaataagtggggactactgtattcatttaggtttgtcaggtttttcggtggactgacttttatcatgttaaataatgtttcactgtctgaatgtactgcagtttatttatccattcatttactgaagatatcttgattatttgcacatttgggaattatgaataaaactaaag

SEQ ID NO: 473415 - DNA, 643 bp, Homo sapiens
aaccatttgggtccagcctccaccggtgataaccgggcaagcagggtctggagtggacctccagcaaactccagcagagctgcagcagaggggcctgttagaaggaaaactaacaaacagaaaggaatagtatcaacatcaacaaaaaggacgtccactcagagactccagccgaagttcactgacttcaaagaccgaaggtagctaaatccatgaagatgaggagaagccagcgcaaaaaggctgaaaattccaaaaaccagaacgcctcttcttcaaagaatcacaactcctctccagcaagggaacaaaaccagacggagaatgattttgacaaattgacagaaatgggcttcagaaggtgggtaataacaaacttctctgagctaaaggagcatgttctaacccaaagcaaggaagctaagacccttgaaaaaaggttagacaaattgctaactagaataaccagtttagagaagaacatatatgacctgatggagctgaaaaacacagcactagaacttcatgaagcatacacaagtatcaatagccgaatttatttatgtcaatttttatccacaacaggaagtgtatactatttaataaatgatagtctaatgaatgaatggatatgatggaaaga

SEQ ID NO: 473416 - DNA, 850 bp, Homo sapiens
tgcagctgctgtaccagatgtggtttcattgcttaagcaaataaatacatctgctggtaccttgcatgcagccattgacttggcaagttcctttttctccactcctgtccataaggtccaccagaagcaacttgccttcagctggcaaggacccagcagatccaacggtgcttgaggtgtcagtggcaaatagggatactttttggagcctttggcaggctccaataggtgaatcacagtggaggcctctagaattttggagcaaggccctgccatcttctgcaaataactactctccttttgagatacagctcttggcctgttactgggctttggtggaaactgaacgtttgactatggatcatcaagtcaccaatgtgacccgaactgcctatcaggaactgggtgttttggacccatctagccataaagtgggtcatgcacagcagcactccatcatccaatggaagtggtatatatgtaattgggctcgagcaggtcctgaaggcaaaagaaagttacataaggaagtggctcaaatgcccatggtctccactcttgccatcctgccttctctcccccagcctgcaccgatggcctcattgggaattccctgtgatcaattgacagaggaaaagaagacaagggcctggttcattgatggttctgcacgatatgcaggcatcacctgaaagtggacagctgtagcactacagccctttctaggacatcactgaaggagagtggtgaagggaagccttctcagtgggagaacttcaagcagtgcacctggtcgtgcactttacatggaaggaaagatagacagatgtacaattatatgcgaattaac

SEQ ID NO: 473417 - DNA, 796 bp, Homo sapiens
ggaagaggggcacaaggaatgtgaatgtcaggccccagtggtggaagcagcaggccaactgtgcctgtttttgggtttgcaggcagtatacataggcgctgttgtaagcagtttctagcaggccaattcttgggcttccaagcagcttgcttgggtgctgacagtggacaacagtgggtcaagtggatggaggggtccttgagcccctgggcagcgagtgtggcatggatgatagtagtagtagtgatgggacaaaccttgggctcccaagcagcacatgctggttttagcattggctgcaatgggcaaggcaaccagttcccatgttcccagggagtgtgcaagaatgcagcagccctgctgctggtggaagaagattgctatcagtggcagtttctgtttctttcccttcatctgaagattgatttacttctggttcatgcatgtgctcatggtcactaccatcagaggggtgacagaagtcgcacagctgtgattgctgctggcagctactccataaccccaggggaactagccttcagaggaagcttactctgaggttgcaggggagagagacagagagaaattaggcatttggtgacatcattgagctgatggatagaccaaccctgaaacttttcttattctgtactttcagtgtacaattcaataatttttagtaagtttacagaattgtgcagccattaccatgatccagttttatttttatttatttatttatttatttatttttattatactttaagttttagggtacatgtgcacaacgtgcagg

SEQ ID NO: 473418 - DNA, 883 bp, Homo sapiens
caccacagcctaccgcgcctactgcgcccccaatatcgccttatgaggattttgtggaggatctccttcccccagatccaaaaaaatccctctaaaatgcactatcagcagccgttgcggcccaaacctcctgtactatctcagccttgctatagggctctccaccatccgcctgttcagcccggttatgaggctctcaaccctatccctgttcggctcgataatgaggccctcaacgctatctctgcactcaattctgcctttctttctatgcatcaggctcctcagaagtctgacttgcagtcagtgcaccagcctggaactcaggccctgcagtcaatgcaccagcctggaactcaggccctgcagtcaatgcagcagcctggagttcaggcctctgaaagacctgcacagcaggcaaccgcgcgtcagcctggcttaaaggctctcaatttctcctctattcaaaactccaatttcctttctgcttctgggccatttctcaggcaagggaatatggggatcccgaggcatggcagtttcctgttattttacaatctgctatacctgctgcctctattcctgccgcccctgctccagctggctgcaccagttcagccacagccctttgaccaagctcagcaggcagctgatcccgctgccgctgctcctccagacccgcagcttaatgatcaggcccctcagcatttctcctcctcctctcactcttctcccaactttagaaagccctcttgggaatgattttattgaaagcatcagaacgaagaagatggctgcatcatttctgtagtgccaggggtcagaatctttgactggtttggtgtaatgtgcacatataaaatttcactcagtccttattcat

SEQ ID NO: 473419 - DNA, 470 bp, Homo sapiens
ctctgtgaatttcagctaagaattctaaagcaaaccataaatgaaaacggaatctaagaatggatttgaaccctgtgctacaatgtctaaaccaggagtttccactttttgtggaatggaataataaggactcagacatgagtctatatggattgggcaaagaggggccatttatgcctgagaccatcatcctcaacttgccctcaaacttctttgccccttctagacccatgcatcatattcatatagcacattatctggaaagacaaagaacacaacttgcctggcatcccacgcttcaccctgacagaatgggcttaggttacagatcaagccaggaactagtgactaaggccagggaaggggaatatgatgacagattaagccaatcaagggtcgtcctagagcttcgccctaaacacatgagcttcctaggagaaagaataagtattattagaaaagaataagag

SEQ ID NO: 473420 - DNA, 1954 bp, Homo sapiens
ttgacaccttcattacagtcttgtgagaccctgagcagaggatccaggctgcagccacagacaggcactcttacgctcccagatggcggtgctgggaggtgcccctcaccttgggcctggaggctctttcttcctatgcccctggtggagctggggggacacctccaagccgctaacatgtcacaggaaatgcagggagacaggaagattgcatggtctagaacttctctctgggagatcgctgcacttgtttcaaaggaagccctggacaaggcccttgggctcccaggccctccccgatacggaaatattaactcaattgtacatgaatatcagtgtgtcatgcccccagtccttaatctccctggaaccccaagtccttcacttgccctgggccaccccacatctccatctaggcccagtgacaagcccttgtttactctgaaaacccaactcaaacggcaattcccttgtaaattctcccataaatttccttgtaaatactcttcccaggacaaaactccagagcccattgttccaaaagttccagagaaatccaaacaaatgcccaacaacaatatggggtccagctcaaccctgcttgccaagcctagggcccttcgcagtggtgggaaaaaggaggcagccatggataagacacttgcagaaagttagcaattgactgaatctcctcaaacactacaagattttcatgggctaatatcttcagcagaaaaagaaaaattgctgaactcataaattgtgattttgcatgctcatctatttccagagcgccttgctagataactaagagcttgttctttgattatggccatttagtaaatgggatctaacaggcttgttttgagtctcacgagccttgcagtttgctccaagaagctgtctgttccagcgcttccatctggcagatggcctcactgtgatgcactcagaagtcaggagaaccgcagcatcaacagaagcacaattaatcagtgcaattgttttccctgctgtgaacatgacacttccctgggtttttgagggcaacccacacaggaaggacctagttttgcattctctatggcattcaaaaccatgttgagtgtccaagaagcttttgtttctgacattggtcttcctgttcattctctatgtccctgaaaacactgctgcagtcaccaaccaggccaccatgcagggcagcaaagcgcttggccctccttgtcctggtggggatggcggtgttgtgtctcacaaggagtctgaagttacctcgaggtcagcaccgatgaatggtcctgaccggaggctgtctggattccgggctttgctaattgttatttttatgagaaaattacttgtttttgttccttgcagaccagaaggaggaaaacaacttaaactagtagctgaacaggaaggggaagcccatagctccctaatgagatatcagctgagagctgtggatttgtggagcctctggaagcaaaggcccgggaggctgcgactcctttagagctgttggcccagcccgagccaggccttttttgggaacctgtgaatctcaggttttcagtctacaaaatgacaactcaaaacctgctgaattatgtgatcctcaggattaaaagcagttaggggcttggggggtctccctgggaagaacaagtaacaaagagactcaaagtaccacgggttgtggtggagacagaggaccccatggttaaagaggagagggtggtttaaacacagaaatttattctctcacagttccagaggcctgaagttcaaaaccaaggtgtcagcaggcccatgctccctctgaaggctctcggggagaatgctttgcccctctagcttctggaggctccgggcatgtagacctaccctaaatccagaaaagtctcatcccaagaccttcagcttaattatatcagcaaagactgtgttt

SEQ ID NO: 473421 - DNA, 942 bp, Homo sapiens
ctgtcatggacacatgcctggaggtgggaggcagagtgggtggctgaaccaggaattgcctgagagacagacgaagtggacaaagtcgctgacagacctgagttactgccttggtcctggtgaccctgctccaggcagtccatctctgtctgcgatcccggcaccactcccggtggttcattattgcccagaggggcctctggagtgcaagcctcaaacagggagacagacctgggaagactccatgaggctccacagcaaccagacagttctaaagtcagcgtccctggcttccagctccaacactggacattcccccgtggctcccctgcctgggaatctggtggaggctgattgggcagcccaggggatgccggtggggtgcggggaggaaaggctgcaagggcagcttggctggatcatggaggcccgggtgacctggggctgtgacagtaggtatgagggacgtgaggggtctgagacaagcagtgagggtgcactgcccagccttcctgcttgtgggttaggagctgtcggtgaggattctaagggtgtgacccttgatgatgaggtgaatgtgttatggctcacaggaacagggaagatgggaggaggagtgggcttacagcaaagagaagcgttttattttattcagcttggccgtgagacttctctgtggcgataggtgagtttgccaaatctggagctcgagaaccaagtcaaggctgtagctgcatatttaggagtaaaggtagaaattgaagtaatgggagggagtaagagtgttgaagatggaagtttttcatgccagaaataagctgtttaaggaaatgaccaatctcctagaaatctccaaggcctatgttaaaaccatcccttacccctgcaaagataccatatgcacgtacctctaacattgcctggtttatgtcatgtgcacct

SEQ ID NO: 473422 - DNA, 2047 bp, Homo sapiens
ccgtggacatactgtcttctctggagttacagagggagttgggttcattgccaccctcattagatgctttgctccaagcaggcaggtgaaccaggattctcgaatgcttactgcacagacccagccacttacacgtcgtccccgtggagcttggagccacgcttggtggttcgcgcctccgcgcctccgggggcgcagtgtccagctcaggccgcacgatggcgcccgcttcctgcggacccggcccacggcggcggcacagacaaagacgggcatcgggcctcccccgcggggcggtggaggcggcgggcgccccgggtggccgaggccgcccctgcgcgccgaaccaggcagctgccgcccgagtctttgtcctacgctgctcgcccttgtgctaaaggacaagcaaagaggacgaggggagctggcggctccggccaggcatccacccgactcccgtcccagctctcacaccccaaagcccggccccgcgcgagctggggtggctgcaagcgcctgcgtggggacgaccccaaaggcctgcccaggaagctttcctccacctccacacctctgtaaagaattttcccggaattccgcactgtggaggttttgcagcactgccctgacttcccatttgaaaggctacagggcctgggtgtcccgggtgcagaggagacatgcatttaggttgactgcaaactcgtgagcatctgggcctggctgttccaagcgcagctctgcaggggtccaggaaaacttctctcctctcgtgttctggcaccctctagtcccgcagtccagtagagtttactgggatgatgccaatgttctgtctccactggccaatatggtggccactagccacacgtggccatggatcgcttgaggtgtggctgaagaactgaattttaaactgtatttaattttaataaacttgaatttagagcaaaagttgaacataaaattcacaagttacctgcagcagcaatcatcagggttctggtacctcaagaatgcctcgtcacctgtctcctccaagaatgtaaaccaatcaacgacttccatttatttttattgaaaataaacatgtataccttcttataggttccttggtctagtgtattgaatctttccaataagcaatgcaattatgtgactgttttctaaaatctgaggtggatgccaccttttagcatccaccttttgatcttccagctgaggtgtcctggcaaggctccttgcccatagtaggcattcaataaatttttggtgaattttatgtaagaagggaaaatgggccaggattccatatccaagctatcgttgtgggctgtccatccatctctttttgtttttgtttcttttcccctggagatgttgccgaccacaaataaagaacaagggggaaaatagttaagcacacctagagctgcgtccaaacaaaagaggaaagagactaaacaaacccaaggttttctatttctccctgagccaagtaatccctttgattacatctaatacctgccaaaacccagatggtgtgcccacccatctcccgtgtgataatgccacattgtgaaatctacctattaatattaattgtcagttagagaatctgtctgaactactaaagcttgagattgccttgagaaagcaggccctgctttagcagggattttaagataattctcattctttcattctgtatctcacatatgtagaatgttaaacaatagcctgagaatgcttttctaatttcggtacatgcctgcctcttgcaatccaggtcttaaaccactgttcatttggggtctacacctgctgaccaaaatattaccttaaactgctgtgggcttgccagcgacatgtaagcacacactgttcaccatatagagagaattttaactccctgggagctgtttgaattgaatgtgccctagcatgtgatgctcaactatttcctttttatttttctccctctcagtaattgacttggtaatccttgaaaagtattaccaaatctcagttttttcaattattgtat

SEQ ID NO: 473423 - DNA, 545 bp, Homo sapiens
tgagagtgcagggcctctcctcacacgttggagctaactcatgaggatgagcttcttggaagcagtaggaattgatctggggcttcaaggatcagaatgtcgaaggacggtagcagtgcgctcagtggaggccacgggtgcctcagagggatttctcttggacctcctgccctaccccagcttcggcgttgcacttggagaaggccctggatatctcaggggaaggtgtgtctacttgcagacatttgagcagatacctgaagataaagaagtgggccatggagatctttggggaaagggtgctgcaggcagagggactggtcagtgcaaaggcccaggccagagagcatgtgtcatgttggaggagcagcgaggtggccagtgtggctggaatggtgagggccaggaaaaagtgccccaaccgcactgtagaactggcctgaagatgaaaccaccattgcagctactgagaactcaatgataagaacttgtcatttctaccctgtgcactgctgcttcccaagaactgatgctaccgtgtcagc

SEQ ID NO: 473424 - DNA, 594 bp, Homo sapiens
cgaatagtgtccccagatactgccagatgttccctgggggcaaaatggaccacggtgagaatcgcagctctatacaacagaaagaggagaagcagtctagatcatggaaagcagttggacctgaagctacatgtagcaagcagtcagtccaatatttgctctggctgcccccacacaggcttgcaagccctcagcttccgcaactgtcagagaagacactggacagggttattcctaatgatttaaaaaagcatccttgtcggtcacattccagatctttctttttgtctcttcttctctctgggtattctggtctttctctttggctacagtctctacataaccagacccacacccaatatatcagcgaggcattcagcatcctgggccagccacaatctcacagcctgcacagcagtcacattcccggttgtattttcaacctcgtttcagcacccctaggcggtgtacacgctgagaaactttggttcttttagctgtctggatgatcttttattttagtgaccctgggcagaacacaaaccgagctcagtctgctgacggagacctgacctctttttatgtagctatgtc

SEQ ID NO: 473425 - DNA, 483 bp, Homo sapiens
cccgggaacaggatgaaaggggatggagaacagtttcactgggatgcggaatttgattttgatgcatcctcttgttccttttaggtcactcttgtcctggaagcgcccacaggcaaagccattttatgcatcaggcgctgtaggcacagtgcctaggggatgtgggaatgctgagtgtgatggcgcagcccacatgatcaaggacaactcgatgctggcgggagtgcctaaacatatcttggtcctacttgcagtcagctgcgaaggtgaggagtctgaacctatttgtttaattgttagagaatctaagagtgatggaaaagttaaaaatacttttgtccctgactcccatgagattacacctaaagtaatcaagactagaggaaacttaacctatgtatacataccgaacccagaaccctcactggaaacagtacaactgtcatacccaagaggcagtttacacccagtatgaatcccagc

SEQ ID NO: 473426 - DNA, 506 bp, Homo sapiens
acgcatgcaacaagcattcgttggcaggtgtaccagggaccaagatgaaagagacttctaaggatgagaacactgaggctactggcaatggcaaacaggggagttctgtggctgcagaggggaaacagctgatgagaattccccacgagatagttctttcctcttgcacaaaggggctggctggtgtctggaaagcttgggagatgtcctttgtagacctggtccttgagggatgcctcatgctgggaggacaggtccccggggcctggcaggtgatcgtgcatgggtctggaggactgcaagggagtctgggaaatgttttcctggactggacagctaagttccctgttaaaacctctacgactgtggacagagaagacaacagatactggagtacaacaagcactttagcatttaatcgcaactctagcgtaacagaggccaagccatgtggtaggccagtgtttcgcacatttaatatgatgtgatgtgaatcacctggggag

SEQ ID NO: 473427 - DNA, 656 bp, Homo sapiens
gcagaaagcaaaagatcaacaacctgtagcaaaatgagcaaaagtatgaacagatgcgcattccaaatgtcccagggaaaggtctttgttttagggatgctgaaagacggaaaagctctgagttgcttgttagaggtcaaagttgatggaccagtggtttgtttctctcaggccagtgttatagagccagaggctcttccagaagaaggaacaaaggacctggatgaaaacaacaacaacaacaacaacaacaacaacaacaacaacaacactttttttaactctccaaaatggtatttgttcacgttcagtcctggtcgattgtctgccgccatattggatcttactcctgtgactttgtctcctcacgtcctctacttgaaatgctctgtacaaacccacttgtctttccaggcccatttcaaattctctttcttccatgaaaccttccctttctactccaagtcgatgttacccctgaattaaacatatactgcatatctccttatgtgttctcatgggactaccttaataagttacagtggctttgttcaaaacaaaaaaaatgattctaaactctgagaacaaagcagacaaggcctggtgaggtgaacattagacgtgggaggaaatgagggtatcagaagtaagctggc

SEQ ID NO: 473428 - DNA, 587 bp, Homo sapiens
tgtgttgtgggagggacccgggggagccatgaaagaagagcctttgcctcccgccatgattctgaagcctccccggccatgtggaactgcaagtccaattaaacctttttttgttcccagtttggaacatgatgccctttgtcatgaagctaaacatacacgtctggtccaccattcagagaagctgaaggagaatccaagggaaagtagggcagttgcaggtcccaagctgcttcacaccaatgaagtgagtcagcagatcagcaacagtgtgcttcaattacaaggggactgtgctgatagtgatattcttgggacacaagagggccagactcagaaggcagctggtttgataacattccagagaccacctatggcttctgtgtgcccccggtggggggtaagaggccaccagtaccctggacaccctttcttgtttcagagcagcatggaaatgttcttggcctgctgtctagaggtcatccttccaaacctgctagagcatcttcagctgagttgcccaatcctgttcatcttggaaactacaaaaatgatgggtggagagagatgagctgggatacttggct

SEQ ID NO: 473429 - DNA, 646 bp, Homo sapiens
gagagcaggagggtggaaagacagtgtgtatctccttaaggggacggcttcagtggagggtagtaggtactatgggattgcccaagacagaagcacttaccttaatggtgaagagaggggttgatggggcagctgtctgcgcgttagcacacagcagctgtcctcgtcctggtgacaacaatgatgacaacaagagctggcacttgctgagccaataccatgtgtcagcattgagattcagatttcggcgaccatgcctgggagacttgggaagggctggttctgacagatgccagattgcagaaaaggacagtggggctttgtgtcgggttggccactgtgcagacatttgtagaagcgtgaaatacagacgatacaaagcagactatgatagcacacggggcggtggcagagagaagacactgcacaaagtgttggggagatctatagtgacttggcatcagtgtgttagaggctcaagacaagtatcagcaacatggtgggtcagtgtccttggcatgggtgtggatgactctagagaaacagagcttgcctgagaagggtagtgagactaatacctgtttataacaacagttatagtttctaggcatctactctaagtcaaatgccatgctgtctgcctttt

SEQ ID NO: 473430 - DNA, 740 bp, Homo sapiens
cagcttctctcctctttttttttggaccactctcaagctctgcaggccgccccaggtgctgttttgcacagcatgatgggaaagagagggtgtgtgaatactccaatggacttctcaaagaagggaaaaggagacaagaggggaagaagggaagggccttggaatccctataacaggccagcagacagaggaagaaagcatttcaaaggctcaaaactgagctgctcacattccattgctaagaacctcttcagaccccatctaatgaagagttcaggagggggcctggttcattgtgctacaaacatcacacttcttggtggaaataaacatccagattattgcaagaacgtagagatttgctggcagttccggatcaatgactattttgaatgggccaattcctcaaactcagaagtagaacacctgtttgtagcccatgctttggtggacatccttgaagaaggcaagtcctcaaagagtggaacatgtatgcgtgttggggatagaggaaagttcctcatggtggtgaggaaacaggtttctgaactgcttgtttataagcatatgggccttgggtgactttaaaataaacagttggagagccactttctttctacaatctttccaagaacatttaaaaggatggtccttgtctcttaggccttaggagcagttctagctctgtgatttcgtgaagatcattcttttgtacttgagatgtccagaagaatttcatc

SEQ ID NO: 473431 - DNA, 2304 bp, Homo sapiens
tggatttgcatgaagtgggatgagtgtttgacagtgtgttcacaggatttcccacagtcccgcaggcagagacctttgcgcagcccctcccatcacaggcctgaaggtttaggaggaaaaaggggtttcatgggtctggcccagggttcccttgctgtgtgcagcctagggacttggtgccctgcatcccagcttctccagccatggctgcaagggccaacgtagagctcgagccatggtttcagagggtgcaagccccaagacttggcagcttccatgtggtattgagcctgcaagtgcacagaagtcaacaattgaggagcccacacacagaatccctactggggcaccacctagtggaactgtgagaagaggacctccatcctccagatgccagaatggtagatccactgacagcttgcaccatgcacctgaaaaagctgcagacactcaacaacagcctgtgaaggcagctgggagagaggctgtaccccacaaagccacagtggcaaagctgcccaagaccatgggaacccacctgttgcatcagtgtgccctggatttacaagaaataaaacaaaggagttccctgtaccaggggttcccaacccgtgggtcgtggactggtattgatctacagcctgttaggaacctggctgcccaagagaaggtgagcagccggtgagctttggtatcagcatgatggtggtgtagggggaggggggaggggggagggatagcattaagagatatacctaatgctaaatgacgagttaatgggtgcagcacaccagcatggcacatgtatacatatgtaactaacctgcacattgtgcacatgtaccctaaaacttaaagtataataataataaaatttaaaaaataaaataaataaaaataaataaataaaatactgtaatataacgtatttaaaaggatttcagtgttcatgttatttggaatttttcttataaaagaaaaaagaaaatatatatttttacaagccagttttatggtaagaattttctttgacttatgttatttcttgatggaaagcagctaaatattcaaaatgtgatacaatgtaagtattcaaaaactattcagcattatggttattgacatatttatttcatagtcattgttatatggaatagtaattgctatatttatttcaaaataaaattattgaacatgaatacacatttccagtagttatagtacattttaaactgataatatttaaataatgctttcagtgtcaaactttctttcagtttcaaattgtaattaataattaaaaaaatttttcagttcatttttctaggaggtgttcttatgcacacagcagaaaggagagagtgttggcatttgtttagtgcctaatatgatcaacaggttttattttgtgttgtgactatgaggaattgcctgaggagttgtctttaaaataatttatgagatccggcacgttcagggtggtatggccatagacatttagtttctcatactactaataaatattcaagtaataattagttgtgatgaagcacaacacttccccttctaaaactgcttctcatttgcatggtatgtttgttcccttcataaaccgttttaaattgagaatatattgttatccaaatactccattcttatttttctttcttgaatcatttattcacactctttgaagtaagatgatgatctggatcttaaacctgtctgtagccatatcacaaaataacaaatgctctctgaagcacaatgggaccaatctgacaccgcataacccaaaaacagacacctgaatcgtgtttcctctggaagcattttattctctgtcattgtctacaagagctgctgcctaatacacacaatggaagattcatgaatcactgaggcatgaaaaaatgtttttgtagcagcagaaatgtaattaactgcaactttggtaatattctagagtgaaaaaagaaaaacttagagacatttctcaggcaatgctaaatatgtatgaaattcccaacctttttatctcacacttaaatgatttcataggctctttaagagtcttgctcttgatgccctttaacattggaatgtctattctgcttgcttttccaggtagcattttgacgcttagctgatttactattaacagcaacattttactaatacttattaatatttggagttttttaacaatagcatacaagttatttaggagcttgttagagattcataagcgcattaaatttttaaaagattttgaagctcatgaagcatgaagaaatgtccaac

SEQ ID NO: 473432 - DNA, 583 bp, Homo sapiens
cagggtcaggaactggctgggctgcaggatttgaagtgctcccatgctggtggggaagcatttaagtggagccctgggcaaagcacctaggctcagcagcagaggctgcactgtgcacatgctcctgtgggagcagccaggcagggaacttgggaagggtggcaggcaggggggcctgctgaacacatgtgccccagtactgggtggtaaagatgaccttgttctctcttggccctggtgggggcagatccccctgccaattcaaatgtctactggggtcctgggatcttttgtagctaagatcccagaggcccgtggcaagagtgggctgccccacctgcacttcactcacacttccctaggagtcgtcctaagcacttctctcttctgccgccatgtgaagaaggatgtgtttgctgccctttctgccatgattgaaagtttcctgagacctccccagccatgctgaactgtaagtcaattaaacgtctttcctttataaattacctagtctcagatatgtctgtattagcagtgtgagaaaggacaaatacaataataaaatttaacattaagtgtatcc

SEQ ID NO: 473433 - DNA, 640 bp, Homo sapiens
agtgttgcaacaggactgttgagtttctctaccaacacccagaatgggctgtcgggggctgtgtcccgtccagagccctttgaatcacaccacggtgtgctctggtcagaaattcccagttgcctcagaacttttctcagtctcgcgccatggagctcttgccagtcagcttctagctttcccttttgccatatgtactagatatggggtgtacatattaaagaattgtggaaaaattcctccccaaaccaaagatttgctcactcaaacacacatttcagtgctctacctgtttcactacattaatgataacatactaacctgtgagtctcttacggacctggagactgtcctactaatcgtcttggacagcctgaaggacaaggaatggaaagtcaacctcaagaagaaacaggggcccagcatagagatcaaattcttgagagtttcctggttaagatgcaaaacctactcggagctgtcattgataagacagcacagcagcccatttcccagacatcaggcactacagaaggtgcttgaatgcatctgctttaaataagtggaaaggaccagcatggcagtggagatacctacgaggcaaaccaccatatatgaggagatctcactgatacgtact

SEQ ID NO: 473434 - DNA, 682 bp, Homo sapiens
tgtaggagaatgaaactggatcctcatctctcaccttatacaaaaatcaactcaagatggatcaaggacttaaatctaagacctgaaactacaaaacttctagaagaaaacactggaaaaccccttctagacattggcttaggcaaggacttaatgaccaagaacccaaaagcaaatgcaacaaaaacaaagaaacatagctgggacttaattaaactagagttttgcatggcaaaaggaacagtaagcagagtaaacagacaacccacagagtgggagaaaattttcacaatctatacatctgacaaaggactaatatccagaatctacaatgaactcatacaaattagcaagagaaaacaaacaatcccatcaaaaaatttcaaagatatgtcttatattagtagctcagaccttcactccatcataatattccgctacaataccatcaacttcacatacacaacaatccatttctcagttcccagttactgtttctgccaagagtacactgataaatcactatgaaatttgtgagcattttctgcatctgtaaagacatcagtcccattagattagagccctacctctatgacctcattaaactttgcctccttacaggccttatctccaaatacggtcacattgatggttaggtttgcaacatatgaatttggggagg

SEQ ID NO: 473435 - DNA, 929 bp, Homo sapiens
ccagcaggtccttctccacccaaatgatgagaaagggaaagatcctaaagagtggacagttttgtggaggagagagtaccctgcaatcgggcaactgtgaaagaaaagaagagcagcaaagcattcaagatatgacgtgtgtgctcttaaaagcattcagttttattcattcacaaagatacagtttggtattggaacttatatttaaaagggaagtggagaataaaagtttagaaaatttgcagctaactgcaatagaaaagaaaaacctactttctgaggagaaattcaagctggcagtagaaatttcttctcaggacttggtgccctgcatcccagccgtggctaaaaggggccagcgtacagctcaggccattgcttcagatggtgcaaacaccaagtcttggcggcttacatgtgctggctttatctgctgctccagtaggaagaggggtggcactgctttcttacagccacatgaagtagaaattcaggttcttcacacagtctttgacactttgggagtggagatcctcattactgccagactccctatggggtctccactcaccattctatggagtcatctcattatcactggtgatgatgaaactaacattggctagaccttaagttttgccaactgtaaatgagttggaatgaattttaagttatgtacccttttaaaataaattgaactaattaatgattaaaataaatgactaagttttatctacacatgttgtaaaatatttgccttagaatttcttatgcatgtcaatacacatatctttggggatatataagctattaagccacagaatttgaaacatgtataatgtattcaatatggaatcttccaacacaagcttgatgcttttaatgaaatatgattataccatcaataagactaatcattgttctattac

SEQ ID NO: 473436 - DNA, 1171 bp, Homo sapiens
ctaatgctaaatgatgagttaatgggtgcagcacaccaacatggcacatgtagacatatgcatcatggctggctattttccaaggaagacaggtaatgcttggtgcaggtcatcgggagtagataatcaacttgtttttgttgacagtctaaaagaagaacccatgagacccttggaagatggacaggacaagaaaacagataggggttgggagaaaactctaaattccaatcactctacaggaaatgccagcactaacatttgcacaatcaatgtaagtggtacggaagaaatcccagggatatggaccactctgaagaaaagtggcattggtaatgtctttgacggctgcaagagaaatatggctgaaaacaagataattagttcctgccctcatgaaagcaataatcaagtgtggaagacagacagaggtaccgacagacaaaagcattcaggtaccaactggcagtagagagacactgatgttttcactgatataaaatcagggaataatgcctgcacttttttcttaacatcgttttggggaacataaaacaagatagaagtaattttaaagacttaaataaatttaatgcacttatttgctgttatgtggctaagcatatgaatctgcttataatacgagtatgaaatatttttatgagtagtttaattccatacagccaggaatatattggaaaacaaagataaaagagaattctcaaataatataacttttacagtttcttattcaaaataatatcatgtaacacaaatcaagtttattcttgtgttgacatctaaaccattaaagattgtccatgactacagcttttacaacagtagttattgctatttcctaagtcagatgggtcttttttttttcattatctttgatctttgtcacttgtttgctatcaaatattctttttaaaagaggttactaatggcatttgtaagaagcaggcaagcatccaatcagggtacttataatatcatacagtttacagtgacatattcactaatataacaggcgtaaaggccatctcatttcatttcacttttatatttgtcaatacaattattccatcataatttgtcattacttaactttgtcagtcctcattgacatgacttcacaagttgtgaattccaacctatattttatgtc

SEQ ID NO: 473437 - DNA, 704 bp, Homo sapiens
acatcagctgcctctggaattgcccttggcccttgaacaacatgggggaccaaggcttagctaaggacttctggactgtgtgctctaactctgggggactggtattaggccttggctctgatttctggctccttgaggttaggaacgtgctgtgctggagaggcagaggtgctcccagatggctggtcacaacactacaatggctggtgccagccaaagtacttcacagggcagtggcagcaggatgtgccctcatgtgcatgtgccagcagcagtggcagcagcagcacactgggtgcatgctcatcagctgcagcagggtgctagtgggtgctggggtgctggcctctgtgcaggcatttgcagcagtgatagtgctagtatggctcaggaggatgggagcccccgccagcaattgtgtgcacatttgcactgatcgtggtgttagcatggggactgagtgctggtgggcacaggactatgtatgccttccgtgcgtgttcactctggtggcagtggctgctcagagcagggatcagggggattattctgaattctctgacatttcatagatcttcaaatcttctgggtccattggtggagctttgttggtttcttttggtcatatttccctgagttttcaaaatctttctgtcttgatgccttcaaaatctttcttgatgcctgcacatttgagaagacat

SEQ ID NO: 473438 - DNA, 1492 bp, Homo sapiens
cggcctgaccagtttacagacctgaagaatttcagggcatcagcatgacaaagtgcttcctgccccccaccagcagccccagtgaacaccacagggtggagcatggcagtgggcttacccagacccccagctctgaagagatcagccctactaaatttcctggattgtaccacactggtgagccctcacctccccatgacatcctccacaagcctcctgatatagtgtctgatgatgagaaagaccatgggaagaaaaaaggaaattttaagaaaaaggaaaagaggaccgaaggctatgcagcctttcaggaagatagctctggagatgaggcagaaaagaagtatggcatgaagtgtgaaggcatctacagagtatcaggaattaaatcaaagatggatgagctaaaagcagcctatgaccaggagaagtctacaaacttggaagaatatgaccctaacactgtagccagtttgcggaagcagtatttatttgaagaggcttatgggaggaccacagagactgagaaagtgcaggaattccagcgtttactcaaagaactgccagaaggtaactatcttctgatttctttgttcgttgtgcacatggaccatgtcatcacaaaggaactggaagcaaaaatgaatatacagaacatttatatagtggtcagcccaactgtgcagatcagcaatctagtcctgtatgtgttcttcacacatgtgcaagaactctttggaaatgtggttctaaagcaagtgacgaaaactcggcgatggtctaacgtggccacgatgcccacgctgccagagacccaggcaggcttcaaggaggagatcaggatacaggagttgcttttgaattgtttacatcaagatctgcagggtgggataaaggatttgtctgaagaagaaagattatgggaagtacaaagaattttgacagctctcagaagaaaactgagagaagctaaaagacaggggtgtgaaaccaagattgcacaagagatagccagtctttcaaaagaggctgagaaagagatcctgactaaacaggaggagctcctgggcatggagcagtttctgcgccggcagattgcctcagaaaaagaagagattgagtgcctcagagccgagactgcggaaattcagagtcaccagcagcagggcctaagcgagactgaggagtactcctccgagagcgagagtgaggatgaggaggagctgcagatcattctggaagatttacagagacagaacgaagagctggaaataaagaacaaccatttgaatcaagcaattcacgaggagagtgaggccgtcatcgagccgcgcatgcagccctggctgctccagttgcagccagacagggccaagcagcaggcgcaggaggacgaggagcccgagtggcgcggaggtgccatccagacgcccaagaatggcatcctcgagccagtagcagctaaatagccaccaaaggcaggcaagaagcc

SEQ ID NO: 473439 - DNA, 659 bp, Homo sapiens
ttacaagcagccaccccataagagcaggactgaagtcctgggaagagttctggtgacgactgcctttcagtgcctaagcagctgagccaggttgattgatgggcaagcctccaaatcaccacaggaatgaccaaaggggtgaggagctgagagggcaagagttacacgatgccagcaccaagcagaggatctccagctgctgtgacactcctctcactctgaaaagaggtgatgtgacacaccctagtctggcagctggcattttacatcatctagacatgactttaattcatttgactgctacattatcccattctccacaggctccacagcctgaaggctggcacactgatgctctgagcagggcccaggcagggctgctgactgggcatgttgacttatcgataattcaggaagtgaagctgagcacttcccctgtggctgaaaacaatacagaggcctctgccttgcaagacaacacagccctccttctcctccccaactgggatctacccacctcttttctccctgctgccagaccagtaacttggatcatgtcacaatttagccaagctagagaaatgtcggacacactaagggagaaaagggatgatatgttgaaggagctgcaggacctagccaatgtgtactagtaggaa

SEQ ID NO: 473440 - DNA, 738 bp, Homo sapiens
tttctgaggaacctaagaaaggcatacactcacttgcaggggagtggttaagataacaacatggaaaacaaaacaaaacaaaaatccatggatcaaattgagtttaagaagaaggaggagaggcctccaaaccttatttcactgcatgtactgtcctatgaaatgaccttttccaagcctaaaaatcaagggtcaaacagttctcagggtgttaccatccactccacctgctccatgtttcttcccccactgccctcaccggaaaggcataaggaggaaggagactggatccctattccctctagagcctccataccaccccttggtgcagaatgggaaatggggaagtgtttggttggtgctttagaggcacctaactgtcaggggtccactgaggatggaaaggaagagagttccagaacaaatgacaagcatgtggaaaacaggcaagacttccaagtgagaggcagcatggagagcagttcaagaatataaacaatgcaagtgtgagtggaacacagcatgggggagagtgggttcagctgagcttgcagaggtgaacgagtcctggctatgcatagacttgacataaagtcatgacaataatattggctttcttttcagagaaatgtgaagccttaaaggaagtgaaatcatgctgtggcttgaccatctttgcattcatttaaaactgaccttttaagtcattctggaggacagattagagtgaggtgagac

SEQ ID NO: 473441 - DNA, 765 bp, Homo sapiens
cgggccttcgcgttggttccacctccagcttccatgactgtggagttctgcagtgggttcattgagaaagtggtgctgctgcacagcgggctcagagcctgggctcaggaggcatcccggttactgttgctgtatcctggagggtggcatctcctgggagctgtggtccgagccccttgcaacagcggggccaggagaaggctggttgctgggtgcatcctgttcttggggttccacctgctgtatccatctcccgggggattttccgtcgccgtccttggttccagcacatgccctgagtgggtaacagtgcagctgcgggggcagccccctccagcccttccttggtcagcctccctgctgctggcccttcctggagacgtgatttgccctagaagtggcagaggaaatggcatggagtgtccaggagcccacgaatcagctggcattgttgaatcatggagaacgcagagacggtctcagaagtcggccggagcctgagtcattgggccacgcggcttcagtccttccttgcagcctgtggggagtctcaggggaattctgaggaggaaagggggatgctcatgataggtatttattgtttttgtttgtttgtttttaatcacttattttcacaagtgtaatcgaagcacctggttatcagaggctggggcttggtgggcctgagatgtgagcccaacactgaatacagacttacaccaaccagattcaaacaccagccctgctcctggggcccctctgctc

SEQ ID NO: 473442 - DNA, 541 bp, Homo sapiens
ttttaagactcaaccagatccttcatgctccaactggctcatcaggaagttcaaagcagatttttccagcatgcgcagaggactctgggaaaacttccaggattcctgaaccaggcggaaacttcagagctgtcagacactgctgcgcctcctcctgctgctgcctggctgctgagattggtgcatctggatgaatctgatgtgtatgttttcattcctttccttccagaacccttggtaaagaaagtacacagagggattcatgagtgcttggccaactccaaggtcctgggaggacatgaaccagtgactttgaatgtgatgctgagcccagcagggagccagtatgactctccccaaatcacaaaggttgaagcccacagctacaaaatttcagtagtgtggattggcccaggactacaaggacagctttgattaatagtttaggaagcctggaaacaaatccaagtatccttaataagttactgtattattaaggtgatatttcaaatcagtggcaagaggattgattattcaataa

SEQ ID NO: 473443 - DNA, 721 bp, Homo sapiens
tactgccgctcatttcagcttcgctgtgaaggggcaaatgcaactgatgaccttaagttgaagtcaaatgcttatttaccattctgaaaatccaagggcctttaggaattgtactaaatctactctgtctgtgctctataaatgcaacaacaaagcctggatgacagcacatctgtttacagcatggtttactgaatatcttaagcccactgttgatacctactgctcagaaaaaaatattcctttcaaaatattcctgcccattgacaatgcaccttgccacccaagagctctgatggagatgtacaaggagattaatgttgttttcatgcctgctaacacaacatccattctgcagcccatggatcaaggagtaattttggctttcacatcttattatttaagaaatacattttgtaaggctatagctgccgtagatagtgattcctctgatggatctggaaaaagtaaattgaaaaccttgtggaaaggatttgccattctagatgccattaagaacattcatgattcttggggggaagtcaaagtatcaacattaagaggagtttggaagaagttggttccaaccctcatgggtgactttaagactttagtggaggaagtcactgcagatgtggtgaaaatagcaagaaaactaaaagtagaagtggaaactgaagatgtgactgaattgctgaaatctcgtgataaaacttgaatg

SEQ ID NO: 473444 - DNA, 630 bp, Homo sapiens
ggtggattggatagtgcccacccatattgagggtggattttccccatctagtccactcagactcacatgctaacctctggaaacactctcacatacagaccccaaaataatgctttaccaggtttctatgtatttcttaatccagtcaaggccacacctaaatttgttatagacatttgtgtaaaaatcattgtatggacatatactttcttttttgggaggggaggggtaaggaataatggaatggaatatggtggatggttgtttaaatttttaagaaactggcaaactttttcaaagtggtttcagcatcttatattcccaccagtgatctatagagatcaagttgctcctcatcttcaccagcacttgatatggcacagccagctgctactgtttctgctccttctcccgacaggcgaatgtttaatgtctctttctcctgtcccctttctatacatttggtatcaacatctctttcacgaagccaaagaggaaaaagctcccaaaaacattcgcatacatattaaatgagcttcatctagggtctcctggggtgcctctgactgggagcctgcggctgggcaggcttgatctgcgccttcattcgtgttatgtatttttttcatt

SEQ ID NO: 473445 - DNA, 1008 bp, Homo sapiens
gccacagtgtctttaggttgattgcctgaattctaagtcttgatttaaaccatctcatgtctgcaggttgagcctttcatggggtggacatctcaccacactgaatggaatgccagtgtttcaacagatgtactcctagtacaccatgaattcaaagtggaagccaattcttttcatctggtactcaactgaaggaacagccttctccacaaaggaactatcagacactactgtttctgaccatggaattacctttgtctttgtgagatttaagcagtttgtggacatgaatctcatctgtgaagtcctcatcatgcctcattcctggcaaagtaaagatgtcatcaccatctcttgccacccagtccatcactgtgttcagcatgaaacatgttgttttgactatatttaccctccacacatctattatcaaagtatcaaaggagctgaaactggggggtcttccagccattatgacttagttgatggggtctctgtcatgcactacgctgtcaagaaagaagatgtggcagtttatcagccatgtgatctacctggcattggtgagcatgtcagaccaggctgatatcttctgaaatgtttttcatggtgaagaaggaaatagttcttctctggtcagcataactgctgaaaagatagtcacttctttttctggacagtttatttaggaatttaaaccatggcttactccaaaaggggatatgaaattgcttacatgtaaacatatagttcaagataaaaggagtaagtgaagaaattgtgggaaagggaaaattagagtaggacaaataagataaaaatcagggatagcattattacacaaaatgcatatcaaaaagtccagtacaagttgtaaaatataggctagaattgaccgagctgcctagtatcacaagtgaaagaatgaaacctattcatgaaagttgttcatgaaaattataactattcctgatactgagttttgagaaaaatgtctccattgaataa

SEQ ID NO: 473446 - DNA, 594 bp, Homo sapiens
tgcattctgaagtaaagaaggctcacaatgaaaaggatttggggaattattgtggcaataatatgcagcttcgaggaacaaaaggtgagtggcaaggagacaagttaccagcaagataggcagcaagataagcctgaagtgaaagcatttgatggaaacatcccttgggtccactttgactctgtcactctgggacataattgcttgaattcaggcaactatggaccactcattccctgccccacctcagtcaccctctatgcaccagtagaagccaccagagaccagaagccaagggctccagagccacatgtggctgggggctactggattggacagcatagcactaaaggaatcacaaacttctttggaaaacagaaacgtctggttgtcccatacatggcccgtgtgaagagtgcccagtcagggatggatggtgttccaaaggttcctgtgtaagtccattgttggaaaccctgaatgcattttataaacaaataaattttataaataaataaatagctggtccctattttcagggttttctctgtctagcaggatacttggggtgagaagcctggttgctggagttac

SEQ ID NO: 473447 - DNA, 1414 bp, Homo sapiens
ttataggaacagatgtatttttattggtggaggaaggagaaggatctaattccagccctcgattttgcttttttaaaaaccactcacctgacttttatttgcagccactttggcaaacagggcttgagacaccttggcccttttcatctcctgttggatctcgtcataaatggcagctgtgatgttgatgttggcgccgtccaccttaatagggagaatctcaaaccaacagagttatctccaaatcacaagtttccctgtgcggatgccctgagctgttctctactggatccagcagtatgcaggtccagagaaagatgtaacaggcagtgtggactctgtgacaaatggtatgaagaaactgaaataaaagaggatcttaacctaggacacccagcagccagtgaaggaaccatgatctgaacgcaagtctttcaggctcaaaaacatgggctcaggacactgcactacacactgcctccaaaatctccaatttatgccagctactaataaagtatagatggggtctggaaaataatctccctgcatcaatgtcaagctgcttgtgtgcactaaattgctgactccaactaaaaggctgagtcaatgcgatctcgctccacttctggcagattgaggaaattctgcatggccctcaggtttactagaagagactgagaggctgtccgagggtcttcttccttacgcagaatctcagacaacaatccctgattaaatgggggaaaaaaacagaccaagtcacatttgcaggtatatgtgtgtggtttctgtcttccacccctctcctcctttgtttggtttaaccagctcgctgtgatgtcaagaacctcacactaattccttagggttctccgatatgaagtcaatgtgcttgccttccgggggatatgcattattttaggactgttctattctgacactttatcatcactgtaataatcatcagtgtacagacatgccagctagcaaggtaggcacttgggaagaattgtgaaactgcaattaccaccaggtgcctcctacaagtatttcaggaactgttagaactctctctgcttgaaactgggaacacttggcagtcctgcttagctttacaaatctgccaagtttggtaaatttagtttcgacatttaaacagcatggtagatttacatcaatttaaaaaaaaaactggctgaatttctgtatgaccggccactgttttcaatagagatatttcttatgcaaaaaaaaaaaaaaaaagacgcaaagcaaatggctaaattgtgttaaccctctgataatttcccaatctatacacacaatagttatccttacatatgtacaaagggcacccaaatctttcatgagacgtcttcatgggggaaaccctaatgtcaccattaaagcaatg

SEQ ID NO: 473448 - DNA, 673 bp, Homo sapiens
ctaactgcctgctcacttgcaaccgctgactgagggaggaatgagtcatgatagaggccagcttttccatctcagaggcagaacaggagatactatctactccctcgtcccacagacaaagcatccaggcgggcaggggttcccctagacgctggcggcactgcttgcctaatttccgcaactcagctgttcatggtctactttctgacaaaccactgggtgagcctgcaacaggggttcttcctcctcagtatcagattgaggactgggtatgcacttctcgtaacacagtgaaaaatgcccatccaactctgctggcaaagggcccatccttgcagcatggctaccaccaggtaccacaacccatgttgtggccacatggtcgacccagaatcagtggtgccaaggctcactcacctcgggatcctgccaactatgccaagtgtcaggttctagcccaagctgaggtccaaggagagtgggtgtgtgagtggcaggtagctgaaagaccgcttgaggaatcgtaggcagttgcaacatggctttattctctttctgggtgcaagctgtaggttgtatttcttcttgtagtttggcatgtcttgtgattttttttgttgaaagcaggacatgatgtatctgacaataggcatcaaagcaacaggctttcagt

SEQ ID NO: 473449 - DNA, 732 bp, Homo sapiens
tttttgttttgcctcttctgaaactttaggggcaccaacctgatgccagtaggattgctcctgtatagggtgtctgacaacccctattggagggtctcagttgtgtggcatggggagcaggatccatttaatgaagcactttgtcccttggtggagagcgtgtgcttcgctctggggaaacccacttgtctgggctgcctggattcctcagaactaccaggaagagaggctaggtctgctggtctgcagagactgcaaccacccctgcccatagaggctcaggcccagggagatccaaattctgtccctgagcctctggctggagttattggagatcctgcagggaagccctgcccagtgaggaaggatgggtcagggttagccctgaagaggcactccagctgcagactgccacagccaatgtgttcagttgtggggacaagtcttgggatgaagccatccagcttccttggctccagcagggaaagagtgcagcctagagttatagaaattggtgcctcccttccccaaaccagggagcttagcatgccaggtagttgtgagtcccagtgctggcctcccctcctgcagttcagcaggcttaagaagattccagctgagaggctgtaagagtctgcacattccagggttaggatgctatgccctggtagtgtgggtttgcgagtggtctcttccaatctgtgtgtttcacacttccatggaaaaagtaca

SEQ ID NO: 473450 - DNA, 790 bp, Homo sapiens
gaagctcctcaagcctttctctctgtaggacccccgatcctcttgctaagacttcgtctacactctgcatatgtctgctgatagcgcctattcattggtgccctgtttattgacatcttcctactatagtggtcatggacaaccacagataccacacaaagcaaagctctctatgatgactaggcaatacagggtaaaagagttcagaggaaggagagcttgtcccagcagccaaggaagtcttcacagtggagattcgataagagggaatcaaaacaaattcttgatcagggaaaacaaacaatatcaacctacagatgcagaagcttctaaacatacacctctcctggcatctcctccctcctcatcctctttccctcctattactgtgcaggtggtaaatgccccacaaatactgatctggaatgaagggatgacccttctctttctcaaggacctgtttctccccttagaaaatgattcggtggaatatccacccaatggactttattcggccatgaaaataaaagaaatactgaaatatgtcacagcacagatgaaccgcaaaagtattatgctaagttaaagaagccagacacaaaaagccacatattgtttgccagagttcttgcactgattctttctcatctgtgtgggccgatgttcctttaactgtggaataatttgagaatagtcagttggcttctttttgggatgttttcagagagctgcggctttgtgtggggtctttatttgcagctgaattattgtccttagtttcacaggggag

SEQ ID NO: 473451 - DNA, 635 bp, Homo sapiens
ttattttaatctgcatttacaattcaaacatgacagaactgggtaatgggcagaggttggaacagtttgcagggcttagaagacaagaagatgtgggaaagtttggaaccatatagaaagttgttaaatgtttttgaccaatatgctgatagtgatatggataatgaagtccaggctgaggtggtctcagatagaaatgaggaacttattgggaactggagtaaaggtcactcttgctatgctttagcaaagagactggtggcattttgcccctgccctagagatctgtggaactttgaacttcagagagatgatttagggtgtctggcagaaagaagttgtaagcagcaaagcattcaagaaatagcctggctgctgctaacaacatacagtcctatatgttcacaaagagatggtctgaagttggaacttacatttaaaagaaaaacaaagcttcaaagttttgaaaatttgcagcctgaccatgcagtaagaaaaacccaatttctgggaagaaattcaagccagctgcagaaatttgcataagtaacaaggaagtgaatgttaatagccaagacaatggggaaaatgtctccagggcatttcagagatcttcaaggcaacccctctcatca

SEQ ID NO: 473452 - DNA, 856 bp, Homo sapiens
ccgaccccacaacaggccctggtgtgtgatgttccccttcctgtgtccaagtgttctcattgttcaattcccacctgagaaacctgaagccgtcctctccttggaggacttctttgtcattccatatctttcctattgcacgtacactttcctctgccttttctctgtccaactccaaaaaaatccgacatcacttaaatttaaaagacaaataaatcacctattgccaaagtttgggggtaggatttttgtcccagcaggatgcaggtgttggaatgatgcagttaaccagctgtctcctgcatctcttggccctgcattcctcagagctgtcttcactttgggtaagttagcaaagcatgtccataggaggcaaggtggccgccagccactcctggggaacctctggccgactaagactgcccagcagaaagagagcacttcttttagaaaacttccatcagaagccccagaatgggtctcattcacctggctttgctttatgcccaaccctgacccaatttcagtgttatcaggctctgcatcgggaagcaaacccacatcttcatcttcaatttcatttgactaccagggtggaggagaaaatgtcctcaggcaacagctcttcacctttccttacctctggtgatatttatgcttggcctgattatctgtgcttccttcagatttattgctggtctcttagactttaggtcaaacgtgatctaaacttggaaagcagttgattttctttcatccttgacttttgtctaaggctagtttatttcatttcccaaggcatggctttctatatattgtttgattgtttggcattctgttccaggttcatttattt

SEQ ID NO: 473453 - DNA, 737 bp, Homo sapiens
ccataagcaacagaaattgattgtctcacagtggtctgccatggtaagaagtgctggcttcccctttgcctttcgccatgattgcaagtttcctgaaggcttccagtcatgcttcctgttatgtctgcagaacttgtgcacacagaagccaatgcctaaaccatgtatgacgtctgagcctccagctcccttttctgaggacagactgcggcaggcacaggaggggaggttggttggaagagctgacacagagctcaagtttcttgtactgcatttgtccttaaagccacactcctcacaagacattcctaaacttcttgtctccatgcgggaccttaggtacacagaatcaaatggattcagtcaatcatctaccctgataccaacacaatgtcatttctgttcaaataataactccatgactactaatggctgtgtcaaccttttttcctacctggagtacaggacagtacccaaataaatttacgtgcaagcaacagtcatctctgatgactagttatgatactatgttatgatgtggttatgatattacctaagggcgggaagccatgcatttcatttttctctgctgctgtgtggctttctggcatcttttctaatttcctcaaattgttggtgggaattgcttgaaactactttgttatctttctcagatgttctatggaaactgaaatgaatgtgtcatttgtaatcatttaacagttttttaaaaagca

SEQ ID NO: 473454 - DNA, 1244 bp, Homo sapiens
cgttagagttgtgcggccaagatgaattttgaggaactaaccctaaacaggaaaaatgctttttcaggacccttagctgcaggtctgttggagtttgctggaggtccactccagaccctgtttgcctgggtatcagcagcagaggctgcagaacagcggatattggagagcagcaaatgttgctgcctgatcgttcctctggaatttttgtctcagaggattacccggccatgtgaggtgtcagtctgcccctactggggctgcctcccagttaggctacttgggggtcagggacccacttcaagaggcagtctgtccattctcagttctccagctgtgtgctgggagaaccactactctcttcaaagctgtcagacagggacatttaagtctgcagaggattctgctgccttttgtttggctattccctacccccagaggtggagtctacagaggctggcaggcctccttgagctgcagtgggctccacccaactgctgtgctagcgatgagcgaggctccgtgggcataggaccctctgagccaggcacgggatataatctcctggtgtgccgtttgctaagaccgttggaaaagcgcagtaatggagagcgcgcatccagcgagtatctgggctgttggctgtatcgttattatatcggagaccgtagcattaccgcgggagagcataaatctaagattccacgtcaaggcgaacctcgtgacttactaacactccatccatcatcgtggtctgactacatggcatgcgtgtgagggtttgaaggcgatgtagaaagagttgctgaatagcgtttatgttctagtttgtttgcagagttgttaacagtattctttgctgatcttttgatttctgtgggacctgttataatgtcatctttgtaatttctgattgtacttattttaatcttcatttttttcttttttaatctagctggcagtcagttttggtgattttcacctttcaataaatttctgcatgttttctaagttacaaattcattgaaataaagttatttataacgttcctctgttatctttttaatattttggtatctgcaatgatttttctcgttcaattttgataatgataatgtgttttctatttaattattttgtcattagtctgataagggttttatcaattttactgatacttttcaaagtgtcagtttttggttttattgatttttctgaactgggtttaaaaaaaaaaatgtttc

SEQ ID NO: 473455 - DNA, 3043 bp, Homo sapiens
cacagatgttgctctcgcaacaaatgcatgagaatggtggtctatcacagaaacaccaattctttcatgagctcacatgtgaggaatctaggttgcacactccttataagaatccaatgcctgatgatctgaggtggagcagtttcatcccaaaagcatcccctgactccctctcctctaccatggaaaaaattgtcttccgtgaaaccagttcctggtgcgaaaaagattggggaccgctgcctgatgttgatgttctatctcctcatctttgctctaattgtaggtctcacccacagttgttcagcatggcactgcctagtggagctgtgaggagaaggccaccattctccagaccccaaaatggtagatccaccaacagcttgcaccgtgtgcctggaaaagccacagacactcaacaccaacttgttaaagcagacagatggagggctgtaccctgaaaaaccacaggatcagagctagccaaggccatggaagctcacctcttgtatcagcctgaacttaatatttcatataaatgaaatcatataacatattgtagcatgtgttgtcacttcattcctctttatgactaatactctattatatatattttatatattaatacgtaatttaatatatgatatattaaatatatcatatatttaatatataattaattaatatatatttatatattatatataaataattaataagaaaatatattatatatcaaatatatattatatattaaatatattatatatcaaatatatattatatattaaatatattatatatcaaatatatattatatattaaatatattatatatcaaatatatattatatattaaatatattatatatcaaatatatattatatattaaatatattatatatcaaatatatattatatattaaatatatatcaaatatatattatatattaaatatattatatatcaaatatatattatatattaaatatattatacatcaaatatatattatatattaaatatattatacatcaaatatatattatatattaaatatattatacatcaaatatatattatatattaaatatattatacatcaaatatatattatatattaaatatattatacatcaaatatatattatatattaaatatattatacatcaaatatatattatatattaaatatattatacatcaaatatatattatatattaaatatattatacatcaaatatatattaaatatattatacatcaaatatatattatatattaaatatattatacattaaatatatattatatattaaatatattatacattaaatatatattatatattaaatatattatatattaaatatatattatatattaaatatattatatattaaatatatattatatattaaatatattatatattaaatatatattatatattaaatatattatatattaaatatattatatattaaatatatattatatattaaatatattatatattaaatatattatatattaaatatatattatatattaaatatattatatattatataatgtttaatatattttaattatattaaattaaattaaattatataaattattaaatttaaattatataaatatataatatattaaatttaatttaatatataaatatatattaatttaatctataaatatatattaattatttaatatataaatatatattatataaatatatattaattatttaaatatgtattaattatttaaatatatatgaattatttaatatataaatatatatgaattatttaatatataaatatatatttattactttatatatttattatttaataataaatatatatttattatttaataataaatatatatttattattttatatatttatttgttattttatatataaataattgttatataattatatcaatataatacataatatatactatataaaatacatggtatttataatatataatatataacacaattatatgtttatattctatatatcatataatatatattacatatcatttattgtggatattatatattatatttatatatacacacaccccacattttgtttattcattcataatttgatggtcttttcagttgctttcacttgttgactattaggaaaaaggttgctataaacatcatgtacaagtctttgtataatatcaacataaggtttcagttcttgggtggggtatatacctagcagtagaactgctgggtcatatggtaactcaattttacctttttgaggaactgccaaattgttttccacagtggctgaattattttacatttacaccagaaatgtatgaggttctaatttctccacaccttcaccaatacttgctattcttgtttttcattttaaaaaatcacagcttttctactggatataaagtggtatcttattttggtttaagtttgcattttcctagcgaggatgataatgatgaacatcttctcagatgtttatttgccatttgtctaccttcttcacagagatgtctattacatttgttttgctcgtttttattttgcttatgtgtctttttattgttgaggtttgagagttctataaatatatccttgatactacacattatcagatatacgatttacacatattttcttccattctttgatttgtcttttcaattacatgatactgtcctctgatgcacaaatggctctaattttgctgaggtccaatttatctattattccttggttgcttgtgcttttggtgtcatacataaaaaaaaaaagttgcctaattaaggtcatgaagatttacatctggttttcttccaagagatttagagctttaaatcttagcatcttgaatatatcatcctattttcccctgtcttgtaaggtgtctgctgagaaacctgctgttaatctcatggaggttgtctttctcagagaaggaagctgatccacttctgcttacgaaaatgatttccacttcc

SEQ ID NO: 473456 - DNA, 690 bp, Homo sapiens
gctgcaaagtttaaacctacaaaggttggttcatgagactgaaggaaagaagccatcttcactaacatgaaagtgcaaggtgaagcagcaaatgctgatatagaagctatagagtgggaacttttacctgaggtcactggactcagctttagaatcctggaagaccaggatgcagttttctcaggagagataattgatagtgtgatggttaatattgagtgccaacttgattggattgaaggatgtaaagtattgatcctgggtgtgtctgtctgttgcagttttctggaggtccacttcagtccctgtttgcttgggtatcaccagtggagactgcagaacagcaaaaattgctgcctgctccttcttctggaagcttcgtcccagaagggcactggcctgatgccagctgaagctctcctgtatgaggtgtctgttgacccctatcaggaagtctctcccagtcaggaggcacagggagctggcaggcaggaaagattaagtctgctgaagctgccactgcagtcgcccctccccccaggtgctctgtcccagggacatgagaattttgcctgtaagcccctgcctggagatgctggatttcctgcagagataccctgcccagtgaggaggaatccagagaagcagtctggtcacagccgctttgctgtgctgtggtgagttccatcc

SEQ ID NO: 473457 - DNA, 691 bp, Homo sapiens
gtgtcgcaagatggggccaagatggtcaacgccgcggtgaacacctacggggcagccccgggtggctcccggtcccggacacccacgagcccgctggaggagctgaccagcctcttctcctccggccgcagcctgctgcgcaagtcgtccagtggccggcgctccaaagagcctgcagagagacaaactcaaggaaagaagacagcccaggacctggaagtcagcttggggccagaaatgcagcgagttcttaggtccaagctgcatatggagaagtctgtaaaagaggatagaggctctagatgggcacaggctcttggcttcatggactccttgtcccatgttgagagctgcgcagatcttcccctcttccaacttgccatgggcattgcacaaatatttccctctgcccgcaaaactaatctaatccaccctcaccctcccctttgccatttttgaatcactaatcaagatttctcgacttccctccttaaaaaaaatcatctattatatcttttcattatatctatcatctcttcttgtagctcttatcagagctctaattccatatgagttcatgtaattattttctccctaccttacattaggagttctattcaggcagaggtcatggtgttttagttcactgttctattcttccagatcacagtgcctggcattcaaaatgtct

SEQ ID NO: 473458 - DNA, 693 bp, Homo sapiens
cgcactttggaaaacttggactaaatgtaatacaccagagacatggccagtgagtggtataagagtgaggatggtagaaaagtacataatagatgctgtctacctgatggcaataaaagggtatttgactggctgccctccaactcatctgctagagctgtaatgatgaagagtaagagaaaatggaaagtgaaaaatcgtgtaagggtagctttgtcaactgagaatgcacctcagattcattgcacaaagtcagttccgatacatgggatggccgatagtagatttgtaattactgtggcacctcagaatgatatctggcctcatgggagcagtgaagaaaataatatgggtactatagacagctgtcaaggaggtggcaataagagtaacaaaaagggcacaggtattggtgtatgacatgtttgtagtttcaatgatgaggtctttagagtaaaagcctgtgaagaaaggcatacttaaaggcagtcttcaagctctgaaatttttttctctgcttggattattctgctattaataattgtgattgcactgtgatattcttgtagtgtatttttcagctgtgtcacactagttatattcttctctctactgcatattttgtctgacagctcctgcattgttgtattatgatttttggctttcttgcattgggttacaacgtactcttat

SEQ ID NO: 473459 - DNA, 579 bp, Homo sapiens
cagtgggtcttaacttgtgatatgccatgggagttgggcctgctgaatgatgccacttggcttcctggattcagcctccttcctaggaaaatggatggatctcctgcctcactggaattcccagggccagaatatgcaaaagctcctgggtctccatgcatgcccaagcagccacaagaagtctgcacagctctgtgctttggacccaaggccctggtggcatgggctcatgtgggctgtcaccccacgctgctgttcctcactctccatagattgcaccgactgcctagtcagtgccaatgtgagaacctggatacctcagttgaaggtatagaattcactagccatttttttcctctccttcagccctgtggactgcagctgcttctaattggccatcttggaccacccctagttatttattcttaattgacatttgtatacttttgaagttaaatgtgatgttttaatttatgtatacattggagaaatattcaattgagctgattagcatacctatcacctcatcaacttacctgttttttggaattagaacttttgaaaatgaaagacacattt

SEQ ID NO: 473460 - DNA, 538 bp, Homo sapiens
tcttctcggcttagcagctgaagactgacactgcccgatcgcctcagaagcctacgagaccatcacagacacactaggacatctctactccttccctggcaactgatcacatgcctattaccatcccattaaaacctcatcacccttaccctgctcattgccaatatcccatcccacagcacgatttaaaaggaataaagcctgttatcactcacctgctacagcataggcttctaaaacctatacactccccttataattcccctatttcacctgtcctaaaaccagacaaggcttataggttagttcaagatctgcgccttatcaaccaaattgttttgcctatccaccccatggtgccaaacccatatactctcctatcctcaacacctccctccacaatccattattctgttttagatctcaaacatgctttctttattattcatttgcacccttcatcccagcctctctttgctttcacttggactgaccctgacacccatcaggctcagcaaattacctaggctgtattgcc

SEQ ID NO: 473461 - DNA, 1181 bp, Homo sapiens
cagtggagagtgggaggagtctttgtttaggtttcagtcactcctttctgctttcctcaagccttggatgcagctgaagccatgagattaaaggctcagggtcacagccacatgaatgcccaggctctgctggaagaaggtgatgcagggagctcggagaattcatctgagaaatctgatatgcttggaaataccaattcttcagttttgtattttatactgggtctacactttgaagaggataaaaaggcgttagaaagcatccttccaacagcacccagcgctggcttaaagagacagtttccggatgacgtggaggatgcacctgacctgaacgcccctggaaaaattcccaagaaagatctctcacttcaaaggagcccaaactctgagacagaagaaagtcaggggctctcgcttgatgtaactgactttgagtgtgccctctgcatgagagtttttcgtaggattgaagacttgatcatttctgaccacaggtgagtccctttaggcttttacagttgtcagttattattgtctttggtctgaaatcaaaaccagtaaaattcaggtcccatggggaagctatttaatgatatttagccccaatataaactattaaatccaggttccatggggaagctatttaatgatatttagccccaatataaactattaaatccatttacgttaggtatggtaaatacaatgaagagtatttaaaagctgaagaccttctgatcaattcctgaaatagtgaatccatatcagctgtattgggctgtggtcctattagtgccatgaactttctatggagcaagtcatataacatcttaagggggtggggagtatcttcctttgttttgcattcattaaatgagactgataatatttgccttaattactttccagagattaaacttattgaatgcattttaagtaggataaagtttttttttctttttacaaacgtacagtaaaatttattttttaaatctgatgtgataagatgagatattatacttaagtgaagttttaaataattataacctttaaaatttactgccaaaacattaaaataactagttacaattgaaaacattttctaaaacattgtatgcacatacttgctttattaaattgcatgcatactgaatctttttaaattcttcagagttctc

SEQ ID NO: 473462 - DNA, 1087 bp, Homo sapiens
tttcacagctgacagggtggctgccctcagcagccactttgtttacctactcaagcctcggcaatggtgggcacccctcccccagcctcgctgcctccttgcagcttgatctcagactgctgtgctagcaatgagcggggttccgtgggcgtaggaccctctgagccatgcgcaggatataatctcctggtgaggcgatgcctcgccctgcttcggctcatggtcagtgcgctgcatccactgtcctgcacccactttccgacactccccagtgagatgaactgggtacctcagttggaaatgcagaaatcacccatcttctgtgtcgctcatgctgggagctgtagactggagctgttcctattcggccatcttgctgagtgtttcaaagaatgcctcaatgacagtttgctaggccaaaggggtagcaggggatggagctggaacctgaactgcaggctgtgtgattctggaggccaaatcccaactcagaaggaaggtcctcagaaatcttggaaggaacagcctctcccaaagtggccttctgtggctcctccagggatgttcagaaggtctccttagccaaagataactggtcctgggaaaacaccacttaaatccacttaaagcaggaccaaaatttgacattcagtaaaagaataataggtttaattgtgattttatcttgaaaaatagagtgaaaattatgaaaataagtttatcttacatttattaaaatgcacattataattgtaattatgtatgtgctaatttgtaagatagaaaaggaacaaactgagtggtattagggtggcttttgggtacaacattcccgacaaaagagtagggtagctcatcaggacatcctttacttcacacagagtgttacgtcacaagcataaggaaagtgtctcttttattaaaaaaaaaaatagatgcaaaggattcatatatttccctgatgcctctcttaatcctttggcattaaaatcactttcttttgcagtgcctaagcattggttttcctttccatttataactggagaaattgccaaactaaacaggttagtagttttacatgtggttc

SEQ ID NO: 473463 - DNA, 558 bp, Homo sapiens
ttgtttgcaacaatgattccagccatccctcttcaccccagcccagaggtccccagagctgctctcagtctcagagctgggggtcccgtggtgcaggctggggcagttccagctgttgctgctgctggctttggagtcgcctttctcaggtcagctacgcctgggacactcaccttctgctttccaggatccaaaagtgctgtttgctcctctgctctcacctgccatgcggtccagggggccagcactgacccttcagggcagggacacactcactggcttctgagcatcgccaggccctggtcatggaatgaggttggtggtgtctacctctccctccctcccccacggtgtctccttgaggaaaagacagtctcgctctgtgcccgggccctggccggcaggtgctgtgggacagcccagggaatggccaagtcctcctttagatgagggtcggtgcctggtcactctttctgttgagtccttttagcgaggggccacataagaggctgggccccagtggacccatggagagccatcctgtgaatgcgcggcacc

SEQ ID NO: 473464 - DNA, 578 bp, Homo sapiens
ttgaaatctggcagctcaagagccatgtggctggttcccaggcaccatgccaagcgcattagcaaagactggcagccccagtggcaaggttctatcaaggggagcttccagctgcttgttggtgttggggtctggtgtgtgcactggcagtcaatggtcagctgggctcgccatatgccttgccacagccctgagcagtgggcgccccaagagctcatgtttaatatcaagttccatgctggcgccttcacccttcatgcagcaaacaccatcgaaagatgtagagaaaacactgccgaagattggaagaaactcatgttagagcaaattacccagtgtgggaggtttgctttgcagtgtgctgaaagcacagatgttcccaacatggctcagctgaagcgcagggaagaggtagaagcctggagggcatagaatgttgcagaccatcagtgggctaatgttataaagccaagactgtggcattacagtagaatctttcccatacttggtaaggagattgggtggaccatgaaaactttccagccacacagaatgacttatcttcatagcaaaatacc

SEQ ID NO: 473465 - DNA, 646 bp, Homo sapiens
ctctgcctcacctctgagaaccacttagttgctaggagacagcaagctcgcggttactatgggaactgggctgatgtggaaagtggagagttggtgtccaggcagcaatgagaaggctccagtggccccgcgtgaaaagggggatgattatgattatagcccctcctgcatgcagcttctgtgggggtcactgagtctgtacctggaggattcccggagccaggactgccatgggctaacgcggctcttgcccagacctgagagtcctgactcaccttgccaagccatccacctatccacatctcaattgccgcatctgcaaaatgggtacactgtgaggctccgtggaagtggtgtgggacccccttcccctgcagtgctagcccctgccctgctcagctcacggagctgcccgctgcagacggcccccacctggtgtcccgctgtgctgttgcccctgtgaattgcttaataactgttgaacaaggaggctgcggcgttgcttccttgattcctgatcaaggaattcaaattccatgattcctcctgggacctcatctgtcctttccagcttggctggggaagtgagggaagctgctgtgctgtgccaaggcccccctcccctgtcctgttttcctattcactc

SEQ ID NO: 473466 - DNA, 694 bp, Homo sapiens
ttcttctgggtccctagaatttccaaatgaaatttagcatcagcttaataatttctgcaaagaagccaggtaagatctgggagaattccctggattcccaggcagagacttgttctctttgcttactttcctttaaacaaacagagtctctctctttctctttttgtctctgtgctgagctgcctggggctggggaaaaggcccatggcaattactgcctgcctactgcctatgatgttcactcaaggcccaagggctcttcagtcagcctgtggggaatgctgtctgtcctgagtctctcccttcagggcagtaggcttccctctggcccaggggaggtccagaaatactgtccaggagccaagggctacgactggaaggagtctctctccatagccatcatagctgggaatgtgctgggtcacacttgaagccagcacagctctgagtcttgcccaaggcccttgtgtctctttccttaatatgatgttaaaaccagtactgtgattgcttacttgatttttggttcttatgaaggtgattttgtgtgtgggtagttgttcaattttgcattcttgtgtgtgtgtgtggtggggcaacaatcactggaggcttctatttggctatctagctctgccccctcctcatcaactttgcaactagttgttttgacatccattttatatgattgcct

SEQ ID NO: 473467 - DNA, 564 bp, Homo sapiens
aattcactgttagaccccctcactttctgctgatgccacagaaatggactcaattccgcagggatttgagactcaaatctccattctgactcaattctgcagggattttcagagggcgggcaggcagattataacatccaaaaaatggccacaatttctccctggagaggctacatcacaaaaggtgatacagctgctaccggactctccctcttggaaagcctacccttggagcctagtgaccatgttgagaggaagcccaggccacgtggagaggccacgtgtgggtgtttcagccaacagccccagtgaagggcccagctggagccggcacggatcctgggacatgtgcccgactggacatcggaaaagaggagaaggagaacaggctttgggctgtggccgctgggtgcctggtggacacagccctcaatctttgccccttgcagatgatgtgccttttgagaggcaccaggtgactgctcacagtatgcaagcgcattatctaaaagcactccctcatttggaaacacttcaatgaaaaagtgaaattttgttcacaat

SEQ ID NO: 473468 - DNA, 563 bp, Homo sapiens
ggcctctccagagcgctgttctgataatccacagcaaactgagtctctgccggcctctagtgagagagtttgaagctgcaggtggttgaacatggctgaccgtcggcctctccgtgggcatcttgctgtgtctcttgctttgtatttgacaatatccacgctctcaggtacagctgatgccatggatttcagagacctgaaaagccctgccggcctccaggtgctcaacaattacctggcggacaagagctacatcgaggggtatgtgccatcacaagcagatgtggcagtatttgaagcagcatctggcccaccgcctgctgacttgtgttatgcccttcgttggtataatcacatcaagtcttacgaaaaagaaaaggccagccttccaggagtgaagaaggctttggtcaagtatggtcctgtggatatggaagacactataggaagaggagctaaagatagtaaagatgatgatgacattgatctctttggagctgatgggaggagaaaagtgaagaaacgaagaggctaagggaagaacaccttccacaatatgaatc

SEQ ID NO: 473469 - DNA, 562 bp, Homo sapiens
acccaacagctcattgagaacgggccatgatgacaatggcggttttgtggaatagaaaagggggcaagaatctagcacaggaatatcggggggtagggaaaggcaggacttttggaaccacagctgccacaagaaacaaggacaaggatgggcttggacaagcgcgaggaatgcaggggccagagacacgaatcccagatttctgcagcatttcaggagcagatgggcaagctgagggacttccttcagagaccccattcatccgaagttcagacagccccaaaagaaagtggtgggataagatcgtgaatgcaaagagatatggcagacctccgccaaccacagataactggagctatggcatagtcacagtgagctcagcagtgcctcgtgccgtggcattcacgcgatctcaagcaccccgctgctccggatctcgggaagatcctgccagaggttgaaccttgagtgggggttactgagcaggcagatctggggcagagtcttcctctctggtgggctggccggctcctcctcctcctcctcttcttcttcctcctcc

SEQ ID NO: 473470 - DNA, 526 bp, Homo sapiens
gcacactgcatgctgttaagccgcgctgactccggaattttgttcccaacggctgaacctgctgggctggtggcagaagtccgaagccggctggcagggtcccgagctctagtgcctggtcgtttggggcgtcactgtgctcatctgggaagcagcagggcatctgatgttctgagtctttcctcctgctaccccctgcaggtgtctgctgacttgaggtctgtgctaagcggatccctgcagcagcccagctgccttcagctctgtgagttcagcaattctttgccaagtgttaggaaaggatggcagcttcctaagatgattaatggggaaggaaagcaggatgaaggctccaagtggagcctgccagttccacttggaggtaattgcaagtgcaagcctttacagaaaaaagtatgaagttttaagaagactctaaggttacttgtattgatagtctttggctgcagtttagatatgtttaacaattagataaagaaggaataatagctaacagttgtactgc

SEQ ID NO: 473471 - DNA, 1455 bp, Homo sapiens
ctgagaggccctggacagctgcggtcctaagatgtcaaggggcatggaagggagaggctgcagagttccaccaaagggtgttttcctggcacccaacaagggccagaaactagcacaatctatatctggccttagaaacagggtcaagcgaaagggcaaaggactattcagccatggcataggcagcaaggtcagagtcagaagagatgtgacaatgaatacagaggtaggagtgatgtggccacaaaccaaggaatatgggcggcttttagaaactggcaaaggcatggaaacagatgtttctctagagcctccagaggggatgcaggctttgattttgttgtcatggttgggctctgagaagttccataaagcagtttcctctgagctgcttggactttaccctagacaggcagaagacggcaccatcacttgggctaaatcgcacccaccaaatgtcctactgcctgacacctctccatagactttgcagagaatacatcagttggtcctatctaaataaaccacagcttctataagatgccaacgcacccaccaaatgtcctactgcctgacacctctccatagactttgcagagaatacatcagttggtcctatcatctaaataaaccacagcttctataagatgccaacgcacccaccaaatgtcctactgcctgacacctctccatagactttgcagagaatacatcagttggtcctatctaaataaaccacagcttctataagatgccaacgcacccaccaaatgtcctactgcctgacacctctccatagactttgcagagaatacatcagttggtcctatcatctaaataaaccacagcttctataagatgccaacgcacccaccaaatgtcctactgcctgacacctctccatagactttgcagagaatacatcagttggtcctatcatctaaataaaccacagcttctataagatgccaacgcacccaccaaatgtcctactgcctgacacctctccatagactttgcagagaatacatcagttggtcctatctaaataaaccacagcttctataagatgccaacgcacccaccaaatgtcctactgcctgacacctctccatagactttgcagagaatacatcagttggtcctatctaaataaaccacagcttctataagatgccaacgcacccaccaaatgtcctactgcctgacacctctccatagactttgcagagaatacatcagttggtcctatctaaataaaccacagcttctataagatgccaacgcacccaccaaatgtcctactgcctgacacctctccatagactttgcagagaatacatcagttggtcctatctaaataaaccacagcttctataagatgccaaggcctctgcagtagcacaagggcccagcatgtgattaggattatggattgacttggcgacgcgggct

SEQ ID NO: 473472 - DNA, 1067 bp, Homo sapiens
tcatcaagtcaccatgcgacctgaactgcctatcatgaactgggtgctttctgaaatgagtcatgcacagaagcattccatcatcaaatggaagtggtacatatgtgatcagactcaggcaggtcctgaagtcacaagcaccacccgaaagtggacagctgcagaactacagcccctttataggacatccctgaaggacagcggtgaagggaaatcttcccagtgggcagaacttcaagattcacaggaccggtccaggaatcaaggggtgaaagtgaaagtggcaccactcaccatcacccctagtgatacaacagcaaaatttttgctccatgttcctgcagcattacattctgctggtgtagatgtcttagttccagagggaggaatgctgccaccaggaggtacaacaacgattccattaaactggaagttaagattgccacctggacactttgggctcctcatacctttaagtcaacaggctaagaagagagttacagtgttggctggggtgattgacctggactgtcaagatgaaatcagtctactactctacaacagagaaaatgaacacataagctcttcggatgccatacagtccatattggctgccagcctttcacagatgtttgggaacaccagcggtccagcgcatgtttaccttgggaacaattggaaaccacaggccttctatttagggaaggcactggagcccattcctacgtggagaacgacaaatcctcattaccatgtaggtcacagtccaggatatgcagagtgagttcctggggttgttttcagtacttctgttccatgcatcaaactaaaactttttgataaaattggttataatgttttgatggtgaaaaaaggaggaatcaaagataaattctaggtttctgccttgagaactgaaaaggctagtggtatgctaacatgtaaagaatttaagaatgaaaaatttttaactaagaaatgatcatttgttttgcacatgatgcatttaaaataagcactcacctgatactaccaagaagagaaaaaagacaacagctcaaggaagt

SEQ ID NO: 473473 - DNA, 853 bp, Homo sapiens
agctctggagctataaacttccaggagactttcttgggtcatcacaaacacaacacgtcattggtgtcttagtgcattttctgttgctattaggtggcagccacagcggccgccgcaggtccccacagaatgtagacatcggtttgttgcctcttgggcctctccacaggcattccctcagcgtgagcagggacacaggcgagagagagcaagagtgaagccaccgtcagtgtgtaacctggtctaagaagtgacatcccctcacctttacacgagggtgtcagctccaagaggccagggtctacgggtctttttggtgaagtgtcatttcatccctggagtttgcccctggggttccacatggttttccagccagtgttggggctcaggtggggccatcgagagccgctgaactctcatcctctccaggtcccgccagccacctctcagcgaggccccgaggggccagcagccctaagcggagccacagagcccatggctggctcttctccagaccaggcttatctgaccttccccaaagcccccgaggggtgccagggccacaccacagccagctgcaaggggacagaaaggcagtttgcctcagcagccatcagagtctgtctccctggggaaaggagaggcaagcccagcctgctccaccgcctcatggagcctacgtcgttcagaaccctgctctgccccacagagcgcactgccccggagtgtgattttatattcattgcagccagcccccttcttggcctccagtttccaatttccacgctggagcatgagctctgaggccaggggccatttttggcacagccttgatcattgcctgcccacaggg

SEQ ID NO: 473474 - DNA, 506 bp, Homo sapiens
caccgccgccgatgttgacatctgcagatgccaccttctagaaagttccccttccccaacatgtccggagtcctcaagggatgtgatactttcagttccgctgccctacagaatttgtcccaggccattgtatgttcttcaaatcctgtattccagggttctccagcccctggaccatggactggtactggtccatggcttgttaggaactgggccagacagcaggaggaccatctagttgcaagaaaacaagctcagggctcctacatgatggtcttaattactcagtgttcacattttccttccactgttggctttctctccacatatgatgaaactccatggtcagcactggaagaggcgagaggcgttttcatctggatgtgggtgaagggtggacaaggtaacagcactgggaaactttttctccttctcattgagcacagtgtgaatgtctatgtcacttcatttgcttttaatttctattaaggaaattttaaacatac

SEQ ID NO: 473475 - DNA, 448 bp, Homo sapiens
gctctggtgatccttcgacctggattcgagcccccacgtatgggcgctgcttgccgagaccagcttgctgtggctctgaacccagaaagggttcttacaagctcagaagtgcctgctgtctggcctcctactgtctggcctctgtctgctcctggtgcccactctagtgcaagcctgggtgctgtcacaacccagccaggtgtgcacgtgctcaggccagtgctgacatgccagccccctgccaccttagccctcttgggactttgggtactgacaatcatgggaaggaggtgcccacagtggaaaccgcttgtgatgcatctgatccagccacaggcttgcatgaagccagagtctgtgctggcatctggagctgactaccccactgcagcagccgatgtgcctggctgtgcacagtggcctgaccccctacttgctcactgacgca

SEQ ID NO: 473476 - DNA, 1075 bp, Homo sapiens
ctggagctattatctacgtgaatatggggaacaagttacccatttgttgtccactacttgaagagggaatcaaccctgaagtctgggcattggaagggcaatttggaagggcaaaaaatgcccgcccattccaaatcaggctaaaagaccccaccacttttccttatcaaaggcaatatcccttaagacctggagctcataaaggattgcaagatattgttaaacgtttcaaagctcaagccttaataaggaaatgcagcagtccctgcaacaccccaattctaggagtacaaaaaccgaatggtcagtggagactagtgcaagatcttagacttatcaatgaggcagtaattcctctatatccagttgtacccaacccctataacctgctctctcaaataccagaggaagcagaatggttcactgttctggacctcaaggatgccttcttctgtattcccctgcactctgactcccagtttctctttgcctttgaggatcccacagaccacacgtcccaacttacgtggacggtcttgcccccagggtttagggatagccctcccctgtttggtcaggcactggcccaagatctaggccacttctcaagtccaggcactctggtccttcagtatgtggatgatttacttttggccaccagttcagaagcctcttgccagcaggctactctagatctcttgaactttctagctaatcaagggagacccagggcaaatactcatctagtagaacgggaaccaggggcagaaacagccttcaaaaaccttaaagcaggccctagtacaagctccagctttaagccttccgacaggacaaaacttctctttgtatgtcacagaggagcaaggatagctcttggagtccttactcagactcgtgggacaaccccacaaacagtggcataccaaagtaaggaaattgatgtagtagcaaaagattggcctcactgtttacggatagttgtggcggtggccgtcttagtgtcagaggctatcaaaataatacaaggaaaggatctcactatctgaactactcgtgatgtaaatggcatact

SEQ ID NO: 473477 - DNA, 609 bp, Homo sapiens
cgtatcacaaccatttcctcacttacctttataatttcaccagttatgttttgggaccatgcgcagagaaagcagaggcgatcggaggcacggatgtcgaggccagtgtgctcggcagggcctggagttccggagctctcagaccttctcctcctccgcccccaggtcagcagtcccctcccgtgcagcatgtctaacacagaactcagaatcgtccccaaaccaactctcccctctgctttccacacaaatgccaaagacttcgtcacagccatctcctgcccagcggtgttcagtgactccccgtcccttgcagaatctgattctaatgagcttaggtggacaaccaaggccctgcgatatcccaccccaacttactcccgcacaaactccatttctcagctgaaacttaaaaacttaccacaatccaaggaagtgttaattcacgcagccactgctgtcatcaaggtgctgggccgaggggcaaacttgagcttgttaacagaatttattcctgaaagagctgcaataggccaaaacataattggatctcaaaagtttttgagaagaataatgaatgatgttaagaagaatgttcttgtgtaactt

SEQ ID NO: 473478 - DNA, 563 bp, Homo sapiens
agcaagcaaaaggggtccgatggtactcaccgcttggtgatagtcccatctgggtcaccaaaatgtgtccagaatttattccttctgtaagaacaatccctcctcttcctcctcagcctactcaatgtgaagacaatgaggatgaagagctttataatgatctacttccacttaacgaattgaaaaagactccaaatcatacagcataccagcctgaagagaaaatgacccagtggctgccatgtctaccaggcactggatgctacagctgtgttccactcagacctcgaggtccttgtgttgagatctcacttcgcaatcactgctgtcctccaaagtccaatgcctctgctgcccactcaccagcacactggatgcatatgcagagccgtttcaaaagctacaagaaggcagtaagtgacaagtctctttcccattcctgtccaccagtggctgagtaccactcccttcaggcagcccatgctagcaatttcttgtgaatccttccaaagatatataggcaaacactacattctatccagactgtaatatcctattatatc

SEQ ID NO: 473479 - DNA, 1320 bp, Homo sapiens
tgtcaaactgaatattcccacaaaatgtggaactgccaattattggatagtgagagaattgaggctgaaggtagaaatgtgatgcctgaaaatgactatgaagtgagtcatcacaaagtggacaaagcgatgcagagagaaggcggaaatcaaaggagtgaactttattaccttctgtcagtgttcagaaaagaaggctctggtttcattataaactgtgaccacttggggcttacggctggccctgtttacccaggagaggacataccatggttaggctgcattgctttgagtctcactggcctcctgatacagtttagacgtgagtctcctccaaatccgacgtgcaaatgtgatccccagtgttggaggcgggggctgtgtggagtccagtccgacttcacagcttgtccttgcataaggccagacctggtgttgaaaagcaaggctagcaaacgtttcaataaagttaaaacacatgagatgtcctacactcgcttgtaccttcctggcctccaagctggcaaactgcttcttccaggaacttcagttcattctagtgaagagtgggatttggagatcaagatgtaagtacttaaacctatttaaacgccgtcttttaatatgaacatatattttgtataaatataaaatttaaacataaatatgttagaagcatagtgagaaatttacaaaatacaactgatggaacaagcaaaaatagaagcacataaaagggcatgtaatcttccttgaggcgaaaactaagtcctgtaaaatttgtaatcttctcaaaatgaattaatgagttaatgaaattagaagccaaatcccctattttttagaacatcatagaaatattcctattcatttgaagggaaatacaggaaactattggtaaaataaaatagacataatggggctagaagacatgaaagtacattttagctctgaaataaataaagcagtgtggtattcacctaacaatggacaaagaatagaattatttcagagaaacaaaatagcatattgaagaaattagtacagtacaaatcaggggggcaaagatggacatattaaatgatactggagaaattgctagcaacttgacaattgtaatactaattttcatcattttaagcttcagactaatcagatttatttgttaaaaaagtaaatataaggagaaaacgtcagtaattgaacagtggaatttaacaacttgcaagcataaacatttcatgacatttttacattgaatagcatcataaatagaattaagaggcatgttatacatgaataaaaattttggattattac

SEQ ID NO: 473480 - DNA, 655 bp, Homo sapiens
tcctttctgcgtcagcgtcttcactgctgtgcacctttcattctctgtggaaaaatgctcacttctagacttataataatgcagtttaacttggctctgtttggaaacacaatgccagtgaaccttgcattttgttgtcattggctagaagccacggctttcactcagcccctggtcctagagctcacatccagtctggaagagaccaaaatttctgtatatgctgctactctgtgctcatggagtatccctgctcttcaagagcagtcacagagcagtaacactgccccttcaacaaagctattttcttctatctatggctcgcctttgaattctttcctgcgcaaagccaagaaccctcactggctaagctcaactttcgggttcatctgccctgcatccattgttttcaagatgtggaagtggcagttttcaggggctaagaagagcctcttggagttcttggtttgcaagcaacagaaagcaacgagggtgagccttaagcaagctaatgagaagaacaacaatttctttataagtagaaaaaggaataaaagataaatctaaagaaagaaacaaagctcttcctgagtctgttgactttggctctgagccctaccattaacttaaaccctcaatttcatgtctctatggt

SEQ ID NO: 473481 - DNA, 548 bp, Homo sapiens
atggattttctgcccgctgcagatatgtgatgtatctggtgataggaactaagaaacaggagaggattcttcttatgcttttaccaggagaacttggtggggttcctggaaataaagcccatgaaaatgtgcatggtcttctaagacaagagcctccactctcaagcaattgcaacaaagtcgctccacctcctccctggttgctgcaggcctctctgttcccagttcaacagaagcagcatggatggatgcagcaggctctcaatcaagggcagataagaatccctcttcgcatgtgctgctgctctactttggggatggctcgagtcttcacactacacagtcactgtttcctctggacttttaagaaggagatcatcctttctgctccttttactctcctctcagtgcctctccatgctcaggccatcacttttcacgtctccaagttctctctccgtcttccctctccccacgcagcccacacagctctgaggggccatgtgatcatagggccatgactcacaggcagacttggagagccgtct

SEQ ID NO: 473482 - DNA, 1048 bp, Homo sapiens
caggtagtatttggttacatgacctgcttgggaacgtggcgaagcacacagacctcccacgtggacatcgccttgggcggctgcctgcttgcaatgctccatggatgattctggggcagctcttccacacatctcacttcggcaagacagtgctagggaacaccccgcaagcacagccaaatgatgagacgcttccgacaggtaggacagttgcagaaaatgacaccggaaaagttgagaaggtcactgagcttctcatttatgcggcagttccaactgagaggccggagaagctgacggtgtcgcacggttcagatcttttccacgtgaaggcattctgtacatgccaccacctcatggaagattcgatggacatggacacgagcaccctgaggccccagaattaccttttcagttgtgaactaaaggccaacaaagatgatcaccttaaggtagataatgatgaaaatgagctcaagttatctttaaaaacagtcagtttagtggttggtgcaaaggatgaattgcacactgttgaagcagaggcaatgaattacaaaggcagtccaattaaatgtggctcaggaccagtacatattagtggacagcacttagtagctgtggaggaagaggcagagtcaggagatgaagaggaggaggatgtgaaactcttaagtatatctggaaagcaatctgccccagggggtggtagcaagtttccatggaaacaagtaaaacttgctgctgatgaagatgatgatgatgatgacaatgataattttgatgatgaggaaactgaagaaaaggtgccagtaaagaaatctatatgagatactctagccaaaagtgcacaaaagtcaaatcagaatggaaaagactcaaaaccatcaacaccaagatcaaaaggacaagaatctttcaaaaacaggaaaaaactcctaaaacaccacaaagacctagttctgtagaagacattaaagtaaaaatgcaagcaagtatagaaaaaggtggttctcttcccaaagtggaatccaagttcatcaattac

SEQ ID NO: 473483 - DNA, 1404 bp, Homo sapiens
gcaggaagagcacaggctgtgatgggatcctttggcccctgcccagccctgtgtcctggagctgcccttcatccctcctgccttcaggaactcagcaccccccattctggagaaggggttacagtccagtgggagcatcttgagctcctcacaccaggggccaatgcctggcacgaggctcagaggctgcccctcacctcatgggaggacttccatcccatcatgcatggaggaggaggaagagaaaaaggaggaggaggagatgaggaggaggagaaggaggagaacaaggaggaggaggagaacgaggaggaggagaacgaggaggaggaggaggagaacaaggaggaggaggagaacaaggaggaggaggagaacgaggaggaggagaacaaggaggaggaggaggaagaggagaaaggaggaggaggagaacaaggaggaggaggaggagaacaaggaggaggaggaagaggagaaaaaggaggaggaggagaacaaggaggaggaggagaacaaggaggaggaggaggaagaggagaaaaaggaggaggaggaggtggaagaggggaaaaaggaggaggaggaggagacgaggaagaggaggagcctctgatttgtgtgactttccactggaatgtctgtggtcgaagacctgagagcctctggcaaaccactggtgtaagttcaagagtccaaaagctgaagaacttggagtctgatgttcgagggctggaagcatccatcatgggagaaagatggaggccagaagactcagccagtctagtccttccacattcttctgcatgctttatcctcaccatgctggcagcagattggatggtgcctacccagactgagggtggttctgcctctctcagtccactgactcaaatgaaagaagacaatcaatcagctatgaagcaagaagcagccctcacaggacaccggatctgccagtgccttgatcttggacttcccagtctccagagctgtacgaaattaatgtttgttgtttaagtcactcggtgactgatactttgttataacagcccagactgactaagatacctcctgtcaggtataaccccctgcctagaaccctaattttaggtacagagagattttccagtccacttaagttcatatttcaaaaatgttcattcttaaagcagacaattctaagaatattattgtagaaaatgttatgtaattcaatttttactaaaaagtttgagagcaaatgactgttcctgctaccagtcttccaaaataaaatattgatgtttaaaactctgtatgcacacttgctagtgtaatataagtgtgattgttgtagcaacaattttgagactgtcagaaagcagatgagtctctctgtgtgaatttcagaccttgatccat

SEQ ID NO: 473484 - DNA, 1750 bp, Homo sapiens
tgggtaggagaggacggacctctccttctatgatgaagaaggggcagatggcacagattaaacatcctgtaccctgacagctgcctagcccacagccacagctgcctagcccacagcgacagctgcctagctcagagccacagctgcctagctcagagccacagctgcctagcccacagccacagctgcctagctcagagccacagctgcctagcccacagccacagctgcctagctcagagccacagctgcctagcccacagccacagctgcctagctcagagccacagctgcctagcccacagccacagctgcctagctcagagccacagctgcctagcccacagcgacagctgcctagctcagagccacagctgcctagcccacagccacagctgcctagctcagagccacagctgcctagcccacagccacagctgcctagctcagagccacagctgcctagcccacagccacaggtgcctagcccacagccacagctgcctagctcagagccacagctgcctagcccacagccacagctgcctagctcagagccacagctgcctagcccacagccacagctgcctagctcagagccacagctgcctagcccacagccacagctgcctagctcagagccacagctgcctagcccacagccacagctgcctagctcagagccacagctgcctagcccacagccacagctgcctagctcagagccacagctgcctagcccacagccacagctgcctagctcagagccacagctgcctagcccacagccacagctgcctagctcagagccacagctgcctagcccacagccacagctgcctagctcagagccacagctgcctagtccacagccacagctgcctagctcagagccacagctgcctagcccacagccacagctgcctagctcacagccacagctgcctagctcacagccacagctgcctagctcagagccactccctaccatcccatgtctcagtgtgccagccacagcagagactgccaccttgagatcatgaggagacaagcccaaggccaaaggtgaaggcttggagggaggcagtggaagaatggggtgcccagccactccccgaggctcgagggggccaaccccagagcctctcccacacggaaggctcgagtccttctgttaggtggcctgataaacgttcctgattgtttaaaccacttctcttgaagtttcccttcccacaagctaagccttccgtcctattcacaaccacttagttcaggacaaatgagtttcagtgactctgaagcttcccactttgatgacccaggtaactgagatcactggattaactcaggggccaaggacgggccacatccttcatttctccaaacctgacaatgggagtttagtaacagatattgaaggtgtcacaggaaaatcgaagtgtccttccacattggacatcctccatggatgctcggatgctgtgctggccaaaccgtccttcactaatggcctggaaagttctcacgacacggatatacgcaccttccctgtgtccatgggtatgccagtcaccctgacgcagagccaagagcctgcccagcaggcagcacgggccaggcgcagagtggggccaggcagccagccacgctcgcgcaagttctccaggcttggcccactcggatgcagccacccacccggtccatgactgtcccaggaacagagggtctgcacaaaccacatcctatg

SEQ ID NO: 473485 - DNA, 526 bp, Homo sapiens
ctgtttgatggtgccaaagcttcacgcgttcagtggaaagccgtaggatactctcggaatgctgggcagtgacggccacagctccctgtcagccacatgccctctgcagtggacggcgatgccaaaagacttttcccgcctccaggccaacgtggactccaaaggaaaagaaccttgtaaatatgatggcataccccctaaaacacaggattctgtttattatgccaaagaagaaaagaagaaaacattggcagaacctttagtccaaaggggtgcagaaggtgacgtgtataaagcaccgactcctagcaaggaaacccaaggggcgctggacgtcaaagaggagcacaatgtgcagctggaggtgcctgtggaccaggacattttaggctgttacttgtatgccaaatataccgttgtcactaggatgttactgtggctttctgggttgtagactgtgtgtccaacacaacttttcaacacaggcagaatcctcgtgtgacaagcactgttgtcataactttgc

SEQ ID NO: 473486 - DNA, 693 bp, Homo sapiens
tttcgtgtaggacatgacttgagggcttactaggaactttcctggagctagttctttgtcaagttttcaatgatcattatctcgagcaaagaaaaagagctgccatttttcatcttatggtggagcaggacagatggtttgaacaccatgcaggtggccagccttcctctatcctttaggttttgtggtaccagatgtgacagatatcaggccggaatggggcactcattgattcatctggtcgtccatgaggccgtggtgaggtgttggcagcatgctaagcacactccgctagcacgagacacaaagatgagtggagtagaagcacagaagagccgattcactttgcaaacctgtgtgcagcctgagaggggagggctgtgtggccagcaagcaaccaaccacactcgcatgtgttttgttcctgagagtggtgcaaaaggattgccttcgactctgcagggctgaagcaccagcaccaaaatgtgcagttcagacttccttccaaggccatgaagttctaatttaagctgttggagctgcactgtccagaatgtttgaaagatgtgagagcacagctcttcgcctcttagttctcagtttccattttgaatagaagaaaatatttttttcttaattcagcaaaagaacttgcatttgcactgttaaaaatgcccatttccctaccatttg

SEQ ID NO: 473487 - DNA, 730 bp, Homo sapiens
tgacagggtcctggaatgcttagagggcagggaggtgagaaggagcagagagggctggagaaagtccaggtgatttctttttcctagaccaccttctctctgattcagctgttcatgtgctaccttttctttctcctcttgaaccctgattttggaaaagaaaagcaatccaatcaccatgccgttgtttgcagaacacacatccaagtcaggtgttgctacaggaacggagtgcattagagcctcactggccgctgccctgggatgccgctggcagtgccaggcaccgaggtgctcacttgggacctgtgcctgctgcttcgctctgaggctgaggatgtctcccattgtggaaaacagggctgagaatatgcagcacactgtgaggagagttggcgagggagtgaatggcttgttgagctgtgttctgcagcagccagatgctggagagagagcccggggctcccctgatggggtcaccgggggattgagctggtgggagtatgaaaaggcaggagaatctatgggctcttgttccatgatctcggagagaagccaactgtgtcatggcatcacccgctttgttccacggttgttgggacagtcgtctgcctctggctgtcatctgctgcctgaggctgtcaatggaactgtggtttgagatctctggttggagtgctttccagtcggaatcatatctatgtatatatgatataatatatatatattt

SEQ ID NO: 473488 - DNA, 650 bp, Homo sapiens
caccctcaggctcccaatcactccatgggctccagctcacctaagtctacgctggactttctgtcaaaaatcccacccactggcagttgtttaaagtttatgcccaaactctatgccagtgaaatttctaccctgctgatggatctgagcatattcaatgttaagggagttttaaagtatgctagatgtcttctttctgctctgtccttcctgtgctgtcctggaagcactgccacattcacagagctggcaggggagatgaaagcagccccagccagtgatagtcttctttcaactccttgtcagaatctatcctgtggacccaatttcctggttcagcagggagtgtttatgtatggcccactccacacagtggcctggacaaaggacaatgatgacagacttgcaggtggttctaatcacttcaatgagaacagtccgtggcagctgggcagttctcaagcccacataagcttggctaagatctggccagtggattctagtttaattgatagcaacaattttgaggtctcatctagaagtgaaattgagaattggccatatgtttcttagaatgtaatgtgataattgtacagtaaaggtgagctcttcatttaatcagcaaatacttagagttgtataccctttac

SEQ ID NO: 473489 - DNA, 603 bp, Homo sapiens
tcatgcagagtacagcacaaatatgctgtcactaagcattggacagcttgaacaacagaaacctactgtctcacggttctggaagatggaagtcgagatcaaggtgtcaacaggtttggttttccgtgagggaggatctgttctggacattgctcttcggcttgaggatgcaattgccgccctgcgttttagggttttcctgctgataattttggaatccaaagaacttttcaaaaatcgtattactggttctgatcccggtaatgagtttttcagatggagatgtaagggacgtggaagggaggcttgtgggaagatgtcaacagcgacagagacttgcttgagaaaattcaagaatgcaagcctgggccaatggggaccaggaggacaggagtggagcccatgcaccacgtggggtgagagcatggtttccagcccgaataacatcttccagagattgcctggaagattgatgaataagccttttctctgttaacagaattaatatcatatggagccttcagaaggcgatacccgatgtagagtcagatgccagggagggttttgttgtttttttttttctaaccatccataaacctgcac

SEQ ID NO: 473490 - DNA, 599 bp, Homo sapiens
gcacacagcatccccaggctaatgttatttgagctgtccctcagacagtccagtggacgacctggggcaagtgctgtttctgctgtcagatcaaggggagcctgtgacagcctgggtcctgtcaagtcaaggtgcaggatacagcttggggttggcttccaaaaagagtcagtgagagatgagagaccacccgcttcagacatttctccccagtcactattccacttgcagcttccgggaggaagtttgagcggggtcaccttgaagccagaagatgtagctctcctcttaggcttcagggcaggttacaaactggtgtccaggagagcttctgcttttgtgttattttgcctgctcactggcctccagtgtgttgaatttgagttcacattatttcacgatgattgcacaaaattcctgcagatataaggaaccacacaattcttaattcaatactgcattcaatactgtccatttcatgtcaccccagtagacacataagcggaagtgaataagaggccgtgcgtacttctctgtggtccaggacaacaaggcaaaataataaatgcaaataaattaccctgtggctgaggatcatc

SEQ ID NO: 473491 - DNA, 1071 bp, Homo sapiens
ctttctttcgtgattatacactcgtaacaaagaatgttataatgagagagctcagctcagccgaagtggcaatcacactggagaaccctgggatggagaacactgcgtgtctcagatgccctgggatggtgggaggagatgtcatgaaatctggcacagagaaaggagttagaggagacacatttgtgcccctggaagtgactgttcacagagctacaggatttggctgtctttctgcaactctaaagccacctcgctccctgcacagagagccctacttaggcaatgccacgtccccagtgccaggacaggagctgcatgtcctgcttggaaaggccggacccttaagccgtgagtgctttgtcctcctcgaggcacccacctttctgattttgttggctagtatctcattctcatgtgaacacagtgtacagtaatgggtggtatacattggacacattctatttgccaggagtcttgcaaatctgatctcatttagactagattcaaatcccttttctgccattgctaatggtatgcacctagggaagttaataagcctgtccttcagtacgggcttggattaaggtgggctaacaggagactcaaaatatgtaatggctcaaacccaacagaagtgtctttcttgctcacccgtctgtcagtcatccaggagcctaagctgatgaaagttctgcccatgtcagcatgtggctttccggttttgctctggggtccttttccttccacatttctaggaggatgcttgagtgtgatggaggagattgcttgagtgtgatggaggaggatgcttgagtgtgatggaggaggatgcttgagtgtgatggaggaggatgcttgagtgtgatggaggaggatgcttgagtgtgatggaggaggatgcttgactgtgatggaggaggatgcttgagtgtgatggaggaggttgcttgagtgtgatggaggaggatgcttgagtgtgatggaggaggatgcttgagtgtgatggaggaggatgcttgagtgtgatggaggaggatgcttgagtgtgatggaggaggttgctgggct

SEQ ID NO: 473492 - DNA, 629 bp, Homo sapiens
agtaggtagtggcacagcaaagcacctgggtcatgaggcaaaaatgattcttgttttcaaatttaattcagttttctccttaggccagctgaacttgctgaatgatcactggctgcttagtatgattagacctcaaaatgctaaggattctactgctaatggtatgcagaacactgagaatccttggtatgaatggttcagagagttacacaaaataaatgcatttgacactcctgattcattgctcgtgagaggcaaggagtttgttgactctatacataacacctttgaccatatgtggagaacccaggaacataatgaagctggttggttcctcctaagttcactggacaaagtgatgaaagaaaatgatgaactcagagattctaactcctgccttcagaagcagatactgagcctcaaatctaagattgccctgagtcagagtcttatttcctgtagagaaagagctgacattgtggcaaatcaaacagaagctcttatcatacctgtaacttgactaacgtcttggcaggcccctagaggtgagggtgagagtgtgatccatgaggaggtgtgtgacacttgaaaagaactgctcgatgtttgtaatttatataaacagaaat

SEQ ID NO: 473493 - DNA, 668 bp, Homo sapiens
tcactcgtctaaatctcccagtgtcttcacgttgcctctagaccaagatgtcgaggacttgctggaacctacagagtcctacacgacctggccctggccccatcactcattgctctgttcttcaaaccaccaaacatgtttctgctgcttccactacctactgttccctatcgcatccacagtctttgattctaagagaaactggcaatagccaactagacgcctggaggcatctgattccagagtcacattccactacccttagttatccatggaactaccttccacctccaggaaccatggctgccagtgtctctaaacagctcctttgcttttctgacaacagccctggtccctccaaacgagggaattatgggatctacaattcaagacaagatttgggtggggatacagctaaaccatatcagaattggtgcatacagaggcgcttaacctcacaggcaggacttcatgggacgttcattcaaactgtgtcagaaacacagcgtgcccggcgctttcattccacagttgctggagaggcctactaagccccacactgattccaagagaggctgttatctaggaaaacgttcaatcatgtgttttatatttgattcatttgaaaaattatttttcagaaatttgttcccaagtaaccaagggag

SEQ ID NO: 473494 - DNA, 582 bp, Homo sapiens
atatcccacagagatatggccttaggtcagaccaagactttggcattcacttatgggcatctgacaacccatgttgcagggtctcatctagttgggtgccatgggggagaggacccatttaatgaagcactctgtcccttggtggagaaggtgtgtttcactggggggaaacccactcacctgggatgcccggattcctcagaactaccagaaggagaggctaagtctgttggtccacagagactgtggccacccctccccataggggctcaggcccaggaagatccaaattctgtccctgagcctctggctggagatcctgcagggaagctctacccaccaggaaggatgggtcaagtcccggtgctgactgctgcccttcccctaatgagctcaaagggcttagagagcaggcagccacagccggtgctggtcgcccctccccctgggagttccgcaggcttaagcagattgcagctgagaggctgtaagaatctgtgccttctggggttgggatgctaggccctggtggcatgggtttgcaagtgggatcttctgatccatgggttgcacagttctgtg

SEQ ID NO: 473495 - DNA, 1012 bp, Homo sapiens
ccggcctccccaggctgttaaaagcagatggtagctgaggttgattcaatgccggctgcctcttctgtgaagaagccatttgttctcaggagcaagatgggcaagtggtgccgccactgcttcccctgctgcagggggagcggcaagagcaacgtgggcacttctggagaccaggacgactccactatgaagacactcaggagcaagatgggcaagtggtgctgccactgcttcccctgctgcagggggagtggcaagagcaacgtgggtgcttggggagactacgacgacagcgccttcgtggagccgagataccacgtccgtcgagaagatctggacaagctccacagagctgcctggtggggtaaagtcgccagaaaggatctgatcgtcatgctcagggacactgacgtgaacaagcaggacaagcaaaagagccaaataaaaatagcaaagttttagcgtttttaaattacacatgctgtcttttattattgtgataaattaattttttgtaacagaatggaaaaaggcttgcttttccagatatcaaaatgtgcatgtgttatttatttccacaaattgtttactaacagctgaaaagacatcaatgaatagaacagaataggaaatttagaaatacccaaatatatgtaagaatttagcacttgataatggtgatgttttgtattatttaaaaaagatggattgttcataattcatttttggagaaaactagctagatttttatgtcacaaaaataagagtatagattaaaaattttaaacatacaaaaggagaaacataccagaaaaaatataaatgcctatttatatacgcagatatatatatatatacatatatatacacatatatacatatatatacatatgtatatatacatatatatgtgtgtgtatatatatacatatatatgtgtgtgtgtgtgtgtgtgtatatatatatatatatatatatatatatatatatatatatatatcctttttttttt

SEQ ID NO: 473496 - DNA, 565 bp, Homo sapiens
tgaagtctattttcaaggtgctggctgatttggtgtctggtgaggacccacttccatagatgatgccttctggcggtgtcctcacttggcaaaagggaaacttttgtggtgtgatgtatggctgtatgtgccagagtggctttgcagacaatggaaactgggaaaatatccagagactgcttttgaacgctcacagccagaagagtcgatttggttctaggctagaggggggaaattgtgatgtggctgaaaggaacaagagtgcccctcagccggcaggcattcgctggggctccgaagttaaaccccaacataggaatgggctgaacataccagccctgtgctggtacaagtccttatgcatcccctgcgtctcctcccagtgtcgctgccatgagcccagcattgctcttttctctcctgagaagtttctcctttttaactgtctccctggacgcctgggctgccaaaagaaaatgccttttatcttcaaattctccttgtcttttcagagctaggtacttaagggcttctcagttagtagacagataaatggtaactttgg

SEQ ID NO: 473497 - DNA, 4177 bp, Homo sapiens
ggctgcctcttctgtgaagaagccatttgttctcaggagcaagatgggcaagtggtgccgccactgcttcccctgctgcagggggagcggcaagagcaacgtgggcacttctggagaccaggacgactccactatgaagacactcaggagcaagatgggcaagtggtgctgccactgcttcccctgctgcagggggagtggcaagagcaacgtgggcacttctggagaccacgacgactccgctatgaagacgctcaggagcaagatgggcaagtggtgctgccactgcttcccctgctgcagggggagcggcaagagcaacgtgggtgcttggggagactacgacgacagcgccttcgtggagccgagataccacgtccgtcgagaagatctggacaagctccacagagctgcctggtggggtaaagtcgccagaaaggatctgatcgtcatgctcagggacactgacgtgaacaagcaggacaagcaaaagaggtaaccaggcctgggctgggaggaggtgggaggtcgggggatgatggggacataccctcctggcgggggaggagggggacctggctttctcacctccgcaggcctcacagcaccctggttgtggaaacctcagagaggtcagggcacaggcccctttatgaacagcaacacacacaaaaaaaactttagctgatttccaatcaaattataatttccctcgtagaacactaatagactgttttaaagtgatttaacttgcaaaattaattaagtcaatgcagcagattatttttaatctacagattttaaaacaatgttctatacattatagaaaagtgtatattgagaactaagaatgaagccccataacacatcaacttcagggctaaatattcttcaaataaaatccagatggaataatatgtaactattgagggtgtcagtagatacagagatatgtcgacgtgcaaagatgtactttgctatatcaagtgagaaaaaaatcagtttgttacacatatacacgaacagaatctgctcgtgttagctgcaaatctgtagaaaatataatcaaacttgtttctggggatttgtaagtgaagtttttccctttctcttatctgtgatttctgcaatgaacatctgaagttgtagttaaggttcattactaatgcaataatccttgggaagagaaggaatatgcttcttgcatagatgcaaataattcctcacattctattatttatttttatttctgtggttggctattttctgtgaacttttaccctcttcagaagaagaggggtcgtgtttacctgttcctgtagattttattatatatacattttattccataattatcttttcattatatatagattaacatgtaaaaagtatgaattaatcattttagttgagttatatatttatgaaaattaaaatagcaaatataaatgattattgctattgcaaatgtattgcgctactctataggagttttctttaaaaatattgaactcccaagctgtgttcatccatttttcctatccatttagtcatcagacataagccagacacctattatgtggcaggcatattctactatctctcaggatccttccgtctttgaaaactacatgttttcctgctgggcttgagcaagctgagagatttaaaattggggcattaggacttaatctcaattgaagcttttcctccctcctttcaaacaaaagcatttctggaggtagaaaatagtaatagataacctttaactgcccttttgaaaatttatgtcttggggaaaagactgttttagttgttttaagaactaaaatgtggtacataaacagcatggaataatatgcagccataaaagaaggaacgagagcatgtcctttgcagggacatggatggtgttgaaagccattatccttagcaaactaacataggaagagaaaaccaaatacagcacgttctcaattacaggtgggagctaaatgatgagaacacacagatacctagagggaaggaacacacactggggcctatcagagggtggagggtgggaagagggaaagaagcaggaaatagaatgaacaggtactgggcttaacacctgggtaatgaaataatctgtacaaccaacacccttggtgcacatttacctatgtaacaaacctgcacatccagcacatgtatccctgaatgtaaaagttgaaaaaagctccacaaatagtttcataaatccattttaaaacaagaaaatttataacagtcttaaatcctaatatgaatgattggaaatatctgatgtacatacattgtataaatctaagtgttgacaaaaatgagcccatgctattcatttgaattccaagttttctttgacttaaagtttattgaaaaccaaagtaagaattggtttattttagaaatttgtttttgttttcacctctgctctcttattccatagttcttttaggaactaaaatttatctaaatgctggtcatctgactggaaccgccccagacctgttgtaacatattctacttaatgtaagacaccagggattgtatgatgccccattattttatgcctcaataagagaattatttaaatgccgcaaattatagtaaatcatgaattgtaagtggtatttcagtggagacaacatggagacaatgatcatctcagaatcactaaaatacaatgttagctgtaatatttaaaacacacctgaaagtgcaggtataattgtatcatctcaattcaaatgttgtctttagtggtattagtaaaaattaaaatatctaacaattattgagctgttatttgtgttaggaactattctatatcttttgtgcagagtctcatttaagcattacagtggtttcccgtaagaaagctactattttcattcctattttattgatgaggaaactgagaccccaaaaggctaagcaacagccaggaagtgacagagcttcaagtaggattccagctcaagttgaatgtcatccaagggctatgctctttgtattcatataggatgctctttcattaatacagcgagtaaagagagataataaatagtgtgcttttttcatgggaaagttaaatgtttgttttgaaggcagagtaatagcaggctattcagtgtttgcaattacatgaatcattgctatggctgtagctagtgcactacaatttcctaaaaagtcttgtcactctcataggactgctctacatctggcctctgccaatgggaattcaggagtagtaaaactcctgctggacagacgatgtcaacttaatgtccttgacaacaaaaagaggacagctctgacaaaggtatgcagtagccaactatatcagcatgaggtgggtttgatttcaatacatagcataaaaatgagttttctcctttaaatataacttaggtggtgaaagctgtggaatgttattttgaattcctaggatttgtaatttgtttttggtctaatactgacaggccgtacaatgccaggaagatgaatgtgcgttaatgttgctggaacatggcactgatccaaacattccagatgagtatggaaataccactctacactacgctatctacaatgaagataaattaatggccaaagcactgctcttatacggtgctgatatcgaatcaaaaaacaaggtatagatctaccaattttatcttcaaatactgaaatgcattcattttaacattgacctgtgtaagggccagtcttccatatttggaagctcaagcataacctgaatgaaaatattttgaaatgacctaattatctaagacttcattttaaatattgttactttcaaagaagcattagagggtacagttttttttttaatgcgcttgtggtaaataatttttttgaaagcactgaatttgtagaaggtaatacttactatttttcaatttttccctcctaggatttttttcccctaatgaatgtaaaatggcaaaatttgccctgaaataggttttacatgaaaactccaagaaaacttaaatatgtttcaatgaatagagatcctgcccctttggcaagttcctaagaaacagtaatagatacgaaggtgatgcgcctgtcagtggcaaggcttaagatatttctgattgctcatgaggcagaagtggaaagc

SEQ ID NO: 473498 - DNA, 1001 bp, Homo sapiens
acccccaggccagctcccagtcgcccaccctgcacttggggtgctcccaatgggtgttcagccctgcctgggccaactccactgtggggttttcctattccctggccatctgtggccacagcagagggcacctgcgactttaaactggggacccaccttggggatcccctctgtctcttcccaggttctaggcacaatgctgtccctcctgcctcctcctggcttctgggccttggcacccacgtcccccaaccctatgctccctgctggacccatcgccatcccagcgctgccaccttcagcccacacacattcctctggctctgaaaccctcccctgccagcaccaggccccatgctatggcctagcgcaccctttccaaggacagggagcagctccttccttgactggtcccaggcacaggagaacccaggctcagggagcaagcggcatttcaactgccctcaaagaatggacagatgcaagtggtgggaagataagatgctgccccaagcatgagggaaaattccttgtccagtctcaccagatcagacgctcccagtggagcagcaaggactgaaatttaaggtgtttgaaaatgtctcgggatagagagattcccaacatgggagaaaaccccaaaccaaaaagacccaaccaattgagaactaggttcacgacctgtgtacaaaagtttttaaatgtagccaaagtggctattggcagggtttttatcatgcacccaactgaaatggtttgttgagggaaaattgtagtttcatcattccatccattctgggtgtggtatagggtaaaaaacaaaaccgttcgggaataggaagattatgaattgcccccaaatgatggtcagaatagttttctattatagaatcttattcattttaatgtgccgcttttaagtctttttagtggaaaatattcatttcgtgtaagttcggcatgttaccatcttggctccacacaaagccactttctctccc

SEQ ID NO: 473499 - DNA, 1658 bp, Homo sapiens
gtgaaaagacccgtggaggtcctactggaagcatgttcaggactttcatgtggtcctaaacttcgtgagggagagtgagaaactgccccccatcgcagtgatgagattaccgcgtggaggtgacttggaggtccgcccgcgccctgggatggagcctcggccaagctcccgggaaagtacttaaaaaggccactagcaagcgcgcgatgaacggcgcaaacacctacgggacggctcgagatcgcaggctggcgagggccatcgcagctgccacccgcacgcccgacaccgtccgggtccacctgggatcgccgtcccggcccgggtgggcggaggggccccgacaccaccccagagccccagctttggagctccccaacgccacagccaggcacagtgcgaccccggcagcagagggggcacttggaccatttgttcatagtctgggacctccggtcccacgagagcagctgcgagaaggcgaccgactcctcctgcagctccggggccgcgcctgcggggtcgcagctccggagaggacagggccttgctccaggcgaggaggccgggggcgcctggccaggacttgcccaacgggttcctggcaggcatggacctgaaacctgaaaccaagaaaggactgcgagagaaattggaccccattgagaccaatgaaattgctaatgccaactctcatcagcagatccagaagctgatcaaagatgggctgatcatccacaagcctgtgattgtccattcccaggctcaatgctggaaaaacaccttggcctgccggaagggcaggcacatgggcataggtaagcagaagcgtacagccaatgcccaaataccagagaaggtcacatggatgaggaaaatactgcaccggctgctcagaagataccgtgaatcgaagaagattgatggccacatgtatcacagcctgtacctgaaggtaaaggggaatgtattcaaaaacaagtggattgtcatggaacacatcaacaagctgaaggcagacaaggcccacaagaagctcctggctgaccaggctgaggcccccaggtctaagacctaggaggcacgcaagcaccttgaagagtgcctccaggccaagaaggaagagatcatcaagactgcccaaagaggaagagaccaagaaataaaagctccccctttgtctgtacatactgccctctgtgattacatagatcagccattaaaataaaacaagccttaaaaaaaaaaagatgagagatgaggatctagtttcattcttctgcatgtggcttgccaattgtcccaggaccatctgttgaacagggtgtcctttccccatgttatgtttttgtttgctttgtctaagatcagttggctgtaagtatttggttatatttctgggttctgtattctttccattgatctatgagcctattttcatatcagtaccatgctgttttgatgaccatggccttatagcagagtttgaagttgggtaatgtgatgttccagatttgttctttttgcatagtcttgctttggctatgtgggctctttcttggtttcctgtgaattttaggattgttttctctagctctgtgatgaatgatggtggtattttgatgagaattgtgctgaatttgtacattgtttttggc

SEQ ID NO: 473500 - DNA, 1731 bp, Homo sapiens
tccctgccacccagtggccagcgtgacaaggcttttctagctttgcccatctagctgctccaagccaggctggaggaggaggaagaggaggagtcatctatggtacattggagcctgcagatggcatggctttgcagctcgccttatgcggttggtggcagcaacagagactgcagctcccccggagcaggtgggctggcgcattgagggcgacagcagttgtattggcatcggtgctagtggtggtagcagcagcaagtctggggatctggagcactgcaggacccagcccgacctggggtggggaggaacttgccgccgctgcttctggaccagcagcaggtctgactctttgccagcacctccacctcacgctgcagctccgacttccagccgtggaatcccgcaggtgctcactcaccctgacgtggagtcccataccacacctgtgcctgggtctgggctgccagttgctggctctcgggccactaccactctgactgctggcagtctgactgctggtgatctgcgaaggcctggtggcagtggccatagcagttctagaaccactcgtccagcagccagcagaattactggctatttagcagctggctctgctgagcagcaaatactggccctgtacacccctggacaatttctaacggattcccccctgccccccatctcagagttcaaaggacccctccccctgcaccctctcagtgcttcaagaactccctcagctcctatgcaaagggccaagggtgcctgcccagtgatggaaacactgagagtgcaggaacagaggcaaactcacaggacagaggggcacaagacttgtgccctggcacacaaggagaagtacatggcctaccgcgtccattatcccaccatcgtacagctggccagctaccagcgagcggctggcactgtgcaggcaccatccagtgcttcctgtcccccgcttcagctcacaatacccctcaggacagggcactcaccccatccaaagctcctcccactgctggatgtacctgctggggcgaccccccagacagggccttgcccagacagtgccccctttagcagcccctttctgtccccaatgtcagtgcccaccccccgcccagttctcagtgcccaggatccccgaggctcagatgggcagatcagcaggggcacgtggagctcccacagcactccgcaggacgggacccacccagaaagcatgtgggtggggggcccttttccaggacccaggcccacagggctcttgtcccagcctggaggggatgggcgggtaacaggtaccagcccctctacccatgtggacacccagctgggcatgtactcccacagggcagggcgtgggcaggtagcacccaagctctctgatctcttacaaggacacaaatcctattggatcagggcccacccttatgacctcacttaacctttaccatctccttataggccttgtctgcaaatacagtcaggttgggcattagaacttcagcatctaatattgggggtggggagcgggacacaattcagtccttagccctctccttcctcaggactccagccacatcatgcacagaactatggcctgtatcccatggtgctcctcagtacagtctgggatacattctcagaaatgaatcattaggtgatttcattgttgtgagaagatcatagggtgtatgtagacaaacctagacggtgtagcct

SEQ ID NO: 473501 - DNA, 706 bp, Homo sapiens
ctgtgagggcctgggtcaccagtgaccccagaaactgcaatgcactccagagctatcatgagggaaccttgtaagtgcctcgttgaaaacctggagcactctagctttgtcacagtgtttcccaacagttgggcctgggagcaactctgtggaaggaggttctgtggtgacatcactttggagaactctgactatgagattcctcttttggaaagatatagtataccttcatgtatcaacagctgtatagatgtccctgtcacaattgctggaatctgtgactatagtggtttatataacaaaggggaaatcaaggttgcaggaaccaaccacagcaactgctgtgagcagaaagtcacgagcttgtgctcactgttgctgccatgcaaactagcaaactaggcccctctttccccgatcctatttttaatatctctgacaatgaaacagtgtgtgctaacccaaagaaaaggtaagtcatgtccatggataaccttggatttgagatgatcccttttgaatgctgtgctcctgtttctccatgtccacccactctctggagagcagccaggcagataacgtgggaacgtggaaatgtaaagtggagactcatacccccacttccagtagtaacgatttcttaagtttttccagctagagagtaggtgtactctggaagctggggagctgcaaccaggcttagggg

SEQ ID NO: 473502 - DNA, 1070 bp, Homo sapiens
agcaaacggcacaccaggagattatatcccgcacatggctcagagggtcccacacccacggagcctcactcactgctagcacagcagtctaagatcgaactgcaaggcagcagcgaggctgggggaggcggttcgccattgctgaggcttgagtaggtaggtaaacaaagcatccaggaagctcgaactgggcccaccacagctcaaggaggcctgcctgcctctgtggactccacctctaggggcagggcatagctgaacaaaaggcagcagaaacttctgcagacttaaatgtccctgtctgacagctctgaagagagtagtggttctcccagcatggagtttgacatctgagaatggacagactgcctcctcaagtgggtccctgagccccgagtagcttaactgggagacacttcccagtaggggctgactgacacctcgtacagccagttgcccctctgagatgaagcttccagaggaaggatcaggcagcaacatctgctgttctgcaatatttgctgttctgcagcctccgctggtgatacccaggcaaacaaggtctggagtagacctccagcaaactccaacagacctgcagctgagggtcctgactgttagaaggaaaactaacaaacagaaaggatatccacaccaaaaccctgtctacaaatggctaactagaataaacagtgtggagaagtccttaaatggcctgatggagctgaaaaccacggcacgagaactatgtgacacatgcatgagcttcagtagccgatttgatcaagtggaagaaacggtaccagtgattgaagatcaaatgaatgaaatgaagaaatacagagaacaccacaaagatactcctcaagaggagcaactgcaacacacataattgtcagattcaccagttgaaatgaaggaaaaaatgttaagggcagccagagagaaacctcaggctgcccacaaagggaagcccatcagactaacaacagatctcttggcagaagagagtgggggccaatattcaacattcttaaagtaaagaattttcaacccagaatttcatattc

SEQ ID NO: 473503 - DNA, 783 bp, Homo sapiens
tcaaaccataagaagaggggcaagcactccacttccagcagctcctcagccctgccagtccccccgtgcgtgcatcctccagaggaccctcgggaaggactcacaccggctggaagtcagatcatgcatcacagcccagagctgcttcagttcttggctctcctctcctcacctgtgaagagccagctgaccagcggcctctcacagctgcagaatcctataatttagagagccctttggcatctatcgagaggataaatccacacatctggttatatgcatgtcctgctggtactctggcatagtcttccctggtcccagtgggagccttctgtgttcaccagggcccctccacactccctgttcccagcaccatgagcctgtgggaatctctgctcagatattcatctccgtgctgctcctttcatcttggaccctcagtgccttgttgcaagaacatacagcttggaagaagaacttttaccagcttggtctgaaagagactgatacaactcaaaatggaaagtattatcagaggcctcagcagtctctgggaaggaggcagcctgagaatgctaagaactacaagtgggaccactccccatggacaggaagactcagaagacagagccaatgccatggagaaccattcccagaggcaggactgcagagttgcggccacatcaattacaggatcgaagtggaccagtgatgtccatataacttcagtctcccaccttttctcctacaagtttgtctgctgtaatgaatgcatctctgcct

SEQ ID NO: 473504 - DNA, 826 bp, Homo sapiens
tccaacatcaaggtggaactgatttggtgtctgagctcctctgtgtggtttaacacaagtgcttccatacaagtgcaatgcctaaagcagtgacccagcatggctccgtgtccacagcagtgacccagcatggctccgtgtccacagcagtgacccagcatggctccgtgtccacagcagtgacccagcatggctccgtgtccacagcagtgacccagcatggctccttgtccacagcagtgacccagcaaggctccgtgtccacagcagtgacccagcatggctccgtgtccacagcagtgacccagcatggctccgtgtccacagcagtgacccagcatggctccgtgtccacagcagtgacccagcatggctccgtgtccacagcagtgacccagcatggctctgtgtccacagcagtgacccagcaaggctccgtggccacagcagtgactcagcatggctccatgtctatagcagtgactcagcatggctccatgtccacagcagtgacccagcatggctgctccactcagaacagtcatcttggccaactgcacaaaggcctcctgaaaccttctcctgacctcatacagtgcgcagtcgctgaagaccattttctcatgtttgcaagaatgaggggcatgagactggctgggacacccactgtcaggctcggtccaactcagccaggctccagagtgctccagggctcagctcttcctaggagccgcaaaagttcgatttaaagtaatcttctttgccattatcttctttttcttctggagagcatgcaatttttaatctttattgctgaccaggacaa

SEQ ID NO: 473505 - DNA, 760 bp, Homo sapiens
gagggctgtgctgttactatgaaagctaagtcaggggaattcatccaaggtgttttggaatatttgggtcatttgaaacctgcaggttatcaggatgtacccagccctccacacggcaggtgtctccctggagggtccagatggctgagcctccactgtgtgccctgctgggacatgccgagctcccaagagatggggcaagggagagcaggcacccccggcttgggagccctgcaggaacaggcatcggactgtgctggctctgccatccccttcctgcaaggctggcaggctgcagggattccgcctcgctggctgcctcaagatgctgcctgctgggcttctgaccccaatgtcctgggacctcctcaagccctgtggtctgtggcccttaggtggccctgctccaattctgcttcccaggctctgactgctggggtggggagagtcatccagggtggcttggatttggagagccttcacccagagtgctctgctccaggcaagctgggcattcacagactagactcggggaggatgccaggagagaggaggccaggctgggcattcacctgctgcatcacgcccaccaaggggattggggatggcaacctggcagaggatcctgtcctcagccacaggttcctgtgagagggaactgtatggaattggggtggcatacctggggctctgggtgacctttaccttgcagctgcccagcaacaaggctgcccaaggagcatggaaacgctgcaggcct

SEQ ID NO: 473506 - DNA, 1432 bp, Homo sapiens
gggaaggggatgggcagagtgaccagaaagtgataatgatggtgatggtggtggtggcgatggtggtggtagtggtgacagtggtggtcatggtgatggtggtcatggtggtagtgacagtaatggtgatggtggtggtagtaatgatgatggtggtggtgatggtagtgatagtgataatgatggtgatggtgatggtgatagtgatgatggtgatggtggtgatagtggtaatggtggtgataatgatgatgctggtgacagtggtgatggtggtagttttggtgatgttgattatgatagtcatggtggtggtagtgatggtggtggtggtggtagtgatggtggtggtgatagtggtggtggtagtgatggtggtggtggtgatagtgatggtggtggtggtagtgatggtggtggtgatagtcgtggtggtagcgatggtggtggtggtaaggatggtggtgatggtggcagtgggtgacggtggtgatggtggtggtagtagtgatgatggtgatggtggtgatagtgatgatgatggtggcaatggtggtgatatgatggtggtgatggtagtgatggtggtggtggtggtagtgatagtgatgatggtgatagtggtcacagtcgtggtggtggtagggatggtggcggtggcaatggtggtagtggtgacagtggtggtcatggtggcagtgatagtaatggtaatggtggtggtagtagggatggtgatggtggtgatagtgatgatggtggtgatagtggttttggtgatggtggtgatgacagtgatggtggtgatagtaatagtggtggtggtgataatagtgatggtggcaatgatggtggtggtggtggtgatagtgatggtggtgattgtggtggtggtggtggtagtgatggtggtggtggtagggatggtggtgatggtggcgctgggtgatggtggtgatggtggtggtcatggtgatggtggtggtcatggtgatggtggtcatggtggcagtgacagggatggtgatgtggtggcagtgatgatggtggtggtgatagtggtggtgatgatgatagtgatggtgatggtaatggtgatggtggtggtggtggtggtagtgttcattactgtagttaagactgtgttgcagattgttgaagctgttgaaagcctaaccttagagtataaagaccttcattttggtgggggaaaaaggatctttacatccacctctcctctgtaagtgggcctgtatgtaaaactttccaggacaagtgagaaatggtggcactcttttaaaacctctgtgagatgattagcaattagcttttgtggtctaacctttaaaccctccctctacagtgaagaaacaaagcccttgaatgtgtatatgctcttagggctccatgtgaccaagatgaataatgatgt

SEQ ID NO: 473507 - DNA, 692 bp, Homo sapiens
ccagcactgggcaccatctgggtggaaagagatggaatgcaagctgccagcagtgggcaggagctgggcagcagggcctggtgatggcagtgctggggtgtctgagaccagccctgcaaccctgctccatagtgcctgcacggctttcctggtgcaggtgcctgcagcagctgctgcactgtgggtccccttgcccctgggctcctgcagttccacatctatgatgaccctgtttctgtatggcgtctttggactcttcctggatcctgttcttctctcaggaaagctggccctgggttgggctttgctgctctgtcccctcttcctgcattcagagcacaaagcctctgcactcgtgggggctgcagactgggagctgctcctcggccctagacagaatgtttcttcaatccctttcctggtacccacagcccggctggatatagacaaggctcgatgttagaagtcagtgagcttgcctgactgctggactgcaggctgctctcagacgcagaaacactgccccttgtatttcccttggctgtcttttaaatcacatctcgtatataaagttttcataaatgtagctctattttctaatgtgtagctatggtcctctctttggagacagacctgcacgctcttgttatccccttccatggtgtgatattcccaatagaaccagagtgaac

SEQ ID NO: 473508 - DNA, 568 bp, Homo sapiens
tgcctctgtctaacctgaccatgacacctaattcaacacgagcccttcagctaaagtttttctcaccaactgctgatagcttctttgcatacgccggctccttcatcccccaggcacagtgctcccctcctcctcagagccaggaccattcagggggtgttcaggaaggcacaggggcctgcactcaaggctcaggaggcctcctccaggaagctgccctgaaacatcttcctttaggcttggctgggggctccttccacagccacagggccccagccttctgtggtcccagccctggttttcctctggatggcggtgggagcctcagtttcctcatctgtaaagtgggtctggtgctgacagaacggtcgagagtgttacagcaggtgttggcaatacgctcctgcactcaatgggtctctagctctgcctctcaagccctgggtcagtgaggtttcttctccctccagctccattccgaggctgaatgtccccacccacacgtgctgatgaagcccgtcttaactgtgcatttgctcagaaatgcagccccacagtgggggctggc

SEQ ID NO: 473509 - DNA, 4643 bp, Homo sapiens
agatgcacacgggagccaactccaccgtatttgatacattgaatatgcacgtccttaaatatgcacatctctttgtaaaagatgtagtggtgtttggtagatatacatatgccataaattatgggaaagctctaaataaatgtaatgaaacaatcttctgcagagagaaacacaaaatcaaaaccaagaaaactgaagctaaaacggagttgaggctctaccttgggcacagtgcactgaaagtactgcagcctgatagcaactcttccaactcgggaggtgatggttccacaccaggagaggaccccaggataccgccccccaccctgccaagcattcagttactggaatggggaacattattgaaaggaagcattatgcaaataaccaataagtacatgaaaagatgcttgacatcattagtcatcaggaaattgcaaatacagatcacaatgaaatactactgcacacccaccaggatggccataataacatagtcagataataacaggtgttggcagggatgcgaagaaatttgaagcctcatacactgctaatgggaatttaaaatgatgcagacactttgaaatacagtgtggaagttccttaaacaattaaatgcagatttaccatatgacccagcaatcctactcctaggcatatacccaggagaaatgaaaacatatgtccacacaaaaacttgtatgtgaacgttcatagcaacattgttcataatagacaaaaggtgggaaaaacccaaatacccatcaattgacaaacgaagtgtggtatagccataccattccataaaaagcaatgtagtactgatacgtgctacatcatggatgaaacttgaaaacatgctaagtgaaaaaaacaggcacaaaagaccacatattatataattgcatttaaatgaaatgcccagaatagggaaatctatagagacagaaagtagactagagattgcttaggactgggggaggcatatggagagataggaagatgagctaaaagttctttctggggtgatgaaaatgttttaaaatcggctgcagtgatagttatgctaaaaaccgttaacttgcagactaaatagttaaactttatagtatgtgagttatatcttaataaagctgctttcagaagtcttaagctgtttccatgagtagacatatagaacagtctcatttttatgatgacttcatagcattccacagcacagatgtgccatgattttgtcttaaccactaccctaatgacggatactcatgctgtttctgattttgcactattactgacaatgaagtaaagaacgccttggcagtacttccttgtgttcatatgtagacatttagtgggctgttttcctagatcttttagcccacagaagactagagttattgctaaagattttaaaagttaaataaataattgtcttctgagagcaacatgacagggttttgtctgctacggcaatcctggctcaagccttctatttttgaatattttgaaatattatacttactggttgagcatccctagcctgaaaatttgaaatcaaaaattcttcaatgagcatttcctttgagcatcatggcagcattccaaaagttctggatttttttagagcattttggatttcagactcttgggtgaggaatgcttgccctgtctatgacccttataacaatatactgtgttttctctcctgcatttgtgctagtgtctcacagtttacctgtccatattttacaaatccccaatgcactgttattttgttttaaaaagttgattctctcttttaaataacatttctattgcttttcattcctttgtgtagacacatttccatctggtgtcactttccatctgcctaaaggaccttccttcacatttcttgtaatgcaggtctgaggctcatcagttctttccgtttttgtgtgttagggggaggaaggtctttatttcattaagtgaaagatattttctctaggtaaatgttttctttcagcactttaaagatgttgttctgttgtcttctcattgcattgtttttaatgagaaatttgctgtcatccttatatctgttcctttgtacctaatgtttcttgtgtatctgactacttttaagattttcccttatcactggatttgagcaacttgattatgatgtgtcttggtgctattttctttatatttcttatgcttcgggtttgttgagcttctcgagtctatgggatataatttttaacaaatttggaaaattcgaagaaaaccgtattccttaaaatatgttttctgtctccctctccttctacaactataattactcatgtatttggatattcaactgcttaaagttaacccacagctcactactatttttttagtcttcttgtttctctatttttcatttctctgttttgtatttcttgatagtttctttccttgtctttaacttctctaatcattttctctgaattgtctaaaccatcctaagtatttttgtctcacgcattgtggctttcatcttgagaagtttgttttggatcttttctaaatcttccttgtatctagttaacatgatcaacctcttcctctattatactaaatatatgaaacattcctataatacttgctttgatgtccttgtctaccagttctattatatcatttgtcatttccggatcactgttggttgattgatattcatacccattgtgggtcattttttcttcttcacatgctagtaacttttgattgagtgccgtgcattgtgaattttactttgtcagatgctgtatattttatattcctgtaaatagctttgaactttgttttgagtttgatctttttgatcttgcttttatgctttgctaagtgggatcagagcagcatttagcctacggctaatttaatccttcactgaaggaaaacccttctaagtactctaaccagagcccactgaatttgttttctactctggctggggagaacaggcactattcccagccctgtttgatctatggagaatgctccttctaacgttatgtgtagctctttctctttcccatcctctgaccagtatagctgagtggtcggggaggatcctctgcagacctccacagctctcactgtgtacccttctctcctgtgaattccagctgccttggacttcctaacttcatctctggtttttcatcttagtgagtataccgagctttgcctggcctcttccttttaccacctgtgtcgtgcactgggcccagcgcaaggctccactcacctgcttccctgttctcatggatcattcccccttcattgcctggtacccaatagctggacaactgttatttcaataatgtgtcccatatttttacatttatcaaacaggaggtaaatctggtccttattactctatcttttccagaagtagaagctatagaaatgtttgtgtcatccgagagtcacacagatgaatgctggccatgccattcataccctttctccaggaggtgatgctctgtcagctggcaagagtctggcttgacaggcaacctcagccctgatgtgcaggtgaggacctcagctctccgacttcatgtcattaaacaccaagtcagtcacaccctttggaagtcatctgtaactcaattgcaaggagggaatccacaactcagatagcggtgagtgtctggtaattgcgttccccatggggcaccagttaaattggcaagtctgtgatgccaggctctcctgtgagctttgtgagcccaactcaaccttgggaatgtaaggatgtaggctttctgagtccccaggctctgggtagattatcaaggtgagagcagctgtcagaaactggcccaactgctgttcctcatgtgacacccaaaacacactgcatgtcatcatgcctaacattctgcaagctgctgcatataatagggttacccaaacagttggaccttgtatctctaaagatccaaaaacttcatgttaaccgttttgatggagtttatgctaatgtgtctattttaaatattttaacaataacaggcagaaataaatgagcaactaaagtcacacactattgtcagcacagtaaagagaacataacataacccctgcatggtcatgcatcaggatcgcaagcaccccttctgtgagagggtgttagctctgaggacctgggagggtgacagcaattggaagatgtcagttccttcccatttctatgaacactaatgagctgtgtggcatacagccaagtctgtggccctctctgtctccacttcctcatctgaaacgatggcagtagaactttcccttcctgggttgtcaaagtccacggagaagcataaaccatgattcacatgtgaggaagtacgcaggtttcaaaggccctggtctttgtataacagcatgctgttcaggccacactcaacagaaccagtcatcagtttccaccacatcagataaaacacttcccacctgaggcctttgcctctgacagggtgttttcttaggagagacattctgttaaatgataaagcagattgcttagaggggcagtctgcaaaggctcttgtttttctagagaagttatccttaaagggacaatctgggatttcagaaaa

SEQ ID NO: 473510 - DNA, 485 bp, Homo sapiens
ttttattttaggttcaggggtacctgtgcaggttccttacatgggtaaattgcatgtctctggggtttggtgtacagatgatttcctcatgcaggtgctggcagtcctgctgtattcgttaaacagcctgtggccctcccttactgcaggcctcatccttctaacattgagcccaacttttgtcacagtgttgggagaaaagcttgggatgaccgactgcgggggcgagtggcggtggccagctgaggtcggccctgaaggtgctcctaacacagcctgcgagctgcccacggggacggacagacgcgtgtgcctgcctcatgctggtgttggagattttgctatccctgggtcctgggatcaatcccttgtggataccaagagacaactgtattaacattttaagaatctggaccttgctcccctcataaaatttctggtaaccacaagtgcctctggcaccttaacttgtttccattatcttc

SEQ ID NO: 473511 - DNA, 544 bp, Homo sapiens
ggctttgcatacaacaaaaacgttcaggaagtactggctggttggctggctctgctcccagaacacacagccatgtgcgtctccatcaaaggaaaggtgcttcagacagctgccatcactcacacgctgagagccaaagacaacgggagacgttgctcttcctggacaccgatgtgcacaggcaccaggaccacggacagcccacacctggctcagcagctcatccccaggggacacacaggaggcccaggcctgctgagcgaagacatgcccctccctcacaacacctaccccaagttgggccttgggataggtgtggggattccggggtccctcatggtgccatatgaaggccaagcaggacatttgagaaacagccccctgggacccaaagcacaaaacatgcatggccttggtgctggacatgccctgctgaccctcgatgggagcatcaggctgctggaaggaggttcttcccagctgcccaggtggcaggccccacccagggcgatcagtctgctctgagcctccagatggggcagcc

SEQ ID NO: 473512 - DNA, 1136 bp, Homo sapiens
cctctctcttttgttaattgcccagtcgcagagagagagagagagaagcggccccgcccggctcgcagcggcagcatggccgcagcgcgggggcagcagcagcaggcggctgcgcgcggatgtcgcagggtttcgcggcagcatgacggactacctgatcaggggcggcaccgactatgtgcccgataactggctccccgcgcagcagctctttgccagcgccgactgcctcacctacgacgacttcctgattctcccaggattcacagacttcatagctgatgaggcggacctgacctcagccctgacccggaagatcacgctgaagactccgctcatttcctcccccacggacactgtgacaggccgacatagccattgcaatggctctgatgggaggtattggtttcattcaccacaactgcaccccagagttccaggccaaggaggtgcggaaggtcaagaagtttgaacagggcttcatcacggacccggtggtgctgaccccctcgcacactgtgggtgatgtgttggaggccaagatgcggcatggcttctctggcatccccatcactgagacgggcaccataggcagcaagctggtgggcatcgtcacctccagagacatcaactttcttgctgaggaggaccacaccaccctcctcagtgttggctccagcaggcctgatctggtggccatgatcacctgcaccgacctgaagaagaacagagactaccctctggcctccaaggattcccacaagcagctactgcgtggggcagctgtgggcacccctgaggatgacaaataccgcctggacttgctcacccaggcgggggtagacgtcgtagtcttggacttgtcccaagggaactcggtgtatcagattgccacggtgcattacatcaaacagaagtacccccacctccaggtgattgggatgacagccgcccaggccaaaaacctgattgacgctgcggtggacgggctgcgcataggtatgggctgcggctccatctgcatcacccaggaagtgatggcctgcggtgggccccagggcactgcattgtacaaggtggccgagtatgccctgtgctttggtgtgtccatcatagccgatggcggcatctagacc

SEQ ID NO: 473513 - DNA, 568 bp, Homo sapiens
actaggaaacttcagctttttgccatgtctaacacatggcaagcaatattcagaggtgcctgtggaagacagagcagccctgcttctggctttgtggagatcaaggaaagccctttcagcgtgtctgagagccagatccagggtgtctcaggcaagctggggagcaccttggagaagtttgttattaccaaccttctgaagcctacttctgtcaactcgtcaaagccattctccatccagctttgttccattgctggcgaggagctgcgatcctttggagaagaggttcttagaggaggagcagccaacctccactggtcttgggtgacaagaaaagcccttggcacaacccgctggggggtcccgggaggccctggttctagtgtcagtaccgtggagtcccctcaccttgtccctcctcagccagcagaggcccaggccaggcaaatggaggaagtggctggggcccttcttcaccccagaacccaaaagttagtcagggctcaacccagaggcctgtgacagtgtcaataaagtttagctttatttaataatattagcaaatttg

SEQ ID NO: 473514 - DNA, 2189 bp, Homo sapiens
ttttgtcacagggcttcaggactacaatcccagcatgcaccgtgctcaaggagagcgcgcctcagtggacgaagaagtggacctgtgctcttctcgctatgctttttcggagatgtattctcacacactcgcagccctttggtcactgggctgccctttggtcacagggctgcagcactacaatcctagcatgcatgggactgagggagcatgcgctaatcagtggaggaaggagcgaggctctgcacgcctctctgggcttggtggaagatgcagtctcataaacactcacagcccttttgtcacagggctgcagcgctacaatcctagcatgcaccgggctcagggaaaacctttcatcaccgggctgcaggactacaatcccagcatgcacccagctcagggacagtgcgcattactggaggaaaaggctaggctgtggacccctccttctgcttcctgggagaggtagtttcatagagactccagaactttcatcacagggatgcaggactaccatcccactgcacccagggttccttccagagcattgcaccttctgcagctcagggcactgccttttttcctaaactactgtggaaactgtcctgatgtctgagacactgtccattgtgcagcagccctcttttttctctagccagagcgcgtgctcaatggcttttgagagaaatcttccacatggcctgcttgtgaacagcttcagagctctgcaggggctgacaagggctgagccttcctggaaacgtcactctcaatggcgcctttttcacgaatgtgaaagtcgaggcatcaggaagttagtttaatgggttgcagaaaatctaagagcaagggagaaaacccgctttccaaggcgtgagttttgtgagccattttcatcaacccatttaagtggacaagctccaaaatgtaacctgaagctgctgactatttaggcattttacaattaaaatcatcggtctcatcccaagtcgtgcctcacttgccagtgtctcagagacacaaatgggacctgatccctcaggaacagatagtgttccaggttcgtgggagcgacttttaagttgtggagcacttggggtcgtttgaaacccactatcttcagtagggacttttacgtctagagagcatgtgcattttgattttatctgtcttcaagctgaacctttgctcattttaacaagtaaaaacacattcctgggtgaaatgtcattgcatgctaataagacatgaaacatatgcaaaaatatgtacagctactgcacatgtgcacccagaagaccactcaaagcatgccttctataacacttctttccaccttcttatgaataatcatgtaaaactcccagaaggagggtttctccagcaacaattaatgctgtctcactcttatgagcaggctgccctggaatctctttctcagactgtaccgtctattctgcacttgattttcaacgtattcttttcttttttgtgtgcaataaattactctatgctgtacttcttttgctgcatgtttcctgtttaaattcttttaagctaagaagataagaaccaaggtattacatcagccatcaacatttcttttgccatggcccggagagaggtttgtctgcttcattaatttcagtttcccttttcttgcagtgaatactatggcacttccagactacctggttaactatcgctggttgttccagcgctgtttcactaaagttctgggggaaacgtgtttaaatcacctatattctctagagagagaatatatgtctgctctccttttggctgctgcatctgtactatccataaatgacactcaccgcatgggttgctctcaacatttcatattcgggctagtttgctgcttagtttcacatctttctggccacacttcagactcagcttatcgtttgctgtcccttcggcaatactcgatcgccacctagtggctattgtactttattttctgatcgggttttctgtttacagttttgtcttgttttgttttgagtggaatattaagagaaccctgtcccttcaggctttatgcatttcccacctccttgaaattgttcttcaacaggttttctttgctgaacaaacgactcaaagtcatgtagatgcccggtcgtggggtttgaatctgagcattgcaggtgttataattc

SEQ ID NO: 473515 - DNA, 9638 bp, Homo sapiens
cattcagacgctagaagcagtgttccggagtcctatgtaggaacaaacactcagaacccagcagcactgttctggaacgctatgtgagggacaaagattcagaccacagcaggattatactggagtcctatgtgagggacaaacactcagaacagagcaggagtgttttggaatcctatgtgtcagacaaacattcagacactcatagcagtgttctggaatccaatgcaagagacaaactttcagaccacagcagcagtgttgtggaatcctctgtgaggaacaaactttcagaatatcgtagcagtgttctggaatcctatgtgagggacaaacattgagatcccagcagcagtgtgctggaatcctatgtgaaggacaaacattcaaacaacagcgagagtgttctggaatcctaacaagtagacaaacatttagacaccagcagcagtgttctggaatcctatgtgaggaaaaacatattcagaccctcgtagggttattctggaatcctatatgaggaacatatattcagaccctcataggattattctggaatcctatgtgattcagacaccaggagcagtgttctggaatcctatgtgtgagacaaacattcaaacaacagtgtgagtgttcacgaatcctatgtgacggacaaacattcagaccttcctcgcagtgtttggaattctatgtgagggagaaacactcagaacccagcaggagtgctctggaatcctatctgacggacatacatgtagaccccagcagcagtgtcctcgaatctcatgtgagggagaaacattcagaccccaggagcagtgttctggaatcctatgtgaggacaatgattcaggacctcgtagcagtgttctggtattctgtgtgaggtacaaactttcagactctcttaccactgttctgcaatcatgtgtgagagaaaaacattcagacccacagcaggagtgttctggaatcacctgtgaggaacaaacattcagatcctcctagcactgttctggaatcctgtgtgacggacaaacatttagacgccagcagcagtgttctggaatcctaattgcgggacaatcattcagacccttgtagcagtgttatggaatcctttgtgagggacagacatttagaacccagcgacagcattctggaacactatgtgagtgagaaacattcagaccacagcaggattgctctggaatcctacgtgagggactaatattcagaccttcgtagcagtgttctggaatcctaagtgagggacaaacattcagacaaccgtagcagtgttccggaatcctatgtgagggacattcattcagacgttcgtagctgcgttgtggaattctgtgtaagagccatatattgagatcctcaaagccgtgttctggaatcctacgtgagggacaaacattcagaccacaggaggattgttctggaatcctctgtgaggaaaaaacattcagaccctcgtagcagtgttctggaatcctatgtgagggacgaacctttagaccccagcagcagtgctcttgaatcctacgtgaggaaaaaacattcagacactcgtagctttgttctcgaatcacatgtgagggacaaacattcagataatcttagccatgttctggaatcctatgtgagggacaaatattcagaccccagcagcgttctggaatcctatgtgaggaacaaacattcaaacaacagcgggagtgttgtcgaatcctatgtaacagacagactttcagaacctcgtcgcagtgttctggaattctgtgttagagagaaacactcagaaaccaacaggagtgttctggaatcctatgtgatggacatacatgtagacgccagcagcagtgttcttgaatcatatgtgaagacaaacattcagatctcaaaagcagtgttctggaatcctctgtgagggtcaatcattcagacccttgtagcagtgttctggagatgtttgtgagggaggaagcttcagacccccatagcagcgttctggaagcctatatgaaggacaaacattcggactagagcaggattgttctggaatccaatgggaggaacaaatatccggaccctcgtagcatagttctggaatcctatgtgacggaccaacatttagagcccagcagcagtgctctggaacctcaagtgagggacaaacattcagacactcagtgcagtgttctataatcctatatgagggacaaacattgaaacaatcgtagtagtgttcaggaacctatgtgacggacaaacatacagaccccagcagcagtgttttcgaatcctatgtgggggacaaacattcaaacaacagcaagagtgttctggaatcctctgttacagagaaacattcagatcctcgtcgcagtgttctggaattctaactgagggagaaacactctgaacccagcagcagtgttctggaaccttatgtgacagacatacatgtagaccccagcagcagtgttctggaatcctatgtgagggacaaatattcagacagcagccgtagtattctggaatcctatgtgaaggatagtcattcagaccctcatagcagtgttctggaattctctgtgtgggacaaacattcagaccctcatagcagtgttctggaatccccggtgaggaacaaacattcagagcctcatatcagtgttctggaatcctatgtgacggacaaacattaagtccccagaagcagttttctggaatactgtgtgaggaacaaacattcagaccctggtagtagtgttctggaatcctatgtgagagacaaacactcagaacccaacagcagtgttttggaaccctatgtgagggtcaatcattcaggccacagcaggattatgctggagtcctatgtgagggacactcagaacatagcaggagtgttttggaatcctatgtgagggaaaaactttcagacactcgtagcagtgttctggaatcctatgtgggagacaaacattcatacaatcttagcagtgtacgggaattctttgcgagggacaaacattcagaccccagcagcagtgttccagaatcctatgtgagctataaacattgatacaacagtgggagtgttctggaatcctatgttatggacaaacattcagaccctcgtcacagtgttctggaattctatgtgagggagaaacactcagaacccagcaacagtgtactggaatcctatgtgacggacatacatgtagacccgagcagcagtgttctggaatactatgtgagggacaaacattcataacacggcaggagtgccctggaatcctatgtgagggaaaacattcagacaatcgtagcagtgttttggaatcttatgtgagggactaactttcagaccccatcagcagtgttctggaatcctatatgagggacaaacattcaaactacagaggctgtgttctggaatcctaagttatggacaaaaattcagatcctctccgcagtgctctggaattctatttgagggagaaacaatcagaacccagcagcagtgttctcgaatcctacatgagggacatacattcagaccacagcagcagtgttctagaaccctatgtgagggacaagcattcagaccacaatcgtagcagtgttctggaatcctatgtgaggggcaaacatacagacacttgtagcagtgttctggaatcctattatgtgagggacaaacattcggatcctcttagcagtgttctggaatcctatgtgacggacatacatgtagaacccagcagcagtgttctgaaggcctatgtgagggacaaacattcagaccccaggaacagtcttcgggaatcgtatgtgagggtaaatcattcagaacgtcgtagcagtgttctggaattctgtgtgagggacaaacattcagaccacagcagcagtattctggaatcctatgtgagggaaaaacattcaaacaactgcaggtgtgttctggaatcctatgtgagggaaaaacattcaaacaactgcaggtgtgttctggaatcctatgacaaggaaaaacattcagaccctcctcgcagtgttcttgaattctatgtgagggagaaacactccgattcctgtagcagtgttctggaaccctatgtgacagacctacttgtagactccagcagcagtgttctggaaccctatgtgagggacaatcattccgaccctcgtggcagtgttctggaattttgtgtgagggataaacattcagaccccagcgcgagtgttctggaatcccaccagtattctggaatcctatgtgggggcaaacattcaatcatagcagtgttcaggaatcctattgttctggaattccctgtgagggacaaaaactcggaacccagcggcagtgttctggaattccctgtgagggacaaaaactcggaacccagcggcagtgttctggaatcctatgtgagggacaaacattcagactccagcagcagtgttctggaatcccatgtgagggacaatcattcagaccatcatagccgtgttttggaattctgtgtgaggggcaaacattcagaccgtcgtaacagtgttctgcaatcctgtgtgagggaaaaacattccgaccacagcaagagtgttctggaatcccctgtgaggaacaaacattccgaccctcatagcagtgtactggaatcttatctgatggacaaatatttagaacccagcagcagtgttctggaatcctatgtgaaccctgatagcagtgttctggaatcctatgtgagggacaaacattcagaccacagcaggactgttttggaattccctttgagaaacaaacttttagaccctcatagctgtgttctgcaatcctgtgtgtgggacaaaatttcaaaacctcgtagcagtgttctggaatcctatgtgaggtacaaacattcagacaatcgtagcagtgttctggaatcccatgtgagggacaaacatgcagaccctcgtaagagtgttctggaatcctatgtgagagacaaacattcagacaatcgtagcagtgttctggaatccaatgttagtgacaaagtttcagaccccagcagcagtgttctggaatcctatttgagggacaaccattcagacactttcagcagtgttccagaatcctgtgtcagggacaaacattttgaccactgcaggactcttctggaatcccttgtggggaacaaacattcagaccctcgtagcagcagtattatagaatctcatgtgagggacaatatttcagaacgtcatagcagtgttctggaatattatatgagtgaaaaatattcaaacatcctcgggagtgttctggaatcttatgtcacggacaagcattcagaccctcgtcgcagtgttctggaattctatgtgagggagaaacactcagaacccagcagcagtgttctggaatcctatgtgaaggacatacatgtagaccatagcagcagtgctctggaatcctttgtgacagacaaacattcagaccccagcagcagtgttctggaatcctgtgtgagggacaaacattcagaccccagctgcagtgttctggtatcctatgtgatggacagtcataaagaccctcgtagcagtgttctggaattctttgtgagggacaaacattcagacattcatagcagtgatgtggaatcccatgtgagtgacaaacattcagaccacagcagaagtgttctggaatcccctgtgaggaacaaacattcagactctcgtagtagtgttctggaatcctatttgaaggacaaacatttaggccccagcagcagggtccttgaatcctatgtgagggacaaatattcagaccctgacaatcgtagcagtgttctggaatcctatgtgaggggcaaacattcaaacaacagcgggagtgctcttgaatcatatgttatggacaaacactcagaccctcgtagcagtgttctggaatcctatgagagggacaaacattcagaccctccagaccctcatagcagtgttctggaatcctacatgagcgacaaacacactgaaaccagcagcagtgttctggaaccctatgtgagggataaacattcagaccatgccaggattgttctggaaacctatgtgagggaccaacactccgaacccagcagaaaggttttgaaatcctgtgtgagggacaaacgtttagactctcgtagcagtgttctggaatcatatgtgagggacaaatatacagaccatagcaggagtgttctggaatcctatgtgagggacaaacattcagaccctcatagcagtgatctggaattctatgtgagggacaaacattcagacattggtagcattgttctggaatccaatgtgagggacaaacattctgaccctcatagcagtgtaccagaatcctgtgttaggaacgaacattcagaccacagcattagtgttctggaatcccctgtgaggaacaaacatacagaccctcgtagtagtgttctggaatcctatgtgacggccaaatatttataccccaggagcagtgttctggaatcctcagtgaggaaaaccattcagaatcttgtagcagttttgtggaatcctattgttctggaattctgtgtgagggacaagcattcagaacgtcgtagcagtgttctggaatcctatgtgaaggacaaccattcagaccacaggaagagtgctctggaatccccagtgaggaacaaacattcagacactagtaaaagtgttctggaatcctatgtgacagacaaacattcagaccccagcagcagtgttctggagttttatgtgagggaaaaacgttcagacaatcatagcagaattctggaatcctatgtgagggacaaacattcagacctcagctgctgcgttctggaatcctatgtgagggacaaacattcatacaacagtgggagtgttctggaatcctatgttacaggcaaatattcagaccctcgtccgagtgttctggaattctatgtgagggagaaacattcagaacccaccagcattgttctggaatcctatgtgacggacagacatgcagaccccagcagcattgttctggaatcctatgtgacggtcagacatgtagaccccagcagcattgttctggactcctatgtgagggatgatcattcagaccctcgttgcagtgttttggaattctgtgtgacgcccataaatctacaccccagcagcagtgtggtggaatcctatatgatggacaaacatccagaacccagcagcagtgttctggaatcctatgtgaggtacaaacattcagaccccagcagcagtgttctggaatcctatgagagggacaatcattcagacccttgtagcagtattgtggaattctgtgtgagggataaacatccagaaactcatagcagtgttctggaatgctctgtgagcagtgttctggaatcctatgtgacagacaaacatttagatggcagcagcagtgttctggaatcctatgtgaggtacaaacattcagaacactgcagaagtgttctggaatctcctgtgaggaagaaacttttagaccctcataaaagtggtctggattccgatgtgatggacaaacatttagaccccagcagcagtgttctggaatcctatgtgagagacaaacattcagaacctcgtagcagtgttctggaatcctatgtgagggacaaaccctcagaactcagcaactgtattctggaatcctatggagagacaaacattgagaccacagcaagattccgtgttctggaatcctatgtgagaggcaaacattcatacactcatagcagtgttctgcaatcctatgtgagggacaaatattcagatcatcctagcagtgttctggaatcctatgtgagggacaaatattcagatcatcctagcagtgttctggaatactatgtgagggacaaaaatgcagacagtcgtagcagtgttctggaatcctatgtgagggacaaaaatgcagacaatcacaatcgtagagtgttctggaatcctatgggagggataaacattcaaaaaacagcgagagcgtctgacatcctacgtttcggacaaacatgcataccctcgtcgcagtgttctggaatttatgtgagggagagacacacagaacccagcagcagtgttctggattcctatgtgacggacatacatgtagaccccagcagcagcgttctggaatcctatgtgagggaaaaacattcaggcaccagcagcagagttctggaatcctatatgaaggacaatcattcagaccctcgtaacagtgttctggaattctgtgtgagggacaaacattcagaccacagcaggactattctggaatccccagtgaggaagaaacattcagaccctcgtagcactgttcttgaatcctgtgtgatggacaaacatttagaccccagcagcggtgttctggaatcctatgtgtgggaccgtcattcagaacctcgtagcgtgttctggaatctggtggacaaacattcagacaatcataggagtgttctggaatccgatgtgagggacaaacattcagactcttgtatcagtgttctgaaatcctacgtgaaagacaaacattcaaacaatcgcagcagtgttctggaatcctatgtgagggacaaatattcagaccctcgtagcagtgtactggaatcctatgtgagggacaaactttcagaccagagcagcaaccctcatagctgtgttctggaatccaatgtgacggacaaagatttagaccccagcagcagtgttctggaatcctatgtgatggacagacattcagacaatcgtagcagtgttctggaatcctatgtgagggacaaacattcagaacccagcagcagtgttctggaatcctatgtgaggaacaaacattcaaacaaacaacagcgggattttccggaattctatgtgacggagaaagactcagaactccgcagcagtgttctggtattctatgcgatggacatacatgcagacctcagcagcagtgttctggactcgtatgtgagggacaaacattcagaccccagcagcagtcttctgaaatcctacatgagagacaatcattcagtccctcgttgcattgttctggaattctgtgtgagggaaaaactttcagacaatcatggcagtgttccagaatcctacgtgagggtcaaactttcagaacacagaagtagtgatctggaatcccctgtgaggaataaacattcagaaccctgtagcagtaacctggaatccgatgtgacggacaaacctttagaccccagcagcattgatctggaatcctatttgagggacaatcattcagaccctctcagcagtattctgtcatcctattgttctggaatccgatgtgagggaccaacaatcagacaatcgtagaagtgttctgaaatcctatctgagggacaaacattcagacccttgtagcagtgttctggaatcctatgtgagggagaaacattcagacaaccgtagaactgttctggaatttttctggaattcaatgtgagggacaaactttcagaccacagcaggggtgttgtggaatcccc

SEQ ID NO: 473516 - DNA, 876 bp, Homo sapiens
tggaggagccagaagtgggagatggttttcccctggagttggctgctctgtggcctgggctctcctccaaccaccccagccaaactctgcgttgttgcgctggtctcaggtcttttggccggcgggttctgtccgtgtaccgctctgccggcatgttcccctcgccgtcatctggatgtccagccgcttgtgtcttctgctgatgtgttcctctggacatccagccacttgtgtgtgtgcgtgctaatgctaagatttcagggttttcataggcataggatgggagtgtggtgggccagggtgggcttgggaaatgcaacatttgggcatgaaggcaggagtgcctgtcctcacctaggtctgtgggtccatggaaaactctcttccccgaagccagtccctggtgtcaaaaaggttggggactgctgctctagacaatgaattaacattaagtgattattaagagcaataaaagtcaccagttatttagtactacagtaatactgtgtaataatactatataacacaataactgccataattactatataataatgttatataatataataataatattaaatgaattacccccaaaataagtggcttaaaacattccttagtacgaaagtagcaataggctgcatcccttatatttactaatttggtagcggtcattttattttatttacttagtatttgtcaaatgccttctagtcctttagttatttttccttttaatggatgacccttctgatctaaaggtgatgggtaagaaaattgaaactgtgaagtctggttgaatgaatttacctgactaaataaatctgtatccactcattttgataaatgtattcacaacatcaataaaaactc

SEQ ID NO: 473517 - DNA, 527 bp, Homo sapiens
acttatctctatgtttttgtcatttgtactttttgtgttacatctaagaatgcattgcccaatccaagcctccgaggtagctggttccacaggcacatgccaccatgcctggttaatttttgtatgttttgtagagacagggtttcgccatgttgcccaggctggtctcaaattcctgggctcagaggaaaagcaaagtttctctggtatctttgtgaggagttgttttactacctggggcaaggaactcacagaagttaggctcctaaccttccagggaaactgggagatagcagtactatcttccttgatgtgtagatttcaaagtgatggccccaagccctggaggaagacattcccaggtcataaaattttcaagaggcttttagatagatttacatctcaaaggaacagcgattacaagtttcctaagctattgagaatgggagtttattcatgatttgactctctgcttacctgttgttggtgtaaagggatgcttgtgaattttgcacattgattttgta

SEQ ID NO: 473518 - DNA, 1051 bp, Homo sapiens
gacaatttacaaaagtactcaactcctactgaattaagtataatgggaaggtttagatctagcagctcgctcggtccccaagcagcctattcctacctggcactacagggatccatcgagagggtggccagaggagcagaagagactacccaaatgagaaggaaccagaaaaccaaccctgttaatatgacaaaacaaggcttttcaacaaccccccaaaatcacactagtttatcagcaatggatccaaaccaagaagaaatccctgatttacctgaaaaagaattcacgaggttagttattaagctaatgagggaggggccagagaaaggtgaaatccaatgcaagaaaattcaagaaatgatacaagaagtgaagggagaaatattcaaggaaatagatagcttaaggaaaaaacaacaaaaaattcagaaaactttggacacacttttagcaatgcgaaatgctctggaaagtctcagcaacagaattgaacaagtagaaaaaagaaattcagagcccgaaggcaaagtcttcaaattaacccaatccaacaaagacaaagaagaaagaataagaaaatatgaacaaatcctccaagaagtctgggattatgttaaacagccaaacttaaaaataattggtgtacctgaggaagaagagaattccaaaagcctggaaaatatatttgggggagtaatcaaggaaaatttcccaggccttgtgaaagacctagacatccaagaagcacaaaaatacctgggaattctttgcaaaaaggtcttctcctaggcacattgtcatcaggttatccaaagttaagatgaaggaaagaatcttaagagctgtgagacagaagcaccaggtaacctataaaggaaaacctatcagattaacagcagatttctcagcacaaaccctacaaactagaagggactggggacctatcttcagcctcctcaaataaaatacttatcagctaataattttgtatccaggaaaactaagcatcaaatatgatgaaacgatacagtcattttcagacaagcaa

SEQ ID NO: 473519 - DNA, 2438 bp, Homo sapiens
cggtgagggaatacgagagcgtcatcgtgatgcacatgcgccatgcggccgagctgcaatggctgatctcagacatgcaccagcaagaccgagaggggcagcccacggctgatgcagagtactcaaggacaaacttggaaggtgttcagactttattggagaaaatgtgggtcagttcactggataccaggaaagttctcaattttggtcagaccacagctgatccgagttccttggcaagtgaaaggccacctgcagggtgtaggggatcaacaactctaagcaagtgtatccaagggattcccggcaattggtggggccggagatctttagagcggacagtctgtgggagctccggtttccagagagtgctgtgcaaagataatcaccagacagaggctgcaatgtcacagagggacaaaggctgggcaggtgactggggcaggctctactagctatcctcaccccagtcctgctgacacccggctcacacaggaagtctctttctactgcactattcctcaagcaccctctactgctcttatcaaaggaaaaattatttaaaatattctgttttagagcatacgttgaaatgtgaattcagagccgagaaataataaactgacaactgacacaaatgattattagggatactttaagttatctttagtcatctgaggagaaaactaagtcatcaatgaactgcatggaagtaaaaaagtcaagcaataaaagcataactgaataaaccgagactgcaacatcattttgatttggtcttctcattcataaagtatggacacttacataaaccttacagataacttatgatcaaattcctgtcttcacaagcaagtggcttagttctaaatgcagacatataattccaagtataatttaaatactagaaattcctcacaaaattgctatactaggttttcacttatgggtagaaatactaactgagattgcatctttctttaggatttataagttcagccaacaagcctaagcagattatattcacatactgataaatttaattatggcagatgagtggttcttaaatttattttgttatttgtcctttgttttgctatgtcttgtgcttccttaactactcttagttcaaaattcatattcgtgatttcaaattcaggcttctcagagttgacatttattgggcttcacctgagctatctgaacatattcagtaaaatcattatgttcccaataaatatgtaataaaagaatttgtctagtctttcttactgtctgttactgaagtagtggtagagggtgtggagggagagctgggtaattccattacattttcattctcccagaacccaataactgacatgagttgcctgctatcctggcccagccagggttcccttcactacctgcaaagcagtctcaccttagacagatttggaccacatagaaaaaaaataataaaattaaacaagaaataggcagggacatataaacaagtaagatatgatgtttctttagctcagagaaatatatagagcaatcaatagaaataatctaggagaagaacataaactcattacactaagcactgatgagaatcagaaacgagcttcattcattggaaagcttccagactcgagtttctaggtgatgacttagtcaaatcaccaatcagatgttcttatgaaactagcaatattttgaactgtgcttgcttgggatgaatgaaagaaaaattgagaagtatccccttatttatttggagaaatgtagacttcgtttgtaaaaatcagcaataaaatttcctaatgtttaataagtactcagaatattatgtcatcgatcacattatataacaaaagtagcaaccaccattttattctccatttctatgagtttgactattttagattccacttgtaatttatcaaagtattgatttagttaaaactttaagacaagcatacatagaaaaaacataaaagtattcactaaaaagtagagtagaatgtaaatcttctaatctattaaaaggtaaaaaagcacaaataaattttcatcaatataataaaagactaaaatgaagatttttttaaagggttggccaataaaaatataactattttaatattcaacacattatacatacttatataaagaaaactacaaaaccattcatggcagtagtgaggttttaatagtaactcacagttctttaaagataaagtaatgtatagcatcatattggacatcattgctgaatgtctgacattgttaaaatagaataaaattttggcatttattattcaatttgttaaaatgtattattatttaaatgattataggcatgtagatgtaattatattattttctatgtttagtatatttaaatattttaaaattttaataagatattatctaccatacctctcaaatac

SEQ ID NO: 473520 - DNA, 1815 bp, Homo sapiens
tccttattccttggcttatgttctcctttatttattttcaaagccagcagtcatgtatctttctgatctttctctccttctctctacagctcccagcgtgagcgacgcagaagatgggtgatttctgcatttccaactgaggtactgggttcatctcactggggcttattggacagtgggtgcaggacagtgggtgcagcccatggagcatgagcggaagtagggcgaggcattgcctcacccgggaagcacaagcagtcgggaattccctttcctaacctagggaagccatgacagactgcatctggaaaattgggtcactctcaccctaacactgcacttttccaacagtcttaacaaatggcacacgacgagattacatcccgtgactggctcagagggtcccacgcccagagggcctcgctcattgctagcacagcagtctcagatccatttgcaaggtggcagcgaggctgggggaggggtgcccatcattgctgaggcttaagtaggtaaacaaggcagcctggaagctcgaactgggtggagcccaccgcagctcaaggaggcctgcctgcctttgtagactccacttctaggggcagggcatagctaaacaaaaggcagcagaaacttctgcagacttaaacgtccctgtcaacagctttgaagagagtagtggtactctcagcacggagtttgagatctgaaaacagacagactgcctcctcaggtgggtccctgacccccgagtagcctaactgggaggcacctctccgtaggggccaactgaaacctcacatagccaggtactcctctgagacaaagcttccagaggaacaatcaggcaggaacatttgctgttctgcaacatttgctgttctgcagcctccgctggtgaaaccgcgggcaaacagtgtctggagtggacctccagcaaactccaacagaccagcagctgaaggtcctgactgttagaaagaaaactaacaaacagaaaatacatccataccaaaatcccatctgtatatcaccatcatcaaagaccaagggtagataaaaccacaaagttggggagaaaccagagcagaaaagctgaaaattctaaaaattagagcacctcttctcctccaaaggaacgcagctccccaccagcaacagaacaaagctggatggagaatgactttgacgagttgagagaagaaggcttcagacgatcggtaaaaacaaacttctccgagctaaagaaggatgttcgaacccatcgcaaagaagctgaaaaccttgaaaaaagattagatgaatggctaactagaatgaacaacatagagaagaccttaaatgacctgatggagctgaaaaccatggcacgagaactatgtgattcatgcacaagcttcagtagccgattggatcaagtggaagaaagggtatcagtgattgaaaatcaaatgaatgaaatgaagcaaaaagagaagtttagagaaaaaagagtaaaaagaaacaaacaaagcctccaagaaatacgggactatgtgaaaagaccaaatttacgtctcattggtatacctgaaagtgacggggagaatggaaccaagatggaaaacactctgaaggatattatccaggagaacttccccaacttaggcaggccaacattcaaattcaggaaatacagagaatgccacaaagatacttctcgagaagagcaactccaagacacataattgtcagattcaccaaagttgaaatgaaggaaaaaatgttaagggcagacagagagaaaagtagggttacccacaaagggaagcccat

SEQ ID NO: 473521 - DNA, 914 bp, Homo sapiens
ctgcaatgtaatggttcacagtcaggatttgggctgtttttagtgtcatgtgcttacaaatatcgcagtgcattgttaaaattcccatgcatgaattagagctaacacgcacgtgctcacaagccatcttttggacagaacaaccaggtcgccggtgggtgcctcgtgctgctgcaccggggactccctgcttaccggccagagtcacgggtcacaggccaggctgtgaagatgaagaagcttcccttctaggaagcaccctcacagccagtcccagagaaaaacctcaggcccaggaagccactctggcgatgtcctggcggacctattacctctatacagagtggaaaccaacaaaatgccagttggacagatggacggacagtggatgccaggatgggtgctgctgaacgggaacggggacaggtcttttttgctggatatcctttggtgacttttgaattctgcactgagtgcttctttctaaaataaatacataaaatgacaaagaggactaatatcctacaagcagaataaaagaccacttttgaaggatctaaaatcagcttagctcctgctttcatttttccagaaataaacattctaagcccagcaagatgccctgactgctgctgctccattcttgtacattacaaagaaatgaggcaaaaattgggcaggaaattgtttgcagtaagaatgacaggacatagttatttcattttataatttattttaattttaaatggacaaataaaaattatatatatttatggtgtacaacatgatgtttgatatattttttaaaaaaacactgtacccaattctgacaaaagtgtggtgttttgaggcagcattaaattgatgcaatatgtatttgaaataggtattgatatatatcaattgtcattgaa

SEQ ID NO: 473522 - DNA, 1967 bp, Homo sapiens
ggaccgcccccgctccgctgcgtcctttgttcccgctcccctctgccttcccgggcgccccgctccggccctgcggcttccggcccgcgcggaccctgccgtgtggacgcgtgtgggctgcgcccgccccgggcgcactccgggccccaacgccaggcacaggcccgcttgtggctgggcacgctcgtgcaaagagctgccccgtgcccgcagccgcctcctgccatgtgggctgtgggcgcagctgacaggctgtgcgtgcaggagagcgagagacgtgctcctgctgctgccgggtgccagcctagcaacggctcccaggggcccagagaggtggtgctggcaggggatggcagctctgatgccaaggccagtgccaaagaggccagcccagtgccacccggagaggggactgagctggctggggccccaggccttacccggcccaccctcccaggccacagaggaggcattgatggcacaagagcaccgcagctggcgcagcatgggcactgctgggtcttggaagggggagtcgggatgagcctgcagcctgagctgctgccaaacaggcccctgaacccaaaggcgagagtgcctatggtcagcctgtgccctgggcatcctggtctccagtgctcctgggcaggcaggggtacctgagtcagtgcccacacacccatctgtgggtgttggcaggaggtcaaggacccccagtccaccctcacccccgctcagacttctgtgacccttccccgctgggcagcacctgggcctctgtgcccggcccaccgtgagggtctggccttgctcctcacccctggactcccagtgagcccctgtactcccacctctccccctgattctctgctcttctgtgccttgagccctttgagtgccccccttttttctcagccaacttatctgaccaaggctttacctccccctcaagcctccaggcaggactgtctcctccatggagcctcctaggattgctccaggccatctaggtcaccaagtatgccctgtgttttgcaggcacctccaggggagctaattctcatgctagattcagcctccccgcatgcaaagctccttaggggatggagctgagacctacattgtcctccctttctccttgtaggcactgaataaatgtcacagtggccggcagaccactctgcccgcttcccagtttccctccaattttcaggcaggttgtccccaaagtcaggctcagggacctggagctgctacctcctccctcgaggagccccccaggccggcagagggcactctaggccccatccctccaggcccagccactggagggaaggacgagactgaccctccccacccaccagcaacccccagtctccttcccagttgctcccataattaggccctgtgcagttcaagagggggtgtctgcactgcctctcctcccccagcttcatcaggccaagggtggggggtctcccctccctcaggggtgtttctggccctcccgagggcaggcagggagctggccaaacctgtggcaggggtggggattctgtccaccatcgtagggccccttgctaggaggcccacccacacgcaggcctgacccaccctgccaggctccgtctcctactccgagtcccctggcaccttgggtgacccaagggaggcccctttgtcctccttcccccacctctgtgtctttctgcccccctcaactggagccccaggatccactaactggcgttgatgaatagcagaggtcagcttgtgccaaaaagcaggcccttggcagcctctaacaaggttgagggagtcagccccttggtcccagccacaaaagccctgaggaacccatccctctcccttccatggcccccagaatgttcacttcctccagtggaggcaggtgctcaatgcgcatgtgctgacgggtgcacggacgcatagctacccttccccac

SEQ ID NO: 473523 - DNA, 865 bp, Homo sapiens
ctcctttttcctgggaagcgccagggggcagtgggaaccgccaccggggccgctgtagcgggccttaaaggatgggaaaccttgatcacagatgccccccgccggccttccttccaccagaccagacttaaaggagaagaaggaagttgtggaagaggcagaaaatggaagagacgcccctgctaacgggaatgctgagaatgaggaaaatggggagcaggaggctgacaatgaggtagacgaagaagaggaagaaggtggggaggaagaggaggaggaagaagaaggtgatggtgaggaagaggatggagatgaagatgaggaagctgagtcagctacgggcaagcgggcagctgaagatgatgagctgaggtgctcaagctgcggagggactgtttctgactttgtaggtggccactgtgtggtcctgaatcttaagaacaggaaggaaacagggctgggctcaacttcccagaggccttgggctgtggagctgggggtccctggttaaaagattatcaaggaatgggcgccccctggtggacacagaggaactgtaaagcgtgccgctgaattctgtccaggaaagacccttcagtgggccctggtccaagaactcactgggcactgggcagtgcccagggaattctaatatacaaagggtactgagtttccgagaggaaagtttagcatgcagttcgctctcaatttatttgacctggattttttcacagagcgctattaatatattgaaggacattagtgtccagtaaaagctgatcttgcacaaggaccctcaccagggctcgggaaatgtttgctgaactaagcagatgatggagaaggattcctttgagaatttgtt

SEQ ID NO: 473524 - DNA, 566 bp, Homo sapiens
aatcaatgcttacccagaaggaaaaccaatttacattgggatacctctaggtccaagatgactgctgtagcactgcccatcacgcctgcattcctgccagcaagaaagaggaatgaggaagacgtggcaaagagcagacacctgctgtctcttaaagaagattcccagaagctgcagcacacactttcacttacatcccatgggctgagccttggtctaggactatacctagctgtctctattcagtcagccaaaagggaaaggttggtcgtgacttgtcccctcaacaaggaacttcaggcactgccaactgtgttcagtaacccttctctgacaggtgaatacgaatcatcaaaagcaggtatgggaactcacaagcgattgcccatgtcaacaattcctccccaaccagccctacaaccctattgccctgtgcctctacgttctggtttctgctggtgcatgtccaccaagtcctgccatcctttcagcgtgtgaggcgtgtgagtcatttccattcacatcaaggactttattttcccacacagtctctgctgaggcaaagc

SEQ ID NO: 473525 - DNA, 1721 bp, Homo sapiens
cagttcattgtggtggaccaagatggtggttatgatttcaatcagagccggcccccgatccctcttggaccacagccagcttcctccagtgtgtcagatccacctatgggcgctccttcccctgctcctgcatttccagtgtccactcctagatgtctcctttcacttctgctacactgccagtcgacttaacagatctaactgtgtctgtggggtctcagccctgtatttaccagggcttgaaatggaaatactgaaacctagtaatgaagggcactatagaattcctggtccatcggaggccaagtgctcctggcaaaatgctcaggaagtccccttcctaccaggctacagtgcggttttcagttacagacttttgaaaattcagatttcagtagaagttggcagccacacagatgttgaagtgtgaatttgggatgtttgcaggttgtaaatatgtggaattttgatcgtgaatgggaatttaacattacaaccttacatggttggaaagattctgcaatagcaacaatttcacatttgcataaacagctttattatagttggagtaatatatagaaagaacacaaattgctctgaccagagttaaacctataaagcaatcacatttgaatgaggattttacttaaaatcatagactcatcaactttaaagtgtttttatctttcacaagagacaaatttagcctgttatgaataaaatcccttaatatctgcattttctgcctggcatatgtatattgcctcagtggaactttaaaataaaaccatacataagaaaaaattaaaaagaggcaaagaactaaagcactagacaaaaaaatctatttttttacatcaaatagtaaaataattgtcaaaagtgtttgctttaattgaattttaagcctagaatctttttcagcgcttgatttcacggtaagagtacagagagtacggaaacagctagaaccttttgaaatttaccattctcttacctttttgttgatgttagtaccatctctgtcactttgcttggtggaggtatagttttgattgtgtaattttacaggtattttattaaaatattcaggaagttaggtagctacattccaaatgcaacaaattacaacgtgttcttgataaatcagaatgctttatgacacatattttcaagcctcaggttgaaacaatttgtatgtccccatcgaaggtgtgatattcatttgaagaattatgcaagttagttcagcatttcagataaatgttggattaattatctggctcctaggaaacttcactcaggcatgtcttagttgcatactgtttgaaaataaaaagcaattgaactgagaaatacaaatatagcatttcatgatattgctatttttattgtaactctaagtcagttttagatagcaaagctccgaccttcaattgaggaagcctttatagtttttaactggttattaactccatctcttaaaaatattaatttgtaagtttgaagggaatgaaacaaaattgtctaatcacttgaaagttgtttccctacattttaaaagatatagttttagcttctcttttatgtaaattatttaaaaatgtaattttaatagggatctttggaaagaacatgaaggatatgaacagaattgttgttcaacttaatttaggaccctaatttagaacatacaccatgttctttttgcctccgaatgg

SEQ ID NO: 473526 - DNA, 674 bp, Homo sapiens
aggacactgcccagacagtcctctctccccctcctccaccggcctgcactgcggagggagcaccaccaccactcgccaaggtcttaatagactccgcgctccataaagtggacaccgagccagtgacggcggagatggcccggcgggcgcccaccggcattggctgcgctccgattacttcgttaagcagtgctgttttcaatggctgcactatgcgggtgtttgattttggagatgtaaacacagatcatggatataatgatttttttccatcctcagctgctcttatatctgtggttgacaatcacatgcagggtatgggtcatgccagtgctttggaaatctcagtagaaaggactgtaatgcttcgctacgtttttttgctgccagagctgtgggtgtggtcagcatcatctaagcccatttgttgtgctgcaaaagccagttcctggctgaactggtcaaagctccatggaaaagggaagaaggcagaatctttggagtatcaaagaggaggagacttgacttttccgagtgtcctcaacagtgtgagttcttctctgaagatgcttgcaagatcaaaggtgaagcatcagagttcgttagccaaatgggtgcagtcagttcttctaaaaatgaagggccttttgtgactaagtcgcagtcaaaatagc

SEQ ID NO: 473527 - DNA, 821 bp, Homo sapiens
attaatcttttgatcatgaatttatcaagcttctgagacagccaagtataaaggggtccctggggaacctctgaccagcctgggaactgggaggaacatgcactggggtggagcctggggcagttcacaccgtttgcagggaggaggagcctgacccctcctctcccccaggtcccgtgcgagggacatccgtaatgccatgtttgcttcagggctgatgaggagagcggcatactgcttggtggagacagtgcttgcctgttacccccggcatatatttggtcacgatgagaatgttggtagatatacggatggtaagggccattctgaagaggtctctgatggaactgaggaacaagatttggaggaaactcagaaactgagaagagtcgagtctggtgcctctctcaagaacacaggaaggggtgacagccaatgggaccatctcccgttctgcctggtgagggctcctgtgggctacctcagcccctgccttcccttctctgccttgggccacatacctggctgtccgaaaatcccagctcctggagaagagctgtcagttggagtctctctacccaaatgtgggatccggaaggactcagcctgtccagaggctgcagacttacgcgtcttcaggagacttacccccacttaaaaagaattctttcttttagcttctctttttcatataattaaaagcagataaaaacaactctttatttcattgctttttcatagctacgaggtacgcgaataattttatttttatctgcatttacaataatgatgaagatagaacaggtcagggagaatatttt

SEQ ID NO: 473528 - DNA, 741 bp, Homo sapiens
cagggctcatctttctggggaaaatggctgacaagactggggatgcccaagcaccagctcagtggagaatcagacaacaaactaaggacaagaagtcagaacttagtcaccagaactgtgctctagaacaggaatcaacaacaatgtgggatttggtggttatatatgtgtttgaggcaaaaccaagacaaactagacaccaggcatatagtagcaagccttctcccccactcctgacttctttctcagaatgtccaccttcagaaaaccacttcacaggtgcagatccccccaagtttttctgtgtttcactactcacacttcacctaagggaaaaaattaagaaaagctccccagagctgccatttttcaaaacactatgttcaagaagtgggagcggggagtgtggggaacagcagggagggatctctaggggactgaacagcaaatgttaatattcttgtgttcatgggcaccttggagggatgggtcaatctagccccgattgtggaaatctccttagacattcagctggtatggtggaagaggagggaagaaaacctgtgtattgtaagtcatattcttctatggtgtgaaggttaacgtaagttttaagaaagtttttttttttaattttattatatgatcttgctctaaagggatgtaaattcagatgctgaattgcacacatcctttctctttcatattttcaatattgaacgtaatttcaatatttaacat

SEQ ID NO: 473529 - DNA, 870 bp, Homo sapiens
agtctctggacaatgacgccacttgcagtggaaaacttcccctgtgtcctctttatccgtgtgactagactagtggtgtccttggccaatgcaggtgatactgtagccttgcaaccaggaggcatgtgtgatgaattccttgttttggagggaatcagtttctcactgggtgctactctgcctaagggcaggttcttatattctaaaatagctagctttagcaacatgcactgtctttttcccaaggcacattactccttcgcaagtgtgcccatttctggctactctgtgaccacttgcactggctttgattccctggggcagggccctggctttccctttggagccgggaatataaagacgtggggccatcgggctgaccccgagggccttctgtcaatcatggcctcgccatctctgctccctttcacaccaggcagctggacccatcgctgtcaaccagctaagtagaggaaggtaactaagcgaatgttttaagaagtaaattctgctatgctgctacaccggctgtcttaaatacaattatttagcaagaataaagtactttttaagaaaattcaaatgcaaacactagttttggaacacaaggtgctcaaagaagatttatttatcaataaaaaagactatttatgcttattaaaaaaaaaatccttgaatctttcaatattaaagaaggttttaaaggaaaacaatatgttttggaactgacatatttttcaaagaagcagtaactatttatgggccagctaaatgatgactgaaagtgtttttttcttaccagctatctattatctattagtatttggagagcgtaaacactaatgaaggacaaattttatttggagttcc

SEQ ID NO: 473530 - DNA, 1327 bp, Homo sapiens
ccacagatgtgtctggacatgcccagccccctttctccgtgtccatcacactttgtggaagcgttgccagcatgtctgacaaactgtcctataaagttgctgacatcgacctggcctcctggggacacaagggcctggatattgcggagaatgagatgctgggtctgatgagtgtgtgggagctgtacttgggctccaagccactgaagggcacccatatctctggctggccgggtaactgtcatgcatccaacattcactacttcaaagacgtgcccctcaacatgattctggatgatggtagtgacctcaccaaccacatccacaccaagtacccacagctcttactgggcatccaaggcatctctgaggagaccaccactagggtccacaacctacataagatgatggccaaggggatcctgaagagggatacggatgtgatgattgtcggcaaggtagccatggtggcaggctatggcgacatgggcaagggctgtgcccaggccctgtgggattttggggaccccttcgtcatcaccaagatcggccccatcaacctgctacagactgccatggggggctatgaggtgactgtggtagatgaggcctgtcaggagggcaacatctttgtcactgccacaggctgtgttgacatcatccttggccagcactttgagcagatgaaggatgatgctatcatctggccaggactggctgaagagcagcacggcaccatcctgctggttgagggtctgctggtaatcctgggctgttccatgggccacctcggctttgtgatgagtgactcctttaccaaccaggcgacggtgcagattgagctgtggacccacccagacaagtaccctggtgggattcacttgttgcccaagaagctggatgaggctgtggctgaatcccacctgggcaagctgaatatgaaactcacaagttgaccaagaagcaggctcagtacctggcaacttaatacctagttcacttagacaccaagtttcactttagagccgtgcttgtttcttgcattttctgtatattgatatttttttccaagaagatcatatttttaaacataggtgcttcttttctaagatctaggtgattctagattctaagattttgattctctatttttcaccttttattaatccatttggaaactattaagcactttctttgtgctgggttctggagtacaaagatgaacaagacacaattcttgccatcgcagctatcaaccaagtaagggagacagaagcctaagtggacaagtgtaattcagtgcctaggaaagggacactggatctcc

SEQ ID NO: 473531 - DNA, 1119 bp, Homo sapiens
aaccattctgctcacacccccatagaatcctttcagcagcaataactgtcactatgcttttggtatccctgacacgttggttgtgccacgtgtggccgggcattgtcgtggagaagaactgggccctttctgttgaccgatgccagctgcaggccctgcagttttcagtgcataaagctgtagcagatcataccagcggcagaccaacaaacagtgaccaagacctttttcttggtgcaactttggctttggcaagtgctttggagcttcttcccagtccaaccactgagctggtggtcgctggttgtcacataaaatccacttttcagcctggttatttcttgttccctggggaatggtggagagggtcctctcctcatcctgtggccctgcctaccggcctcactctccggaaggtgctgctccattttccacaatactcagggatgaggggaggacggaatgccgaggccttctcttcctggagttccacaggccccatgtccctctgcccttcaatgttgtctgaagatgggatgcttgggactgcagcagccaccttgtaatcatgaggagaaagccaagagctgcacagagaaacagatccaaaagcctgacattactgttctattaataaggttgattacactgattgatttcacatgttgaactagccttgtatacctgaagtaaatcttatttaatcatggtgtaaaattcattttataccttgttaggtttgacttgttgatgtttcattgaggatttttgtgtgtgtaattttatgagagatattagtcagtagttttcttttattgctgtatttttctagtttgggttatcaaggtagcagaggggagtctcattcataagagaacaaagatgctccctggaccaggtgcttgttgtggccggattacccttgctggaatctgccacctgccaggtgtctctctgtgggggaaaaagagcctcagtgttggtgtgcttcttatttttaacagggtatgcaataggtcctctcccctgtgctgcctgactcacctgtgttgtcattgagactctagttcaattatccagaggaacgagcatacctagactgccttctgttgctagttt

SEQ ID NO: 473532 - DNA, 511 bp, Homo sapiens
tttcctttcgatcaatatccagtagtgggattgctcgatcatatgaattcagcagtaaaaccttcaggtcccaagtttttctttgctgcaagatttttaattatggttcaggttttgaatttcttcatgattcaatactggacccaatgtttctcattgaccctgccccttatcaaaaatagcaataacagcaaataccagtactccagtgtaaaatcaatgcaatcacttgaaaagcaaaatcaaggacagcagcttattaaaaggaggaacagagcaatgccatttgatgctaaactacctactttcaactccaaagctcagaaaattatactacattacatagcactagtaactttaaccacagacaaactaatttacctacattttaccttcaatatagccatacggttttgttgaccttcatgaagagagaaatctgagccatattcctcatcattagtttgttataataagcatttttatctccagactcttaccaatgtgtcag

SEQ ID NO: 473533 - DNA, 503 bp, Homo sapiens
gagcacatgctgttggaaaaaatgtcctccagaccccagaatggtagatacaccaacagcttgcactgtgcacttggaaaagccacagacgcccaacaccagcccatgaaagcagccaggagggaggctgtaccctgcaaagccacaggggcagagctacccaaaactatgggaacccacatcttgcatcagtgtgacctggatgtgagatatggagttgaaggagatcattttggagctttaagatttgactgccacacaggattttggacttgtttgggtcctttagaccttttgttttggccagtttttctcatttggaatgggtgtatttatccaatgcctggcgaggattataagaaaatcaatttaaaagttaggaaaaagcctggtacataataaacattcaataactgtttacaggtattgataaatagaatgacatccaaataagagatggctttaattttctgagaatatgccttaaggcattgatagggttt

SEQ ID NO: 473534 - DNA, 944 bp, Homo sapiens
ttgaaaagggatagatcaagttgatgttttggagggctcagaagaaggcaggaaaatgtgggaaagtttggaacttcctagagacttggagggctcagaagacaggaagatgtgggaatgtttgaaacttcctagagacttattgaatgactttgaccaaaatgctgagagtgatatgtacaatgaagtccaggctgaggtggtctcagaaggagatgaaaaatttgttgggaattggaaagaaatttctaagctgcaaagcattcaaaaggtgacagagcataagagtttggaaaatttgcagcttaataatgcagtggaaaagaaaaacccattttctgaggagaaactcaagccagctgcagaaatttgcataagtaatgagaagccaaattgtaatcaccaagacaatgtctccagggaatgtcagagacctttatggcagcctcttctgttacaggcctggagacctaggagggagaaatggtttcctgagctgggtccaggcccccatgctgtgttcagcctcagaacttggtgccctgcatcccagccactccagccttggctaaaagtggccaaggtacagctcaggtcattgcttcagagggtacaagccccaagccttgacaacctccatgtagtgttgggcctgcaggtgtgcaaaagacaagaattgaggtttgggaacctccgcctaaattttaaaggatgtatggaaacacctgggtatccagacagaagtctgcagcaggggtggagccctcatgaggaacctctgccagggcagtgcagaagggaagtgtgggattaggttaattcaaatgccttgtctttgagctctgaagttctttcttctacctcttctacctatttgattctattgctgagactttccagtgcattttctgtttctctaagtgtgtccttgattaccagaattc

SEQ ID NO: 473535 - DNA, 520 bp, Homo sapiens
tgtaaggtcagttgagagaaaggaagaatagacccgaagtcagatgagaaaaagaccttcaatcctcttgaaaagtatcaaagaactgaaactcaccaaatcactgcatccagacaatgagatgccagatcctacattcatcatgattgcttcctttcccctccctactcccacttggatggacagagctgcatgtggagacctatatcatgaaattttgttccaagaactactgggggaacataccaggaaagtcgagagaatccgcagaccctttgaaggaggtggattgccgctgcaggctttatgctacagcagaggaactgtgagtctgcttgccttctcagctgagaggcttgaagcctggggcaaattctcaaccctgctcactggctgcctggaaataaacacagtgctgttgtggggacaaggtgggaatgagactggccattcaggctgtgggctgcatgggagtggagtgaggactgtgacagccggcttccttccccttccctagtga

SEQ ID NO: 473536 - DNA, 874 bp, Homo sapiens
ggcagcacccttcctctctgtgttgccaaggccttggcatctgctcatcaggccttggagtgtgacatggggctggggcttcgtgttttcactctgacaagcacagcctctgtgctcctagagctggaaggactccattgcccacagtcgagtgctggctacacgtgtgtgtctctccttcccgacttctgcctgatctgtcagcccttccaggaaggccatggcagtgtcatgactcacaggggcaggaaatacttgttcacacacccatcactcatcctctgtggatgcctgacctgctcttcttccatccttggaagtcaaggaccggataaaacacaagggagggtgagggaattggagatctgccacgctttgacagcgaagctgggttccagccaggccagtccacggggcgctgcttcattctgtcaaatgggcactgaccatccatcacatggagctggtggcaatcactacccacttcatccttgggtgaatcacttaaagcaaaagaaatacagaaccccggaatcttccatagtactataccaggtggacccctttggctaaagtagcagacagatacattttagattctactctctagatcacaagcctcctagtttcttgtttcgggagccctcgatttccatgcctttgaaggatgctggcgtttcataacagtcagacttctcgctttgtgaaatcccgtcctaatctccaggtcaataaagtgactcatctttgggcttaacgatccttttgtttagggagaaaatagtttctactgagtgataatctatttataaaacgttgcatctgattagccactattttatcttccaacaatgcttaggctttcgtgttttaa

SEQ ID NO: 473537 - DNA, 1464 bp, Homo sapiens
gataaaaccaccctcacctgggccctagatgaaccccaggtacggagccctctggcccacctcggaggggtgctgagcctctgagctgctctagttctgattccatgccctcatgaggccacccctggaggttcagggaagatgcttcctctctggagctccctcgcagctggggccagaccatagtggaagcacaggtggctgcagccaaggtgctttggtgagtcctcaggtggaaaccagcaggggctgtcacagagaaaagcaagggccagggagggtctccaggggagctggcagtggggccgagccctcagggatgctgaggacccaagcaggccaagactggcagggcgccccaccctcatgtggagagctcatctcaccagcacaggggcctaggtttagcaggggtaccaggtaccagattcagcgttacacccccagggccacgttttccatccctggcaaccacagaaggtggctttgtgcatggggaaagccctatgtggacagatcgaagatccccctgacctgccacttcctggtcataccggtgctggattcttccagtgccaggtgcacaggtgggggctttgcccgcgaatcaagtcacgtatgtgtcattgacccaaccccccgtcatcccggcattctcaggaggctggtgctgagacttgacttcatgttggacatttgcacctccctgactttccaaatggcccattcgcagttcgagcgctgacattaatccagccacatctttgttttccttcctctcagatctacagatagaacctcgtaaagcgccatgacagttggcttgcatttataagcagtaattagctatcaaatcctttgtgaatctgtttcgagaagaaaagaattcaaaaacaccaaggttccttctgggagcaggagcctttgtcttctcctctgcccccgcgttttggagagcgctcccatcccgactgtgctctgtaggaacgagttattatcaacatggcacacactgggtaggaccttcaagagcaacggacaaaaacacagtctttcagggtaacagagaggatttataggcaaaatgcagctattctcagagtcttcaataaagatatacaacctgaacaaaaggtaagtatttcactccgtctaggaaagcctgtgaaatttatttcttgcaagcttttacagtccatgaccttcccattcaatcttgaataatagcactgaattgagctgtaaaagcttccgaagtttgaagccttttgacaagttaatttagcagtatggtaaaaagtttttccccaagatagaataaagccatcatatcatgaatgtagcagtcatcccgaggaaagaaaacaccattaggattcgaaatgatatgctttatggagatagtttgtggttttgtgtaatctactatcaatatttcaggagaaagatgttccactcatcagt

SEQ ID NO: 473538 - DNA, 911 bp, Homo sapiens
agtacaggacagattccctgtgtcctgtggttggcctgggatgggaggatcccagagttactgggtggctttctctgcctttagctacaacaggaggaacatcagagcattgaccttggtgttaaactggggaggagagaataagatggagcagcccgggcagttggcccctctgaaaggcaccagcctcatcgaagttcttccagttccgaggaaagcgggagtacggagggtcaccagctccacccaggtccacggcgagttagtacagccacggaggagagagtggggaatccacagcagatcatgggctccagggctgagggacacccagcccttccgggaagctggagatgaagatgctgtgggtatcatagtgtctgccccacccatggctgtccctggccggcagaggggcagcaatgagcaggccatgctcccaggtggcttggggcagctaagatctgtggtcatgcgtgtgggtgcctgtgaagaaggggaagagggggaggaggcccagagcctcagccacaacctcaaccgtgctccccgaggtggagctgggcccagggtggtgccatgctccatagagccagtgggagccaggaacaggaaggagcttcaccctcccagagctgaagaggtgatggatgaccagctgcagagaggagctgctctgtctgctgagagctggacactcctcaggacactctggctatagagaggagctgcccactgcaggtctcctctgagctgttctattgctcaataaagctcctcttcatcctgctcatcccccgattttctgcatacctcattcttcctggaagcaggacaggagggctaaaagagacataacacagctttgttcttttggcttagaattgacttggcaatgtgggctctttttt

SEQ ID NO: 473539 - DNA, 915 bp, Homo sapiens
gctttaaaaatggaggaagccaagtctgagtggcgcgtgcaggaccgtggacaggggtggggagtgtgggagaggctgtgtttaaagggctccctcaggggcacaggttcagagaggcactcggaaagcaggtgccatcagtgcctgggaagggtgctctgcgtgtgccggcggcagatctgacgccctcctcctgggaatggcagggctcctccagcagctgaaggcacccgtcacccgggcctgtggggatgatgtgttggcctcagcaggggctctgggcagcccggccttcccttgagatatgcctgagcatgcagcagtgacggtggccccgggccctggacggcctggagacaatgtagcaaggccaggcccaggcagttttaacaattcagagattggggcagctacagattcccgcgtgtgtgccgtgacgggacagacctgcagccatcatccgagaaggtgtgtcatacaggaacttgctgttggtgtcctcgtgaaaggagtgagagcacctctcaatggagccaagggttctaatgggatggagagaagagagaagaaagggagccgactcgaaggggtgagaagcatgggagacaggaggcaggagagtggcagtctcatcaagactaggacggtgctgccagaacgtgactccacaggcccctctccgggaagatcactgggccagggccaaacacaagacactgacaagtcgagtgcccctgccccaaaggaaaccatccacaggacagtagggcacgccaggcagcagcgagagatggcaggggcgactgtctcaggggaagaaagggccggagcctagtcactgcccagccactcccaccactcgccatcgaccgagtcagtctccaaggctggcccagtctctggggagggagcagc

SEQ ID NO: 473540 - DNA, 1158 bp, Homo sapiens
gaagctcacggcaaggtgaacaccatgcgccgtgagggtggtgctgcagctgcagagagctcggagaggaggcccgggatctgcacagtggctctgctgtgcttcctgtgtctcacggaaactgctgatttaccgaacgccagagaaatgcaccacccattcctctacctgctcctcttcacaagcactggctgccatctcccgcacagcagtggctccctgcggattgcggcgaaggcgttattccaggggaataataaggaaatggagactcggaaaacaaggcactggctcgtcaagcctgcgagacaaccacattggttcctcctgaatcttgttaagaatttgcgagatcaagcagggcttcatggaggaggtgtccttgcaggggcctgtgaggataaggaggagctcaccaggcagcagcaatggaggcagagggacatcgcgggtttctgcagcagcgtggggtcttgaagctgagttcacagctttgctcaggtggaacttcccttccctgctgtccccagcgcctcgcccagcctgcgtgttccttcctgctactcctcagccaattccattttcatcccagtctgtcacttagttatctcgctctccatctcttttcacagagtttcctgagtcttgttgagaacacagaacagatgctttctaaaaattgccttttatcccacggtgagcagtgactctataccattcacattcatgaatatataaagacacagacgaatggatacaacgagctccctctctgcagctccggagctctgtgcaggttgtagaatgacttgtcctggaagacaaaccattttcccaggcatagcaggtgggctccctggctcctcgcaccatccatctggctgactgaggaccttcgctgcagctcacctgcggagcccaaaggccagtgtctggcctccaccaaaaggaccaccccagctccatgcagaatttcagcccccacccctcagtcatctcacaaggaagaacggaactcacctccagataacttcaaagttcatcactattctcttaccagaaagggtcagtcaccaggtactagaaccctgggttgctgggcccacgggctcttccagggcggccgttccctgcagccagctgtgccttcccagatgc

SEQ ID NO: 473541 - DNA, 3427 bp, Homo sapiens
gagcccacgagggtcagctcgggcactgggagacagcccaggccagacacggacaatgtggatgatgtggacgacgtggatgagggcacctgcaggcagcaaggccccgtcctgtgggaaagcaggaggcactgagtggagccaagcacaaggtccctgctctcagactctcctttcagacaaggcacgtgcaccaggcaggagcatgggggacagagaggagtccagatgccgcccctgggcttgcttcctgggaaggcagaaggggctgggagggaagctcatccccaacatccaaggaccaactcccgagctgtgtgctgtgtggggttttcctggcatggcagccacccctgctgggggaacgggcacatcctacgtcaccggattttccacagtgcttcaaaaactgcctggaattgggagtgcgggtcctcgctgggtttatgaacttggaattgcatttctgagaagcatcttaggccgataatagcactccaccatggaaacactcccaagctcactggccatggcagttttaatgctgcagtttataaaagagtttttaattatgcaatgctcccttcctgtgcggtattatgcttgagtcctaatccttcgaattaagtggctaatcgtgaaaaatgcctcttgttgttctctgtaatactttagttctgctctttacaggactttttttatttttttttaagagagaaagaggtattatataatactgatgtaatagaatgcagctggagttccagtatgcaatagagtaactatggtattcttgaaaaggctgcttctcagttaaaatcttcccattttagaaaaacaaggaggctcaaattatgctacgttgatatctgtagattgctcagtattgtccaggaccgtgggagtgcatgagcaagaatggggggggctctggttccacttccttgttttacaagtaaggaaactgaggcacagagacattccctgctcaaggttcatagctgctcagtccaggtcctcatagctgctcagtccaggtgctcatagctgctcattccaggtcctcatagctgctcagtccaggtcctcatagctgctcagtccaggtcctcatagctgctcagtcaggtgctcatagctgttcagtccaggtcctcatagccgtttagtccaggtcctcatagccgtttagtccaggtcctcacagctgtcagtccaggtgctcatagctgctcagtccaggtcctcatagctgtcagtccaggtcctcatagctgtcagtccaggtcctctgcctccagtatgcagaacgctgcacacgggaggaggaagcttccatctgcggctctcagcttcctcttcatccatgaagggagcagtcggcgagtagtgtacctttgctttgcaataaacttctttgcctactcttactttgaacttgctctcaaattctttttgtgacaaactcaagaacctgaaccaacctaccaataacacttttacaacatgaaaattcaagcacagcaactaaattaaagtagctcgatggcctgatccttggcttttcagtcacgtgaatgcttagatcttaactgatttcctcaggctatttttaacaacagtggctctgttgatatagaataaatacaagctagcatagccaatgactactcatgggagcagtaggtaatatcaaggtgtttttcctcttccccaacgctggagatatttattagaaagggaaagtgaagggagaaaggataaccacatgttcatgctaagaggacccatccatcactttaattcaagtcagaatttaaaaatatcgcactacgttcttgtttgttggatccagagatccaagttattgggcatttcaatcttgacatttgcatccagacagtttgcaaagggtaaaggtagaaaatgctgtaaacccaatcaactgctgcttgatattccaagtagggtgagtaaccttttcaaataatagaggaacttgtgagtgataagatgaactttgacctctggaatcacagattcttggtaatgcatctctttacctttgacttgccttctttataaataccttgaggtgctgggttttgataataaagaaacaagatctagtaaatcttgtagagcttacaggcaagatcccatatgtcactgtggtgctttctggctgcaaccgcagcaaccttcatgacaccctgtcatcctgcctggccacactggcctttccaattgcagaaacactcttgggggctggagtgggtgcaatcctgcatcatgaccagagctttccaagaagggatcttattccagcctgccgatgtgcatggggcagacctgcctcagtcaccctgacttcatttctaattgctttttctaatgacgtggtgctgtggctgagatgggcagcctcgccatggtgacactgcccgtgtagatgtagatgaggtcagctcatctacatctgcctctgccattccagtggcccatggagctttggttgctgggtctccagggacataaggcacagtaaccactgttcaaacaggacagtcctcagcgtaaagaggacagtagaaatgataaaaatatgtaatgtttgaaatatgtatttattaaccagcaaattgattacattacattactgaatccataaaatagctccgtgaataaataaatttcaaaaataacattcctattaaaaataatgtattttcatgttcatcaaagcaaaataatctttatattggatatctgaacactgaaaaaatagccaaacagattattcttgatatatattcatatactatatttgaatctgctacttagccatttctcttttcatgaaattcatagtttatctctcatctttttaatctcttcataaaattacaatcttctttaaatttttgctttatcattaataaatttaaaatgatagacaccttcaatggactcttctctgctgcccatcgtatgttagagaaaacattctctctaaccgtgctgaggtatcaagtaagtgcagcagaatttctgctaagtggaggataatcttaattctatttctcatatataagtgtgtaaatatttcaggccaaatgtttccatagatactatctttatgcctccattcagagtacattttttttggcaaagataggataaaacttgtcaaataaattgtgtctatttatggttcttttgaatctctcaccatatttagatcatgcaaaactgtaagacttctcaatttaattccattctggtacagagtataaatttatccaattaaaaataggtgctccctcgaaagatttttcccacaaattgagatatactaaagcaaagccatacaatttgaaaattaaagctcatacatggctagagctttcaccaagttaatgtgttc

SEQ ID NO: 473542 - DNA, 535 bp, Homo sapiens
gtaaatgaggttggaagagtggaagtcatgtccgggaaggagcacatgaagacgctgcagaatcctccgttttcatggcgagcagttctggcacagcctccccgcagtgtgacacctcccttctccgggaaggagcttctcctgcgggtggagatcagggcatgtgcccagaagaaaattgcaaccaattatgacactttaaaagctgacaaacactacaagcatcacaacatgaagaaaaatagcagcaacagtcatttaataattatcagcctgtgtggaaagacagtgttgtcctttaaaaactgggtgacagccctaccagcacagccaaacacacctattggaacggttggtaaaacagcacacgtgcaggtgaggacgctgctggggggagtgcaaaagggggatagcctcctggagagtggcttggctgtgccctaaaacgtcagccacataccactacatgactcagcagtctgggcccctgggcattttctctagataaataaaaacctgaacgtggatgtttata

SEQ ID NO: 473543 - DNA, 1068 bp, Homo sapiens
gagcaaaccccaaggtgactcctgccagctcaggttcaatcctcccatgtccgtggcttcatggtgtcctcaggacaccccatgagactcggcctgcctggtccccagcaccagctctgtggtcactccctgtggagagacggcacggccagcaggcaccaccctctgtccggcaacacaacagcaggcaaactgtgcatgtgagcaaatgtgtcccgtacccagaatgcccgccaaggtgaatacgaaacacctgcaaaaagccagcccagcggggccttcgcccctggtccaggggagcagaagggccaacctgaggaccattctcggggacctgctctgctgtggcctcctggatctggcttccagggctaggaaacctggtgaaaaatctctgtgggaggattgcggggctgatgctgggcgagtgcagggaagggaatgcagaggccggagccggctggcattacggaggccgactcttccccagccttttgattccacggccctgcagctcctttcagagaccacccccctgctctgcattctgggttctgagccaccccagtgctctgaattctgggtccagggtctcccctactctgagctcaagggagcatctcacattttcctccaaagcaacggagtgcggtccacaggctggcccgggccacagaccacctgttggggcctgccatgagttaagtttaataatgtacactgtttagaaactttgttgtagcaattcaactttgttgtaccatttctactgaattttgcaaaagtgttggtcctcagcagatcggaggaagaaactagttctttgccatgagatcttgggaagcctggtctccatcgctgacaccatcttcctctgcattgaacctgaccatgtcggatacagatgttaatgctgtcactgctctttttctttaacttgtctttatttcatttacttcctgcctgactttgaaatgaaaggggaatgagttaatgggaaggcaatttttttttgtattacatggtcttctttcttgccttgtttcaaaaacatttaatatatgtgaa

SEQ ID NO: 473544 - DNA, 2159 bp, Homo sapiens
tggcctgtccccaaggttcatcatgtgtggctgcctatggcaggattgccttcatctttaaggatgaatgatgttccattgtgtgtacacgtttgttttatccagtcatgtgttgatggacatttaggttgtttgcacatcttagctgttaaagatgttgtaggttatttaggacccggagaactgaacatagaccccatgggagttgaacagcactcttttcccacgaaggggctgccaaaagcagcttctggctggcgaagtgtggaattcaaggacttcaagttggccagtctggatctgacccagactcagcagagacaggcgtgggaagggggacgggtcatcctacatgaaaaactcagagctgggaatccaggtcagagggagccagagggcactctggaggaggaaggtgtttaaaacactgaaagtcagagaggggaagtgtgctccgtctcctggtgtggagctaatcctctttattcttccctgctcccctccctacctctctcccttccctgcctttcttttcccttcccttccctgcctttcttttgccttgccttgccttgccctgccctgccctgccttgccctgccctgccctgccctgccctgccctgccttgccctgccctgccctgccctgccttgccttgccctgccttgccttgccctgccctgccctaccctgccctgccctgccctgccctgctttgccctgccctgctctgccttgccctgccttgccctgccctgccttgccctgccctgccctgccctgcccttccctgccttgccctgcccttccctgccttgccctgccttgccctgcccttccctgccctgccctgccctgccctgccttgccctgccctgccctgccttgccctgccctgccctgccttgccctgccctgccctgccttgccttgccctgccttgccctgccctgccctgccctgctttgccctgccctgccctgccttgccctgcctttccctgccctgccctgccctgctctgcccttccctgccttgccctgcccttccctgccttgccctgcccttccctgccctgccctgcccttccctgcccttccctgcccttccctgccctgccctgccctgccctgccttgccttgccctgccttgccctgccctgccttgccctgccctgccctgccctgccctaccctgccctgccctgccctgccctgccctgctttgccctgccctgccttgccctgccttgccctgccctgccctgctctgcccttccctgccttgccctgccttgccctgccctacccttccctgccttgccctgccttgccctgccctgccctgccctgccttgccctgcccttccctgccttgccctgccttgccctgccctgccctgccctgcccttccctgccttgccctgccctgccctgccttgccctgccttgccctgcccttccctgccttgccctgccttgccctgccctgccctggggaagggcataggaagctccataggaagctaaaagccaatccattctcacagagttttagtttctagctgaggtctccactgaaaacaaccgagttcttttcaatgtgttttctttttatgccatggggagccttagatctgcttctttcaactcacagagactttctgatgaataggaccagttaatcatggtttccttatagcagcttcattgagatatgttcatatatcgtacaattcactcacgtaaagtatccaattcagtggttttagtacatttactaatgcactaatttatatatactaatatgtaatatgtattattaatatatgttatatactaatatatattattttatgttataaatagataaaaatatatactaatatatatgtacttatatatacatcaatatataatgtattattttatactaacgtatattatatatactagtatataatctatattattttatatgttataaatatataataaaatatataaatattttatgcatatattaatatataatatatactaacatgctaatttatatatacttatatataatttatatagtatataatatataaatgtatataatacataatttatatatttatatattaatagtttatatattagtatatata

SEQ ID NO: 473545 - DNA, 821 bp, Homo sapiens
aatcccttggtcaaatgcccttcggtgggtcagcacctccggcccatcatgctgtgctggtcagtccccgtgggcgtattcttacccgttcagcctggcagctcttccgggtcccacaagagtctctgagcacagcggacgccccttcttcacgagctccacaccctgttctgactccacagtctctctctgatgacagctcggagggcttccctcgggccgacaccttcctggagaccctggatggcggctgcacacttctgattgaaggctctgtgagtgtgtccccctcctcgcatgtggctactctaggggccatcccgctcatcgcttcttgcccagtgttctgtctccagttctgtctccaactctgcactggaatcctctttgaccagacctccttcctgcacatggtgcctccacccttcttgtaccactgcagaagccagcaataaacctacaggagaaaacagctcagtgttttgagctcctctagattctgatctcttagcccagctcaaattattttaaaaatagccactgacttatctttccctcaaaagagcccctctgcctaggaaaagcttaaacctcagccttttcccagattcagaaaatctctcccacccccgcccccagggacaaaatggtcagtgattgcagctcagctgggaagggctcttcctgctctggaattttaatttgtttggttcttctactttcactgctaatcaatggttttacaactataatctttataatttatcaatttatttttctagttgtgttcggagcagtgaactgttgatatttactctaaa

SEQ ID NO: 473546 - DNA, 904 bp, Homo sapiens
ggggtattttcagcaaagtacagcagtctgccgaatatttggagttcacagtaatgaagagctgaatgttaatcgccaagaagatggggaaagtgtctccagagcatgtcagagatcttcacggcatcccccctcttcacaggctgacctggctgcagccactgctgagtatccaactacagcagcagagaacaacactgagtccccagtatggcaccattccctggagggatccgccagctgcctggtggcagattgattacattggactgcttccatcattgaagggaattgttcttactggaacagatacttaccttgaatacaaatttgccatctctacacacaatgcctttgccaaaactaccgtccatgaacttacagaatgccttagcagcatcatggtgttccacctagcgttgcttctaactaaggaactcatttcacagcaaatgaaatgtggcagtgggcccattctcctggaattcactgatctcaccatgtttccccatcatcctgaagcacctgaggtgtttgctgagggcaaagagaatataaaacgggtagagaaaaagggattcctgttttccccttcatattacactgaactgaatatccagatccattctggagctgacccaaagccaccaagtggctgctctttagtcttctctaaagagaaggaaaagaagagctcagtgagtccagaatgggcccaactccacagttaatttcaatatctctcgtcccacccgacaagaaatacccacaggtgtggaggggctggcccccttcacagcctaggtattatgcacataaaaaggagtctaaaagactttaaaaagatgagtcattataaaataataagagtagatagcatattatactttttaaaattagtatt

SEQ ID NO: 473547 - DNA, 609 bp, Homo sapiens
agatcctgctatcagaggaactctaggtaggcagactgtctctgaaaggaaaacaaaatcactgagcacagctgccaggatgcaagcagaagaggaaaatgagctgaggaaaaagcaggaacaagctctcatggaaaaactcctagagcaagaagctctgatggagcagcaggatccaaaggtaagaagtgccgcactcatgagacagtctccttctcataaatcaaagaggcagcagcaagagttaattgcagaattaagaagacgacaagttaaagataacagacatgtatatgagggaaaagatggtgccattgaagatattatcacagccttaaagaagaataatatcactaaatttccaaatgttcactcgaggaaaagagtagggcagggtcacacaaattccaatgagtcaaggagccaggaagtgagtttgaagggcccattagctgacttttctacacaagctgctttgattggctgccagctggcctttgtcctgcttagacacatgctattaaaggttgctattctctcactggcactctcccctttacagatcttagaaaccaaccatacagacgagccgatgcggtgaggagaagc

SEQ ID NO: 473548 - DNA, 688 bp, Homo sapiens
gggaggcagaggatgcattgggctgcacgggatgcccaggatatcctatccacacctaacctcctctgcagataaacacaggactcacaatctccagagctatccatctggcacctttcaacaccttccaaatgtccctacacttctatttaaacaatcaaaacaccaaacactaacaataccaaatgccagcaaggatatggaacaatgggaactctcattcacagctgatgggaatgcaaaatggtacagtcactttggaagacagtttggcaatttcttaaaagctgagtcatccaattcagcggtcacactccttggtatttattcaaatgaactgaaatcttttgtctacacaaacacctgcatgcaaatgtgtatagcagctttattcataactgccaaaacttggaagcaattaagatgtcctttagtaggtaaatggataaataaataaactgtggtacatccagacaatgaaatatttattattcagtgccacaataaatgaactcttaagccaggaaaagacatgggagaaacttaaacagatattactaagtgaaagaaaccattctaaaaagtctacatcctgttcgttaccaactatataacattctggaaaaggcaaaatcatggaaatagtaaaaagattagtgattgtcaggggttgtgaggagggagggtt

SEQ ID NO: 473549 - DNA, 1279 bp, Homo sapiens
aagcatctgctcaaagctgaaggaaccccagcccaaagccacagaaagggaaaaggctttgacttctttatatagataaagccagaacagcactgggatatggcaaaagtcctaactctccaccagacattctctgatataacagtggaaggggagagggacacttcgttactgctgtgtggagatcaacagggaaatatttcagctacatttgagccttttccttttaacttactcaaagaatttaaacaagctataagtcagtatggaccaggttcgccttttgtagtgggactgttaaagaatgctgctgtttccagttggatgattcctactgactgggacgctcttactcaatcttgtctaacttctgctgatttcttacaatttaaaacttggtgggcagatgaagcttccattcaggctgctcacaatgcccaggcccaacctcaaattaatataactgcagaccaacttttgggggttggcagctgggctggtttagatgcacaactggtcatgcaggaagatgctatagaacagcttagaggagtgtgcattagagcttgggaaaaactcacttcaggtggggaacaatacccttcctttagtgctataaaacagggaccaagagaaccatacgttgattttatagctcggttacgggagtctcttaaaaagatgattgcagattcagctgctcaggatatagagttgcagttattagctttcgacaatgctaatcctgattgccaggctgctctgcaacctattagagggaaagcacatttagttgattatatcaaggcctgtgatgatatcagaggccaaaatcaacagccgatttggataccatcaagacacctgaaaccttatcatgagccagatgccaaggaagagattccgggaggatcccaaggacacctcaattgcagccatgtcaagactgacactgaggaggaccccaattgtcacgagcaacacccgctgaacacagccacctacctggggacagatcaagaagctatcacagatggtggaagaaaacctggggaaagcaggacaaccagtcaaaacgagtaatttaatggtagctatggcagcgttaagtcatctgttcctggttgggggaggtttttgattattgattcaattttcacactacttatatgtctgttcagattttctgtgtctttttatgtcttctagtctttctctgtctttctatatcttctagttttaagtgagaattagatatttattgagtcaaattgcctac

SEQ ID NO: 473550 - DNA, 486 bp, Homo sapiens
agtgagcagcctaacctgctaaaatggaggagaccttgcgtgtgtgtttagttaggcttcctagtagaaaatatgaaatctctatgcatacagctataatgaatgtagatatagtcagcatgatgaagtataagaagcatgcacttgggtcaagactgagttcagctttggctctgctttcactggttatgtggccctgtgcaaactgctggacctctatgagcctctctctccctagccctcaagcggggaagatgaggggaaacttgagagctgatgggactgctggaaaaaatcccttcacgaccaacaagtggttgcctaaacttttgattcagtgtcgctccaatgggatctggtataaaaatgagacacttttgagaaaaaataacagtttctggcgaggatgcggagaaaagggaacctttatacactgttggtggtagagtaaattccctttttatttttaagcaaaagatttcttgt

SEQ ID NO: 473551 - DNA, 767 bp, Homo sapiens
cagtctgtaagctgaggaggcagccagaccaattcccaaaacctcaaaagtagggaagccgataatgcagccttcagtctgtggccaaacgcccaagagtccctggaaaatcactggtggaccggagcgttggaggcttgctcacggcccagagctctcgggacccagagctctcaggctcggcccaatttattggcttacaagctctttgttcttagggcagatgggagggggaggaagggatgaggaaaggattaatcagagaaggagaactcgcgggtcattcaataagatgtatagcagaggagccaagaagtttgattatactcccctgcttcaagggagtgttttctccctgagaaacctgtggaatgccacggagcggatggtcatcttcagtgaagcatacagctttgggagagatgcacatggagtggtgagggaggaaggggacacctgcttagccagccagatcagccgaatcaaccttggcaatcaatggggtgacagatgttccagccagattgtcctcacaccctaaaatagatttcccaagctgcaaaagactctgagcatttcagcaattctgagaattttagcaacaggcactgcttgtttttctcttggtctggttgaatttctttaagggcaaagacttttgaatagtttgcagatttgtataatgttaaagttgggaagagtccattgtaaccatctttgctcagtgctctcattttaaggatagggctctgagagcaaggtgagtt

SEQ ID NO: 473552 - DNA, 971 bp, Homo sapiens
actgttagaaggaaaactaacaaatggaaagcaatagcatcaatgtcaacaaaaaggacaaccatgcaaaaaccccatccaaaagtcaccaacatcaaagaccaaagttatataaatccatgaagaggaggaaaaaccagcgcaaaaaggctgaaaattccaaaaaccagaatgcctcttctcctccaaaggatcataactcctcgccaccacaggaacaaaactggatggagaatgagtgtgacgaattgacagaagtgggcttcagaaggtgggtaataacaagctccttcaacctaaaggagcatgttctaacccaatccaaggaagccacgaaccttgataaaagattacaggaaatactaactagaataaccagtttagggaagaacataaattacctgatggagctgaaaaacacagcatgagaacttcatgaagcatacacaagtatcaatagccaaatcaatcaagtgggagaaaggatatcagagattgaagaccaacttaataaaataaaatgtgaagacaagattagagaaaaaaagaatgaaaaggaatgaacaaagcctccaagaaatatcaactgtgtgaaaagacgaaacctacgtttgattaatgtacctgaaagtgacagggagaatggaaacaagttggaaaacactcttcaggatattatccaggagaactttcccaacctagcaagacagaccaatattaaattcaggaaatacagagaaaaccacaaagatatgccttgagaagagtaatcccaagacacataatcgtcagattcaccaaggttgaaatgaaggaaaaaatgttaagggcagccagaaagaaaggtcaggtttcccacaaagggaagcccatcagactaacagtagatctctctgcagaaaccctccaaactaagcttcataagaggagaaataaaatgctttatagaaaagcaaatgctgagggatttc

SEQ ID NO: 473553 - DNA, 802 bp, Homo sapiens
tgacagtctcttctctctcgctcgctctctctctcgttctctttgtctctttcttttcctattagggggaaaatcaagtaactttgaaagtttatgatatgtatgatattgatctcacctataccactccagatggaaaagataaaaaggagagagaaagtgtgggttcacgggctgctaaaccctggttttctagtggacagggcaggcagtcaggaaggggagatcacaagcaggcaagaactgacaagcataaacgggaatgccacaaggacggacagaaacctaggtcagctctggttaactctgaccttggttacaagggtatcctgctgaagctagggcccttcttcagagagttacacacacacctgacccagatgtcagagaaagtggaggaggacccaagggaaggtggaatcattataggcctgctgctgcttcatgttcatgcagcagatcggcagcagcacatgtgtgtcttcttccttacgccttctacatctcagaagaatctctctcatggcccatctaacccagcatagaaggaaattctgagaaatgtagttcagcctagccaacatttcctaccattacaaggccattgttgtaggaaatatgaggaaatgggaagcatatttcttgccctgaagaactttatagtatgcttaaattaatggaaatctctatgtaaagtgttcaatacaattcttataaactgctggcttcctttctcaggtagccttgcattgtgatagatttaaacctattttaaatcttttttattaaagacatactactt

SEQ ID NO: 473554 - DNA, 464 bp, Homo sapiens
gccgttcagtatgatatgggctgtgggtttgtcacagacggctcttattattttgagtattcaccacaatggcagaggcaatgcagctggaataaggggtgaggggctccttctggtgattatgtgcatggttgtactggaggtggtgttggcttggaggcagggtgcttgtgggcacagttctagatggcttctctgtgcccagcaagcaagagtggtcactcagggtgaggtaggatcccctgttctctgtgcaatgttaacacagagtatggtgctggtggtggcagagatggctggctctgctcaccaaggcttcacctgcaatggaatttggagcggggagcagggatggagcacagacatacatatataccacacagacatacagacagcaaagcaatgtggggagttgctgtgggccaaggggaagctacagcataaggagggagcatgaaggctgg

SEQ ID NO: 473555 - DNA, 863 bp, Homo sapiens
taaaggaatcaaaggctggtgtcatggtgaatcccatcgctctccgactgaactcctactgggcttgcaaagcacagacacagaacacacttgtggcaagaatgaatcccaagggcagtgggagacagccaggccgctctcctcctcgtcggcactcagtctcaccaccgaaggctccaaatctctgggcaaagaatttgcagcagggcagcaagaaggccctgatgctggcagtcctgggaagcctgagtgtttctcacttgcctagtggcctggggacaatcactttctccttccgcaccttcagatcggggtctgaggcctcagtatcagaacgagccaggaggttaacggagcgtcgtcctgcagcgtcccgggacaccagggcccagcgcgcgctctgcttccccgcgctgccctgtgggattccgcaggtggcggccctcacaggtcgggagctgtcaggtttccagcccctccgccccgcagggctgggcctccaggcgccaggagaggcgcagcaggttccccatccccccctggcaaagcgcgttcacagcccgcctctccgtgggctgaaagaaggaggaagacagctgttttctgatcacctacgtgtgccagacactggactgagttccgttctcaatattgagaagcagtaagtagtaattgagtgttccaagaagaaatagttgagagagaagggaagttctcttttccatcaggcaaaaggcaggtcctgagattactcattagatcctcatgaagagagtgaccactcctctttcatcaaagagaatctcctcatcccagcctgtgttgcttgacaccctggtccagtccactctcactgaggctat

SEQ ID NO: 473556 - DNA, 618 bp, Homo sapiens
tagtaaagttaatcaaacaagccagagtatatttatttattatgagcctttggtgtcattcctccaacaagttccagatgctgcttgataatttcaaatggcctgtctttaaattccctaattatttaatctgctggtttaaatctgctgttgaacccatgtggttaaaaatgtcaattcagttattacatttttcagttcaggaatttcggtttggtactttaaaaataatttctatttgttcatatgctcattttgttcctatatattttttcctgatttcttttagttatttgtttttcttttgctttttgagcatatttaagacagttgttttaaagtcttttctgccttttgagatgtgtgttaggcgacacagagacaaatcacttagtcagcctttacacaaggtggaaattgcaaatttgatcagctcggctttctgtgcttcattgatggggagtggggccagcttgtcagtcccctaaaactgtgacacattgtgctagggaggagaggaaacaagggtttgaccctgtaactaggtctcatcaaagaaatagctcaagttatgtatatagtataaccttgaaattgacccaatagtcccatagacag

SEQ ID NO: 473557 - DNA, 989 bp, Homo sapiens
gcagctgaatggtgcctgcaacttctgtgaccattttgccatgttgggaccaagtgtgaatgcaaagtttgcacatagaggagaactgaccaatcggagaatggaaaacttcttgatcattgatgacagcagtcaaccagtgaagccatcaagcctggagtttttcctactgctggaattcttgtcattgcagaaaatcaatatggctctggggcgttgcgaaacaccaagagctatcgccactgtctcatgctgcacacaggtgcaccactccttggcagccaacacacacccagatgctgccttaggggagcaagggatgcagagccttttcctgaagccagacaagcccctgttgcctcaggggactttcttccatagaagacatggagcaaaactgccagttgaagaaacacaccccaaagaacaaaaattggatatgaaatgatttggctgtgatcacaatattataaaattattaactggtgagcaatacgatatgagtcacccttgagcaaagcagtcccccagaaaaagattacatgggaaaggatcatattgagctgtaatggtggggaaagctaagctattaactaaaatctgttctctacttccattataattatgttgtacctgagaaatggtaaaccagccactactttatgtctccttcccacaaaggtacagcagtgtgattcaatgctagcaataacatgagtgaagtgaaatgtaccactagaggaataatgaaatttcctgctgtgatttctacatgcttcaacctggaagaactactctggaatccatatataactacaaagggaaaaaatattggtctttaatttcttatctgtttgcctttaatcaaattatgtattgtctctccattgaattcttcatttgtaaagtggaggtaataattgtaacaattattcaaactataaatgtgaggatttggtaaaatgtgtgcgataattccaacacaatgt

SEQ ID NO: 473558 - DNA, 1503 bp, Homo sapiens
gggtgagttaaaatgcaaaactgccttcactggtttatgggtgcaagccacattggcatccatgggtggcacctgccaaggacactgggacttggggataaggatgggaaagaaaaggaggtgtgcctgctttctttccacctcacattccgagttttcgctgaaaggaggaagggaatgagggatgccaaattccctgtctttcagaatgggcaacaaacttcaccacctccagtttatactcagaaacggaccatgggaccagatagtacattagaggaccttttgaaaggggccacattggtctttcagacacaagaaagaggcagaagctttaatggccaccattcaagctcacaaactccagaattcctaaggaaagatcaaattcttcctgcaccatcccctttccaattcccgatcccgctgagagccacttccatttcccagtaaaatcctctgaatacacttcccttcagtcctttcacgtgacctgattcttcatgaacgctggacaagaacctgggtgcctagagaacatcttttctgacacctctggagggtgggaaggaagcttagcattctgcaggaatgatcatcaagtaagtgggcattctgctcaggatgttggcgaagtgggaagtattttctatttactaagtttggggaattggaaaattcacacacaggatatggcaactccatcaatctgaacattatattaatcagaagcccatctagttcataaaaaccaagatatggaaacaactaaagtttggtcaatggataaagaaataaagatattgaattatgcttatatatataagcataatttaaatgcattttatatataaacataattcagtatcttgctgaattttatacagatatagataattcagtctttaaaaagaaggagattttgccatttgtgacaacactaccaagcacaaaccaagaggacgtcaggctaagtgaaataagtcagacacaagttatcaagagtggggtggggaacacaggagaaatgagaggatgagatttttaaaatatgaagaaaataagaaaagttatttacttctttgaataatttttggagaatcctacattgttgaaaatgtatggcatgaccaaatacatcacattaatcataaaacagaaagagtttctcttttcatggtctatgtcggggaatcagtttgaaatctctttttcaaggctctatgaaatgattttgttgagaacaagggtcatggctgctgtgactaaatatcacgatttttaacaagctgcttcataatatgtttctcttccatttatttcactcatttatcccacaagcaatgcatttataaatgcaatcaatgttttttaaatgcatgaacactttcatatggatcagggagtcttcaataaatcttcattttatataacgattcatctggaatgttccagatgtggtatttataaagcattttctattccatatatcatgaactttac

SEQ ID NO: 473559 - DNA, 562 bp, Homo sapiens
gaaaaaagtggccatggtgacagaaatggaggttacgcatgaagattctgagggtacacgcaagagagtagggagcatttctgcagcgagaggtacttggccatggctacagcagacaaaggatggtcaggaatactttagccacaacgttagcacagacattagcagaatgctaaatcgtgggatccaccataaccagaagaatgctagatcagtcccacctcagcaaggactggcaaggacccccaaaacaaagaaaaaattcaaggactctgtcactccataccacaagttcacaggagcccttcatcctccaaacagtgtgatgccacactgcggacatacagatgagggcagaattgatgagactgaaaaagtgcctaaagggattatttacaatattggtttggacacagttttgaaccaaattagactaagtaaatttccatttttatcatcaaataaaggatcatgaaggaacaccacgtcagttttagacaaaatgcgttctatatcggcatacacagatccccctccatactgtgtatatgtgtttactcat

SEQ ID NO: 473560 - DNA, 735 bp, Homo sapiens
actaggcttagtgcctgggtgacaaaataatctccttttgtgtatatttccttcctctgcaatttctatgtgtaagtccaatatgttacttcctttttcttgggggtcatctccccacagcttttggtgttcaggaagtccatgtgacctagacttacaggtccatgggtgcaacctggtggtcccacctccacatcctccttccccactcatccttccccatgactgcctttctggaggcgaggttagcaaggtagttcctgcaggccccccttccctgccattctgcagtgcctgtcagctctctacaggacttccccagtctctggggaccagcctgtgctaccgtattgctgagatattaatagattccaagcattatcagcgaagcttctatcacagatttttggaaaaaattgaagagatatatgcaaaaaacaaatctcaatctttaccctacactatacataaaaattaagatgaaagacaggatagactggggaactggttgaagaagactaaggagacacagcagtggatgcaatatgagatcctggattggctcttggaacagaaaagtacattgtggggaaactggcaaaatttaaattaagtctgtagcttagttaataaatgttgatttctcggttttgataattgtactatggttatataagttgttaacattaggggaagcaggatgaagggtatatgtgaatacttggtactgtattt

SEQ ID NO: 473561 - DNA, 572 bp, Homo sapiens
atacccagggaagcagctaaaccattctttttcagcctaatggaatgaaaaacaaacattttgagccaagggcagtggagaggcactgggtggtacaggggagcctgggacatctgttcatccaggaagagatggttacgccgggccctaaaggcgtggtgggaatcagaaagttaggagagggcactccaggcggagaaaacgtcaaggacaaaggcctggatgggattcagcgggtcgcaaactttgcttctgagaattctcctagaatgcacgttaaggtgcctgggctcagacatcaggtggacattgggatatcgggccctggggtagtgatgagtgaagttcttgacaactcccccaaggctggggcgtacttcaaaggaggaaaggtgaaatgagaatttatgctgaagggttagctaagtatacatattcaacaggttatcggaggagctgtgaatattcagaagggggatgtatacatacatactaagcaaacatgcatgttacatacatcccatgttcactctgggggtggagactgaacacttaaatgcattagaatcagg

SEQ ID NO: 473562 - DNA, 2728 bp, Homo sapiens
gtttagggccatggcgcccggctccacgctgctcctccatcctctcagagaccctgtcgcagtcccactgccctcgccttctccaggcaggcactggcacaggactgtccaccacccaacaatggcctcacctacccgggatggccttacctgcctgcgatggcctcacctgcccacgacagcctcacctgcccatgaaggcctggcatcctgacggggccctgcgcatcatcctcgcactgagaggtgttgccaggacacatcccctccatttgctggataattcggcccctcaggcctgcacagctgcgggggctgcccctatctgtccagccaggccctgcccatgctccaggccatctcaaggccctggatacactggttgtcccctcccacctcgtggcattcttgggtcccaggtggacagaagagtgcagccttgctacacagacgctaagagacacacagtctcctcgtaccccaggaaccccatggtcccacactctccatcccacagccagacatcatatcaaagcctccagagcgtggggccatgtgctgccctttcccctgcctgaacactcacccttacataccctcagtcaaacccactttcctctcaaggcagcccgagcccccaggtactgagccctgccctcccgggccaggcagcgccaggctcttccaggcactcaccccatagcaagaccccagtgggccccagggctcacctgccacatctctcagaccgtgaccagaacctgcttcatggacctctacctcctgtgcccaaaaccttcctggaagacaaaagaagtgccacatgaaccctgagtatatccgagagctgatgggagggcgctgtggaccccgggctgactgcacaggacacacgagcagtcccggcaccgcactttcagaacaggcaccccgcaccaaaaccaggagaagcaacaaggccagaaacgcatactgtagggtcaggagaatccaaaatacaggccaggctttaacatgacgtccagcatgaaccatccaggcctgtgtgttcgggaaaaggtggaaagaaaagcgccgctgggaagggaaccagcagtacctgagtgacagagcaaaagctcctgcaggttcctgctcagttcagaggtctgccctctccacctacctgaggcaatgcgttcaagatcagaaaaatcacaccaacgaagttactccatttggaagctttttctgaccaacctcaccttactctgaccacaacttactccatatccaatcaggtgtgtgtgattggatgtcatgttgtgtgcacgtgtgtacatattctgtgtgtgcatttgtgtatgcgtgtttgcatgtgtgtacatattgtgtctgtatgtgcatgtgtgcatgcatgtcacgttgtgcacatgtgtgtacatattgtgtgcttgtgtatgcatttgtgtgtatgcacgccatgttgtgcgcatgtctgtacatattgtgtgcatgtgtgtatgttatgttgtgtgcctgtgtgtgcatattgtgtgcatgtgtgcatgcatgtcatgtgggcatgtgtgtacatattgtgtgcgtgtgtttgcatttgtgtgtatgcacatcatgtgtgcatgtctgtatatattgtgtgcatgtgtgtatatattgtgtgtgcatgtgtgtatgcacatcatgttgtgtgcatgtgtgtacatattgtgtgcgcgtgtatctcatgtgtgcatgtgtgtacctatgtgtgcatgtttgtgcatgtgtgtatgcatgtcatgtgtgcatgtattacatattgtgtgtcatgttgtgttcatgtgttacatattgtgtgcatgtgtgtgcatgtgtgtgcatgtcatgttgtgtgcatgtgtgtacatattatgtgcatgtgtgcctgtgttcatgtcatgtgtgcatgtgtgtacatattgtgtgcctgtgtgtgcatgtcatgtgtgcatgtgtgtacatattgtgtgtgcgtgcgtgcatgccatgttgtgtgcatgtgtgtacatattgtgtgcatgtgtgtgcatgtgtgtgtgcatgccatgttgtgtgcatgtgtgtgcatattgtgtgcatgtgtgtatgcatgtcatgttatgtgcatgtgtgtgcatattgtgtgcatgtgtgtgcaggatactgactctcagtgaggatttgaacctccagggtgcccagccagtcactagaggagacagttaataaccactgaatccttaggagatccacggggctgctgctattcagtctgcttcctgctgtgcaaaggacagacatttacagcaggcaattctgcttggactggaacacccctgacgcctccctccatgggcaccctccttgccctcctctgagctcctggactccctccagccccactctgcatggacacccaccttgctcaatgccatgtaatgtctttaggactaaattttgcaagaagtggccaggagagggaaaagatggcagatgctgactggacaaccccacttccagaatgctaacgccaaggtttacaacccaggccgaagtctggagaatttttttctgaggaaattgactagcccaaggaaaaagacctgcagattctgtcagttgggaatttcacactgcaaccattggctccccttcccagtatcctagaacaaagctcacaacgcagcaagccccacccgtgcacacaaagcctgtagtaggtgctaac

SEQ ID NO: 473563 - DNA, 1301 bp, Homo sapiens
cagctccttaggacgtgaaatggatgcttcaaaatgtgtcccagagctgtctgtggccatcgtgtgcatgtgcacctgactctataaatgctctagagtgtatctcggccattgtgggcttgtgtcctcaactgactgtgaatgttctagagtgtacctcggccattgtgtgcatgtgttcccgactcactgtgaatgttctagagtgtatcttggccattgtgtgcgtgtgttccggtctcactgtgaatgctctagagtgtacctcggccattgtgtgcgtgtgttcccgactcactgtgagtgttctagagtgtacctcggccattgtgtgcatgtgttccgaactcactgtgaatgctctagagtgtacctcggccattgtgtgcgtgtgttcccgactcactgtgagtgttctagagtgtacctcggccattgtgtgcgtgtgttccagactcactgtgaatgctctagagtgtacctcggccattttgtgcgtgtgttcccgactcactgtgagtgttctagagtgtacctcggccattgtgtgcgtgtgttcccgactcactgtgaatgctctagagtgtacctcggccattgtgtgcgtgtgttcccgactcactgtgagtgttctagagtgtacctcggccattgtgtgcgtgtgttcccgactcactgtgagtgttctagagtgtacctcggccattgtgtgcgtgtgttcccgactcactgtgagtgttctagagtgtacctcggccattgtgtgcgtgtgttcccgactcactgtgagtgttctagagtgtacctcggccattgtgtgcgtgtgttccggactcactgtgaatgctctagagtgtacctcggccattgtgtgcgtgtgttcccgactcactgtgagtgttctagagtgtacgtcggccattgtgtgcatgtgttcctgactcacttgggatgtgacgaacatctctttctacagtgcctttacgtgagtttaactcaatttttttaaaaaatttggattaaaatcttagctatgtgaaatatttagggttattctttttaatgtttttatttgttaattgacagattgcaattgtatggggttactttcttgagttttacgaagtacctatgtttattgaagttaaacatcaaacttaaaacatttagatgaaaacctttcaaaacatattttgatgtttactactttttagctagagcttactgcgggtaaaccccagtgattcttggcggtgactaagaacagctccttacacaaactgtaatacagtgttgctctt

SEQ ID NO: 473564 - DNA, 1251 bp, Homo sapiens
ccctgaaagcccagggtcccgctcacccgtgggtgctggataatgaaccccagtgacatggacccaaaagcccagagctctatcggagtcacagagtccctgcaactgggaaatcacccagcgctgactcatcacgcccaccttcacttgctgcacctccaggaagcagccgggtggcaagagaggcgagaggagccatgtgacaaggagggtgcgtgggaaagtgggcccatcctgaggattggccattataaataccgctgtaagacacagggcaggctcaccaggactgccctgctccagggagctcttggtcgagagcatgcagaaggaagggcctacaccgggcagtgtaaactcgccacccacacctggcctgtcaccactcatgtcaccggcctcccaggaacactccactcagcagtcagttctttgaagtctctagatgcttcaaggccagacacttgagggcctttttgtttgtttgtcccttatagcactaggtttcttcagaagtcgattcccacgaatttcaactagaattctcaggttctcttcaacaaactgtccttggtgctttacagaaagaacctgtgagtcagcttcccagatgagcatctcagtgacaatgatggtgtctcatggctccttcagttacgaacggcactgagctgttctggacagagagggaagagctactcttgcttgcttttggtgtctatttgcctggaatatctttttccacccctttactttaagtttatgtcagcctgatgtgtcaggaacaccaattattcttaggtttggttgtttaatataatcccaaacttcttggagactgtgttcatttaaaaaattttttgtctttgtctttgttggattgggttaatttaaatgtcttgccttcaagctctgaagttctttcttctacttgttcaattctattgccaagactttccagtgcattttgcaatcctctgtgtctttcatttccagaagttgtgattgtttttttatttatgctatctatttcactggagaatttttcattcatatcctgtatctttttttaaaaaaatttatttaagttggacttcacctttctctggtgcctccttgattggcttaatagtcgactttctgaattctttttttggtgattcagagatttcatcttggtttggatccgttgcttggtgaggtagtgtgatcttttggagctgttaaagaaccttgctttgtcatattacc

SEQ ID NO: 473565 - DNA, 605 bp, Homo sapiens
tgccccccacatgccgggtctcgtgtttgatgctggaaatgcaactatggaaaaggccaatcttgtagccaaatgcaatcaacaggccctgaaaatgcccagtgggctgggggaaatgcattcaatccagcagggagaacccaaggtgaagacagttcccagaagcagaagcaacgcagccccggcaccaaggtgtgagcccagctgtggccgagggttcctctcacctggtgtgtgcctcgtgcaagggaacctgcagagacgctgccctaagacctgccaaatggggacctggagatacatgtgggaggcagccttcaaaagggaaaccaaccgcacacccaccagcagggaacagctcagttgacttacgtagaactgagggaatggcactcgctgcaccccagaaaacgagtggaagatgaaaggattccatggaaaatgtcgacgatacatttgaagtaaaaaggcacctatattcatagcatgatctcatttttaatcagaaatatatttggagagaggacagagattaaacatagcagacagaaagtgggaagggcttattccaactactgacagtacttgactctggaaagttaaac

SEQ ID NO: 473566 - DNA, 965 bp, Homo sapiens
caaggtcatggtagccgagacatgggggaagggaccagggataggaggcccaggactccatgtggagtggcctctggggccgggcatcgccaggggcctctgtcttgcttccccaccttctgccctccagcctggggatcccggtggctgccgccacctcctgccacctctgccatcacttttcacggacccccagctccagcctttcagttcctgtgtccgtgtgggacggtgcaatagttcctgtgtccgcgtgggacggtgccatagttcctgtgtccgcgtgggacggtgccatagttcctgtgtccgcgtgggacggtgccatagttcctgtgtccgcgtgggacggtgccatagttcctgtgtccgcgtgggacggtgccatagttcctgtgtccgcgtgggacggtgccatagttcctgtgtccgcgtgggacggtgccatagttcctgtgtccgcgtgggacggtgccatagttcctgtgtccgcgtgggacggtgccatagttcctgtgtccgcgtgggacggtgccatagttcctgtgtccgcgtgggacggtgccatagttcctgtgtccgcgtgggacggtgccatagttcctgtgtccgcgtgggacggtgccatagttcctgtgtccgcgtgggacggtgccatagttcctgtgtccgcgtgggacggtgccatagttcctgtgtccgcgtgggacggtgccatagttcctgtgtccgcgtgggacggtgccatagttcctgtgtccgcgtgggacggtgccatagttcctgtgtccgcgtgggacggtggaatagttcctgtgtccgcgtgggacgagatgaaaccatatcaccccaggatgaaattcaggcatagagaagcttgtcttggccacgttacccgggaggccaccaggcatgccatgaaactttgttgtcatttaaaagaatgtaaatcagagcacccctgc

SEQ ID NO: 473567 - DNA, 834 bp, Homo sapiens
gacagctcagaacccaacagcatggaacccgatggcatggaacccaactacagggaactggaacctgatggcacagaaccagaacccgacagcatggaacctgacggtggcttggaacccaatggcagcatggaacccaacagcacggaaccggaactgacagcacagaacctgatcatggaacccgaaagcacggaaccggaactgacagcacggaacctgatgtcggctcggaacccaacggcagcatggaacccaacagtacacaaccggaaccaacagtacggaaccagaactgacagcacagaacctgagggcacagaactcgacggcacagagctggaacctgacagatggaacccgacggctcagaaccctatggcacagaacctgagggcagcacggaacctggaagatgccggaggagactggagcatgaactcaggcaggagaacctacctggtcctggacaagggcgcacaaggagcccaggctaagggtgcatggtgcagcatgggccacagaaccaaaaacgtgggcaggccagtgtccatggacagggacatagatgaaaacgcgcaattgaccgggaggcagctgggagccctggtcaaaggggacaaagaaaggcaccgcagggctggaggaaccggcagtggtgctgaatgtggcactggtgtgagcagacagacctggccctcagagcctgatgaccttagagccacgacactgagggacgtggaaaaaggccgcgctgcacagatgcagaccaaagcatttcagtagtgataggtattttgttgtttcttataaaacacttcctagaatccatct

SEQ ID NO: 473568 - DNA, 551 bp, Homo sapiens
ctctgggagcacaatggaccctaattataatgacagaggagccgcaggcctggaccgggcagctgcggcctctctcagccccagtcccgccttcccgcgtggatccgggcagcctggcgtggcctccgcaacgcgcagcggggacgcggtgaccccagagctcggctgctcgcagggtccacacagcgtctcctcctgcgggctgcagacaccgcctttccctgccaggttgtgcctgtccaagcaggagctgaagggctgtgggagagggaagtttgctgaagccatgggcacatccctgctgcaggcccctcttcctgcatgcccacagtcaccctcccgggagcctttgcacccagaccccaccctgcccagagaggcctctcaggcacagggcctggcgaggggaggtccccattgcctgactctgctgccagtcattaaagtgtgaccagaaaagccattccatagtgtttactatgtggctttccacaagttatataaaatatgcattgtcatcttgtccacatgtatttttattttgaattttt

SEQ ID NO: 473569 - DNA, 1832 bp, Homo sapiens
ccttaacacttctgaaacggctggatgtctctgcatgagctgtgcttacccagttgttccatttattcttatattttacaagcatttagaggtgttaacattagctatggcaatgtaaaaccgatgtttttggaagcagtaggggcagggaatggaaaatcctctgcagctgtcaacatggggaaaactcccatgtatcaagatgtggaagattccaattcacggaggttcctcgtcagattctgtgccagacactggaggctggtatggtgggacttcatgctcctcaccttcctgtctcactacttttcttgtgactgccaattgctggccctttactctgaagtgggtgagaggaccactgcccctgctactggggaggggatgctcctcacagcacgagaagtgccaagaaggcagcagtcaaacactggaaccttggccacaccaaccacatctggggaattgcatgtgactagggcctagcccaataggaatgctcctcttctgggaacatctccccagtatcttcattttgttttcccattggctagtccagcttaaccccttagacgattctagatctccccagaaaatacctaggtgagagttatccaggcaaattctctccctcctttaaacccctaaaggctataatgtgtgtgtgtgtgtgtgtgtgtgtgcgcgtgtgcgtgtgtgtgtgtgttacagaggtctaatctgcagaagcacagcttggccttcaggaaatagatgggaaaagggaaaagggccgctttattatttcctcgtgccttcaaagcacacacaaagaaggtatcagtactttgtctaataattcctctgtaacattgagcatttaaaagttattataatacatttaaataccttgcccatacaagtgcattataaaatgtagcagtaatgaaacaattaaatgtcccaacttaacctgtcttctggtaagccatgaaataaatttctcccacgacctctatgtatatgtttaccatttgtgcaaatataccaccaaatagtgattgcagacaatttttattttgtcaacagtccactcgtgtaaaattacacacaaaaatactactataacccatgttcattgccagatccaattcaatgtaaaccaaggcccatttgttcacgcatgtgtttttattcttttgtctgttccttttctgacttacatatttataatacagaatgtgagaacagttagttctttgtgattatttagctttaagacatagaaaactgttctagaacctttaaagagaaattgcaggaatttttttaaagtcccttgaaattacaagtcaagatttttaaaattattattctttgaaactaattttctgtgtacatcaagatttatcaatagcatgtgaacaaaataggaaagtatggccacctcatgttgcttatttcttttataataactaagtcctataaattgagctcacaaaatatttatattaataaaattataatttatcatttgtaatgtttgggtttttcttgtacatttttatgtaacaagaaacaagtttttactgttaaaaatggttttaaaaaaatcggagcaagcctaagccccttcattttatgaatacaataacctgaggctcatcagggctggtgactcacacaggcgcacactcagcattgctggatgtcagctcaggatccagaatgcatttggacatttcatgctaaattaataaatgcactttaaaataggcccatattaatcccaaagtaactaaacctgtggaatttgtaaaagaagatgtgtatgaatgaggacatggcatttc

SEQ ID NO: 473570 - DNA, 669 bp, Homo sapiens
acagacttgcaaggactcgatccgtcaccacaaatgcggaagaaagaagattccaggggcactcaaagaagagcctggtacctcagtgaaaagtacagaaaagacgcagaatgcagccccgtatggaacaataggaatcagagcagcctcaacctcacgtatttctcgcagagcttgtacaaatctacgggcaatttcttgcccagttttcattctttttcccaggagcccggaccccctgagacatgccttggacttaggaaaggtgaacagctggtgaaaactcacgggcctcatgtggctaagaagcgtggcactgtggcttctcccagtccaccttcagtggagaggcttcaggaactgccctcggtggcccctcatgctgagcattccaggcacagcaagcagcctgagttgttggagcagcaagcagttatcctcctggagcccggcatggcagagtgaagcacgccttccaggagagggacccgctgacagcattccagagttttcagaacattttaccattaaagccaacagcaaaccacacagggcctttcagccacattaccaattttactcaatggtaactcaaaacttctaggttactgctcccctttctgtgggaaatcttgctaaccaagattgaaatggactcctccattgttc

SEQ ID NO: 473571 - DNA, 905 bp, Homo sapiens
ctgttcggccatcttgatgagaaaagggcactttgaggaagatctgtggaactttgaacttgagagagatgatttagggtatctggcagaagaaatttttaagtggcaaaacgttcaagaggaagcagagcataaaagtttggaaaacttgcagcctgatgatgcaatagaaaagaaaaacccgttttctgaggagaaattaaagctggctgcagaaatttgcataaataatgagaagccaaatgttcatcaccaagaaaatgggaaaaatgtctccagggcacatcagagaccttcacggcagcccctccaatcacaggtgtggaggcctaggaaggaaaaatggtttcctgagccaggtctagggccctcttgctgtgtgcagcctagggacttggtgccctgtgtctcagtctgtctagctgtggctaaaaggggccaaggtacagctcaggctgtggtttcagagggtgtaagccccaagccttggcagcttccacgtggtgttgagcctgcaggtacacaaaattcaaaaactgaggtttgggtacctccacctagatttcagatgatgtatggaaacacctggatatataagcagaagtttgctgcaggggtggggccctcatggaggacctctgctagggcagtgtggaaggggaatgtggggtcgaagcccccacagagagtccccactgaggcactgcctagtggagctgtgagaagggggccaccgtccttcagacctcagaatggtagatcaaccaacagcttgcactgtgcacctggaaaagccacactcgatgccagcccatgaaagcagtggggagggaggctgtatcctgcaaagccacagaggtagagctgcccaagactgtgagagcccacttattgcatcagtgtga

SEQ ID NO: 473572 - DNA, 2181 bp, Homo sapiens
ctgtggtctgccatgcctgacaccccccgccccaccgtgggctcccgcgctgccgaagcctccccaacgggcaccgccccctgctccgtggcgcctgctctcatcaaccgcccaaaggctgaggagtgctgggcgcatggctgggaactggcgggcagctctgccagcggcccaggcacgggaaccaccaggcgaaaccagctggcttcaaaccacaaacccacccccgctgggaggaatgaacaacttcagacgggcagagcaaacaactccagaggggccgccttaagagctgtaacacttaatgggaaggtctgcagctttactcctgaagctagcaagaccacaaacccaccagaaggaagaacctttgaacaggtccgaacatcagaaggaacaagctctggatatgctgtctttaagaactgtaacactcacggcgagggtctgcaacttcattcttgaagtcggtgagaccaagaacccaccatttccagacacggtactaatgagtgtgacgtagtatctcattgtggttgtgatttgcatttctctaataattagtgatgttgagcatcttttaatgtggtttgttggccagttttaggtcatctttggaaaattgtctattcaagctgtttgcccattttctaatcaggttgctattttgtgattgttgacacatgtgtgctttgaaatgacacaaagaacataagttaatggagaaatctggtgatctttttccccttaagtgattgatacatacgcctaaaatctgggggctgaagttagggagtatgtactagtagaaaagaataaaaggggtattttgaagttttatttaatatgggatttctcaacctcagtacaaccaacatttgaaagagaacagttctttgtggtgggggcttttctgtgtgctgagaggtgtctgtgagattacaaatggcagtccagccaccagatgccccagctctggtcattgccgcatgttctaagataggcagaattgcctgtggtggaaaaccactgactttacggttttgtgcaaggaccaggagtagttgtgtcaccaaagtcttggtcttgttattctggatgttatccagcactgtcaggcttctcctttaccacccaaacaatactgcacaatagagcgaaggtgatcttgtgtgctaaatcgccttctgaagattcgctgttggttaaatttctgggatacaaatggctttaggggaaaatgttgatattttagatgactttaaatgttatttctgctgtaaaaatcttatcaagacgttattcaaagcctacccacatgcagatacaatttttttcacaaaacaactagcttgatattattttgattctatttcacatgtgtgctgtactctaagaatataaaaataaaatatctctctctagaccatttataaataccctttaaaaaacgaacactaggtagttgctttagaattttggcatgaacacatattctttaaaaatgacaacaaaaactctcttttcaatttttctctggtgcttactttagcaaattgtctatagtttaccaaatactttttaacacaacttcttcttgtcttaattattaaagaaaatatcagataagccattgtcacttttcctactagatagtggagtgttatgtattattgtatattcttagtatatatatgtgtctatcattctttgacaggctgatttggaaatatatcatagtataaagaaaaacatgatgtttcctaaagtctttttacaaattaaggtgattacaattatattgtgcaatacattttatatattacttttaaaattttatctttttcctgtttaaaaaattatccataaacataattttaactattgcatgattttccgttttcctctgtttgctaaaccatttcttggttttgtatatatggattatttgaaattttcacccttataaacctgtttgtgcttcagttttcttgtagcacttaaggtgtccagacagatttctaaaataataaatcaaaagccatattttaaagctttttatatatattaccaaattgtttctctaataagttatacaaatttgttcaccagtagaaataaacattcccaatgtgacgtgtttccaaaacatcacaaagaggaaagctgtctttggaattc

SEQ ID NO: 473573 - DNA, 868 bp, Homo sapiens
gtgcaggtttacatatacactctcacttgtgcatgtatgctcacactcatgcacatacccacacgatacatgcagcagtgtactctcacaagactcgggcggctggaaacgtccacgggaaatgggggcgaggctgcactctacacccaaggcccacctgcaccatccagggcccagcctcggcagctccgggtgcacagcaggcagcgagtgcacagcagggagcgggagcacagcagggagcgggagcacttcagggagcgtgtgcactgcagggagcgggagcactacaaggagcagaagcccgactgggagacccgctcctcgttcccctgctctcaaccgaggcccagccgacgtccctgcggcttctgccttacatcccggccctgcttcccgctcagcggctttcaccgctgcctgcctctccctgcggcctggctgaggagcaggtgggctccgcctcccattagcagcattgcctccgtccagcacaaagaccaagacttgtctctgaaaagcgtctgcagcacgcgtgggaaccgccgctcagcagctcttcttctggcacccacagggccttctgggatttacaatgtttcaaataaagagataacatgaaaaataaaatgctgaccagtaaatgacgctatgagggcaaccactgtctatactcaaaaaacctcatgccgtttctatagtattacattttaaatgtatagacttcatttttttaaatcagttttaggtttacagaaaattgagtggagttccaatactccatccagtcccaatttctcctgttacttacttattggcttactgccctgcatttgctaaaatcagcaaacgtacacggacactcatc

SEQ ID NO: 473574 - DNA, 3313 bp, Homo sapiens
gttcatggctgtgcctacgactccacgaggccccctcacccccgacaggcttcacatttctctgtagcagcactcgccacatgcttggactggctgcctcttacttctgggcctcccatggtatagagttctcttctgctaaagaggcactggcactgacagcaagaggacctgctatgagaaccaaagggatggaagggcccggcaccactccttcccagtgcagctgtggagcagacgcagctgctgtccctttattattttcgaaataccagtatttcgactccagggggatgttcatttctatagtattttcagccccactgctggtgaatgccatgatcattgtggttatgtgggtatggaagactttgaatgtgatgactgacctgaagaatgcacaagagagaagaaaggaaaagaaaaggagaaggaaagaagactgaggggcagcagctgcttggagtttgcgtccttcccgtccacccagtgcagctcccagtgctgcagtgtgcgtggcgtgggcatccttccagctgactcatggtttgaaaaaccgttgttttatttaaatatccacagtggtagggcacacactgaagttggcttttcagccagcactgaatgtatccatcaggacatgcgtcttcaggtgcctgatctttgtagtcaggctgtgggaacggtctctgcagagcttcataactgggaatttgatttgaagaagtccatgtcatatgtgtaactagtactaattataaatataaaatacacaatataaaatatgaaactcaataataaacagtgccacctgtacatgggcaccatgccctcctcctcgtgctgtgttttctagtgcatgccacagttcgcagtagagggtgttttcaccttccaagacatggggcaaagtttggagacacctggttgtcactggagggggtggtgctcctggcttctcctgtggagcccggggtgatgcataaaatcctgtgtgcctgggtcagccgcatcacagacaatgacttgacatgaaatgtcagctgtgctggggcagagagaccttggaaggaagctcttggaaaatacgttgtatctcagtttgatgaaccaattcacaagaggctaggccctctctagcaaagttatgggctgctttactgaaaacagaatggaagccctgaagtcaacactccatggagaagcgtgtctttcctaatgtcctggtgttctgttgatttaggtgcttgggaacacaatgctcccagttctgttaggacaggcatactgttactttgcaatatccactttataaaatagctcctgcccagtggctcttggttcctgtcaaatgtggacctgtagtttaagaatgacaggtggttagagacccagatatttaaaaataggtgttcaataagggaatactgattgtgcattgtatctggatagcatgcctaattgtgcatttctgaaagttaccaattcaaaatgtaattggaacagttatctttgattagacaagcctgggaagagaatgttgaggtgcagagctcaccagccaagttcatgcccctctcgggcctttgtggctgagaagtgggacagaaagatgattaaggtaatgtgtcctccctgtagcattgtccagggccgttgtgtagatatttgacttcactgacagaaaagaaaccagggagtttgtagagactgtgcatttttagtataacattttcaccatctgatatggtttggctttgtgtccccacccaaattgcatctcaaattgtaatccccatgtgtcaagggagggacctgatgggaggtgatgggatatgggggtggtttcccctatgttgttatcataatagagagggagttctcacaagatctgctggttttaaagacagcagtttcccctgctgtcactgtctctctcctgctgccttgtgaagaaggtgcttgtttctccctctgccatgattgtaagtttcccgaggcctccccggccatgtggaactgagtcaattaaacttcttgtttataaagtaatccaggtctcaggtagtatctttatagcagtgtgagaacagactaattaaacatctatatgttatttggacttaatatggggccgtgtgattgaatctcagtttgcctgtgataaagtagtgtaacagtattgctagctttgcatgaatttgatgctgatgacatgtcagtgtgaaaccatgacgtgtggtctttgattttcattctgcatgtgtgtgtctgtgttttggaacagttatattttggttttgtaaaaacaaccttcactttatttttaactgtgtagtaagtttatattcaatgccttaaagtgcattgttaacaattgtcttgatatgttgtcctcattttagggaaagtcatagaagccaaaatgatcagcagttgagtaatttacgaaagcacaggtgcaatcccactttaaagcactgggggttgcacagagcacactggtttcaggctccataaatgtggatgactcactggagagcttcatctgtttaagtagaacaaatgtttttactctactgataaagtacaggaaaggaggtttgggatcaaaattatttttcacattccaaacctgtgacaccttacgtttatcgattgctatgcaataaaatacatctttaataatatgtagtatttttttttgtttttttcaaaaaaatggtatttgttttgcaccttactgtaactggaaacaggagcacctggaacttagctccacctttggctggcaggtccctttgctgcagcatctggtgctgagttttaacaaacaaatgcaattgtgtcattgccagtagaagaaagtctacttgcacagataatgtatatcaaatcagaaagcaatatgcaacctgaatggctagcttctgtgagaagtaaagtggcaaggaaatgttaacatgttcttgccctttacaaaataataaatgttaaaaaaaaaaaaaaaagggctgggggtggaattcagggtaaggagcttcagtggcgcgaagttgagtgggatgcttaaagacagacgagaattgccgtcagagatataccggtcaggcccaagcatcttttccctggaaaagaacttcaggcttccttgtctggatttcagtggagcacccttcttctttcaccaagttaaccagaacatgttttcagtgcagccttcccctctttactgaagcccctcttgctggtcgactacaccagcaagtcggtcctggggaggacggggctgggctccacatgcagagttctc

SEQ ID NO: 473575 - DNA, 626 bp, Homo sapiens
ccaattttcttcaacattcacttaagatcacatttttaaaaaatgcgtccttcagaaattgttcctcgagatctgaggatgaaggacaagtttctaaaacaccttacagatgctggctacaccagcacaagaaagacaggcttcctgtccattgatagctgtccggagcacattcatgaaaagggagtatttttataccactggaagagctactccgtccacatgcccattagccgacccctgcctcccctccgctggctgctgctggaggcaggtgcagttacactgaaggacgtggtcatgtcagtgggactcaggctcctgtatgggtctctgcgtgcgcacgtcctgctttgcaaacgccacagtgatgccctgcagaaaagctgtggcagaatccccttgatagtccccagcactcttcacatcactctccccatcaccagacaaccacatcagagcctgactgacgatgagatgcaggtgaaatcgcaaaaaatatttctttagaaacataagcagaatcttaaagtatattttcatataacataatttgatattctgtattactttcactgttaaattctcagagtattatttggaacggcatgaaaaattaaaatttc

SEQ ID NO: 473576 - DNA, 1672 bp, Homo sapiens
cgtgggttaacttttggagaaattcaagccagctccagaaatttgcataaataacaaggagcagaatgttaataccccagacaatggggaaaatgtctccagggcacgtcagaggtcttcatggcagcccctcccatcacagacctggaagcctaggaagaaaaaatggtttagtgggccaggcccagggtcctcatgctgtgtgcattctactggacttggtgccctgcatatcagccactccaactattaataaaaggggccaaggtaaagctcggcccatggcttcagaggatgtaagccccaaaccttggcagcttccatgtggtgttgggcctgtgggtgcacagaagtcaaaaattgaggtttgggaaactccgcctagatttcagaggatgtatggaaatgcccagacgttcaggcagaagtttgctacagtgcctgaagctgcagatccccctggtaatattggaggatgcgagtggtatttgccccgtaagctgtgttgacggccttcttcactgactgtgtttcacttgcagcattccagggtaatgaaaatcagttgtgtgtaaacaaatcaagaaagtcaagcatgtttagggacagacttgttaatttcacaaaaccaaagctacatccaggcaaagggtataatgtggttttgtaaatttttttgtaaatttcagtttttccgctgatagtttccctccaatcattgttgattaaaagtataaaaaacacacaaaaatggtaaattgattttgcattttgcaatctgttcaatatatttatttgttctagaagctttcgtgtagatttcatagattttaacaatctaaaaattaagataatttaagacaaattacctgctttccaataacttatctttatcttcttttctttcctgtggcaatggctagaacaatattgaataggcatgaatgaaagtgctgagagtgaatattcttgcttcgatccaggtcttagagaaagagcattatatttttcaaaatcaagtatgatattgtttctgggttttttcatagacacttttcatcagagaaaggtagttccattccatacccaatttgctgatatattttatcaggaatagaacacaaatgttgtcaaatatttttctgcatctattgaaatgatcatggatttcctttttagtctgttaatacaaagaattatatttttaaatttgtgaatggtaaacaaatgttgcattcctgaaataaaccatgaaattggtaacagtgtgacatctttttatgtatggtaagtcttgatttttttaaatgtttgttaaaattttttgcatctatgttcctaagatatattgatatgtaattgtgttttcttgaaatgtcttaatctgaatttggtatcagagtgctgctggtctcatacaatgagttggaatgttatttcttcctccacaatttttgataaaaccttatatagaagtagtattttttttctttaacaattttatgtaatgtaccagggaagccgtctggagctagagttttgttgtaggaaggttttcaactaaacattcaatttctgtaatacacataggggtatgctgactatctattcctttgtgtgtgggcattgttttttatttgttcttttcccaagaatttgtctatttcatgta

SEQ ID NO: 473577 - DNA, 557 bp, Homo sapiens
accataagaaactgggaactgcaaccaccattcaatagtgtccatgaagacaaagtttttaatatattacctttcaaagttgtattttgacatagcatctatgacaagaaatgaaaaaaaaattgcattttattttcttacttttaaaagaagtagaactatgctgttacagaaaagtgaattgcttcctagctgtacgagcatacttgtgtttaggttcttttgttcatttgaagttctgcctgaagtacatcaggctgaaaacactggggccctggtcacctccgcaaagctcactcaaagggtagaagtttcacgtcagcagaagcaggcagagaagattagagaagcccacccacccctcagtgccgctcatgttacctcaaggaaaacagaagcaatcaaagcaggacattgggcagatgagataaagttcctcaagccatacacagaatcatcaacataaggctgaagccacacagcttaagaggctttaatacagcctcttaccgaacactgagcaataagctaccatgacccagcgtcttcctttttta

SEQ ID NO: 473578 - DNA, 545 bp, Homo sapiens
actttcctgcccacgttgcttagtatccatagatgatgtgtgtgggatattttttgaaggacagaaattgtctgtcaacaacagcagagcagcagctgataggcctggttgacatttgggatgaagaaatttttctagaggaaaaccttcaggcagagcaggcctccaagaggcagttatctctagcaacccatgattccaaaaatagcagcagcccctacaacagaagcagcatttgtaaaccaagagtagaggaccagggatgctgctatcatcctacaatgcacaggagagctcccacagcaaagaatcatgtggcccaaaatgtcaataatggtgtgtttgagaatccctgggagtggaagagactgacactcagaaagcaaaatcataaactaaaagtatactttcttatgggagagatgtactctgaagtgcaaaatattcatcaattgtaatactgttgcaggaattgagagtgcagggttatcagaaggagttattctagatccagtttgatttttctttttttaagtagtaccagg

SEQ ID NO: 473579 - DNA, 631 bp, Homo sapiens
tagcctgggatgggttgggctgctgggaagacctctgacatgccctggagacattttcccctttgccctcatagtaagaaaaaccgtgtgatctgccaatttatgaagccaaaatggagaattatggagaaatttccctgcagatctcttgctgctgccaaagccaacagccaagatgaggtttatagtcactcatatttttcaacgatgtgtctcacattgccaatacagaaatgcctcttctgtgaccttgaaaatggtctctttatcagtttcccacctagtaaaattacattcttttcttttacagaatgtcgaattgtagtagtttggagaaagcccgaggtgttgtggaaacaagagacccagaccctccactgcaatggtaccagaagaaattccttaatatcacattgcacagtcactagacataagggagactaaaaaattagtatttgccatttcaacaatcaaagaggggtcctgcagcaggaatgtctttgtgcacaattagatttactttgggagccaaagtgaaaaatctgctaatgaatgagcgcatcagctatggaggcgtgctaatcagacatgttatgaagagagaacctgtaggaggagtgtggttggttaa

SEQ ID NO: 473580 - DNA, 1497 bp, Homo sapiens
ccagaagaggcccttcagtattttccaaaaccatggcacccaaatcactgcctctaagagcagagctttcaatgaaaattttcaacaagtgggaccaagatcctgaaacatttcttcaaagaattataacaggaaatggaacatggatttaccagtatgatcctgaagatgaagcacaatcaaagcaatggctaccaagaggtggaagtggtccagtcaaagcaaaagtaccagtaaaagcaatggctgttgtaaaagattttggggattctcaaagcattttgtttattgactttctggagggccaaagaatgattacatctgcctattccttgaagtcaattcagggaagtccaactttaaggcaaatgcactatcaagaagaatggatgagggagcagcccatagaccagcctgaacgttgcattcctgacaagagaattggcagagtggaggctgcctggccaagcatctgtggggataatgaatggagcaattcttttggcacaaaacaaaaggctcttggggtggggaaaggcccatggcgtcagtctaggcacagctctcacaaacgaaaattctttgttatgaatcgctcctcagaaaatagctctatcctggatgccaatgtgcatgaagaaaatggcaatattcatcaacctggatccctgaataactgcatagactagagcacatctccctactcattcactttgccagttgatctggaacgaactcattctctctgtgtttgagacatatgcatttaattttttaatcatagtctgatattactctaactaatatagtatgcaacttcaaagtattctatctctatttttgtattgcactgacataagaattagccagaaaaatgttacaatattcagagtcacacaggaactttagaaatttttctcaggtatgttgtcacaactttggaataaaggtatctaagctttaattaattatttcaaagtattataaaatgaataccattaactagacaattataaattttaaaagtttacttttaacattttccaattatccaaaatggtaaaaaaaaataggtagggtaactttaatcatggtattcaattctttatgaattgtctttaaaaggttcataaaaattatccattatattcatgattttgtatctctacataattgactcatttttgaactaaattaaatcttgttatcccacacagagtcaataaaagtaacacttttatttcataattcagcacttttcaaaatacacattttaacctacaataatctaaatttaagattcagtgccatgagaggagttagaataatacataatcaagataaagtattttacaatcaagcagttctatctttatgtcttgtcttccacatttataaaccatgtgactttgaggtacttaaaatctcttggctttatttttctcatttgtaaaataggaataataattacacttccttcaaggccacaatgaacta

SEQ ID NO: 473581 - DNA, 865 bp, Homo sapiens
gttgctggcttctagaggttgctcactcatggctgcatcactctggaatctattttcatcatcacgtctcttctgattatgatgctgctcctccctcttatgaagaccgttgtgattaatgaaaggcagcggcagagggcccatcacaacaggagcatgtcctctgggaaaaactgtgagaatcatcacactgtaaatttgtcactaaaaacctcatcagcacccaatgaatataaaagagtaaaagccaacatctgcgcaatggcagataaggccctacataatcagagtagacttctgccacccagccttgcctcctctctgcctttctcatcacctgctgcagtacatttcaccccttccactccaaggtccgcagcttcactcctgaagtcagcaagaccacgaacccactggaaggaagaaactctggacacatctgaacatctgaaggaacaaactccagacacaccatctttaacagctgtaacactcaccgtgtaggacagtatttgaagaattcattcttagagtctaccctccagaagaaaaaaataaattctaggagcctaggttgaaaaggatcctgctctaagacttgataggtgtaaaatttaagtcagatttgtgggaaagcatgttacatgtattagctcagttaagaacttcattaataatgaggcttcagcttatatggatcatcattatttataaattctaaagaaaatgtttttagcagagctgattagatccagagctgattagatccagttggcttccaggaaatgtatatcagaaaaccaaatcactaattacattttaaatattcagaagtggttttttgaacaaaagtagttctaaagac

SEQ ID NO: 473582 - DNA, 774 bp, Homo sapiens
ggctgccagggctgccagcacgctttcctgggtggccagtttgtcatgggcgatagtgaaaacagtggctccccatggaatgctcatgtaaggggcagaagctgccttgccaatccctgccagggggagtgtggggctggtcacagaggccacaaccttgaccagcagggctcagaagaagaaaggaaaatgtgggaaagtttggaacttcctagagacttgaagagctcagaagacaggaagatgtgggaaagtttggaacttcctagagacttgctgaatggctttgaccaaaatgctgatagcaatatgcacaatgaagtccaggctaaggtggtctcagatggagatgaagaactttctaaagatctgtggagatttgaaattgagagagataatttagggtatctggtggaagaaatttctaagcggcaaagcattcaagaggaagcagagcataaaatttggaaaatctgcagcccgacaatgtgataggaaagaaaaacccatttttctgggggagaaaatcaagcaggctgcagacatttgcataaaggaccaccttcttttttctttccttccgaaactttgatgacacaaatgttagatcacttattacagtcccacgggtcactacgactctgcttattttcttcagtctattttctttacattgttcagataatttctattgttctatcttcaagttgaatgattcgttcttattttttgtctattgtgttgttgaacccattccctaaggcttttattttc

SEQ ID NO: 473583 - DNA, 774 bp, Homo sapiens
atctgcattggagagacgtgttgagcaggtaactgaggaggctgtgccatgatcctcttcataagaagcaatataaataggtcatgccactctctgccagcctacaaagtttccactgaaaagtcttctgccagacatattgtcactccactgaaggtggactcccttctggcccaggacaggtccaaaaatgccatcaaagagtcacatcctggaatcagggacactcaagagcctgcttattgctctgtattagttcgttttcacactgctgataaagacatacctgagactgggcaatttacaaaagaaagaggtttattggaattacagttacgcgtgcctggagaggcctcacaagcacagtggatggtgaaagtcacacctcacatggaggcagacaagagaagagagcttgtgaagggaactcctctttttaaaaccatcagatctcataagacttattcactatcacaagaacagcacaggaaagacttaccctatgattcaataaccttccaccaggtccctcccacaacatgtgggaattcaagatgagatttggttacatattttaactcatactggtcaggcaaacatacataatttttatatcatctggcatattgactcttactatagtatattgctcttggttatagctatgcttcttacctattttgtctgctattcatatagcaacactagctttattttggatagtgcttgtgtggtgctcctttgtccatcctttttctttcaaaatttctgtgt

SEQ ID NO: 473584 - DNA, 2077 bp, Homo sapiens
tggctttggtcatcaggaatagacatgctatttcctttcagctatagacaaagcctctttcagctgcccgcagcggtcgcaacaacaagcagttctacgttagcatcgcagcccgccctgcccttgcgctgcccacaaatgaccaggcaaatcccagaggttttagtgtatgaaagagcatcagatgcagattgtattttgggtaggcacacatattgcaatgaaaatccagaaattattcacactgacttcaagctctgtcatttctttataggtgttttatgcctgctcttggattttcatcttgtcattggaattgtttccttctggtgggttcttggtctcactgacttcaagaatgaagccatggaccctcgtgccatatttctttctacaccttacagtgtgcacttttatatctccctctatgggtttgttctgtccctgacagatcttgtttttgtttccttctcttcctgcaaatgtgtatttatccctcaacaaccagctctaaactcacattcccctgaaaacgttcatgaccagtgccatcactgagaattaatcatttcttcatctgtttctaattcttcatactgttcttgtaactgttcttgtcactttgaactatagtaagttatttatgagtgtgtttcccaagctagactatgtgctcctcaaagacaaggacagtggcgatgtcttaataatgtttttattcctagagctaagaacatgtttgccagatttatttccatgaactgtacagaatggaaaactacactgtctgcaaaataggatgaagacattgaggtttagaataatttctgtttaaagaaaagttagggaagaaaatgtatttttaagtgacaatgaggtcttataaaatcagagtattctttaaatagtcatgctcccaaatgctgatcaacagaactgctatctaaatatgactattcttctcaagatgttaatctggaaagagaaaatatgcaagagtgcaaatgttcacttgtctttagagaagaccctggactgtttaaaaataatttttgttctgttcataggcattcttgttgcccaattttatgtgaatatgggtgacaatttatttatattcaagcccaacttaagcttaataaggttcatgagtggagaaaaactttattttcagcttgtctaattattaaagcatacatatctgctcttaatcagcaacataacatttcagcattccaacttcctaccagaaatatactctcatatttgctgcactgagtaccagacaaagattatgtggtctgtctattaatcaaaatcagtgtttcacaatgttttaaaaatctaagctctcattaataaacattcattcccagagtctcaaaaccttttctattgagcgtaaatattttgtgcatattcctatcaattaaaaacttagctttacattccataggtattgttttataagtatatgagaatgtgctttaaattttatgaatattaaataatattttaatcctgaatatgcttcttcatgattcatgcttccctcctcagattattctacctggttgtagtggggtgggcaggcagagaggaggacaagtgagctatgtgtgcctagtcaggtgtttctatctgagagtttgaatcttgtgagcaggtgacaaaggcaatcagtctgatcagggttatttttatagaaaatctggtggacttaaggatttagcagtgttatcctctgtagtttttaggtgtccttaggtgacattctaaacagaaatagaagatttgggctgtgcctttcctgtcttggattcttgccaggccttgtgtcccagtctttctggatattatttgtgtttacagccttccaataaattccttgtctgtttaagataatgagagaaagtttctgttgttttcaactaaaatagtaaagaaatgaccaatagtaaaggaatatgatggcatgatgatatgacttgctttatatctgagattggtattataaagttataaatatcaatttaaattgtctgtaatcattattcaataaatattaaaactgcaa

SEQ ID NO: 473585 - DNA, 582 bp, Homo sapiens
ggacacatcatgatcatgtaattaaaggttaagaattgacaggtgttttatcatcatgtggatacctcatcatgacgcagacagcagagccaagagttggtctgtggcttcactcctgaagtcagcgagaccactaacctaccaggaggaacaaacaactctggacgtgccacctttaagagctctaacactcactgcaaagaatttgggggctaaataccaggcacctgtcagccagttaatagcgactagcacggccgctggactaaagacacaagtgtcaggctttctgggaaagggctctctagtaacccccgactctttggagttgggagcatggtttgcctggaacaagcttccgcttttcctgtatttctgggctgagccaaccgtcaacagaaaggaaagccattcagctccggggaggacaggcaagggtgcaggttttcgagaatgcattggtaagggccactaaatccgacattccttggtcctccttgtggtcttggaggaccactagtgtttctgctactgtgtcggtgagcacaactattccgatcagcagggtccagggactgttgc

SEQ ID NO: 473586 - DNA, 1286 bp, Homo sapiens
tttctgctgtttgataccattttacccacagtagaatttgtttcaaaatcaatcctttcaaactctatcatggctttatcagctaagtttatgttggaggaggggtcatacaagcactcttgtggcgaccagtaccacactgtaccagtaccatcactaccaacaccagtaccatccaggcactacactgggttgcacctgaagccagtgtggtactgggtcttgtccaaggcctgtggcaactactcttcactgcctggagttggggaagatgtgatgcaggcactacttggccttcatagttggtgtcacactgggtcacctgcaccccaaatgcactgtgtgattcagacaaacctccaggtctcactgaaggactgtagtccaagtagcctgactgccactcacatttattctggccccagacctctttatattcagccagtgggagagccagctaggactcaaattcctcctgctgggtgattgttttaacatgctgttgacttcagttttcctgatatccctgataaacataaaaaacaattttttgcatctatgtttatcagggatgctgggctgtaattcacttttcttgtactgtcctcatctggctttggtatcaggctcccaaaatgtttgcaaattcttagcattgtggtttcccaatgatctcattgttttattctcttgaaatattatgtaagtattcaatatgaccttggaaggaagaaaaaaatagtagtactggctaatgacttgaaccagaaaccttagactatatttagtaatacattttcctcctgatattacctataattggtctatgtcccctgcatattatctcaccaaaacccatagaagggagaaacaataaagctgaacacaataggtatatataaatttttcagtgttatttatgaaaaactgtggcttatccagagtaacacaaaaatcacagagattttttggaaactatgtttgtattagcctctgatactttaaataaagaaacattaaataaaggtgcatgtatataagtgagagtcatgaggatagaagttattattttttaaataatatttacatgtctgtatgtttctctatttaaaactttcagctatgtaaatatgatttaatgaaaaaaatgattagacattcttgaaacttctagtttaagagggaagaaaacagagataaaaaggaaaaaataaaagacgtattactgactatttcttcctttccaattctaacgaatggtatatagtcagttgtggctttacctt

SEQ ID NO: 473587 - DNA, 539 bp, Homo sapiens
tcctctagcagtccctgtatgcgccatcataatgtcatgggtgcaactggctgggaccagcagaaagtatgaagataccttgcgagaaagcagcaggcataacagcagagaaggagctgtctgcaaagaggcaggggctggaggaaagttttatagggtcctgctcctggggctacatgcagaacaagatcatttcaagcaacatctcaaatgtgatcataaacgcaatttcatttcctttaggccatctctggaaaagagtcagctgagtcatggcctgaatcctccagtggaaattaaagcagcatttacagctcctgatgttggccatcaatccttggcattccttttctttggtgtcatcacttctgtatctatttctgacattacatggcattctctctgtgtgtctctgtccatattttcctcttgttatgaggacaccagtcatattgaattggaacccattctgatgactgtatcttacttcttctgcaaacactctagtttcaaataaggccacattctaaagtactggg

SEQ ID NO: 473588 - DNA, 543 bp, Homo sapiens
cgggaacatctcctgagactgtgtgaagagatagaaaatggtagctaagactaaaatgttgctggtgcacattaaagtttttgaagcaagccgtacagctcatctggttctcactcttactttccaaagaaagatactgaggtccagagagaacaaggctaaccttccaggccagtgtcagaaaggcagaactcacttagcatattctgaaatctctcagtttgaagtaaaaagtaaacatctcgtttccattggaagcaagaaacaagttttttttcttcataatggagcattatcgcctataaagaaaaatgaagcaatgctgtttatatgtttaacgtttaaaaaaataaagactgacagtcgccagaatgatgggacaatggataaagagcagacccaaagatttccttccctcctctggactccaccctgcgagtttccccagagaggagaacacagatgtgaatcagagctggcagggtggagctctggaaagccatctcctggctctctcagagcttggatcccaagaggatgact

SEQ ID NO: 473589 - DNA, 567 bp, Homo sapiens
ggacgccgagccgcgcgggaatgagcaggaggagcgccgcccagagctccgctcggccccgagagctggccggcccgagggcgggctccgcccgggagactgaaggagcaaggggtgagctgcgtctggcgcagaccccaggggcacacgctcttcccgggctggaggagcggcctgggcacctcagccgggggagcctctggcttcgagcgagcgcgtctgtcctacccgggccggggcagctcccggaactcgccgcttcgccactgtggtgcattttcagagctgcgcctcggtgggccgagcggtcagcgctgagccgagactgcgcccctccaggcgggctgagcgccttggctgcagagggcaccagctgcggcctccatcaacgcgccgcgggcaaggccctgcgctggcggcctgggcagggcaggttgttgaccagatgtcccagactaaagccgagacaattttctgggataaaaagagagccagacccatttttcctttcgaaagcaaacctcagctcctggccaggaagcttcataaacaagcagtcttagctgt

SEQ ID NO: 473590 - DNA, 968 bp, Homo sapiens
ttgctaagattcatggaccccgtgctaggtgctggacattcagccagttttgtacctcagaaaagcaagggggagagtctcctgcctcacgcggtgtgtgggtggagggctgaatcatcaagttctttgagttccttgggaaaagataactcaaaggaatattacacaacatggagaaataggaggaaaataagcagagacacaaaaatgactcaagtgttgaaaaatatgatccacgcaactaaaaatacattgcaactgagtttgaagaggaaaagactgggtgtcaacattccagtggcccaaatggctgtgcatgaatgggctttggttcgaaggatggtgagcagatggtcaccggcctcacagagaagaaggttgtgcaacagggcctggaggccctctgaagatctgagacaaggggaagaggacaactttaccagggacaagacagcctgagcttcagcaaaacactataaaagagtatccttggttccatatgacccaggcagagggaggagtgatgggttttcaaggactgagaatgcacatatggatagaacaaatctagaaattcaagctacttctattgctaaacaagtatagagtttcatataaatataattcataaaaggtataaacggcaagagtttctacccaaagattttgtgaaacacctggcattctagctacagcagcaaattatggcatcccttagcccctcagagacctctgtcctcagcagatgtgaccgccttcttggatctcagcagtgcaagggttcagtgtgccagcatctctacatctgaggtcttgctgtcttctgcaggccttccagctgctttgagagagaagtgaccaaagtattctcacttttgaagggagtgaaataaaacctggacaaaccaggttctcaaattaaaattcatggatcttcctattttcccaagaagagcctgttttttttc

SEQ ID NO: 473591 - DNA, 972 bp, Homo sapiens
ttccactaggttatggatctccttctccctgagggaggcataagtggcagagaagctgagagatcttaagcagctaacggaaaggagtgaagctgcagaccttcacagtgagtgttacagctcttaaaggtggcgcgtctggggtagctttttcctcccagtgggttcatggtcttgctgacttcaggaatgaagccagagaaccctgtgaatgagcaattactgggtgtcttaagcggcatttcaggacgttcctgtctacataggtatcaccccttctctctgctaatacctaactacatgtttcaggtggtctctgaggcacaagattttccagagcttcctcaccgagagcattccttttctgctcttgtctgcctgcctgctctaaaaattccagaatgtgaggattttaatttgtttgaaggtcaaccagattcctctttatccctcaaggttcagcataaatgtcatgtactctggaaggtcttcttgaattccccaggccagaagaagaagaagaagaagaagaagaagaagaagaagaagaagaaggaggaggaggaggaggaggaggaggaggaagaggaggagggggaggaaggaggaggaggagaaggagaaggggaaagggaagaagaagaggaagaggaagaagaaggaggaggaggaggagaagaagaagaagaagaagaagaaggaggaggaggaggaggaggaggagaagaggaagagaagaagaaggaggaggaggagaagaagaagaagaagaagaaggaggaggaggaggaggaggagaggaagaggaagaagaagaagaggaagaagaagaagaggaagaagaagaggaagaagaagaaagaagaagaagaagaggaagaagaagaagaagaagaagaagaagaagaagaagaagaagaagaagaagaagaagaagaagaataaacaacttgggatcattcactgacactg

SEQ ID NO: 473592 - DNA, 928 bp, Homo sapiens
gcagggtttagcacaaaaggagccttaagatgtcccctacctacaaacaactggctgttcagctgcagtcgaaaatggccctcctccgacgtctccctggtgctccttggaaggttgtccacctgcagggaggtctccttgaggttcctctcagcccggacatagtgccattggttgtcattcagaagagaaggagactggactacaagctccacaggaccattcccaacatcgatggcaaaggaaacaggataggcacctggaccattcatgctcatctgatatacctgcatgaatgccgaggccctggattttctggatctattgtggcttcagctgtgtcctccaggatatctgcagacatgagtggtggtattgatggtggtggtgggcataatgttaatgctgatggtgatggtggtgctgatgggggtggtggtgatggaggtgatgatgatggtgatggtggtggtggtgatgatgatggtggtggtcgtggcaatggtggtgataatggttgtggtgatagtggtggtggtgaggggggtaatggtgatagtgatagtggcagtgctgatggtggtaatggtgatggtagtgatggcactggcagtggtggtgttgatagtggtggtggcagtggtggtgatggcgatggtgatggtaatggtgacagtgatggtgatggtggcagtgctggtgatcaccagtgccacctggcagccctgcacatccccaaatttaaaaacacttaactgagagatgactggaccccacatttacatttttctataaaacacagaataagattggtgagaatttgggtgaggaatgttaaagattttgctaaaagctttcctgcaaggctagtcttgtggataataaattccactgagacaacacatgtttggggagggcttgctgtttc

SEQ ID NO: 473593 - DNA, 661 bp, Homo sapiens
ttttctcctttgtaaagactaaaacagccagaaaatggacctggaagagagggcaaaggtcacatctggagtcaggccaggctgccccggccactgcagcagctacggcagcatctgccacaacgggggcaagtgtgtggagaagcacaatggctacctgtgtgattgcaccaattcaccttatgaagggcccttttgcaaaaaagagcattactgctcacagataaatcgtggagctctggcaccacccctgctcaagttgaggttctggttcatctacagtccacgttgtatgacactggttgtgtacctcaacctcaagattccgtggtttcctcatctacgagatgtgggaagcgcaggactctttcacagggagtcgtgtttaacattcgatgagcactctacaaagaacatgggacagcccacagcattggatgctcaaggggtgttgttgatagtggctcggtggccttggagaatcatcatggtcactagaaatcacttgcaagttaaatatctttatcctttttggccagtggttttagatgctcagataactcaacccatctgatcaaaagcttaaactcttagattataaagtacaagaaactgaaagaataatagagtccagctgtattgctgaatttagctttatgat

SEQ ID NO: 473594 - DNA, 1262 bp, Homo sapiens
tgctcaggaagagggtccatgaccacatgttttgtcagactgcaatccttgcccaggaaaagctctctgcccacaactaaatgagaccaggtcagaattatgggacaatggggacagtggtggccctaaggacaaacagagagaaagggggagaaatggaaaatgagttcctgcttcctattaatgttaatcttgcacagcaagttcctgagcaggtttcatttgtttgcttgtttgcagcaaagaatttgatggaccagcaacttcgactcagttataacttctctccggaagtagagttcagggttataaggtcactcaccttgggcaaagtcacagagaatcttggtttggattctgaagttgctaaagcaaatgccatgggttttgctggatgcatgtcttccgtccagtacaaccacatagcaccactgaaggctgccctgcgccatgccactgtcgcgcctgtgactgtccatgggaccttgacggaatccagctgtggcttcatggtggactcagatgtgaatgcagtgaccacggtgcattcttcatcaggtacactcaagagcatgcacaagggagcttctgtcactagcactactttttgtgtcttcaagaagcttccagattaaagagttggctaatgtgactcagtttttactttgtataataacaggtggctaaaaattatgactgatatttcatgggtgattttatacatatttgatgtagttttatttttaatatgatgagtaattaaaactaaatgcatagttgtgtactttgcttattatgcacgtatataatgcattgtgtatgtgtgtgtgtgtgtttgtatacatagtcactactgttgaagtggatactgctccgagaattgaggtatttagagaacagggaggcagcaagctggtacctgaactaacatgataattcatgtgattaaaataaaccttttttagctttattaagaaataattgacaaataaaaattatatattttcaaagtgtaaattgtaataatctgataaacatgcgcattgtgtaattactatcacaattaaattaatcaacacatcactgcacagttaccctttgtgagtgtgtgtatgtgcatgcacatctgatgaggacacttaagattaactattttagcaaatgtcaagtaaacaatacagtatgaataactgtaatcatcatgctgtacattagttcaccaaaatttgggccaggtgtggtggcttatgcctgaaattgcc

SEQ ID NO: 473595 - DNA, 582 bp, Homo sapiens
tccccagagtgtgatgttccccctcctgtgtccatgtgttctcattgttcagttcccagctatgaaaactgccctgagagagacctgcagtcaggatagcactaggtctcacccaagactcactgtaacaactacaaaggtagcagttatgttcactcaagtccctagggctctacaatcagctggtggtgaagccagccagccttgtgtccttcttttcagggcagcaagtttcctcaggcttcagatgggtccagaggtgctgttcaggagccaggaactgaagtcaaaaaccttagaagtctattttgtgttctgttgtactaaaactgaactggtacttaaaccaaaagattccattctcccactcttctcttccctttccactggcagaggggcttcaccccatggccaccactaccacagccccatggggagtcatgccagatggtttggagatctaaatatcagtgaaggataagataataaatctcttaaatgtaaacataggagaatatcctcatggccacgggttaagggaattttcttaaagggacactaaccatgaaggagaagtgaatg

SEQ ID NO: 473596 - DNA, 724 bp, Homo sapiens
agaaaggaaaaatcaaagaaataccctgcccagagaggaggagtctagagaggcagtctgactacagcagccttgctgagctatggtggggtctgcccagttcaaacttcctggcagctttgtttacactgtgaaggagaaagaggaagaggaggagaagaagagggggaggaggagaatgaagaaggagaatggggaggaggaaggaggaggaagaaaaggaggaggagatgaagagtatggagaggaagaggaagaaggagtggagaaacaggaggaagagagaaggaggaaaaaggaggaggagaggaaaagtagaagtaaatcagagttttcttcttggtttagatctattgctggtgtgttaaagaacctggtttttcgtattaccagaattgttattctggttctttctcatttttgtaggctatgtcagagggaagatctggggctcaaggctgatgttcagattcctttgtcccgtgggatgttttcttgatgtggggtatattatttggaaagaatccaaattattatttttttgattttcagaaatacccagatacaaattgaagagcatcaaaaataatttgtgtccatatacttattttggtgtttaaaattgaactgattatggcattcaataaaaactaatgttaatataataaaaataataatattgtgcaaaagcataaaatagtctgcatttcttcatttttaaatt

SEQ ID NO: 473597 - DNA, 543 bp, Homo sapiens
tgaaagcacaagtgatgcttgtcgggacattaacaagctgctgcttgttctgtgtagcgggcattgagcctctggacagggaagagaaggcagtgcccatgacttgccatgccctgaacttagatgatctcgtttactcctcacaacaaacctcaagtaaaggacccatccccgcaccaccaccaccccaagaggatcttgggtctgaggagctgaccgatcccctcattcaatcctcacagccctaccgagaagcactctcattatccctcccgtacaggattcctgctgatgaatgggtctgtacaattatcggtgacaatatggtgcataccctgagtcctgggctgagcgtggaggcccttcccggcagggaggaaagatggctgcagctctctgttggtaggaaagacggtgagtgcggtgttctgagagccagccttgtagtcacaccgacctgggctcagatcctgcctttctaagtatagagctatgagctgcctcacagcatttctgagcctcagtttccttttctgtaaaatg

SEQ ID NO: 473598 - DNA, 600 bp, Homo sapiens
gtgatactttcttgtaacttactatgaaacgtgataggcagagtaacgccttcccaccttcaaagatgcccaccccttgggagtgtttgggctctgctatgcaggtgagcacaagacctgctggaagcccagagggtgggacgcttaccaagctgggaagaaggctacctggagaagcagatgtcaactgcagttttgaaggatggttaagatccagccaggtgactgatggcaaagacagaggacatagcatgaacaagcatgcagaggaggtggggctgaaagtgaccagccacattcagaagcctcctaggggctgccagccaccagtgttctcattagcatacaacaaaacaatagcaacagcacagtactatatatatttcccaaaatgtacaagtgtgtgcaatgagatgaagaaacaatagagcacttcccctgcaatcagaggaaattagaaagtccccaaagatcaaaaagtcaaaataattaacagattcgttaattcattcaacaaatacttaggaagtctccagcattgtcccattgtggaaaaaaacagaattgaagttcctaccctcaggaagagtatgggcttgc

SEQ ID NO: 473599 - DNA, 1405 bp, Homo sapiens
tgaaagcagctgcaggggtttaccctgcagagccacaggggtggagcagctcaaggcattgggaacccaccgcttgcatcgggtcttgctttgtcacccaggatggagtacagtggcatgatcatagctcatggcagccttgatctcttgggctcaaatggcaacacaagacttctcttccagcgccagtgtgctccttgggaagccttctccagtgccagctctagtgctggctactgtagtacatggcaggcagcagcacatggggctggcaacatgtggagttcctgtttaggaagcttcccgtggtgcccctcaggtggctacacaatgagttctgagccacattgcctccctgtgagtggtttctactggcatcctagagagtggattcccaccggacacctcagtggacttctttaccatctgggcattggcagttaccaagaatctatcaagcattgtattgggcaatttacatgcattttatcctttaatcctggcaataacctctgaatcatgcatcattatccacacttcacatatgaggaaacgaaagctcaaggagattgtgtgacttgcttagtctcatccagtttgtcttatttactattcttcaatatatttaatgcatttatccttataaatgttttatatatttgaaatttattcttatattccatgtaagtcttttgcatatttgaaagctgtttgttgctttttacaaattatgtttttaaaatggtatcttctaacttttcctgttagcatatagaaataaaattcacttttgcataacaattttattttcttgctaaattatcttattaggtttcataatttaactacagttttaacttttctatatgaacaatcaaaatgtttatgaataatgacagtttagttttcttatcttaaatttttttatcatttatttttcttgctttttgtgtaagacctcaaatgaaatattaagtcgaaatgttaatagtgggcatttttatctttttcttgcttcgaataatttaccattaaacatgatgttcactataagtatttgaaaaaatattttatgctgttaataaaattgctgtctattctaacttgctagaattagcagtcaggttgttgttgcttaactttttaaattattacgaatactactaattgtacatatttatgggattcatgtgatttttgttgcaagcatatgatgtgtgacaataaaatcaaggaattataagggctgtaaaaatgtgtgctatggtggaacttggcagggaaaaagtttccatttaaagagcttttcaaatatattttctaaagtttcaaaaaattaggtttgaaactttagtcatgaagttagcaaccatttacatagtccaacaccttttaaccgactgcc

SEQ ID NO: 473600 - DNA, 824 bp, Homo sapiens
ccacggggatcccactgccatagagcagataccaattgatatgatatagattaagccctgcctggaaccagttggcttatctagaaagcatctgagtctcattctcatcttcatctcctccccatccaccttctctttccaccccataacaatatgggggatgcgaggatgaatggaacatccgaacaagtgaagaaggaggcacaatctctcaatcagaggaactacaaatgggaagtagaatttgagctgagccttaaaaaggcgagaatgatttggatagcagaaggaagcaatgactgtaagagctgctgtagtggcacctgccacttttcctccttcactttctccatcatcattatcaacaccctcatcaccaccctcaacattactattatcaccatcatcacaaccaccaaactcacaaccatcaactccaacatcacctccatcattaccatcatcatcaccataatcaccatcatcatcaccaccatcaccaccattatcaccatcatcaccatcaataccattatcaccgtcagcaccatcatcaccatcattatcaacgccatcatcaccatcatgaccatcatcatcatcatcaccattatcgtcatcattgctatcatcatcatcttcttcatcctaaagataatcccattgctcagcaatgagtaatacctatcctttcagtttgttcctggtggcattgagtttgcattaattcattcaaaaatcctcactcacttcctaaccaataattttattcaacaaagggtgataattatttggtgtaaaaaataataatcatcatttcattt

SEQ ID NO: 473601 - DNA, 629 bp, Homo sapiens
ttaggagaaatacctaatgttatgcaagaccagggagttccaacttgcaaactgaagtttggcaaacccagtacaatttctaggatagctctaagcacagcacacctgcctgtaccttcacctgaatgcatactttgcctagtccactcactcaaactttgtagggatgacaaccaggacttggatgccttcaaatccaaaacagggctttttgcttatggaattccctacgtgcatactcatgggcattaccacataggtgcaggtggcccttgcctgagactgaaaaatcccactgatgctccctggatgggacaaacagagcacctcccatttttgctgggcaagagaggaaaggtcaactccccagttggccttgatgccactaacatggcagcggattcagggctttgcctgctctagacagggctactcttttcagaaataattttatttgaaatgtttccatttcccaataactgtgttttccatctccattctatgctttgaaatgtgtcagatatttcctgagatttaaaatgctcttactcaaggttatgtgatagtacaggataacttaaatgagagcattaccacaaaataaggtgttattgaaatcttacatctcc

SEQ ID NO: 473602 - DNA, 563 bp, Homo sapiens
aatatgaagttaataccagaaagtggaggtaactgatatgattgaactagaacagagattagtggattccaaaaactgcctcgccttcctcatcgagtatgtcaacttttctccagcagacatgaggctaaataatagtgttttccagtggtatggaaggatgggagaaatttttgaagaacacaggaaaatcattgaagagaaaatagaacaatatcaagaaggtctgaagttacggtgtgaacggtttgtggaggaattggagagttatgctaagcaatcagaagaattttattcatttggagatcttcaggatgttcagcggtacctaaaaaaggctcaaatactgaatggaaagttggatttagctgcagataagaggaagctggaggaaaaagagccataccctttgccatataagatatttacagagtttaattgtattttatatgaaaaggagaatgaaaacatatgattaactatgatgctctatcatttttcttacattgaaagatcttaatatcttattagttcaggtaattgttttataataatcacaaata

SEQ ID NO: 473603 - DNA, 685 bp, Homo sapiens
agcacatacacatacatccaagtcgcacatattcagtatcatctgtgtatagatattaacgtgctggctgatggagcagaagggttgtgggttacagggcctgactcaaaggcaatgtgggcagatgcccacaggtagccacttctgtctggctacagctgtctacactgcacctttgcaaattagaaaatggtgcctgtgggtggggtatggccagctcataggccagctcctgcatgcagagccccaggtgggcagtgtgtgcctgggtgcagggcctgctgaatggagatgcaatagggctgcatatcagccccatcggccccctggcagctcttgcgggaaggactgggaaccgctgtcagcatcaggcccagactggaatgggaaggaggggaagcaagcaggcatatccaaagccagctcctatcctcatagtctccatgaacagccatcacgcatctgggctcttgctcaccttgtccctcagcctgacaccttccttcccatcagctggcccatgcctttccagttccctggaggagcatccctccaattccttttttaaaaatccattcaccctattttttatgatgataaaacatatatataacataaaatttaccagtttcatcctttttaactgtacagctcagtggcattaatcacattcacattgttgtgc

SEQ ID NO: 473604 - DNA, 680 bp, Homo sapiens
agagcaaacagacacgggctccgtggggtccctgtggctgagaggtgggcatggcggcatgtctgggaagtccctgtggggtgtggagtcactgagaccatcaaatgggctgtatctgcctgtcccacagggaaatggtcaccaggaggtgggtgtacaaggcagatatctgggttggccgcattgaggaactgggagggggtggagccctagacaccgtgtcaagagcaataaaccctgcttctggtaggagagggtccaaattagattcaaaatgcacgcacacgcacaattataagaattctttacacagcggcaactctttggtgctctgcactgaccgtgagggccccaggggaagaagcgccacggtggagaacacagtgaacgcctgtggacccggcaccagcgaccaccacagtggcctccatggagatgttgagttgtcccgggggctaggagctcgctggctccccaagggacaaggaggcatctctgactccagctggatacctcctaagaatgtgccttaagtccttgcatttttagcaaagatatttgagacattttgggaactctccatagaagccaccagaccctccctgtgccccttcattcatccatctgtttgtccatccacccatctaacatttgttgattaagaccctgctatgcactga

SEQ ID NO: 473605 - DNA, 838 bp, Homo sapiens
gaaaagtcagcctccccggggcacgcaggactccccctcctaagcccagaccacaatcctgcccctgccactccccatccacacagagcatccttcccaggctcacccccatgggctcgctgccatcgggtcctgggccatgagccacgaggttcagagggagaggggccagcgtggcctgggcaagtacccttggtcaccaatggaccagcgcccaccactgccctcggtcaccactggacctggcatacaccactgtgtccccacagctaactgtgactacctgaggactgacaccctcgcatggagcccagccctctgcagatgcgggcgccaggtcctggatgatgggggccccactcctcgagggctaggactcagcttgcagctggtccagcagtcaggccactcaggggctgctcctagtcaaggtctccaatgccttccaacagatgatgccacacgtggccagctccaactccagctcctcgcggggagcacaggtttctgtaccacctgcagcccacagccaggtgccaccttcccctgtgccaaccagtaccccagcatggacaggaatggggcagagagtcctctggggggaacatcaaaataccctagtatgttagtgactcggccagtcagcaatgtgctgctctgagggctgttgggggatggaggaagaagttgggagcaggggatgaggaggagcctggggggacccagtgtttccacccacaccagagcccccgcagcagatgccagcccactaggacctggtgggcccagaggtgtgcagagggagcaggtggcaccatgtggccccaccacctacgtt

SEQ ID NO: 473606 - DNA, 1382 bp, Homo sapiens
tcatcagttaaggcaggaacaggccattttcatttcttttgcggtggaatgtcatcagttaaggcaggaaccggccatctggatgtattctaatttatatgtctgtcatttcagccttttcaccctgtttatgaaccattgctggggcactagtgcaattgtttggaggtgttccaaatctgctggctacaacactcttacaggaggtcctggccaaagcactgatgtggtggcagtggggtctgcacttacacaaggtgcaagtagtagcagtggcacagcagagtgcatgtggggcagtgggccagggtgtcagtggaggcagaagggggtgtccatgcatgcatactggcaaaagcagcagcactgtgaggtgtatgcatgtgtcagtgtgggtggggtattggtgttcctgcgggggcaggttgctgatggggttggggggtcagcaggatgcacatgtgctgatacaacagtggagggctgcaggcaagtgcacaccagcaaagcggtggggggaggctgcaattagtggggctgtggatcatttgtttacattaaaatttatgaatttgtcattttctaaacatcctacagtcattttgcattattcttttaccctcactggcatgtgccaacactcagcaatttatttcatttgaaaatctttataaataaaatacaacaccaatccactcaaatataaatgtgcaagagtgtatgctaacctttgtttgtttagtttagtgggtacatgattctgtttcatggagagaacagaacaatcaggatatgattcttaggacacaggacctctggaatatagcagcatgattaagagtgtgccctctggagcctgattacctaggtcttcatcctggctactgcccttaccagcaaacttgtataagttttttttctgtattttaatttcctcatgtgaaataggggcaattcaatattaatactttgatacatataaaatacttcaaatacttactagtatgcagtaaacattcaataaatgttagttcccattattaagtatgggttagaaaaataatctaggaatgaatttaaagcacatgatcagattgctggcaataaacacttcagttttccagtttcctggaacaactcatgaatacaattcacttgtgggagtatttcattcagggaaagaaatgtctttgaaaaaaatcattgaccccttgtttttcaaggccttgagtttagagacagagaaacatttaataggggcctacatcccatggcagtgtctttgttataaaaattatacggaaaaaacacaggtagcaaaaccacatattccttttcttagagacactacaaggcttagagagggatcaataatggtctgt

SEQ ID NO: 473607 - DNA, 751 bp, Homo sapiens
ggctctctgtaaaatggaccaatcagcaggatgtggcaatggggaacgctcacggactgtgcggtaatgagagatccaaacaccaagcgctccaggggctttggttttgtcacacatgccactgcagaagaggtggatgcagtcatgaatacaaggccacacaaggtggatggaagagttgtggaaccaaagagacctgtctcaagagaagattatcaaagatcagataatatttttgaactgtatggaaaaattaaagggattgaaatcattactgaccaagacagtggcaagaaaaggggctttgcgcttgtaaactttgacgaccataccgttactgggaatgaccacaactatgaagttaggaaagccctgtcaaagcaagagatagctagtgcttcatccagccaaagaggtcgaagtagttctggaaactttgatagtggtcttggagttggtttcagtgggaatgacaactttggttatggaggaaacttcagtggtcttggtggctttggtggcagctgtggtggtggtggatatggtggcagtggggttggcgataatggatttggtaatgatggaagcaattttggagatggtagaagctacaatatatttggcagttacaacaataggtcttcaaattttggacctatgaagggaggaaactttggaggcagaagttctggcctctatggtggtggaggccaatcctttgacaaaccatgaaaccaaggttgctatggcg

SEQ ID NO: 473608 - DNA, 1777 bp, Homo sapiens
gaaagcctgcagagaccaatttgaggcacatctgtaaatggataatggacatggaatcagcatggaagatcatctcccgtttcatcttgcatcatgtatgtgaagactttggagtgatagcagcaacctttcatcccaagcccattcctgggacctggaatgatgcaggctgccacactaacttcagcaccaaggccatgtgggaggagaaaggtgtgaagtacattgaggaggccatcgagaaaataagcaagcggcaccaataccacatccgtgcctatgattccaagaggggcctggaaaatgtctggttcctaactgaattccatgaaactgatggcagaagtgacccatctggagcagatgctgccataatgccagctgcagttggggaagcaccacctgggctctgtgctccatggagcaggtgggagccaaaaacaggtgaagctgtagcctcccagccacagctgaggacccaggcatccctgtgctctcgggaacctgggaagcctccccttcccccagactgcttctgctacctggcctctcctggctcctggtgcccactccgattttggagcaaagttgatgctgagcccaggcacagttgcgacctgacgatggaatatgtgcagggccttggattgaatggttctgctaaagttctctatttttggaatccactaaatgacttctatgaattttcctatcactttgcactgggttagatttttttgtatatttagtatattttttaattgatattcaaacatttgtgagtggtaaatttcattctaaattcaaattgttaagtacctaaatgtatcttggtatcgatctatttgcttttaaactttttcatttactttagaacactttaaactgtaggaggaaaaaaaagagtaatttcttctcccatcataaggttcatgactgacattccacaacaaagacagattaacgagagcataaaaatgtatttaatataagttttatgtgatatgcatgggagactccagaaacgaagatccaaagacccaggataaactgtacttttatggacagtcatgcagaaatatgattgaaaaatagatgggtacgatccagtttaggataataaaatggagaaaatgttgtgaaacccattcatttagattcttctgggtgttccctgtgacattctttccattagggtgcagggcaagatacctatcatatgaaggtcttcaggagaaaatggagggggaaattcagacagaggccttcttacattgtgatttctaaacttccttcagcttaaagtactcagtctgccaaggtgtcatattttgttctaaatgccaacaaactcttattacacatttcaggtttgaaaagacctcctgttagacttccattactctagtgtttcattctttttactctatttgcctcttctcaggagaaataacgtaatagtctagtatgtaatatatttacagaggtatctttaaagtttcatgaattaagggttaataaccaataccacagtaatgcatcacttgttatataatatttgcctgatttagtcacttaacatttaatgagtaaccactggatatgtatgctagttatgtatccaagtatatagtatggatttctggagtcacagaacagttttgaaaaataatttgcgggaaatggtgaccttttctgacattactcaaagcctatcaacaaagccatagccaaccactaggactgacagaaaaacactctcattttactgtttacc

SEQ ID NO: 473609 - DNA, 538 bp, Homo sapiens
tcatcatcagccggttttggtgtctgaggttttccagaatgtgtgccttagacataaataccagatgtggggcttgtcacttcagcatccacacccaagaactgatctctagaccacatttagaaagcactttcaaaatgcagtctcattctcttctggcctataaagtttctgctgaaaagtttgttgctggcctctggtcagctggtgtggtgcaggtgatggcagtagcagtagtggagcaacccacggggacccaagcagtacatggtagtgtatgtataggagagcctggttttattgttcttcctcagccaggtggacatgaactcagcctgaggacagggtgcaacccagccctactctctcaaaatggctccttggatcagaaagtggggagagtggaacccctcccagacaagcagtgtggggagaaagctgtggggtgtgtggtcaccccacatctcagtctcacagaagcccattgtagggctgtgagtattgtcctagatgtgtaagagagtctggttatctgttc

SEQ ID NO: 473610 - DNA, 863 bp, Homo sapiens
cccataagcagaatgacacaagcttggaagaagcaggggaccttctacaggaaaacagtgggaaattgtctagaaatagcattgagcagctatcagagaatgtgcaagaatgatctgtctcaagatgtgagggaagcagaggggataccccaggagaaagccacatttgatgtaaggcaagaaggggctaccataatggatgacacagatctaagacttctggacatcttgcagaacatcacatttatccattacatcaatgacatcatgttgaccgggctggaagaagaagaggtaggtggcatactgaaagctatgatggaagtggtgcatcccgggttgggcatgaacaggaccagaggacacaagcaagtacctgagcaggtagcccagatccctgtggcatccactactattgcattagtgattatcccttggctcatgcctaggactgtgtgtgggatctcatgcaagcagttgaggaaagaggaaaaaggctgatcttgctgaccaatgggtcaacctgttacatgggtaaaaaccaaaaatggacagccaccttattacagcctggaggtatccttgaaaaacagcagtgggagaaaattctcttaattgtaagagctttggataatacacttggccatctattttgtatgaaaaaagaaaaggtttaatacatatggcctcacaggcagcagcaaatagaaacagactggaagatcaataacgaagtctgggttgataacatgtgcatggacaaatgcgaattgtcatgaagtgtgaagatttttatagcacatgttgtacccaccagagatcaccaaaagaagaggcactaaaaaaccaaataggcaaaatga

SEQ ID NO: 473611 - DNA, 818 bp, Homo sapiens
gcaccttcttcagtgcctgctatggtggagcctcagcaatggtgggtgcccctcccccagctttgctgccaccttgcagtttgatctcaaactgctgtgctagcagtgagcgaggctccgtgggcgtgggaccctctgaaccatgcacaggatataatctcctggtgtgccatttggtaagaccattggaaaagcacagtatttgggtgggagtgacccgattttccaggtgccttttgtcacagtgttgcttggctaggaaagggaattccctgaccccttgtgcttcctatgtgaggcaatgcctcaccctgcttcggctcatgcttggtgcgctgcacccgctgtccgacaagccccaatcccagaatggtagatctattgacaggttgcattgtacaccaggaaaagccaccggcatccaacgccagcccatgaaagcagctgtgggggctgtgccctgcacaggaacggagctgcccaaggctttgggaccccacctcttgcatcagcatgccctgtatgcaagacatggagacaaaggagattattttggagctttaagatttaatggctgccctgccaaaataatcatctttgacttaatggggcctgtagcaactttgttttggccaatttctcccatttggaataagaatatttacccatacctgtacccccattgcatcttggaagtaactaacttgttttttgattttacaggatcataggtggaagggacttgccttgtctcagatgggactttggactatggacttttgaattaatgctgaaatgagttaagactggggaactgt

SEQ ID NO: 473612 - DNA, 772 bp, Homo sapiens
gttaactttgctgaaattgtttaaaccacggtgacagcagaggagcctcaccccgtagccaccatgaccccagaccacaaagagtactaccagattaccgccatccagaagaaaggggtttcttttggagccttgagctatgcagcctggtttagaggaggggtgatgccagcattcccttggcttccccagctggtgtctcagtatgtcacgtgtcccctcagtccactgtctctggacctagttcagcactgggactcacctaatagttgcagtccttttggcctagactgcctttcaagtttacttggtgatacagcgtgctgtagccctcggtgttcacataaagaaaacaaaggtaaacttaagattctgcttgtaaggtccaaactgtctacttgcgaagacaaaacgtacagagcagagaatgttttacccaaagagagcttctttgtggcaaatttctcacaatcttaaaggtccagggctacagaaattggtattttcttcaagagagagctctagtgaggggcttaggagggcagttgttgtagataggttaacttggttaatattggatcagctgcttgtgagcagtgtgaccatgcatacattcactttctttcctttatctcccatacattcagatctttatgtttagtaagcatggatttacaaacctgagaatcctctgaatctttaaacattcatatataaaatagaacttaattttcaactgctatctccccacaaactatccagaacaggtctt

SEQ ID NO: 473613 - DNA, 1902 bp, Homo sapiens
ctatcaaggctgctgaaagcaggtgagttggcagaatctgctcagtgaatgtcagtctctgagcagatgggaagaactgaggatgaatttgtccacttaaatgggaatggaagcttaagaatcaagatatttgaaggctctgtcaagggtgtggaggagaaaaagaccgagtgtctgtccttaataatcttcctctggctattgctggatgatgatgatgatgatgatgacgatgatggcaacgatgactattacagcagagtctttcatgacaggaagttcgcagcctttaagggggatgctggctctgcccagaactggcgtagctcctgcatgaactttggcttggactgctgtccctggagtcagctgtcggctgtggcgctgctccaaaccttcactctgctgggtatcttcctgatggagctccctggggccagtgcccagagggagtcctggggccactgctgcacagaatgtgagccagagtagtgggcatcactgattttcctgatccaactatggcctggaaaggctgcgggagacagaggctctccatctcagagctttgtccattgaaatgctagtgttctgatgatccagacagcatgggaagagttaggaccaactggagttttactggatgtgtcaatgaaagtaaatgtggcatgtatttagaagaagtgtgcacgcatgtgtgagcgtgtgtgcctgtgtctgtgtgtagatctgtgcaagtatgggtctgtatgaaaacacccccaaagattagtattttaatatgtaaatctggaagaaaacactgagctacagctttagttgaaatattttcttaactactgtactgtaatgaggaaagtacttgacaaaagaataaaacatgaagtccagtttccttttgacaggtccatcgccgcaccccaaagtctgcttcccatcctgtctcactgccctgggcacccacgttcacacgtgctgagccacaggcagatggggcgtggctggctcctcggggcccgcgcaggcccagggggcagcagctgtgcctttgctccgctccacttagctctacaattaggagaactgctctccgtgacttttaaactttgagggtgaagggcatgatgccaattttcggggtgtgggcatttctgtgaatgagcaggagacagttggggagctataaacgtgcatattacgaagcagcatggagcagccgggtctcaaaggctgatgtttttctcatatcccacggttttatggctccatacctttaaatattcatttccattgctctacacgaggacataaagtcagactgtgctctcacaagtcctggtaggtgcccatctctgcagtccttacagtggcttccttaggagagctgggcagagtcttatcatcccccaactctgcagaaagagggacaactccaagccgaaagagctggcctggcagcccctcggagggtgacacaatcgagtcagcctgccagtgtcctctgctaagggtcacctctacatactcttctccttattcttctgctatcagacctggttaatgcattctatgtatacgtctgtgggtaactcataagggaagaattagacacccctctatgtttacaaacccagttcttgccacagcttctgaaatatcctggatgttcaactactatttgttgaactaatgaatgattctcctttttggtgacttatatgttcttcagtgactggagctttcacatatacacaatatcaggttgtgaataaaatatgcaatgggaagacacaggaagctacactgtcaggtgaagttaccaagttatttgttcacttcttcactcacttccagtccccagagcctggctttcttcctcgacatgaggcctgcagcttagag

SEQ ID NO: 473614 - DNA, 802 bp, Homo sapiens
gtctagaagaactgtaacactcactgtgagggtccgtggctttattcttgaagtcacttgccattagagttatgttccatctgaagctctctgagatcatttccggaggaaagaaatgcacaaggggccgccgtgttgaaatctacacagtgagaaggtggttgtctgcaagccagaaaaagcgccctcaccagaacccaaccatgctggcaccctgggctcagtcttcaagcttccagaacagagagactagtcacagctccagggttctgcaggccatagcatcagcactaccccaggccacacagctggctgtgatgattgatgtaggagtcccctgtgagtctagcagtccagagagaaaaccaggcagatgggaagacatcattaatcattgtaacattttctgtactaacaagattttaaactggaagttttcaccacaaacactgaatccaaaggaaggtcatcaaaagacaagggctatagaacacaagaggaaattggcagaggttcaattaaagaggacattgggtcctgtggaaggatgtagggactcacccacaggacttagtgaaaatgacaacagcaacattttaaaacctgcgcagcagcaagcaaataaggaggacaaccacagttgcacatttccaaaagtggcagctaagaagagaaacagaacttgaaaatggtgactaatatctcttaatgaagtaaagcagtctaaggtttacttaaggacctgagagaataccatcttctttttcattttcttaatgtgggatataggaaatgctgccag

SEQ ID NO: 473615 - DNA, 631 bp, Homo sapiens
gagagtgagcgagggctgccagcacactgtcacctctcacttatcatatgtacttaccataaatggagctagcagtactagaagttgctgtggaaaagaaaaaggaacctgaatctctgaatctgaatctgacaaagtttctggaacctaagcagcagtttcaaggaagtgaaaggtttaaagacttatacaatgcagggatgaaatcagaagaatctagttgtgaaaaattctacaaggccaatggcctagtttcttcaacaaataaattaaaggaagtggaatactacaaagggccattaagtcttttgtttcattgttatgagctccccacagtgagtgaccaatccttctgtttgcctaggagagccccagattatctgtttattcggaataattactactgtagcccctgtcactctcaaaagtgtcctgatttgtatgattattgtacacagtcacactacccatcagcctgtatcactgtgcaaacacacagccaaactatcttacatccaactgtgtatattgaatttgtgtaaagattatgagagagtaacaatcctaattagtgtgtcctagtttcccactgtgttagacagtttgggttaccataacaaagtaccacaga

SEQ ID NO: 473616 - DNA, 1344 bp, Homo sapiens
ttttggaagactggatattgttccagtggggtgtgagatcctctggccttaagtcgctcctctttgctcctctttgtctcccaagccaggcttatccgcaggtttcaaagtggggaacctgaacttgtgatgagcgagctcatggcaggcatgcaggcaccctgggctcctttgcacacactccctcgcttgggcctgcggtggctccaggaagcaggtgctcttgtcatccccaatttgtagatgaggaaaccacaggtcagagaggttaaacaattgctcaagtcacacagctgagtcccctgtgaggtgaggggagtgcagaggattcgcgtggcctgggacttgccatggcgtgtgggaataggcagtggtcagctggggacactgaccacactagcagagctgctgccagtggcccccaaggcgggggtgagttccccaagaagaccctgcgattcattcagctgtttttcattgacaccatcatcatcatcgtcatcactgttaatacaaatgctgggagcagcccacatagccgcctgcaagaggcctgtgtacccaccctgggcatacctcctccagagccagaggggtgcctggtgtgggtcagtgctccccaccagaccagtgcctccgacccaagtcagtgcctcccacccaggccagtgccccccacccaagtcaatgcctcccacctaggccagtgtccccaacccagtcagtgcccccaacctgggtcagtaccctctacccaggccagccccatcccaccaggccagtgtcccccaccctggtcagtgccttccactgggccaatgccccccattctgcccatgccccccaactgggtcagtgctcctcaccaggacagtgcccccgacctgggccagttcgccccacccaggccaataccctccacatgggtcagtgcccacaaccatgtcaatgctccccacccagatgtgtgttccccccccaccaccagactagtgcccctcaaccaggccagtgccccaggcagccttgggtttgcgcctcagctggtgacagctgaggctgccctgcaggaggatgagccccggggtcctcagggagtgccagctgaaaggggtgtcagtcaaatgctcctcggagcacacccgttccgtgctccctctggccaggccttccctggctcctgtgggtccagaagagatgcagtctgccagatgcagaccccaggaagtgtcagcagtggggccgggatgaggggtggatagaggggtgccacgtgtgtgtttgcattccaccctgcgatgttgttctgacccctgtgtgtccctgcctccaacccctgcgcat

SEQ ID NO: 473617 - DNA, 4061 bp, Homo sapiens
gctgcgggcgcctcccccatgctgctcggagcgtcctggctgtgcgcatccaaggcggccgccgctgctgcgcagagcgagggcgacgaggacaggccaggcgagcgacggcggcgtcgggcggcggccaccgccgcgggggcgggcgaggacatggacgagtcgtcgctgctggacctgctggagtgctccgtgtgtctggagcgcctggacaccacggccaaggtgctgccatgccaacacactttctgccgccgctgcctggagagcatcgtgtgctcgcgccacgagctgcgctgccccgagtgccgcatcctggtgggctgcggcgtggacgaactgcccgccaacatcttgctggtgcgactgctggacggcatccgtcagcggccccgcgcgggcaccagccccggcggcagcccgcccgcgcgtcccatcccaggccagagtgcggcccccacgctcgcgggcggcgggggcggcgcggcaggcagcaccccgggttccccggttttcctctccgcggccgcgggcagcaccgccggcagtctgcgggagctggcgaccagcaggaccgcgccggcggcaaaggtgagtatctgtctcggcggaagtggccacggcacgtgggagtgtgtgggtgggtgcttgggcgtggggggcagtgatgaggtgcggaggagaccacgggtggtcctgcgttggcccactccgctgttgctcttcctccaacttcgcttgcttggtggcggcatccggcccctgggcagctcgccgcttgttcacgtgtgtcccatcctcctgtggagtgggcacgccttcctgtcccgtcgctcacccccgattccttggccggacttgttaccctgcctcttaaacttagcatcgcccttgcgtctccctagaaacggggaccttcttcctctgggtccccagacactccctctgcacaccctgggcctgcctagagaaaagttagcccttaacgtttctgacagggctctgatggctgctctgggaagcccgcgggcctcctgcctgcggtgtggctaaggaggggagggcagaaggcagagtgggactggggtttggaggaatgcttctagtagtctggaaggagttaatctggaggccccaggagccttttgacccagcccttttggacttggcagtgtctaaccagaagccaaggtcttctcctgggctcccaggcagggttgcattcccacgggggtcatttatatttattattattatttttggtacagccgcattttagggccttcgctgcttctgttttagacgaaagatcttctctggatggcttcaatgatttggttttaaaagcttcttacagcttcttattacacacccttgccaccttgtgaacagttaccaggagagagggcatgggatgctggtttaaatgagaaaagaaaggacccgggttttgttaatttctttaaatggagaaaagcacttaaatgttaaaaaaaatacattatctattggaataatcatttgctttagaaacacaactttattcctctacttttgaccatttaaggagttggtgatgcctagtccttccactatgtgtaatcctgaaatgctgggaacattctagcacctggattaggcagtactgcaaatctctaaggttaaggttaggaacttaaacccttggatgttgagcttgagttaaatgccatactttgctgcaatgggtttttttttctatggatcaggaagaatggggacagtcaaggatagtcactgggggtcacttggggggcactgctgaaggggaatttttttctttggttttaattgtgattaaatccagctaaatgcttgcgttagaaattttcaaacttttccttcctggccttgctgtttttgatgtaaggtatttataattaaatatctttatttgcagaataagtgggttaccttcttctgttctgataaattatgtgatattcggagccccgcttctagtaaaacgctgggacattctgatgaccatctgtttacagatgtcctctcagtttatcttgggggactttgtgtttgaccaggaggttaggaggtaacctctgacatgtgacaggctgaagctttgatgccactccgggaattctgtggcatttgtagtaccttttagaacttgtcaaaggggttgaagcttggaactttttagtagtgacatttagtattagcaggaaattgatgttttactcaccatatgttgagacccttggttgactttctttatgggtgcatagtcatgttcatgactttttgtgtttttgggatgtttctggatgttgtttaatagacgagcacttatttaactaataagcaggagtcccgcatggtgtattcacactacactagcactatactaccatgctgggataatagcattaggtccagcacatgcttcgggagtgggaaggattgtaatagcatatcaggcattgagcaaccctatacagttggttgacaaagatttcggctgaaaattacttttggtactttactgtccattggaattgcttgactcctgccaggaaagttgaatgctggatgttgttgcatgttgtttaatagaggggcacttatttaactaatatgccatgatagcaggtaaccataaatattacagtcccatcattttccaattagaagctccttacatcttcttttgggccaattagggtatgtatactttttaggtatataggtaagtattggcatagcttgtttactttattaattttgttacggttcaatattttgacagctttatttaaaaaaaagttttaatttctgtttggttttactggcaggacacaaaacagtgttttcctgaactctttacctgttgtttttcatcggttttggtgatcaccagagtacttggagtcccctgacgtggttagcagaacctctcagctctgctctcacctgagccatttgagataaagcgcttttgtggagtcagttaacgatgctgcccctggaaataatatacccagtgacgagtacccatagcctaagatcaggagttggtctttttatttgcctgttggcaaatactatatgtgtgttgcttcttaaagtgtgttcatatgtgttacttcttgaagtgacctttaaacagtcctgttttaatggtactgtctaacccttgcagttgctaatgtatgctaaatttctcaggctaacttgtttgtttattgttttgttttcactattttgcaagaaaatccctttaacatcccaagctagcatcaatcaaattgtttcagtgcagtgggagtcttgctaaaagagttttgtggttccacattgagtaattcaaaacatgctttttaatgtaagtgatttaataaggacttgaatatcagacaattccaattttgttttgaaaattttttaaatccttgacttatatttgagcctatacagaacatcttctgcagttcatgtagactcggctaggcactattataggtaaacaagactggcttgggctttctggatggagctgacagtagaggtagtgagtggttgcaagctgtctgcccagctctcagaagaacgagtgatgttaataattaattcagtccacacatatgtactgactgcccaccctgttgcaaatactgtgttaagcactggaatatacattgttcacaaaaccagaagtgatccaggcctttctgcaactgaccattcagaggacactgtaaacaaatagccaataggtatctcttgacatgtggtaataagagacatgaagacaaggggccacagcctgatgatggcaggggacgtggagtcatgggtgatgtctgtggatttaattatgcagcttattttatttatcaaaatgtatccacatctttactcttttatggataagccactggattccttaactctttataatcatatcccaaatctgcgtaacttaaaaattgcatcctattttctcttcccaagcacagccaaaggtaattaaaaccagatgtgtttgcatgagaaaatgc

SEQ ID NO: 473618 - DNA, 555 bp, Homo sapiens
ggtagggatgctctgcctggtgggtgcgggacaccacggctgggagcagccccttggcaaggtcctgtccaactgccccgcacagggtgtcagtgcactgcggagatgcaggtggtggggttcaggacacagtcacgttgaacctgctcagaagttccctgagagcagaatcgcatcggcgtttgtgcaggacatcaggtggtttgacactttgtctcacaacacacaaatgctcagcattgtgttccggttgtctccaggattcagtagtcacgagctgtgcagttcacatctctggggagagacaaggaagctcgtgacactagaacgaggtctggtaggtttgcctctggaattccgagtgacctgggacaagtcattctgtccagtgagaagacaagtatttctacaaggagctcgctgacccccacccccacccctaccaggaagccccacaaggcatcattatgaccccaccttacagctcaggcacagggaaattccaaaccacccagaggcagttaggcttaggtccagtcccagggcccctgttaa

SEQ ID NO: 473619 - DNA, 1838 bp, Homo sapiens
cagcactgctcttacaccagagtcactcagctctggaagcctctttgcatccccatggcagcagctccgcatgtcctgcacagggagtgctccacgcctgcacaggagctgcatcaacaggagggaacgtccctgcacagggagtgctccacacctgcatgggagctgcatcaacaggagggaacgtccctgcacagggagtgctccacgcctgcatgggagctgcatcaacaggagggaacgtccctgcacagggagtgctccacgcctgcatgggagctgcatcaacaggagggaatgtcctcacgcaaggagtgctcgacacctgtgtgggggctgcatcaaaaggaggaaacattccccacatagggagtgctccacgcctgcacaggagctgcatcaacaggagggaacatccctgcacagggagtgctccacacctgcatgggagctgcatcaacaggagggaacgtccctgcacagggagtgctccacacctgcatgggagctgcatcaacaggagggaacgtccctgcacagggagtgctccacacctgcatgggagctgcatcaacaggagggaacgtccctgcacagggagtgctccacgcctgcatgggagctgcatcaacaggagggaacgtccctgcacagggagtgctccacgcctgcatgggagctgcatcaacaggagggaatgtcctcatgcaaggaaaatggaaatctctcagtggttcctttgtgggagagcatgctgaagggacttgagggtggcctggagaaccaggccctgctctttgctgtgttcccaggtctatacatggtgaccatcccgggaaacctcaccatgaccatggtcatcatcctggacacgcacctgcacttcccagtgaacttcttcctcaggagcctcccccttcctggaccttggccatgcctccatcaccccaatgccctggttaacttctcttcctcgtccaaggtcgtcacctttgcaggctgtgctgcccggttctttttctccttgctgtctaccactgagactttcctgctggccgtgatggcctatgactgcttcgtggccatctgtagtctggtgtggtgcccagtgaccacgtgcctctcgatctgcatcatcctgggaccaggcacctactgcagggtctgcctcagctccatcgtgcagaccggcctcatgttccagctcccttctgcagggaccaaccacattgaccactctgtgacatgccccagctgctccggctggcctccagggactatggagtccatggagcagggcaaggtggtgtctgtcttctacagcctggtcatcccgatgcttggccccttcatctacagcctacgaaacaaggacatgaaggaggccctgcggaggctgggccagagacaagcactcatgggaaggatgctcatcttccacagcatcctcaaataggtctgtttaaaatagtaacttacctctcgctttccctccatgctgccccccacccccaaggttctcccaacaagcccccgggtgccatctggaaaccacctggctgaatacacacctccccctcctccccactctccttctccttcccctcctccttctcctctcttcctcctcccatcctcctctcctctcctcctctcctctcctcctcccctcctcctctcttcctcctcccatcctcctctcctctcctcctcccctcctcctctcttctcctcctcaccttcctcaggctccaggccaggctgtggctctgctgcatgccgctgtgccccactgaccacctctagatgtacttcttggctcacctggcaaggaagac

SEQ ID NO: 473620 - DNA, 884 bp, Homo sapiens
ccaggagatgctgtcctggactgtgttgattgcccttcagccatgaggtggtgcttgcaaaagagcagcagtgggatttcagtagcccctgtgcgtttcggggcacgggagcggtcctcaggccacggggttgacattccagggggagcgctgctgtctctgcagcacagaaaagtttgtgcagggcgtggggagtggcaggcggtggctagccccacagttcccacgcacttggagagtcggatccactcccacacaaccgccgccttcaagccacgcccctccctgtctgctgcaaaggtgggcgtccagcccctgcacccgcgggccctgcgcccgaggctcctgcaccggccgtccctgcaccctggcccctgcatccaaggctcccgcacccggggcttttgcacctggggctcctgcatccgcggcacctgcacccaaggctcctgcaccggggttcctgcacccggggcccctgaacccgagactcctgcacccgcagctcctgcaccaggggcccctgcacccgggacgcctgcacccacggcccctgcaccaaaagctcctgcacccgggacccctgcaccaaaggctcccgaaccttgaaacctgctttttactctctcccacctggggttatgtcgtgaaacgcccccattgggagcttctttgaacctgagaccacgcctgaagttcttggctgtccgcagggtcccctgtgaggaacagtagggaacgactgatcttggtctgcctgggctctgggagtgcaggagaggtcttcccaacgcagctcctgcttttatatcccaccaccctccccaagtcagttcctgctccgggtggggttagggccttccttcttgtcctcctggactttc

SEQ ID NO: 473621 - DNA, 2006 bp, Homo sapiens
aggagcctggtgttcaccaaaggggagacttgagacaaaaagaggacagagccccaagagctcacatgtatggtgggtaacatcagagccccgagagctcccaggtgtggcgggcagatcaggacccgagagctcccaggcatggtgggcagatcaggacccccagagctcccaggcgtggcaggcagatcagagccccgagagcttcctgcatggcaggcggatcaggacccccagagctaacaggtgtggcgggcagatcaggacccgagagctcccaggcgtggcgggcaggtcaggacccgagagctcccaggcgtggcaggcagatcaggacccgagggctcacaggtgtggcaggcagcatggactcgtctggcaattaaggtgggggtagagtgggttgagcaggagagggcatcgggcttgggtttggcttgctcccagtgaagcctggtggtgccttggccacatgcatgcctgttcatccacagctcttcatccacggcccttcatccacggcttttcattcacaacttttcttcaacagctcttcccccacggctcatccacggctcttcacccatggcccttcatccacggctcttcacccatggcccttcatccacggctcttcacccacggcccttcatccacggctcttcacccatgtcccttcacccacggctcttcacccatgtcccttcatccacggctcttcacccacagtccttcatccatgcctcttcacccacggcccttcgtccatgcctcttcacccacggcccttcgtccatgcctcttcacccacggcccttcgtccatgcctcttcacccacggcccttcgtccatgcctcttcacccacggcccttcctccatgcctcttcacccacggcccttcctccatgcctcttcacccacggcccttcctccatgcctcttcacccacggcccttcctccatgcctcttcacccacggcccttcctccatgcctcttcacccacggcccttcgtccatgcctcttcacccacggcccttcgtccatgcctcttcacccacggcccttcgtccatgcctcttcacccacggcccttcgtccatgcctcttcacccacggcccttcctccatgcctcttcacccacggcccttcctccatgcctcttcacccacggcccttcgtccatgcctcttcacccacggcccttcgtccatgcctcttcacccacggcccttcgtccatgcctcttcacccacggcccttcctccatgcctcttcacccacggcccttcgtccatgcctcttcacccacggcccttcctccatgcctcttcacccacggcccttcgtccatgcctcttcacccacggcccttcgtccatgcctcttcacccacggcccttcgtccatgcctcttcacccacggcccttcgtccatgcctcttcatccacgtctcttcacccacggcccttcatccatgcctcttcatccaagtctcttcatctacgcctcttcagccacagctcttgcctggctgctgctggacacccacgttgttgcacagaagcaccactgtccactgactgtccacctccagctcatgtcctttccagaaatgaacaacaaatacatagcaccaagagtatcaccggcaatacccaagaactcaaatatgaggaggaaaaagatcgtgcaaccacagaaaagtgaaaaaaactccaagccgacagtaagagaattggacttccatattcacgacatccctctccccaaaactgcccagcacaaaggacacggaaaatgtccccctgactcacagtttctacgctggaaaaaccaaagaagatgtcaaatcagtgtggcagttcagcagcaccatgctgtaggaggtttgttccacaccttccctgggcacaaactgtgagccagccttcccacactaccaggatattccctctggggcctccctcatttgggatggttggcactctgactgtttact

SEQ ID NO: 473622 - DNA, 1496 bp, Homo sapiens
cctgtccctgggcaattcccttctagaagtttgtttttcagcctgcaactcttccatgaactcgacttgtctagccaaccccctacacgtcaccatgaggctctccactcccaagcacagaggcatgagtggggagaatgtcaccaaggtcagcaccttcatcctggtgggcctccccacggccccagggctgcagtacctgctcttcctcctcttcctgctcacctacctctttgtcctggtggagaacctggccatcatcctcatcgtctggagcagcacctccctccacaggcccatgtactactttctgagctccatgtctttcctggagatctggtacgtgtctgacatcacccccaagatgctggagggcttcctcctccagcagaaacgcatctctttcgtcgggtgcatgacgcagctctacttcttcagctccctggtgtgcaccgagtgtgtgcttctggcctccatggcctacgaccgctacgtggccatctgccacccgctgcgctaccacgtccttgtgaccccggggctgtgcctccagctggtgggcttctcctttgtgagtggcttcaccatctccatgatcaaggtctgttttatctccagcgtcacgttctgtggctccaacgtcttgaaccacttcttctgtgacatttcccccatcctcaagctggcctgcacggacttctccactgcagagctggtggatttcatcctggccttcatcatcctggtgtttccgctcctggccaccatactgtcatattggcacatcaccctggctgtcctgcgcatcccctcggccaccggctgctggagagccttctctacctgcgcctctcacctcaccgtggtcaccgtcttctatacagccttgcttttcatgtatgtccggccccaagccattgattcccagagctccaacaagctcatctctgccgtgtacactgttgtcacgccaataattaaccctttgatttactgcctgaggaacaaggaatttaaggacgccttgaaaaaggccttgggcttgggtcaaacttcacactaagacaactaaatgtcctagagtaaaatctgtagtgatgaaacaacattgtatgtggcactttgtgctctttaaattaatttttaagttaaatttaacaaacctacagaactaagtgaaatttaacaaacctacacaactgtgcacaagtaacaagccttcgtctgcatatgttttcacaaaaggactgtgctcatggaaccagctcccagatcaagaactagaagctgccttcacgccctctcccagtcattaacccttctccacaaaaagcactgtcctgacttccaaaaccagatgctagcattggtgtttctgaggggcttacacataaagtatgtgccctgttatgttcagcttctttcattcaccgtgttgcttgagtgaatccttgatgtttttgcatgtaacaataattcatgcattctcattgcta

SEQ ID NO: 473623 - DNA, 1518 bp, Homo sapiens
acaggtggtgaatcctagaacagacaggagaacccggctgcacagcaggaggtgagcggcgggcaggcgagcatgaccgtccgagctccgcctcctgtcagagcagcagcggcattagattctcagaggagcgcgaaccctgttgagaactgcgcagcctcggaccctgggcaaggtcgtgccggccgccccgtgcaggccccttccttgccggtcatggccgggccttgccctatttgccacccctgtgcaatgggtcagcagggactgaccctgtgggaacagcctccgtcccaggaggtcactgagcagggggccctgctgaccacggtggccccgagtgcctcagtgcactgtggcctctgcttgcgtccttcttcggagacgtacaccctcagccccagtgtgttcctcagctgctgcagaggccgccccaggggctctagaattgtgggggaaggggtcagcccaggggcaactgaggcccatggggactgggcctgcctctggccacacagctggggcaccctcatcggcttcctgcagcctgtagccaccaggcaaggcatggaggccgccactgcccaggagctgagtgagccgccctgctttgtgccctgtgcccagccctgtgctggggaggccctgcaggcccgagtgggctgtgctcacactgggggctgtagctgagaccatgcctggctcccgctgcatggaaaagcagagcatttgttttgctctttgcttaaaaagagggccaggcacgttgtgggtgatggatgaacctttcagagtcacccaataaatgaatcaacagatgcaggaaaatggtcagctcaccttgagggacatgtgggatgagggcatgtgtgtgtatgtgcatgtgtgtgtgcatgcatatgcatgtatgtgtgtgtgcatatgtgtgcctgtatatatgtgtatatgtgtgtatgtgtatgcatgtatatgtgtgcatgtgtatgcatgcatgtgtgtgcatgtgtatgtaagtatatgtgtgtgcatgtgtatgtgtgtatgtgtgtgtgcatgtgtatgtgtgtgcatgtgtgtgcatgtgtatgtgtgtgcatctgtatgcatgcatgtgtgtgcatgtgtgtgtatgtgtatgtgtgtgcatctgtatgcatgcatgtgtatgcatgtatgtgtgtgcatgtgtgtagatgtgtgtgcctgtgtgtgttcatgtgcatgtgtgtatatgtgtgcttgtgtatgcatgaacgtgtgtttatgtgtgcatatatatgcatgtgcatgtgtgtgtgcatatgtgtgtatatgtgtgtgcatttgtatgcatgtatatatgcatgtgtgtgtttgcatgtgtatatgttttatgtgcatgtatgcatgcatatgtgcacgtgtgtgctaatgtgcacacacgtgcacaaatgtgtaggtgtgcacatgtgtatgtgtgtgtggttgtgtatgtgtgtatgcatgtgtgtgtgcgcatgcaggcacatcaatgtgtag

SEQ ID NO: 473624 - DNA, 567 bp, Homo sapiens
tgcaacagaggcatttttttctcataatgtggaaaagtcacccaaaaaggagctctttggaatacctatgcaagatggaagaattcttcaatcccaggctcttccaagccacaggaaacaaagactggctcctgttacctgaggctgcagagcttgggaagccatccattcagatgtcccactacccaccggtgcacaggaacaaaattcttgtccttcaggattctggcttcccttatgtctgcataaatgtggctgcctttgatgacatagtaaggtcccaaggcacggagcacggcacatcacagggaggagccaccggagcccatattaatccaggaggaatgtggtcatctctcagcttctctcctttccagcaagcagtcctttctgaacatctgcaaggaggcaacatcaaaccacaagcacttccaggaagacacagtccatggcagggtacaggaaggctctggggatgatgataatcagagcagcatacaagaacattgtagttactctttcattagtggacattttagaggcttgcccttcactgtccttggttgg

SEQ ID NO: 473625 - DNA, 895 bp, Homo sapiens
ctcacattctgttctccaggaaccgcttttgcaattcagttttcctatctgcaaaatgataggaataaagccattagaaatcaggtcctggccaagcagccctgcccactgtcggcttccctggggttcctgcatgttcttgcagatcaggcccatcatttatctcccgtgctcgtgtgattatcgggtggtgggcatccctacatcaggtggtgggcatccctacagcaggtggtgggcatccctacagcaggtggtgggcatccctacagcaggtggtgggcatccctataccaggtggtgggcatccctacagcaggtgttgggcatcaccccattcccaagtcacaatggtcgaattaggcattacaggaacaattccttttgcttcttctccacttccataattcatagcgatggcctaatttcagtttcaacacacaagccacacttcatatctcacgttaaactcttgtatgaatgttgcagaatatttgcagtaacgctaatgtcctccccacagtgaaagctgttacaagatctctcgctcgagctgctaccgcctgcacctctcaggttggtctgatgtcagcacagggcttggctgaaaccaccccagagccagcagcaggaatccagcagtatcaccgcccctaggcctccccctcactcatggccagattcaaagcccattaccaactagtaatatacctagagccaattcctaacccgtgaatcctcaccttcaccttcccattccccatactcacctcagtcttgcccttctgtgaactacagttttccaagcttgcctccacctgaactccaaacccaattaatttccagccctatcttccatggctttctgaccccacaaatccaaatgagtccacct

SEQ ID NO: 473626 - DNA, 655 bp, Homo sapiens
tggatttgggtatatggtttcaagccaatggtctttggaagcttgtaacgtctatgcttgatttctcaggaaaaatgatttcagaccattcaagtcattgccccttcctcaactatccggatagccaaagctgcagctgcagtcagctgagtggggttacttcccatgagagcctgcattgccaggggaacagctgcttctccatgtgcctggtgtccctggggctgctccagccccctggccagggcctctcctggaatgtcttgccctgtgtgtcaggtgccctgctccctatgatgagagccctacccctgataccactgacctgtgaaaggcaggaacctgctgagctttttctactcccttccctgctgctcaagggtcgagccccaccctttgtcctctctctagcagtggttgggttcaggcccacctgttgcgaatttcttgattctgatttgtatcggagctctcaccggatcttcaaaggatgggtgatatggtttggctgtgtccgcatccaaacctcatcttgaattgtagttcccataatcctcacatgttgtgggaggaaccaggtggagataattgaatcatgggggcagtttcccctatcctgttctcgtgatagtaagttagttctcacgagagctga

SEQ ID NO: 473627 - DNA, 1108 bp, Homo sapiens
gcctaaaatctatagagagttaaagcataaaccatctacagctcccagggtgagtgacgcagaagatgggtgatttctgcattttcaactgaggtaccgggttgatctcactggggatcatcggacagtgggggcaggacagtgggtgcagcccaccgagtgtgagccgaagcagggcaggcatcgcctcacccaggaagtgcaagggcacagcagtctgagatcagactgcaaggcagcagtgagaatgggggaggggcgcctgccattgccgaggcttgagtgggtaaacaaagtggccaggaagctcgaactgggtggaacccaccacagctcaaggaggcctgcctgcctctgtaggctccacctctgggggcagggcacagataaacaaaaggcagcagtaacctctgcagacttaaatgtccctgtctgacagctttgaagagagtagtgtttctcccagcacacagcttgagatctgagaatgggcagactgcctcctcaagtgggtccctgatccccaagtagcctaactgggaagcaccccccaggtaggggcagactgacacttcacatggccgggtactcctctgagacaaaacttccagaggaacaatcaggcagcagcatttgcagttcaccaatatccgctgttctggagccactgctgctgatacccaggaaaacagggtctggagtggacctccagcaaactccaacagacctgcagctgagggtcctgactgttagaaggaaaactaacaaagaaaaaggacatccataccaaaaacccatctgtacatcaccatcatcaaagaccaaagacgaatggctaactagaataaccagtgtagagaagtctttaaaggacctgatggagctgaaaaccatggcacgagaactacgtgacgaatgcacaagcctcagtagccgattcgatcaaccggaagaaagggtatcagtgattgaagatcaaatgaatgaaacgaagcgagaagagaagtttagagaaaaaagagtaaaaagaaatgaacaaagcctccaagaaatatgggactatgtgaaaagaccaaatctacatctgattgatgtaccttaaagtgac

SEQ ID NO: 473628 - DNA, 766 bp, Homo sapiens
gccattcatggccacagtaaaatctatgacagtcagagttgagcaaaatccaaaaatatgtgcaagaccttcctggagagaactacaaacatgttattgaaaggcccgaaggaagaatttgaggaggagaagcaccagtgtttcggacaggagtatttggataacagtaaattctccaacatcttagcattcaatggattttgggttaaccggcactgtgagaagaggaaggagcagagtcgtcaatgcaggtcagtgcccgtcacgtcagtaacatgctcaaaagacagatttatgtcacggataaatgcaaatatacgggatgacacgaaaaatggcaatgcgactgcagtgacctcagagaagatggtagctgtggagacgacgggaaatagcatgggtgcagttggtgctcttaaagaagactgaagaaataaagaaaatcaaagagctgagaacacaaagcgtctttaaaaaaatgaaacatttgtacctgtttatcttctgttccaagaaaaaaagtgataaagatcgatatcgtaaaataccttgacttgtaaccagacctcaaggacaaaggcatcttttggtagctcgaggaaaagaaaatctataaaggcaggagagtgacttcaagtctttaaaaaatgtttagctctttcacccaattgtcaatcagaaaatctttgaatccacctgtgacctgtaagcaccccaagttggagatgtcccacctctttaggcagaagcaatttacaccttccac

SEQ ID NO: 473629 - DNA, 545 bp, Homo sapiens
acagcagacatgggaccatcatctggattcctagacgtgcaactgcaagctgtgcacccaggctcacctgcagagcttgctaaagctctggaatgtacctccaccaggggacgtaacagagggtctgggtgtggtcaatatgccataaacatttgtggaatgaatacagcacaggaggaggaaagcgtaacatactcggatgtctgccaacctccaggcgtggcccagctggatgccaatattcaattcaccctttgctcctcctgtgctgaatggccagacgcttgggtcctcattgtggtttgctgtggcctcaacattcctctggccttctcccaggaggaggtggcatctccagaaattcatgaggggcagctcaagtccctggcactggccccgcagaggttctgctcctgtcagctgaggttctcagaacccacttgtctgtgtctccagatttgggggccgtgctttgcctggtgactcagttctccgacgggtgaagaagagttgttgattttcagtttgttcatccttttccttcc

SEQ ID NO: 473630 - DNA, 571 bp, Homo sapiens
ttaagtttaatttgtcaatcttttatgaatcatgcttttggtgtcatgtctaagaacttttcgcctaaccccaggccgtacgaattttcccctgtgtttttgtctaaggtatcatgggcgtttgcagctcccagtgccccgtgctgctcctgtcttcttggtctgctcctcctgtcatacctttctccgtctctcacggtatcgtgggcatttgcagctcccagtgccccgtgctgctcccgtcttcttggtctgctcctcctgtcatacctttctccgtctctcacagtatcgtgggcatttgcagctcccagtgccccgtgctgttcccgtcttcttggtctgctcctcctgtcatacctttctccatctctcacggtatcgtgggcatttgcagctcccagggccccgtgctgttcccgtcttcttggtccgctcttcctgtgagtctcagggcatgtcttagtgctcacgctgtcctggtccatcggggggtcccgtgagcttgtccgtgtgggaaggtcgggactgtgatgttgacgggatgccttgtgagttgggggaggtgctg

SEQ ID NO: 473631 - DNA, 542 bp, Homo sapiens
acaaccacgacctaggaaggcaagatgccagagacgcctggaccctacgctaggctcagaaatgttccaacacaccatccaagcatgaagcagaagacacccataattgagtttgctgccaccaaccccaacagcaagaattccagtcctgctgctgcaaaaataatgtctcaggcaaaaacggcctttaaacttgatggaaaaataagaactttttccgacaaacaaaaactgagggatttcattaacaccagacctgtcctacaagaaatgctaaagggatatcttaacctaaaagaaaaaaagttagcgagcaagaagaaatcatctgaaggtacagaactcactagcaatagcacatggaaaaacattgaatatcataatatgctttgttccgttgctggtgaggagctgcgttcctttggaggaggagaggagctctgatttttagagtttccagtttttctgctctgttttttccccatatttgtggttttatctacctttggtctttgatgatggtgacgtacagatgggttttt

SEQ ID NO: 473632 - DNA, 937 bp, Homo sapiens
tgcttcaaagtgttctcttgtcaaaatggctttgtcaaaataccatttacctatcagtcctgtcctcttgctctcttcctgggacggcatgagcttcaccactcgctccaccttcaccaactactggtctctgggctctgtccaggtgcccagctacggcgcccggccggtcagcagtgcagccagtgtctgtgcaggcactgggggctctggttcctggatctccatgtcccgctccaccagcttctggggcggcgtgggatccgggggcctggccatgggaatggccaggggtctggcaggaatgggagacatccagaacgagaaggataccatgcaaagcctgaacgaccacctggcctcctacctggacagagtgaggagcctggagaccgagaacaggaagctggagagcaaaatccgggagcacctggagaagaagggaccccaggtcagagactggagtcattacttcaagaccatcgaggacctgaggtctcagatcttcgcaaatgctgtggacaatgccagcatcattctgcagatcgacaatgcccatcttgctgctgatgacttcagagtcaagtatgagacagagctggccatgtgccagtctgtggagagtgacatccatgggctccacaaggtcactgatgaccaatgtcactcggctgcagctggagacagagatcgaggctctcaaggcagagctgctctttataaagaagaaccacaaagaggaagtaaaaggcctacaagcccagattgccagctctggcttgaccgtggaggtagatgcccccaaatctcaggatcatttcagacatccaggtccaatgtgatgagctggcttggaagaaccgagaggagcttgacaagtactggtctcagcagattgaggagagaccacagtggtcaccatgcagtccactgaggt

SEQ ID NO: 473633 - DNA, 2007 bp, Homo sapiens
cgatggtcaagacaagaaccgtggagtcagaatgcctgcatgcagatctcatcaccatggatccaggaaagacctagaaagagaaggcctggctacatcactggagattctctacagatgcaagtttcccccacctcagtctgcctgccctgcagcagccatttcaaagtatgggataaaatggtttgatttccttcaaggaaaactcaaatggaaagatggacagcctgcttatggagcagttctacctatgagtgagactttctctgcactgtactggctgtgtcagagaagcacgacgtatgtgcctgcattgtcttcactgggcaagtcatttcagttgcaggaagccatgcacctgcacttctttgccttgaaaataactaatctgcggagagtgatcagtcagccttgtcagagctcagtcgtttggctttatgctcatggccgcacctgacccttgggcactgtgggtgtataaatagcctcagaaatggtgctgctctcaagccctgtcttgcaggactttacctgtaaaggaaagctttaccttttcatgacaggacttgagagcttatttcaataaaagaagagggagagaaaaccatcctacatcccctgaacatggaaacatttcaaccctgatgaccactggttcccacagtgggataccatgtgtaaaatgatttaaagaatgcatgttagtttagaatctaaatttcaaaggatttaagtttctacttcagtaataattattactatttatagggattaactcttccacacatttctaagtgaaataaaagttagctctaaagaagtactacaagttggaagagacattttacctttacgttatcacatcatcaaagcaatgtggctttcattttataaatcttattaagtttgcttgccttttcatattagcatttattacgatgctggataatgttacttggcgaaacttgtactttctgtctgccaaaatctacattacaagatctacataagcaccattgtacgtagtgttttcacactcccaagaaatattaatgtttgggacttgagaataagaagctggaattcctgagaattctagggaatccctgaaattgtaagttagtctttattttttagtaatattttatataaatattttaaattaattataagtgatcatactaataaatagtaaatcatttttaatagtgctatgataaaactttcagaaactttctgcaaacaaaatatatgatagcaaatgcatggtttattatgattatgaagtgatgtattgctgacaagatgaaatattttcataactgcaagagtgatctctttttgatagaaccattccataatagaaaacattaagagaactttaacacaaaatatacgccaaataaaaattatttaaaagtggaaagatattatcaaaatattaaatatctaaaagttgccattcttaaaaataacattttaaaacactcaaaacatcagttgccatgtgcaatagttttgatccatgttttgtaacaaatacctaagatgcacacagtttttttctatttcatgtcgagttggtcgaattataaatgtgcctccaaaagcaccctcaatttgattattagggggcatgttgcttgtctcctattttaacagtgaaaatagtttgtctactggtcctcattttggttttgccttcgaaagccatcttacttttgctaatctgaatttcatatcaatttctgatttcatgtagaagtattccacattgatgtcttatctttgcatttctcctattaaagtattcacaaagaactgtagcctctagtaaatattcaaacattggaaaatgctaaggaatatcttggggtattattccaataatgtaacacttggatctcccagcatttttaacagaactacacagaatcatgtcagtgttgccaagttaaggatttattttgcttccaaaatttgttatttcttagaacaccagtcatc

SEQ ID NO: 473634 - DNA, 518 bp, Homo sapiens
tcgggaaagggagtcgaggaaagttgtgagaaagctcgataaccatgggcagagaagagagcattcttcccaaacatgctgttcaggcagagtcccatggaactcatgctaagtctgtcacaaaaacaggagcagtgttaacacagggggatattgaccagaaatggctgcttcttgtaatcagcttggtcactgccgtcatctttcactgccatgagcctgctctgaggtgttttgtcctaaggagaccaactaccttctgtcctgttcttgccaacccatcccactttccagctgccaatggagaagaagcatggctgatcctcctctcttcccatgtggaaggtgctgctgagggcagacctcccttgggaaaaggcaggcttttatctgctgagctcaaggttaagcctgctacgaaatctcaagggcaaataatcacttggggattatagaactcagtaacaggaaatctgagtgtcggctttcagggattcgtgtttctttaggggagaagg

SEQ ID NO: 473635 - DNA, 587 bp, Homo sapiens
ctacaagtgacatgtgcagagtgacagcgagagccctgatcacagttcctgtttctgtccagggctgcttgtaccacaacaggccatcagatggacgctgtccacagtctattacggcaagggggcaggaggcctggtgggagccggtaaatgactctgccctctgggagggataccggggtggttggggaacgcatctgctgtgcgccacaccctcgtctccaggccctgcgtgctcagtgggctctcagttgccagtcctgagtcaaccttcaggcttggtcctgtggcggcattgcttgtggactactgagctgccgcacgtgtcacagccagacacgcacggggtcattccaccacccagggctggcccccaccctccatgctctgctccattgtctgggcaatggaaggcgatgatgctgatggaaagctaggtaatggtgtgaacatcactttcacaatgatcaaaaaaaatgacctatattcagcatggaggaaatgtctttcaattcctaatgatcacctttttatttacacgtgctcatttataagccgtcagccaacatagatcactttatgcttcc

SEQ ID NO: 473636 - DNA, 801 bp, Homo sapiens
aggccagaggtaaatctatgcccctgtgagtgcacatagaggaaaactggaaccaaccagaggaggaatgccaaagaggctgaatcccaacactgatccttgcatgccagagagaagggcaagacactgggtttgcgaaaaaatacgtgctgaaaatgcatacttggaattctatgaggatatctgtgaatcacaagtttcactaaaacacttagtcctacaaatcatgtcttcagggcattcattccccctgccctggtcgtggatggaagggtctacccaggcattgagcaatgggatgcttctggctgacactgctcagggggaccttcagctgcctgaagggagcctcctcacctcagagcccacccaggtctatccaagaccaacatcatttgtccaagcttccataccaagcaggcagaacccggattcgaactctgacccatctgactccaaaccagtgacccagttgcttattgtgggacctagtttacactgttatctaaacagtgaaagtgctgaggaagacacagagaagggaaaaccctactgttcatagctttttctggtgacatttacttgttttaccttttgataaaatcatttgtcttttttctggatcgtgtttgcaaataaatccttcaatgaaaaaatcctttcatcatttcacattcccagatcctgaaggcacctgcattccagctcttcagggaggcaggggaggaccctggggaggaccctggggaggaccctgcacattcctgccagctgtatgggcccctccccaaatgttcagcc

SEQ ID NO: 473637 - DNA, 787 bp, Homo sapiens
gataaaacaactctctctctctctctgtttggatggttttaatagcctacaaatatcttctgcttttggcacatcattgcccctttgtcttcagctctctggtggccttccagaatatagggcaattgccaaataatctgaaatctgcagattttgggaactacaaaacaggatggtactgtttggtgctgggtataagaaaatcaataaggcctaaacatagctcagcaaatgaagcagaagtttgcatgattgttcatccaccaggggaggcggctgtgatgaagtctgtggggcctggggaggaggagagaatcaagccctcaatagtgagtaggtgtcagccaggtagacagataagagagcccattccagtaggagggccagaatggcgagtgcctagaggagggccagatgactcatctgtgagacgggaacaggtcgtgtgcagggagcaccatcacaaatgtgaggtgaggtgccagcatcttcccggcattattgctgcgttagtcagtccctgctatattgggagagtgactgtttcgcattggctgcatgaagtggctgatctcatccgtgagtggcaccacctacagccgcgtcagactctggggcctcgacacttagggagactgactcgcagttccgtccgcacacgctgcggctctgaattcacaccagggtagacagtgtgggcttggcgatgtgctgtgctagggaagaggctcctgaaacacatactgactcaatcacaactctttagactctccctctatattctctc

SEQ ID NO: 473638 - DNA, 565 bp, Homo sapiens
ggcctgtctggcattggtctccaggaagcaaattcctgtgtcttgtggagtgcctggcacacaatagatgctcaatatgggtttgtgggatagaatcgtgtttcaaaaacagcaccgaagcactctgcactgtgaagaggtaatgcagaaaccaacaagtatcctgaaggggatgcatgaggagccaaatggggaagcggtaattcgggtcaagaaagtcttcatagtgattttactccaaagccaaatcttgaaagatgaagttgggctcaccagaggatccaaagaagaagagaatgagaggcaagaaggaaaggtatttgcagcagaagaattagaaagcaagtgctcaccaacatctgtgcgccctctcttcctgggtccacagctagaaaacattcctagtactcttgcagcaaatgactgggttttggccagtgcagttgtaggcagaagtgatgaatgccattttcaagtgttacttgaactggatttagcagatccaaggaagagttctgggggccccagaggcttgtggagctccagctctagataaaagggtccc

SEQ ID NO: 473639 - DNA, 610 bp, Homo sapiens
aacattctgctctcccacagcttctgatcgaattctaggctcccaacagaagaggagagctaactggaatttgtgtaaggactgagaaagcaatggtggtcaaggctcggagggcccctgcactgtggaaacgagcagaagctggtggggagaaggcatacgtctgggggctgagagcctccagttctcctctggtcccacagtgtcagagccgggcctgggctggaggactctcctggaggcctcagcatcctcacaggtcaaatcttcagcccccggtgcttccctcctggcagatgagaagcacccgggcctctggtctttgtgccagtgacacccgaggagtccccccatggcctggcccctccctacaagggcaccaggaaagtggagcctctgggcagggtcttccctctggggtcaatgccaggctaactcaggactgtcccatagtctcagactatgctggagtggggagtgtgataggccattcttattccatacgtgacttatcactgaggaacatctgccgagggctggcaataaggtcactcccagcatctcccggctccttaactacgtctcccttcattccacactcccattgatt

SEQ ID NO: 473640 - DNA, 539 bp, Homo sapiens
tttctctaaaggaacagaaagcatgttgagtatggaaaggcccacatggatcccacagaattccagaatcctcagccctcatttcctggattccaaagacccaccaacccaatcacccaaatttttctccgcagctttgcacgtgcagctcagatcatcaaaattcttgagttagacctagaaatctgttgcgttatgcgccttgatctaaatgtgactgggacttggaaaccttgttatactgaaaagtctggctatacagatatttggctgatgtattcagtgattctcattcctagagcaggaaagggaatgaagtataaaagtttcagattgtttggtgagccggatcagatcacaaagttggtcatgagtccaggatgggggcactggcagctcctaggaagctgctgtaacacctgtttactgctcatccagcaagcaaacaagcttcgagaactcttagagctccctgggtggatttggtccctgaggctgactgtgtttctcatggacgtgggactcaggactggatgatc

SEQ ID NO: 473641 - DNA, 511 bp, Homo sapiens
gtgccaattctgcctctggatatgttaaagcagtcaattaatgaattcactcaagctcaagctaagattggcaaagtgggagctattctgatctgtgaacgtgctcttgactgtctgctgctccggacctgtgttgatttcatgagacagccacagaactggtctgctgaagacagccctgtggcccagcagcaggctgcatcttgcacctcaatgccacttacctggtccctgtatgctggcaccagcaccacttcccaagtaagcaactacaaccaccacagccacaccatggccacgccacggaatctctgtggtctctgccccactgaggacttacagcccatggcatatttgtctggtggtgagttccaagtctgtacccaaggtgcatgggaggtcgtcaaagccaagtacctgacatctgaaatttcggtgatgggaggaaatttctaagatcctccaggacatcatttttataagacaaaaggaccctgagcatcaaaaggag

SEQ ID NO: 473642 - DNA, 839 bp, Homo sapiens
tccgttcatcatccagcccaaagtcctgtccctgagaaatacaggattggggatggcccctggtgaggaccaagctctgtccttctggattccttctggcctggttgcctccatagttgatatagttatgtgtctccacccaaatctcatcttgaattataatccccgtaatctctatgtatcaaaggagagaccaggtggaggggcactttccccttctctcagcacttctccttcctgccaccttgtgaagaaggtgtcttgctccccctttgcattctgccatgattgtaagtttcctgaggtctccccccgacgtgaagaactggacctttctctcaaccagcaggcatacaagcccacccgtcccttgggacaggggtccccaacccctgggccatggattggtagtggtggattggtagcagtacatggcctgctagcaactgggcctcacggcaggagatgcaatgtctattgaaaatttgatgtctgtctctccagttcatgttttcacacttcgccacatccttttggttgtcataaataagatgaattctttgcttagttttagattttgcatacatggaatcgtactctatgaacatctctcttgctcctaatttaaatacaaatgcttctaaaattttgccattacatataacattttctttgtattttgagtagttacattttatcacacttgtattcctagattgctatcaatggttctttaaacaagaacattttttcaaatgttttttcttctaccaagatagtcatattgcttttatcacttcatctataatatgattataatatgccctggaagttattct

SEQ ID NO: 473643 - DNA, 619 bp, Homo sapiens
cacaccagggagatgggaaaacttgatcctcatctcagaattctgccaactatagttgatgttttcttcatgctacttcctagctttgtgaacttggccaaaaggacccttctcaatatccctgccttctgccacatattcataaacataaagcagggtcttgcagacatcgatagtagcatctgctccagtgaaggcaacagaggagtgaaatggactctgttctatggactcagagtgacacttccatctctcattgatgactgttctgtgtttcaggcagaagggcagtttccagggggaatcgtggggcgacaagtagccagtggagaagctgccaagagggtcatcggaaccttctgccagcagctgaagcacaggcagcatggcagctaacgttgaatgagaagcaagtaggctttaagaaatcaagttctccatgtaggtggggaattttgttatttcactgaaccatcttaacttttccatataaataagaaatttaaaagttaatgaaaatgactgtcgggcaggagtgtgtgatgtattcttggactgcctttgtggtttttgtgtggacaagatgttttcaagccgattttgaatataaaaagggggt

SEQ ID NO: 473644 - DNA, 658 bp, Homo sapiens
ctctctctctctttctcatttctgaaggggggatgagggaagtaggcctgcatgactccagaggcagggcacagtgtctgtttcaatgctggctagcttttggctccttcattctgggctctgaggggcaaaatcccttaagatgccccttgctgtaaacctctcaaaaagaaaatctcatcaccagtcaaaagtaatgggtccaaggggtgttgtgattcccctaaattctcaggtcagcagcattctcatttctgactttttcacttcggtcagctggaatcacactctacggcctcctattgacacaagagacatggagatggaaattatgacttttatcctggtggttaacatgaaaaggcaatgcagacgtcaggatgatgaccaagaacaagcggaagtcaacaagaaccaagggccctgtcagaaggaggcatgcagaacagaagccctcatgggccctgggcttgggccacacaatggccgaggagatgcaaatgtaagtcagctgggaatttctgggaaagtttgcttttctgcaaaagacggctacctcttttttgggtaacttttatattctttcttcctggaatgagggctgaggttggagacagagcatggcttttctgatcaagaagcaatcagacaggcaaaa

SEQ ID NO: 473645 - DNA, 577 bp, Homo sapiens
tggctcattaaggatgcccaagtggggtgaagagtgtctgcaagtttctgtatgggggcatctgcgtgtgggcatctgcgagtgtgtatctgcatgtgggtatctgcatgtgtgtatctgcatgtgggtatctgcacgtgggtatccgtgtgtgggcatctgcatgtgggcatctgtattctgcatgtgggtatctgcatctggagagtctttgagtgaaataaaaagtagaggacgcatggagtgtggacagctccaagcacgtccctgttgtgacatgacatgcatgctaggcacaggcaggagcaagaaatgtgtcagggacgcgggagacgcagattctgaaggatctcagggccctggaaaagagcatgtcgtttcagcaagtctcgacgcaccactgctgcgattgagcagtgatcagaattgcattttagatcagccactgaggtgaagttgacactcaatgttgctgttgggtgaggatggaggcttattctctccacttggcctctgctgataccaccctggctggaaggatgagaggcacattattgctcctccttatgcagcctct

SEQ ID NO: 473646 - DNA, 582 bp, Homo sapiens
cgctgtccctggctgacatggctttaaaagagtttcagaagttgaaattcagtgagatcgtaaatacaccaggtagacagttgaatctgaagataaaaatcaagttctggtgtgatcccgatgaagacagccagcagagaagagcagggcctggaagaacgacagaggtattgaacaggagcatgctgggctgcagctcagaatggggaccatccttgctgcttcttagtcatctgctgcagggatacacaggggtcttactcttcagccggtgttgggccattacttttcatcatgatttttggcagaaccaaattgggttgacaatactgctggccttccctctaaggccccaagagggagctcctgaatcgtatttgcatatgggaaagctgaagtggctggcattgtgcaactggactgagggactcggttgtagtaagtaaaagcagattgtaatacacagcgtcggctcatcactattgtgctacttgaaatgtacttacaagtagccctttaaagagattatgaagaaataactgtgctactcaccttttctttcaagagaagccaaagggaatg

SEQ ID NO: 473647 - DNA, 484 bp, Homo sapiens
cccacacagaacaaacgtttgaagcagaagtttgcttggtaaacatggaatcggaacatgggaattgggccactgggatattcaattgcgtgggccacggaggagaaagtactgggctctcgggacttctctcccagggccctagaggatgtggctggcattccccctagggacagcaccctgcgctgcccagatgcctgtcccctccttgatggggaacacggagctttcctgggctgctggcctaccaatgccaagaggctggcccacagcccctccagacacagccaagagccttgcctggagcccagtgtcagctgcagggcctgggacatttccgaggaatcagaggcaaggatgccagagctacgaggagccttagattcagaaacaaggctcagagaaggcagcacctcagataactggctcagagaaggtggcccctcaaacgctgcacagccagccccaggctgatcccatgcca

SEQ ID NO: 473648 - DNA, 689 bp, Homo sapiens
tggatggatggatgaatgggtggatggatgggtgggtgggtggatggatggatgggtggatggatgggtgggtgggtggatggatggatggatggatggatggatggatggatagacagatggatggatgctgcatcatacccccacctctcataaccaacaacggccatggttgtcacccacagtatctccttctcagaagagctcgccaaccccccaaggcctggaaagagccccagcagctggcagcaagtatcccaggcacagggcgaaggctctgcctgtttcctgtctggacctcacaatgccctggcatggcagggcgtccccccgggagctggtgctgagagggtggcggaggaggagaccccacctcgggggaccagggatcaggagagtcagcagggccttcagaagtcccctgattcaggcttctcacttctaagtggggacatggagccctacagaggggcaaattttctgtgggttataaataagcagttcttagcggaaggtcccccacactggacctgggaggcccacaccactttacccttgacccaggcacactgatgtcggcaataaaggatgtgacatgccagaaggagctgaggttcctggtgacagctgttgccaagacacaacaaatattgaaattaggcaaattaacaaccttacaatggcctctg

SEQ ID NO: 473649 - DNA, 632 bp, Homo sapiens
ttatttttaagcaagggctctgccttcccagcgtgtcttaaatttctccaggggttgtatgctccctgcccctactaatttagtaaatggctttgtcacgggtgtgttattgtttgcttttctttatggcatccctcatgtctgggctaagcagtcatttgttgagcatttacatgcattgcccccatttaattctcgtagagcgtgggaagtagttttctattcctacttaacagaagaggaaatgttacaggaggtatttcaagacttactccaggtgcattttcttcctcctttgcaaatggccaatcgccctgagttttccatgaaagaaagggccacggacagtaatggtgcagctctcagactctggaccccaactattagagttgggcccaaatcccagctctgcagctcactgtccgcatgctactcagacatccccgcatctgacccagcagaccgctcctgctcctgctcctgcaagtgtctcccctggctcctgtgaggcccactggcctggtgtccgctctttctgaggctgtgacattggagctgtctctttggctcttctccgtccacactctgtccctggagagctgcaccccagcaacattcccgtctctcccttc

SEQ ID NO: 473650 - DNA, 982 bp, Homo sapiens
tgcctgtaatcccagcactttgcgggggtgagaagcaacgtgtcaggagtatcagagagtggccctgtacctacctgtatcaagagtgcgcactgctggccgtgagtgattccgtggcacgcagtgcatgggaggtccagccttgtttaaacggccgtggtcagaccagaaccgagattgtcatgcaagctggttccattagcagatccaaggtgccacagaactggaatggcggtaggattagccaatcctcagctggaaccaaaataggggacggagcccaaataaaaaaggcttggtttcctgagggcccggagccccccgagagaaccactctaacattgaagtgcgagagtggatacaccgggagctgtaaggggagctgggagcagggcccacccctgtcctcctgtgagctgcagctgatgaagccatgtagcgtgaaggggccactgcaagggtccccagcagccatagagctcacagaagacaatgtacggagaggtcccacagcagcacccctggccagtccccagccctggactcaagactcgcaagcatcaaagttgcagacaggaagcttctggcagactgtccaccctgcagggagcctcagaggttcatttctttgcaaggcaaagaaggaagaacgtggctctaagcctgctctgcacctttcattctcccccatcatccaccgatacatttataagggataaaaaaggctaaactgctacatcgccgctctgagcctcaatgttctcatctgaagaatgggaattattctaccacattcaaaggttgccataagtatgaaataggagagtagatggcagatagtcagtattcagtggatgcagctattattgcctggctccatgccagacacaagttaggtcaactggggtgggtgactaggggaaggcagacatggaaatgtattagatgcactcctgcccttgggaagctctcctagcctatc

SEQ ID NO: 473651 - DNA, 615 bp, Homo sapiens
ttggaggtgggaccatgagcctcttgaggccacactccctgatcctggttctgaaactcagagatgcagctgaccagactgatgtggccagcctcactctgaaggatcctgcagcagacaaattgctggaatgtgttcagacggaatccagctgctacaacccagacatcagaccatgctgcactgactccgtggcaccaggtcctggaacctggacgccgacacggtccaggaccctctactctcatttgaaatccatgacactaagccttgctgctgccccacaaaggaattctccacagtccctgctgctttgggtcattcactccagattcaaaatcctggctgtggtgtctggccaggtccgagtcacgtgccacgccaaggttcaagataagctagggggacacagcggttgctgtgaggattaaatgagatgctttgtgtaaagccctgtgcagcgtgtgacccacagtgcaacagtgacccgtgacgcagtagggagggctgttttccatgcccagtgaggcctgctcagctcccattaggcctttatggatggcctgcctcccagctggtacctggtcccgtcacagtcccaggactctagacctc

SEQ ID NO: 473652 - DNA, 3445 bp, Homo sapiens
cacctgaagctcctctaagcctctatgtcctgccgtggagctccttgcccccattctaccttgggggtgtgtggggtggagagaagatgctgaagctggatgctaacttcccatgcgactgggatgggggcatctgatcagggctggagactccctgcctggactctaaaccaaacccaggacagggaagaatgattctggtggtcacttcagcatcagcagccttcagtttcgagggagagcagcagcagcagtgccagctgttgtgcccagtgttcagagctggtgcatctcagagccccttcttcagcagcattctggctgctgcctacagcatgtgctgttcagatatcagggaggacctccaagggggcccactcaagtggagatcagggagtttggagttacacctgtgggttcccacgggcttcctggtgttggagtcccagccagactccctggatctgtccgtggaggctgggagtcacttggatgtgtttcagtttgtaggtttaggaggtaagaaatatgggggaggaaaaattgtgcagaccagtgagaatgtgccctggccctatgccttcctgtggactggcggctgggaaatgctgggctagaggatccctaacattccatgaagctaatgttccagccttcctgttttgccttttccagaatgttatatagttgcagtcatatagcatgtagccttttcagactggcttctttcacttaataatatgcatttaagttttcctcacatcttttcatggcttgatagctcatttctttttagcagtgaaaaaatattccattgtctggatgtaccacggtcgtttatacattcacctgctgaaggacatcctgttgcttccaggtttgggctattattaataaatctgctataaacttctgtgtgcaggttttggtatgaccatgatttcaattattttgggtagataccaaggattgcaactgctggatcatctggtacatggagtgtgcttagttttctaagaaactgccaaactgtcttccaaagtggctatcctattttgcatacccatgagcaatgaatgagagggttcctactgctccacatcctcaccagctttcggtattatcagtgttctggattttggccattaaataagtgtgtagtggtgtttcattttaatttgcttttctctaatgacatatgtagtggagcatcctttcatatgtttatttgccatctgtatatcttctttgatgagatgtctgttgaggtcttttgaccgttttaaaattaggttgtttgttttcttattgttgaattttaaggcttctttgtatattttgtacaaaacagtcctcttgcaaatattctatcccaggctgaggcttatcttctcattttattgacagtgtctttcatagagcaaaggtttgaattttaatgaaatccaccttatcaattatttctctcatgacttgtgcctttggtgttgtatccaaaaagtcattaccatactcaaggttatttagattttctcctatgttattttctaggagtttatagtttgcattttacatttaggtctgggatccattttgagttcgtttgtgaagggtgtaaggtccgtgtccagattcacttttttctgcatgtggatgtccagttgttccagcacccttcattgaaaagactgcctttgttccattgtattgactttgctcctttgtcagagatgttgacgatgtttatgagggtctatttctgggccctctattctgttccatagatctgtttgtttattctttcaccaataacacgctattttgattatttcagctttatagtaagcctggaagccaagtagtgttagtcctatgactttgttcttctctttaaatactgtgttaactattctgggtttttttttttttcctctccacataacttcagaatcagtttgctgatactcagaaaataactgtcttggattttgattgggattgtattaaacccataataaggctgggaagaagtgacatcttgacaatattgagtcttcccatccatgaactcttttaataatgatgtctcctcattatcttccttggcattctgggaaaacttctcaagcatccttcacatccttgatcctctgcaatgtcaaattcccctttccatttctaatgaagattaaattctgtgatggcatttctaatttccttactctctttatccatcaccaaactcctcttttctcttaaattcttagtcttctcctttttcatttcagtctgatatttcatcatgtcctcttttatctcctttttcatatagttcacattttttgaattatttgagaatataaaacatttacttcccaatatttcttctgtttcctgttcttaatatttgacaaaagtgtaattgtcatatgcatcttaattgtggtgctttattttgcagaatctctttgatccatgctagattcttaggcttcctcctgaggacaaatcaataagacctggtgtctacccaaccagggcaaccagtgagtggattgtctttaattcccaccacatcttgattgctctacacattctgctgcaagatcttcagaggtgactggtgataatttacgcaatcagttcaaagtgggaagggaggcagagcgatgagcatgctagcagggaagtcgtgtgtctgggatactggcttggtgtttggggaagctattttctacttccattttcccatttgatctggccttcatactaggtataaaccatagcctgctaagcctccttccatggatcagatccttgccctctgctatggtttgaatgtgtcctccacaaaattcacggtgaaatttaatctccctggtggtattctttttggaaagtgatgaagtcacaatggcttcaccctcatgaatggaccagagggaactaacttaacaccttttgcctttctgccatcccaccatgtgagaacacagcctttgtcccctctggaggacatagcaaaaaggcagcatcttagaagcagaaagactggggcctcatcagacactgaacctgccagtgttctgatcatggactgctcagcctccagaactgtgaggaaataaatttctgtccttaataaattactcagtctcaggcattttgttatagcaccccaaaccaactaagttatccactctaccaggagcaaactctacttccctggaggctttctgtgcactatcgctgccactcaaaacctggagcctcacagagcctcttacacatgctgctgctctgtgacagggaaggagttcatgtggtttgttcctcatttgctccagctcaccctcctctctcaccctcatccctcgagttagggcacggtggtagggtctgcaggctctcctcaactcacttctcttgaagggtgctgctcctc

SEQ ID NO: 473653 - DNA, 1033 bp, Homo sapiens
ctgtactaaaagatggggttggtgaccgtcatgatgatggtgataaagctgaaggaaaagttgctggcagcttcttcccttctgccttctggagaggtcagggatgcctggcggacggccgtggctgccccttcaaaggtgcttccaggatgcagacctggaaaggagcttaggaatatgatgactgtctatctgaatatggataaaatgagagaaggttttgggaacatcagagtggccccaaagaagggaatccctgaacccaaaccagctgcccagctactgctggtagcccaggttctgaggctgaggaatggggaagccccatccccactcttcagcacccagttgattggaagagggaggaagctggcagctggggaaaggtcttgggccaaacatttttccactggtgaatcagaggacagcagtaacaggagccaggctggcctgaccccagccacctctgtgagtcatagctgaggtccctgtgctaatcttaacccctcagagaggacttgttgggacttgccaccaaatcttgaccaccaaaatagtcttggagctgacgtggccctggaaagccctggcccatcacagaaggggtcagagaatggagccagggtagagagggctggtctgggagttaggctgtgccccagctctcccgtgaccttgagcaactcacagtgaagtgttagcaagatgggctcccaggtcccttccagacattctcccagaccagagccaaactgggtctgagaaggaaggaaccaggacctgaggcagcagaaggttttcaggccaggtctggccctgccctcatcacagttgctcaccaaggtcctcgccttttacagtgcacagctagtgacagcaaccttggttctggggccagctgcatccaaaatttgttctgggatttttgacaagttgcttcacaaatctcctttctacagggaaggcagtacagctagtggtttaaggcactggactttgaagtcagactaacccaggtgagaatcacttagtc

SEQ ID NO: 473654 - DNA, 4901 bp, Homo sapiens
tggtggtaataatggtgatagtactggtggctgatgataatggtagtggtcatgatggtgatggtggtggtgatgatgatgatgatgatggaaatagtgatgataatattggtggtgatggtggtggaaatggcaatggtaatggcgatgatggtggtaatggtggtggtgatgatggtgatgatcctgctggtggtggtagtgttgatggcaataatagtggtcatggtagtggtgatgatgtggttagagaagtcctgcttcagggagatactgggcactcatcagagattgagctactactgtgtttcccttttggattttatccttatgctgtgattcccttggcaggaaacctggaaggaagggagatgacaccaaggagtcaacttgagaccaagaccatcagctatcaaaagacatcttttggggcctccacccatcccatgaccaatcacactgtgaggttgtccatatgtcctgccagctgccgccaggaccagtgccttagcaacaggagcttttgcacgctgggagagggaactctggcaccttcccaagggtttgccggaagggagctggaggggcagcaggatggagaggaagagggcgcattacaggcaaactggagacaatccgggaaactcccagaaaccccagcaaagactgcagagagagcctggggatccacagaggcctacatgacctcaaggcccagagtcactggcttccagaaggcagggaagttgatgacatgcatctctgtacctctgtgtccttaccggtaactaaagcagaggcctgggggcctggtggggaaagtggcccagatcagacctctaggggatccagagaaggcagaagaccttagaggattcagagcctaggctgggaaagtagtctcttgctgggaagacctgcaaagggatggccatttgcaaccctcttgagcaagatggtggaaggtggacttgtaaactgctagcatggggcttccctgagttctcttcactcattgctacctagaagaccttgacttcacctagggtgcagagtcttgaggttttaagactgaatgcgaccttacccaaccttgctctgccctttgccagaacactacatgtggtacttgactctggaaagacaacaaacgtgagattcccttcccagtcctgcatccctaactcctttcgcctggcttatctcctcctaggaggcctgggcggcagccttccccaggaatgtaagagcttcctctttgctcttccagccaagtccctttcccccttcacttagctaaaataagattggactttctcaaaatgtttactaggaaactaagaaataaacaaaacaaaaccaaaggcaagtgatggaggttgatgaactattacaggattgtagaatctaacagcaatcttcggtcaaagaacccaactcaaatctctcgggattttttttagaagtgcttcttatttcttctttcttattttattatactagtcctcattctcattatgttttgctaatccttttgagcacatgctatgtgccaagcattttgcaacatgatcatttatcgttttatcaggcaaggcattgtgtacatatatcattgtatcatgctcagacgggttaaataattcatccacagctgttcccctggaaagtggcagggctagatgttgaaaccaggctctctgaccttaaaacttatgtattgatcaccctccaccctgcctctctttgactgtgtgtccacacccctccttgtaactcaaggcatctaatgtgaagtgccctgccagggacacatgtgaacctttggacccattcctgctccaggtgaaattcatgcagaagctcctgacactggttatgaatagtttgcaacttcaagaaaacaaataaatgcgattgtcttacatttcctttaccttttcttcttatggacttcaggtgcagagttacagtgtctgctccatgattcatcatcattagttcacatgtggatttcctttatttcttatatatgtatttgtttatttttaagaaaataaacacccacagaccaccacccatctcaagaaacagaacattacagacaatttacaactacctattttcctccccaatcctgttgcctggccccatctccttatcattctcttgcttttttaaaaaaaaactcatttaaacttatatatgtatatatgtattttaaaacataattctttagttttatttgttttcaaacttgtgggattagagctgagggccagaaccttctgaagtttctttttttcattctaaataatgtttcatccaaaatgtatggattcatccatgtaagtagtacatggatgtatactttttttcttttccttgttcttataactacaaatagacatataagtttaacaagatttttcaccacctttgaatctaaaatatcttgcagtagctctagaatttagctcttttcttaaaagatacttcaaaaagtatcttcagtgtgcgtcttttgcagctggtcatctgagcccatgtataactgggaatatttttattatgtcattcaaatgacaatttgggtatatacaaaagtcttaattcaaaggttttccttcaatatttaaaaaatattaatccattgtcttttttactctgctgctgctattcagaagtctgatgtcaatacagctcttgcacctttgtagttgttcagtcctttctctaaagaagcttttaaaatgttctcttctttcatattcttatattttactgtagtgtattcaggagtgagattttccttctttctcctgtttgcactttattgcactttattgatccatttaatctcatattatttattttttaattctggcaaacatttctctattattttatcaaatactttctatatatttttatcttcttaattcttatgcttttatcttcttctgggactcttattatctggatgttaacacttgcatactctatcttctttaactttttttgtgtatgttctattcctttatcctttcctatcaccttctggaaagcttcctcaatctgatcttccaattcattaatttgttctccggctgtattcatactattatttatttgtgtatcatgttctttatttcaactattatatttctcttatgtaataattctaccgggtacttttaaaatttttaaaattgtcatttcatagtattacatatatggtgctccatttctgtaaatgtgtttagcttattttaaattttcaatccagttttctaatattcctacttcagaagtaatgcggttttactcttgaggtggtggcattccctcagggttatttgggcacgtattctccaagggtctcagttactgtcttaaaatacatagtagagaagggaaggccacactgtagtcatggggccaagacattgagacacttgtttaccatcatacttcaaagcaactcctcaggccaaaggttggtggaaagaacaatctctctggatagaaaccactagcctagggtgagagaggaagaagatagaatatgcagctgagcttgtcccaacctgtcttccccaactacctcctccagaggagtaggtgcattgcccagacaatacccctacagatacctgctcaaactgcacggccactgtctccaaaatctgccgtaagaggtacacaatgcttgccctaatgtaatgtagggaaaaggcaagatcagatcttaaaccacttttctctcatttaacctctcattgtcactatcaatcacctttcattcaggtttttaccaaaataccagttcaaagtacctttcagtttccctggatatttctatttttttttctttgctggcgtgtgtgtgtttgtgtgtgtgtgtgtgtgtgtgtgcacgcgtgtgtgtggtgctggtgatggttgtggttttgtttcctggattctgcattctcctttataggttcccctttatagaggctgattcttggagagggagccattgtgctgtgactatttgcacctaggtgggaaccagataccctcatcttaaccatttctatgtctatgttcctacaatcctttcatctggacattcccaggaaacagattatctccggttcctttttgatttttaaatgacattctacaacccatctaaaaaactgaaacatacttaatacagaatgctctaaaagtacacaaacacacaaagcaaaagccatctacaattttactactgtgagatttctcctatgaattcaatgtgaatagatcctgtcagaaccttcaagagggttgtaattgtgtacatgccagccaggtgtctcagattcctatttcctcacacccactactaatactgtatgtattattgatttattaaaagtttgccaagctggtggtggaaaaatgtgtaatttcttattgctataacttgtagtcccaggtctaaagaatagttgggcactgttccatatgtgtactggatgtttgcccttctgtgaaatgctcattcttaccctttgcccagtttgctttgagttgtttgattttttttcttattgatttgtagggcttctttatatattacaaatattgactcttgctatatgtgtttcatatattttcttctctatggaaaaatgatttttatttaattgtgttaatgttgtctttgaaaataaagatgtttacacttttcatgtggttgaatctttcaatatttttcctttaagacatctgagtttcatgtgttgcctagcaaggtctttcccaccccataattagaaaaaaaatgtcaaaggataaaataaatatttctccagagcaaatatgcaaatggccaatacttatatgaaaagatgctcaacatcatt

SEQ ID NO: 473655 - DNA, 1495 bp, Homo sapiens
gtatatatacgcgtatccacctacatatatgcgtatgtatacgcgtatccacctacatatatgcgtatgtatacgcgtatccacctacatatatgcgtatgtatacgcgtatccacctacatatatgcgtatgtatacgcgtatccacctacatatatgcgtatgtatacgcgtatccacctacatatatgcgtatgtatacgcgtatccacctacatatatgcgtatgtatacgcgtatccacctacatatatgcgtatgtatacgcgtatccacctacatatatgcgtatgtatacgcgtatccacctacatatatgcgtatgtatacgcgtatccacctacatatatgcgtatgtatacgcgtatccacctacatatatgcgtatgtatacgcgtatccacctacatatatgcgtatgtatacgcatatccacattcatacatgcacacacatatgtatacatatatacacatatacatacacacatgtgtatatatgcatatatacacacatatgtatacgtatatatgcagtgtatgtgtttaagggaagaagtagtatatgtgtatatatatgaacttttgtttctgtggttaaagatattgtccatctctcatgtttcccccttgatccatctgctcctctttctccttctggaatggcaatgaagttgtttttaaatacgggctttattattattcaggtgtggcgaggccaacagatcaggacacaaccaccattgaaaagatggtttattactcacagtcccaagaggagaaggcataatatgccatgggtggtcagcaaggccccagattttgaagccccagaaatacagaaaataaaaaggcatgatgaatacagaagtagaggtattccagaaggaggcattgttatcataggagatgacagctgcatgcatgttactgcccctgtagaccttccagtgggacaaggtgtggaggtggaagacagtgatattgatgatcctgaccctgtggaggcctaggctaatgtgtgtgtttatgtcttagtttttagcaaaaaggtttaaaaagtaaagaaaaaattttaaaataggaaaaagcttatagaataaggaaataaataattttcgtaaagctgtacaatgtgtttgtgttttaagctgaatgtgtaaagtcaaaaagttaaaaaattaaaaagcttataaagtaaaaacaattacagtaatttaaagtaatttaagatacaaatctttagacatcttatttcacttctcttggttatgtatgtaggagtgggatggctgagtcatgcagtaggtatatgtttaacttttgaacaaactcacaaatagttttccaaagtagctgtcccattttacatcccttccagcaatctatgagagtactagttgttccacctatttgcaatacttggtattgtaaatctttttagatgagggctgaggtcatgtgggttataacagcaacattaaagggacagagtt

SEQ ID NO: 473656 - DNA, 754 bp, Homo sapiens
ccaccgctgtctctgctcacccaccctctgtcccgcttctccctgacctgacccaggggcagccttgctgtgggagctatttccaaggacaaccctggcagccccaggccctgtcctggacccgggatgcctgtgcacctccaccccagactgagacagaggaaccctctacacctgcaggagacagaagcttctagaatccacgtgggaggaaactgaaggactggaccacataggtcagtggctgatggtcttgaccatgcagagaagccaagatcgtatccatccacatcggaagaaaagcattcataatttgccctgggcacccagtaatgattctggacacacctcacctctctctggggatcggccttctgcccgaggagttttcgcacacaatggttggcaggctttggcatttattttcatcactgttttgaaggtgaatggcatttgtcacattctttcctggctgactttgatgtggggtgaattcccactccctaatgacaggaagtcctggaatcctagaataaacattaagccagagtctgatcagcttcttgaggtcaagccctttgtgggaaaggctgagaacaggctcttaaattgtaaagaaaaggttccaggccaccccaagggtcagctgccaaactaggcccggaaggaggagctactgcccaccagataactgcatttcacattagtcagactcccataagcctggctaagaaatgtaagaaacaaagttcat

SEQ ID NO: 473657 - DNA, 627 bp, Homo sapiens
ccctgtccatgaaggcagctgtgcagatgctggctcccactgaggaccaaactcgaggccacagcatggttctgcagtgggaggcctgtggagatgctcaagggtttcagggaaaccaggacttgaagtggctgtgtcaccctgtgcttcaaaccttggatggctcctcttggacctggataaagctgagaatctgcgcagaggtgagagctgcctgtttggcaaattcctggatttcaggggaagaaataggaactcctgcccagggagaaggaggaggcatggacactgaagaacagtctcgaggacaactgcacagccaggtctggagagcggccgtgggagaagccttgagtgggttgagtgcccagcagctccgtggaggctatcacaagaatatcagagaagcgaggtgggtaggaggcgttctggacagggaagcagccagcagaatgggatgaacttacattcaggggccaggaacataaggtttcactgtgaccacgtcgctataactgacaaaatgcaaataagctccactcccactgatgtagacaacgccctggagtagaattaaaaaaagaaaacgttgtgccaacctattttgattgtgtacttctgcaataa

SEQ ID NO: 473658 - DNA, 4955 bp, Homo sapiens
cccaagttctgattcctaggccaaccagctgtggccagagggacagggtcccagaccacaactcccagcacttgcttgcaaggctgctttcctgagaagcggtggtgggaatggcaggcgtgtggagtcccacagaccagcacttctggcacccagcccatgagaacagaattcctgcccctgataatggcacagctggctgttatcaggggcaagaagtgcagttgggccagtggaaaaagagcaaattggcagctgatactgcccagtggactggaagacaagagacaggcccaacacttggatggactggagtttctgaaagggccaaaggcagaatccagacctggaagcacgatggggcctcatatgagactggttcaaaggcaagccctagtctctggatctggagcatttccacactgacttgccagtgtacaattgcacagttctctccagacctgctgggtatgactcgaggcttaccaataggattttcagaatatcgattgattaccctggggcaatggctggtggaagtcttttaatttgtcttgcccactgtctgctgactcttctgatcctttggtttttaaattttataggagtagcttgcagcgttcctgcctctctggcctatccagtcccattctcctgtcaccatctctgtgggctcccttccccagcaagcttctccttagaggagtccagacctactacctcatctcctctcctcccatcctcaccgcagcattttgcaatccaccctctgcctctgttgctccaagggtaagagatacaagtttcctgcaactttctttcaaatgttacaggaaattttatatatatatatatatatatgtatgtatatgtgtatatatatgtatatgtgtgtatatatgtatatgtatatatatgtataggtatatatatgtgtatatatgtatatatgtgtatatatgtatatatgtgtatatattatatatgtgtatgtgtgtatatatgtgtgtatatatatgtgtgtgtatatatgtgtgtatatatatgtgtgtgtgtatatatatatgtatatgcatctgtgggtatataataaaacaattgtcaaatgtccacaattagtgggtctttgttaaggctatgatggaattgattatactattcttatacttttttggtaaatttaaaatcttttcaaaaaaggaaagagttaaaaatgaaaatgcatatatgtaatcaaaagctaagatttctgtttacatatgtttcgaggaaggaatccaacttagccattatttagtgaacacttattttccaattctatgaaatatctccataatcaataataaaatctcgcacatatttggatctgctcctgccttcctagtctgtctcatgaatccatctgtctgtttttcttcaccagtaaatacactgtaattgttgtagcctttagttatgtttaatatctagtagggcaagcccatccaccttgctcttcaacattttcctccccatgcttctattcttccagagaaacttacaataattttgtcagatttccttaagagaaaaaaactcactgaaattttgattgatatttagtcacttattgattaactgggaaaattaaaatcttataatttttgttgattcttcctagaaaaaaaatgcttgtttctccttttgttcaagtctcattttgggttcttctgtaaagtcttttcattttctttacataaatcttgcgcattccttgctaagttaattcccatgaattttgttgctgtagtaaatgcaatatatttccgtgatatgttctaatggcttgttcattatcataggaaggatattggtttttataactatatttctgtattttgtgactgctaccccactaaactcatttgttagctatacgacattttcagttgattttttgagatgttcaaattacaaaaccatatcccctgaaaatgatggtgataatatttccttcttgggaatatttatgacccttattttatcttcttgtttatttccattgctagaactttcagaacattaataagtaatagtgaagatagaggcatccttgtcttgttcctgaacttaatttggatgccaatgatttttcacagttaatgataatgttgctttagtttgagagagatttcctttatcatgttaaaagagcgttctttaattcttttattcacaaaaacatcaccaggaatgaattgcaatgtcttgaaatttttctaaaactctgatttactaagctctgattctgtgcccagctctgtgccaagaattttaaatttaccatttaatgtaacctgcacatgaccctgactattaaaaattacgtttcaaattatacagtagaagaactgaccaaggacccagagttgggaagtgaaaaagacaggatttgaactcaggctttcgaaattcaagctcttgacactctatggcaatgataatgtggtttttttttttgccttaatctattaaaaaaattgatcacattaagaaatttcctagtattgaacaacatttgcattgctagaatcagctctgcttatacatagtgtattattagtgtattattattttaaacacatggcttcattcacttttataatatttcgagtctgtatttgcgaaattagcctgcagtttctcttttgcccatctggctggctggctttagtgtccaggcaatgccagcttagctaaatgacttgggaagctgcctgtctttttccatgcactaatcctatttaaacagcccaaagatgatctgttccttgaagttttgaaagaacttgcccctccaacagtctgggtttaaaactttttttttttttttttttttttacaactttttcagcttcatcttgaatgacccaagagctacttagaaggatagtttttaattccccaagtggcctgatgtttctgttctttgcttaccctttgcttcttaatgtctagttttcttgaattctgtccccaggcaaccacttaaaacttagattgtttacatcttattacctatttagaatgtttaaaaatcctaagaaggtctacgtgatttgatttttctagttcttcttttaagacaccttgacctgtcaaatacagagatccataagtttaaaatccccactatggattcatggatttttttttatataatagcttttgctttctattttttaacgagatgttacttggttcataaaagtttatgatgtatctttattgtggattgtcattttgatcaatataaaatagcactctcttatttgcatttctcatgcactactaatatgtatttctgctctctttttgtttgcattttgagtataatattttcccacttctctgttttgcatgtttccactgtatgtttctgaaagagtatatactttgatttttttacataatctaaaaattttcatctattcacagtagaatctcatatgttgatatttgtggtgaaacttgtatgtttagcattgtttctgtaatattattttgtactttgtttttatatttccttcctgtttctttttctgaatttacttaattgcttaaatattttggtgtatttttctatagtaatttgaaagttatgtatacctgtagaataaaacaaaatatttaaagcaaaaaaaattctaccaattttaataattaaataatatctataactgtactgaagtaagatgagaaatttaggacatttttctttctttctttctttctttgcctatcttttcctcaccttaaagttttgtcagaataattatttattttggatttatgttcttttccttcaagaattattttgaatgtttgcatttggctttgtatccatattccaaatgatgatttagacattaactattccttcctggctgagttactcatggctgtttcttttgtatcacttctttcattctctggttcttgattttgactcatttctcggttgattggtggatcttttggggtaatgtttttaaagcagaattacatgagttcctacatgtctgaaaatgcctctttcttgacctatatatgagcgacatcatagctatgtatagaattttttcacaattgttgtcactcgaaattcagcagacattgcttcattgttttctgaaatttaaagttgcacaagtgaagtctgggatgacctgatttttctctctctctgtttctttcctacctagatactgaaaattgttttcctttatccttaagccttgatgagtccttttatattaatgttgccccttacatctgatggctgacatcttccttcacatcagagaaattttcttctattatttatttgagtatgggtatagtaaattataattaaatgaaaatttaaaatagagactttaatgagtctataaaagctccattgactcaaaataagctccctaaataaatgttgaatgaatgaataagcaaagaatggatgagtgaatcttttttctccattttctttgttctcttcttcttcctaacatggcttttatgtcttcccccatctccattagaattttcttctgatatctcttagaaattttcaagctactttccttatttcatttgattttatgttattcatggcttacactttttaaattttacagtagtgatttttcatattttaaccttttcctttacaaaaaaattttgcagttgagatttgtttcttctcatgggtgcaatgaatcttgtaaaaactctaacaagaggtatcacattgtatttccttttgttctgttttctctggtttcttgcagtaactcttttccaaagggaacgcatctgtttagtttccctggatttgtccttgcaaagccagcctctaagatgtccctgcaaattcccacctcctgccattcctgcccttctgtgttgccctctct

SEQ ID NO: 473659 - DNA, 622 bp, Homo sapiens
caccctccactcctctctctcctcctcctggcacaccccctctgtctgagagcctgagcctgccacacatgctcatttctccagtttgagcccgcacttgccctgactcttctctatgttctctccctcctcccagcctcccaggcactgtccccagcctgccaggcactgtccccagcctgccactgccaaggagcccccaggagcaccctcagccccagggccacctgcaggccagaacaggggctgcaggaagctgcacttcttccggctttctcagggcccaaggaggggcctgctctgtccccttgttcagctccttctctgccagccctacaggaaggaaaggaggccacgcctcacagcttgtgccccaatctggagcttctgcacccgtgccccaggtccatggggccccacccttacttgtcttcactctgagcctggagaggcccaggacttccagaaagctgcaggccaggaccctcagcagctcctccccattctgggagaaagccccaagacagcctctgagacgactctgactttctagctgtggaacgttgggcaagtcacttagcactcagagcctcagtttcctcacatgcaaaaagggataatc

SEQ ID NO: 473660 - DNA, 1012 bp, Homo sapiens
actgctcagaaaacaaaagattctcttcaaaatattactgctcattgacaatacatctagtcactcaagagctctgatggggatatacaaggagatgaatattgctttcattactgctaacacaacatccattctactgcccatggatcaaggagtatttttgactttcaagtcttatttaagaaatatatttcataaggcattagttgccacagatactgattcctctgatggatctgggcaaagtcaattgaaaaccttctggaaaaaatgtatcattttagatggcattaagaacatttgtgattcatggaaggaaggagacattgccacagccaccccatccttcagcaaccaccaccctgatccatcagcagtcataagcattgaggcaaaaccctccaccagcaaaaagatgatgacttgttgaaggctcagatgattgttagtatttttttagcaatgacatattttctacttaagtacattttttagacataatgctattacacacttaatagacttcaatgtattgtaaacataacttttatatgcactgggaaatcaaaatttttgtgactcacttcatgttgatattcgggattgactgaacctgcaatgcctctgaggtctgcctgtaccggcattcacgtgcacttgggcttgctgttgggctgccagccaatatcaaccaagctcttctccacttccagttggttctctctgtccttatcatgtagaacagtgctaaacacagaagatgctagtccttaattaaatgagtaaggaaatgaattaaatctggagcttttcatctcactgctttctgtagcagtgccaccatgtgttgtagagctcccacaattatttattgaaagtctccattttaccactggcaaaatactagtatcaatttacctgtctcataaggctgtttgaatgttcatcaattttttctccacatcatgaaaatgtttcatttgccactcgtattaatctgttctcacactgc

SEQ ID NO: 473661 - DNA, 618 bp, Homo sapiens
gtgctggcacagcaggctggcctgcctaggggggctctggacaccagctgccctcccttctgcctgctgcgcccccaggcagaacatccagaagaagccctcaaaccagctagtgtagatggacattgataaaggagactgggctaccaaacagaagtcagcattcggaagataccagccagccagagaagatgccaccggaagcagaaccacatgggcctctgtgggtcctggaaatggggtgctgtttgtacaaggcccttggaggcagcccctctgtgagtcactgttactgctcctgataaaccaattgactcaaatctgtcctgtggctctcagttccatgaccctggctcagagcctggcacgacctccatggcccacagaacccaagtgtatccttcctagaacagtgagggtagcacctccatgtgaccatgtgatcactggccactccctacatgcactgatcatgtccatcactacaagggccacacctgagaggatccaggaccactgcttgatgctaagcagatgctgttgacaaatgacccaataaggacacaatggcaagggtggaacggggggaagctggaaagatggccccatagagccaac

SEQ ID NO: 473662 - DNA, 736 bp, Homo sapiens
ttcactgactccatacccaggacccacagccagccgtggtcgggtgatgccctccacattccaatacctggaagcagcaattcctgtgagcactgtgccttttatggaccaatttatctgccagtccagcctccaagaggagctggggccaagttggagacctgcttatgcttgtcagcctctgtggccagatgacaagagagcagcccacagctgggagaggactgggaagtccccgtgtgcagagcctccctggagttccattcttggcctctttgcacctgcgcacagtccctggtggtgctgcaccctcacaagggctccacgcctatttctagctcctgccttctctgcagagttccaggcctgtgtttggctctatctacttggaagactcacaggttcttcaaaaccaaccaacgtgaagccagtttgtcctgacttttaccccaaacctgatgactgcttcatcccctgtcttgagaagtctccactgcccacccattgtctaaaccagagcccctgttcccacagcattaaagtggagatgacagagtccctcctggagagccggtctagccattcagtgagtcagcagcacagctcctccagcacgcagagaacagcggtccatggagggagggcgtgagcctggggttttactgaggaaggatagtgggtttttcagtccctgaagctgctgctctgcccactcaggaaggtgaggaaggcagac

SEQ ID NO: 473663 - DNA, 1131 bp, Homo sapiens
ccgctcgccatcggcctgcaggctcacgcttggtcctgtatgcagctaagccatcaaccagggaactgtcctctgcctgagggtccaggaagaagcacggtgcctcagcagcagcagagccggaccccagggttccaacgagaaacctcatctgggcagtcagccgtgactgctgattccaccaggcctggaggggcggtccttgagcgtggaactcttgttatccaatggcaccagcgactcatcgtgacatcagggactccaaccgagaaaggctttagaggctgcccttgcaatggctcccccgcatctcctcctctgtgctcccttttcctgctcacatgccaggaattgactgagggactccgtggcgcttcggggccagctcacaacacccacggggcagctgcagactggggagacctccctcacgggatctaatcttctcgcagttcctgggactcacgggtatggggaaggaggggacaggggctgccctccagttctgacctgagaacctgggaagcctttgggaccctcccaggcagcccctctataggcccctcctgtatctgtggggagaagagggcagcagtgtcccctaggagaggagcggaggcagcctgggaaccaggccaccatggaaccacccctagctggccatcagggagaggactgcctggctcagcctgcaccgtggggggcagctggggctgcctggcagccttgcagggtccgaagtgcctcttgggatgggacgtggtatcgcgttagcaggtttgacctgggttccctgtgtgtggaggggcacgggcttgtcagaagcagcaaggtgcttgtgtgaaggactgtgcaggtgtcacctccaactcaggcctctgctagggacgttccagcctctctctccctgtgtcctacgtgcctgagtgccacagagtcaccctgggagtaggctctgtcctctacgtttctctttggccacaggaatgtcggggaggatgtcttcgtgtggttatcaccagcggcccctgaccgctggttagaagggacacttttctggtgctcgtaggcacgcggttcctaacagcggggaagccttctgcaaaatgcacctcattgtgcagacatcac

SEQ ID NO: 473664 - DNA, 3218 bp, Homo sapiens
cactcagtgggtcccgagctcttctcgcatccaagaagaatgagctcttctccgaagttaagccatctctcctccaaagtccagccatcccactgaagtcaagtcgcctctctccagtcaagccacttctctcacctctaccaactgagtctggggtctttataggcacaggatgagggtgtggggcaggccacaggagatagtgggcgaacacggatataagttcttactttgggcagcgggtttcaggcttttcggcttgaagagccatcagtctccccaggtctttgcagacctgccaacttctctagaaggagcagcctcactgtctgatcccagcatcctgcccagctcctgcccagctcagcaaaggtttatggattcctgtggtgtgcaaggcaccgttagaccctggtaccacaatgaactaggtggtgagagctcacctgtcaacgaacatttcatttcaccttttcgaacacaaagtgacaacgtggttcgagttaaaatcatttattctctttttcaaacaaaagatctgagtgtgggggagatgaggtcagaggctgccgggagtgccttgtccctcagtctgcacagagtcactgtcccagagatgcacacttcctgcctgtgctctctcgtccttgacaggagctgagtgaggctctggggagtcccccactgcgggatgtgcagctttgcaaatctgcagggctcttttattcctgcccccaccccaaccaagaacacaagcctaccaaaagcaaacccatagtttcttatgcaactaagtgcttatatttaccatgtgggaatgcaaccatcctaccaatcttagctgctccatggtcgtgactggagtatagaatcaaggcactttttgcaagagtggcaaatactagggcattgtatagagaagtagtactggttgcaaataaaatgataataaccaatttttactattgggatggaagtttatttcctccatataaactgagttgcaattccacttgagtgaattcttttgatgaagtctttaccaaacatgggctctttaccacccccagtgaatgcaggtgccgttcagaggtgagaaaaaatcaccatctgatgtgggggaaagagcacggggtcagatgagctggcccagcccaggctgaatgctgtgacagtctctccatgtgacctcatgactttcccacttgctgggctccctccacgggcagaaccctgtgcccaaggtgcccaggctcacaggaacccaccctcatcctcaccctgcttcccagggcagctccccctgctaactctggtgatgtgcaacttccatgcaaggtttcatttgaaagaactgattttacattatttcagaagggcctctcatatatataaggtccttctcagctctgacaagataggatatattcacaccaactttttttcaggctggctgcagacagccccaaatgcttcattccagccgcccctgccccacctagacttgtcttcccacctaagttatccacaccatactctttattttcctgacccttccatgtgtgcccttgctgccctgccctctcgctcatgggcccgcctttatggccccaccaaggccattttcctaaaaagcaggcaaatcacactattgcactgttcagccatcagatgcctcctgccctgccctctgcctgaagagcagagttagggcaccttcacctggcatccaaggcctccacaggtctccccaaactgtctttgcagcctcactgccactgaagttctgtgcttctgtttaccaactcgctgtctcttcccatgctggcatagccttgcccacacccttctctccataggaaaggcctttcaaaatcctactgtagcccacccaaagcccacgataatatcctacccagcacagagatgagtgacctctgcttctgtgttccctcccacaacttgaacttctcttgatcactcaggtttttgttttgcttcgttttgctttctttacagtataatgtaacatctggtttcgtggaaaaacaatgaatttgggagcccatcagccctgaattcaaacccagtccctcttgcatgtagcacagctggcctgtcagccacagggaagcaggcgccatgcctctctcatcacagatccatacccagcattcagctgtgcttctcactgttccaagtgatttatgggaattgttttgtcccgtgcacacagcaaccatcacagagctatgcgaccagtgcaaacatgacacgcaaattcaggaagctttccatatttttaaaacagaactgttcaaacatcttgtcttgtttgttttactttatttttatatgttttcagttcatcatctatgtctgctcttaagtcctttccccacctccagagagccacttcctgtgcatggcgtctgtctttaaatatgcctgtgtgcatgaagaatgtgcagaacgtagccagtctaacaggtgtgaggtgatatttcattgtggttataatttcactacactgtgtatgttcaaaggagattaaatcaatataccaatgatgtatctacactcccgtgtttactacagaattatttacagtaggcaaaatatggaaacaatctaaatgtccatcaactaataaatggataaagaaaatgtggcatatatacatatatatgtatatatataaatactttatatatgtgtatatataaatactttatatatgtgtatatgtaaatactttatatatgtgtatatgtaaatactttatatatgtgtacatgtaaatactttatatatgtgtatatgtaaatactttatatatgtgtatatgtaaatactttatatatgtgtatatgtaaatactttatatatgtgtatatgtaaatactttatatatgtgtatatgtaaatactttatatatgtgtatatgtaaatactttagtgtatatatactttatatatgtgtatatatactttatatatgtgtatatatactttatatatgtgtatatatactttatatatgtgtatatatactttatatatgtgtatatatactttatatatgtgtatacataaatattttatatatgtgtatacataaatactttatatatgtatatataaatcctttatatatgtgtatatataaacactttatatatgtgtatatataaatactttgtatatatatatataa

SEQ ID NO: 473665 - DNA, 777 bp, Homo sapiens
tttgctcagccaaccccaaccctctctggtgtcattgtcctgtgcttctgacaaaggccaaggggtttggaagccagtctgtggccccaagtaccagttcagttctcccagccagcttttgaagtagaaagacggatttattataacggcggctagcagggcatgtcgcatttatggcagaagtgcaagaagccaagccaaaccacatgggtgcaagtgaggactgtgttagcatcttgtttgctaactttccggggccaagaaagcaagtcatgtgacaaacctctaaatcaacccaaaatagattgtcctccacatatcgcaccgggaggcaccaaggaatcacatggaactagttctagctgtatgatctattacagagagggtgaaggcagagcacccagtggtgacccagccaacagtctgactcttcctgctctgcagacctcaatcctcctccatgtgagtcagcccaagggctggcttggaatagaggctgacaagaagcccagttggagccataaatccaaactgaactctccaatataaatttatttctcagacaacaaacaacagatgaacaaaatctcttgttggctttaaaactcaatctctacagctcctgtgtcttatttcttagtacgtcttaattcatagaagatttagggcttatgaatgattagccccctaagaaccagcaagcccccttcgttctttctttttcccatttttaaataaaatttcattaaatacagtttcattaaagtataacaccca

SEQ ID NO: 473666 - DNA, 467 bp, Homo sapiens
acagcacaaagccatgagggatcctgcccccatggcccaatcatctcctactatgtcccaaccccaacattgggtattacattttgacatgagattcaggtgggggcaaatatccagacagtatcataaacctttccagttttgtcttttcataataccctcccactctcacccccacttccactttatggaaaaatttatagtctataaatgttccagctgtctctttgatcagttgcaaatattaattgactgggtccctcaacactatttctatttcctcaaattcctattcattcttcagcaaactctttacttaaatttatccttcaccatatgctcttcaagtactccagaaaatacaatattgcaactgaattcccttgaaaagaaacagaaccagtagaggagagagggagagaaggagagagagaggcttattaaaaggaattggcttatgtaattac

SEQ ID NO: 473667 - DNA, 732 bp, Homo sapiens
aacatactctgaatgaatagacttttcttgttttcatttggttggtcttcatttatttccacaagacttaaaaggctaaaatcaaggtgtcagcaaagctggatggagattatgggaaaagtaaatctgcttctgaagttactcagatttttggcagaattcagttgctttagtttgtacgatgaagatccctatttcctcaacttgtggcttccttcatcttcaagccaaaaatggtggttatttttcaggcttcaaatctctgattttctattttgtcctgtcttcttagaaagtcttgaaatcagcaactgtacacattctaagagagaaaaaaggactggaagaaaatttgctaccatattagaaagaagaatgaaggaaagcccgaaagaggtaacggctgtggctgcaatgtttaaagaaaaactagagtacaaaaatgaacaggcacagacggagaagcgaagccgatagagtgactcataatcaaagtccaaatagcttttgggtcacaagaaccaattgtccctataggacaattattatttagttataagatgaaggaagtcaagcactgatcaaactactcttgataagttttgcaaataaataaaccacatgaattttcaatgtttctaatgttttaaactatcatgtttaataaatattagttttatcatttttaatttccctatacatttatgtcagagtaatttttttaatgttttg

SEQ ID NO: 473668 - DNA, 1030 bp, Homo sapiens
ttcaggtgtactctgggtggaggctgttgctgatttgcacttgccaacagcagtggcagtgttgtggagtacactgttgtcagttgtgttggagtgccagcacagggctgctggcttctatgcaagtgtgcgcagcagtggcagcatggcatgaggtgggtggaagagggcctgccatccgtgcatgtgtttgcaccagtggcagtagcagcacaggagcagagctggcaggcagagtgctggctggtgccctctgtacatgtgtttatttaggtagcagtggccatgcagggcagggtggcaaggatgctcgtctttgtgggaactgctctggggatgccaggactcttgcaagtttatatgatcatcctggactaaatgcctatgaacaatacaggaagaggcaattaattggacaaaacataatgaatttagcagatggaggcagagtgggaagctatttgacatcatttggtactatgaatgccaaaagagcaataattatttatgttaatagtttaatggcaaaaaatacaaaataaatgaataaaaagttttttcttatataagtatagaaatagctaaataaaaatgaaaaaaattgattttcctggttaatcgcatcaagtttttacctccttctgattatacagatagagcatttattttattatgcagaatggattttaaaggggtttaaaaaagaaactaccgttcaaggttttatgacttgggaaatgcatgatatcactaaggcaacaaaggttacacaaatagtataaaatgtcattttttatgaagtctgcaggcttcattaaaaataactaaatatcacctcttttatgaaatatttaaatttacattataaatatatttttagaaattcttcataaggttatctccaatttatgctgttctccaaatgtatatttttatttatttatatatattatcaattatactaaaagaatgatcttttccaggaatgtgatttatgggcatgttcaattatgctttacattttcacctt

SEQ ID NO: 473669 - DNA, 735 bp, Homo sapiens
cacagcagtccccagagtgtgatgtttcccttcctgtgtccatgtgttctcattgttcaattcccacctatgattgagaacatgcggtgtttggttttttcttttcagctctatcagattagtttagttctttctttaaaagggtgttttgcctttcagcttttatattgttttactggattccttaaattccttggattggattttgacattctcctgaatctcagtggtcttctttcctgtccagattctgaattctatgtctgtcatttcagccatttaagtctgcttaagagccatggctggggagctagcatggccatttgcagagcttcttggagtgtgtcagtcttcttgatggtctggtgtcttggtgaaaagctcatcctggctgcagctagtcagccatcttggctcccttctccaaaaaatattttttataaacagtataaactaagtgtacagtatttgtaaagtctacggtagtgtatattaatgtcctaggcctttatgtttattcaccattcactgacttacccagagcaacttccagtcccacgagcttcattcgtgactgcgctgcaaatctttaagttcacttatctgcaatgtctaatttgcaattactgtcttttagtgtatttttaaactcaaactttagtttccctacaaaagttgaatatgcacattaaagaaaatcatctatgtctctatttatatacttgatatttttat

SEQ ID NO: 473670 - DNA, 1047 bp, Homo sapiens
ataactttcctgaggcctctacagccatgcagaactaatccgacctgtgataggacacctaagaaagggtgagagacctgagatagggatgggatgaaggacctgaaattcctcctccccttcaggactaagcaggagaaaatccaacgtccgcctccagagtggcccccaaagtggcattttcatgatagacttgttattaccaagggtctgctgcagtttgctggaagtccactccagaccttgttcacctgggtatcacaagtggaggctgcagaacagcaaagattactgcctgctccttcctctggaagattcaacccagaagggcactggcctgatgccagctggagctctcgtgaatggggtgtttgtcgacccctattgggaggtctttcccagtcaggaagcccgggtggatcagctactgtcttcagagccggcaggcaggaacttttaagtccgctgaagctgcacccacagctgccccttctcccaggtgctctgttccagggatatgggagtttcatccataagcccatgactggggctgctgcctttttttcagagatgtcctgcccaggccctggtggtgtaggcacacgagggaatcccccaaaaccaaagccttctgctttggtctggctggaggctgcagaccagagctgttcctattcagtcatcttgccagatccctatcttccacctaataaatttaaatcatatgtcaacttgtcttaccagagattacagtttgagattctccttggttttgatgataataaaagtgagatggagagagactagaactacttggggaaaagtttaaatgtctaatgggagattatttttggtaagagattaattatactgtaaaataattacttagtaataaaaggaagaaaagaaggcacattagtaatggccttcattatcttattctgtactctggcctcaatctttttgtctcttgattagctttgatgttcactcttacattcatttaattcaaaatttatgaactagtaccttttctctttcatttta

SEQ ID NO: 473671 - DNA, 603 bp, Homo sapiens
gacaaaattcaacagcacttcatgctaaaaactctcaataaattagggattgatgggatgtatctgaaaatagtaagagctatctatgacaaacccacaaccaatatcatactgaatgggaaaaaaactggtagtgttccctttgaaaactggcacaagacaggctctcccagagtagctgcggtaagtggaatagtgcatattgaaaatctggacacatgttacacatttctcaataccacccgactgagggaacaaggaattattataggatttgtctgccagggtggatatttcaaacaccctaatgacactggcagcaagtcactctaccacgggaaatctgatggtgagaacttcatcctgagcatgcaggtcctggaatcttgtccatggagaataccagacccaacacaaacagtgcctagtttttcactgcattgccaagactgagtggttggatagcaatcatgtggtctttggcaaggtctcctttaaaatcagtatattaattttggttaatgaagatttaatgttatctactttctgttattctaataacagcaaaatataccctgccatgaaatgtttttttctatttgc

SEQ ID NO: 473672 - DNA, 712 bp, Homo sapiens
tgcactctttttcagtaaggatgaggtatgagcgggaaataactctggcaccattctggcttttgagccaatacatgcaaacagataagctgtatattacctgtggccattgcgctacttctttagttcctagtctttctaccatgtctgaacttctgcttcagagaacagtatttgtagccttagaagataccagtctttctcttccttccatgtgtttagacattgctctcgtctttcagcgcccgtacatactgtgtgccccacgagaacagactatccccaggcttttaggcagtagttccagagcatcagtcagggggcagatacttctctcatctgctctggaggttgatgaagaaatctatgtcagcggttactatggtgttatctcacctgccctgacaacctctgacaatcctgtcctcacctctatgttgcagaaatcagcattccctgtttacagcagaactacataaaacgatagcaatttccttgtgcacatcaattttctttgtggatgggcagcctgttgcaataatgaggtctgtcagctctttgcaaaagaactggaaagtggccttactcgtgtggaaatcgaatagcaacttgtcactctcccttggcagcatagccccagactgtcaatgtggtgtcctgtgtcacattgtggcagtgggctaggtccctgcctgaagagatgctgctgatt

SEQ ID NO: 473673 - DNA, 622 bp, Homo sapiens
cgcatagccatgattcatgggtccaggaatcaaggggaggaagtggaagtggcaccactcaccatcaaccctactaatccactaagaaaatttttgctacctgttcctgcaacattgcattctgctggcctagaggtattagttccagagggaggaacactgccaccaggagacacaacaacgaatccattaaactggaagttaagattgccacctggacactttgggctcctcctacatttaagacaaaagactaagaagggagttacagtgttggatggggtgattgacccagactatcaagatgaaatcagtctattactccataacagagatctggctgtagttccctttcagccaagtgccaaaagtctgagctgtcttacccaaagacattttggatcactcttgggatctcttctgcaggttccttaacgagactcagcaatttatattacctcacttgcaaagactaatgtcagaagagaaatcttaatgtttcatatctcctgtaaaatattggaaaatcacagttctcttaggaagaaaaaagaagtttcaataaggttaacatctacaatatatgatggcatatgaggaacacatactttttattataagt

SEQ ID NO: 473674 - DNA, 1340 bp, Homo sapiens
gaggcctggatagcgaaaggagttaatcatcaaagctctgaggggagagcatttcatgctgaggaaacaatgattgcaaaggccttgatttcatttgtgtttcctggagaaatccagcagtggatgcagggcagactggaaggagatcaagatggagagcaaagcaagggccaggccatgcaagaccttgccagccatgttgaagattttgatcttcattctaaaagcactgggaagccagtgacagaggaagatggggaaccttggggaatgatgcctatggccatcttccattgcagctgccccacacgcaaaaccacctgggtttcacacagggtggagctctgtcttttcctaatctctagacagatctccctgccaattcaaatgcctgagagggtcgttggatctcttatagctagaatcccagaggtccacagcgagagtggcctgccctgccatcacttcacacacccctttcctagaagcagttcagggccaggaactagttccggcactcagcaaccccatgcagggttccaggcttcctccttcttcagctttggcatctgcatcacctcttctcaactcgtggtgttttctctctaaagatctgtttgaaatatgttggtttccttgatattttggtgtctcttggcggtgttgcttcctggatgcttctagtcagccatcttgtctccctcttgagaagtttctctcaaaatggtaacacagaaagacatagtcagtttcctgctccgtgaatgagaatatccagtgaacattttatcataaaccgtaagagtcaatgcccaaagcacatctctctcttaagagaaaagtcatagacaaatcactggacaaatttgaaattttaaaggtaacaattttacaatataatttttgtttctttttcctttagtccaaaatccaaactggtttttgttttcagttcattatctccaatcaacttaaaggcaaatgtctcagcatcaactttggaattaaacagagcctttcttcaaatgatgttctgggtgtatgatttttaaactctaatctatgcctcctcttctcttgtacttgcatgaatcctttccccaagaaaatcaacagataataaaagtgtatgactataggtctgaagagctgagtctttgaaatagtttatactcgtttcatctctgttagaggtgagtgattattaatattctgtgtcaacttgaccggcctaaaggatgcccagagagctgataaaacattatttctcagtatgtttgcgagagtgtttccaaaacaagtagcatttgaattagtggaacgaatgtagaagatattcc

SEQ ID NO: 473675 - DNA, 722 bp, Homo sapiens
tactgttcatggaagtccctaccgagaaagggagaaacaaagagtttcaaagtatgtttcaggctgaaaacaaaaaagaaaacaaacaaacaaaaaagcttgaaaatgcattttgaggctgtgatcttccgttacaagactgtggtctgaagaccagtgggggttcctgacttttgtaagaactgcaatgagccaaccaacgactgccaaacctacctgaaaaccaattagaaactctccctgcttcccaaaatgccacctttagtgggtccggaattggttctttccagtgggttcatggtcttggctgacttcaataatgaagccactgacccccgcacccttgggatgatgcagcaagaaacccctcaccagatggggtgcctcagccatggacttcccagcctccagactatcagccaaataaatgtcatgctgatgcaagaagtgggctcccatggtgttgggcagctctacccctgtggcttttcaggatacagccttcctcctgactgctttcatggtctggcaatcagtgtctgtggcttttccctgtgcatggggaaagctgttggtggatctaccatcctggggaaacttataatcatggtgaaaggtgaagcaaacatgtctttcttcatatggcggcagcaaggaaaagtgctgagcaaaagagggaaaagctctgtataaaatcatcaggtcttgtgagaactcattca

SEQ ID NO: 473676 - DNA, 1417 bp, Homo sapiens
ggtgtatctggaacccaaaaagttatatttggcttgacctactttggtgtctagggcgtatgcgtataggtttgtatgcacaggagaacctggcttccctgtcccgcgttggctggtcagtggcttcagccttgccagcccaaattcaggccaagcacggattgcagctcggcattagtctctcaaaattatatgttgaccctggaatcagggaggcagtgccgtggctgcagccatgtctctactcctggtatcggggctctcaaaatggttctcagctgaagctgctccaggcttggctgcctgtgggattctgtcttcaccagaaacttcaaattgatgtaaatgaattgctgtatggagtatggaggttgtctttccataacaatgtctgtttgtttctgagttttaggtatttcctttacattgtgtctcagaaagggcatctcttgttcttttaccaactgcattctgctattactttctaattcatgctcattagctcattcagggtgggggtgagagtaatactcttcaagttttctacttcccagggtagaaaccatcaacataaaatattgtgaacagtgagattatgtcttaaagtgagctttccttttgttaatcaaaatgctagggaaatatgttatgataataatattataatatttgataatatttaataatatattacatactattaataatatttatttaataataatattaaaattgcagatatttattaggcttttatcaagtgttaggcattttgaccaagaatatatggttaattgttatcacacccagacttgtaagacaaatggaaagttcatgtgaaaaacaagacaatggacaatggctccttggctaaaaaggctccgcaccccctttagataagcatcactctgagtatcacataaaaccttaacatttattattttaaataccttggtgtggtacttgtttctttcaaaactaaagtgaaaactgcattagctaagaaaagaaatgcagtattcacggacctgacaacttaagtgcatttgcaccttacttcttaagatgttgtttaaaagagctcttcaatccttctttggaaagaaatacctcctttcatttttttccttgatgatttattagagtaactcaaatttagctcagtccctaatagattaataattctatattagtttttgggtaaataataattgtacgtatttattgggtacatgtgacatttttaaacatgcatataatgtgcagtaatcaaatgaaggtatttaggacctccatcacctcaagcatttacttctttgtgttgagaacattccagacctcctcccctagctatttttaaaaacagaataaattactgttaatgatactcattcaatttgcaagtgaacactagaaa

SEQ ID NO: 473677 - DNA, 1822 bp, Homo sapiens
gaagccttcaggtcttgacggggcgataaggagcctgcctttctaaggctctgctcccctagtttctttccctctcccatattcctcaagggctgcctcagaccttgcatccagggccctagagcaaggcgctttccagtccgagctccagggcagccactgtggtgaggggtgtccgcagacgctgatctggacgctgagccacgctaactgaagatgagagtcacgtgttcatgccaggccaacctggaactctatcaacattcggtccacagggagcttgatggcttttcccttccacaagacattgtgccgacccatcatgttgatgatgacatgctgattgaacctgaggaatgtgtcttcaccccaatgatctctttatcccactcagaattcaagatgtacactagttggacagtggttatccaggccaggctgcataacgccagcactggactcgctccttcttgtctcaagctctcatatcctgttctgggtcatcaaactctacagccctctccacccacgtcccctaaggattttatacagcaacttttgatgaccagctcagtggttggatcaagaagaagctccaaagcgattcttaaagccaaacttgcaccaaaaaaggtcattgtcactgtttggtggtctgatgccggtctgatccactacaactttctgaaccccagcaaaactattatatctgagaagtaggctcagcaaatagatgagatatactgaaaactgcaatgcctacagccagcattgatcaacagaaagggcccaattcttctccacaacaatgctcaactgcagatggcacaaccaatgctttgaaggctacagagttttgtctcatccaccatattcaacggacctcttgccaactatcacttcttcaagcatcttgacaacttcttgcagggaaaaggcttccacaatcagcaggatgcagaaagtgcattccaaacatttgttcagtcctgaagaatgatttttacactacaggaataaagaaacttatctgtcattggcaaaaatgtgttgattgtaatagttcctattttgattaatgaaggtatgtttgagcctagttataaggatttaaaatttatgatccaaaactgcaatcacttttgcaccaacttaatgcataagtaaatagagtatgaatgtataaaaggcagcataaatgtatttttgcttctaactcattgtgttctcctattattaagagacattaaagataaaggttcagtggtagaaattcaggtattattaatagatttaaaagaaagctgcataaagcagtaattatatatctgtggtgatgggcatacaatgtatacaatgacataataataacagcaatgtcttcacaaaggaaggaaatgaatgcagcactatatagggataaggttttgtgtacaattgaaattaacggcattaattcaaactaaattgttacaaattaaattgctaattgtaatctccaggacaacactatgaaggtaactaaaaatatagtacaaacaatgaaaaagaaattaaaatgatatctacacctcaacagttatataaatatctattttcctaacttacgtagttttttgtgtcccgaagcttatacggatatctatacctccaacttatatagatatttacaccctaacttatgtagctatttacacctctaacttatatagatatccacaaccctaaacttatataaatatttacactcctaaacttgtctaaatagcaaatgcctaatttaaatatatatcaacactcttaaacttatgtaggtatcagc

SEQ ID NO: 473678 - DNA, 1135 bp, Homo sapiens
aggagaaatacctaattaattcctcctttgttctctctattgctctgacatggtaagacctgcttgctttccctttgctttctgccatgattgcaagtttaccgaggctccccgcgatacttcccgtacagcctgcagagccgatgtgtctagaaatgtcatccaggacgtggaccctggaatgggtgcagtgggactctgcctggtacccattgtactgataccctcatgtactatacctgagtattatccaagttgcaaagcaaagtcttctttactcgcccctctccccaaccagaaggaggaaatctcttctggagctgtgagctgtacaccctggggttgggcatctcttctgtattttgaccctagtacaacacagcacacccttcttctagtatatgcaagagacctggatctgcacaactctcttaccctgagtcaggctaccaggtactgccccaaaatggattgtcccctgaggagacgatttggatcttctgcttgatcaagtctgctgttgaacacttttagtgatttttatagatatcttcttttggtgcgtacttaattccacttgcaaaatatttctccataatatcccctttgtctaaaaagtatttctctttccatgtaattatttatttatgtatttatttatttatttttgtgatttaagctctgtcttgcttgtcaccttttgtgtaaagatatctttgtccacaccatcctacatgtctttttctcctcttttactaatagcacattattatttacaattttagtactttaacatgcaaacactgtcccatttcaaatgacttactcatgtatttgtgtaaccaaggaagtcagctttgaaaagtgtcagatttgactcctcaccacaggactcacttagaactggaacatattttgagaatatatatcaagataattcaactgaacagactctgatagaattagcatgctatttgtcctattgcctttggtgagcaggaacaaggggctgggagacaagacatatttctgtatccttgaatattactgaagatatacattggatattgaaatgaggctatctacattagtatacttacattgggatatttcacacattatataatgatgcagg

SEQ ID NO: 473679 - DNA, 649 bp, Homo sapiens
ttctatatatttacttgcagtggtttttagcaattgggaaacacatgtgtaactgttacaactatgacatagtcaccattgtctttaccatcaccatcatcaccaccattagcagcaccagcagtatcactatcatcaccaccattttaagcatcattatcattgaatttgttgatttcattctactggccatgacttgtggcctaagggctgttcagtcatcatgtggcgaatgctgctgggcctgggacacaccctttagggcagtgggctcctctctggcccagagcacgtccagaaatgccatccagaagccaaggcctagaatcagggaccccaagagtctatttggtgctgacacccatgaagcagagctggcacctatggtgccagacaaagtcccctttacttttgcctctgcttttctcaagaagaaggagtttctccctgaagccaccacagctgagaatggcaatgtctcatgagaatgtgttatgtctcacctgaagccagcaagtctgcccttccctcaattcctaaacacgtaacttcttaattataggttctatatatgtggcttcatttaaatctcacaaccacatagagttgataacatgatctgtaaattacacataagaaaatgaaatac

SEQ ID NO: 473680 - DNA, 667 bp, Homo sapiens
tttccactttgacagttcacaatgtgtccggagtttcttccttctggtgggttcgtggtctcgctgacttcaggaatgaagccgcagaccctcactgtgagtgttacagctcataaagagggctttctgtatcctgggttcttgccttggtgtactggaagaattgaatcacacgtgggcttggagaatgaatgcaagattttattgagtggcggtagctcaggggaagtcagaagggatggaatggggagatgttcccctggagtcaggccactcaccggccagggctgtcctccaactccccagccaaattctgcattgttctactttgcctgtgggtggcctggcagtgtgtcagtgcctgtcagtgtgttcctctccatgtccagtcacccaggtattcctccgctgatgtgctcttcttgacgtccagctgcctgtgtgctcctctgctgatgtgctccagccacctgtgtgtctgcctgctagagtcttggggggcttttatagaggataataataattttcattatcaccaaattaacaatcttgtcatgattatgcataatcatctatatgaataacaattttaaaagataaatattggttagactatcagtctttcagcaagctttcatagagtggagaaaaaataaaatcacacaga

SEQ ID NO: 473681 - DNA, 2095 bp, Homo sapiens
gacagacatgcacagtgcacacttggacatacgccctcgacagacacccatagtgcacctcccggacatacaccctccacagacacccacagtgtaccccctggacatacgccctcgacagacatgcacagtgcacccccagacatacaacctcgacagacatgacatgcacagtacacccccggacatacaccctcgaaagacatgcacagtgcacccccagacatacaacctcgacagacatgacatgcacagtgcacccccggtcatacaccctcgacagacatgcacagtgcaccccccggaaatacaccctcgagagacatgcacagtgcacccccggacatacgccctcgacagacatgcacagtgcacctcctggacatacatcctcgacagacatgcacagtgcatccctggacatacgccctcgacagacatgcacaatgcaccccccggacatccgccctctacagacatgcacagtgcacccctggacataacaccctcgagagacacgcaccgtgcacccccagacatacaacctcgacagacatgacatgcacagtgcacccctggacatacaccctcgacagacatgcacagtgcaccccccggaaatacaccctcgagagacatgcacagtgcacccccggacatacaccctcgacagacatgcacagtgcacctcctggacatacatcctcgacagacatgcacagtgcatcccccagacatatgccctcgacagacatgcacagtgcaccccccgcacatacaccctcgacagacatgcacagtgcaccccccggaaatacaccctcgacagacatgcacagtgcatcccccacacatacgccctccagagacatgcacggtacaccccccggacatacacccttgacagacatgcatagtgcgcacccatacatacatcctcgacagacatgcacagtgcacaacccagacatacgccctcgagagacatgcacagtgcaccccccgcacatacgccctcgacagacatgcacagtgcattcctggacatacgccctcaacagacacgcacagtgcacctcccggacatacatccttgacagacatgcacagtgcaccccccggacatacaccctcgacagacatgcacagtgcacctcctggacatacaccctcgacagacatgcacagtgcacctcctggacatacaccctcgacagacatgcacagtgcacaccccatgcatacatcctcaacagacatggacaatgcatcccccagacatacgccctccacagacatgcacagtgcaccccccgcacatacaccctcgacagacatcctcagtgtacctcccagacatacgccctcctttgcagctgagagttcttggatgttctggatacaagtcctttgttggatttgtgatttgaaactgtttttttttcaagtctgtagcttgtcttttcatctgcttaacagagactttcatagacaaaaaacgtttttgatttctataaagtccagataaccaaattttcccttgtggctcctgcctttggatgctgtgtcgaactgatccttgaccacatagatttctgtcatgttttcttttggaaaggttttctagttttatgtgtaaatctaccatactgtttccgttaatttttgtgtgaagagtatgaggattttcatttcacaaaggtcactccagtgtgcagggatggattggaagaggctgtgcctggaggtggacgaaccagtaagtgggtgacagagggagcaggctcagtggctgagatgaagaattcaggttcacagggcacccagcagcaggctgaccctgtgcaatgtgacatatttgtgtgcatgtgtgtgcacatatgtgcacatatgcgtgcatgaatatatatgtataattgtatatattgtagtcacatatttaaacttattaaaattattaaaacccccttcaccccaactgctgagattgttttaaatctttaaagggaaatactttagtgttcagaaacacttaacttgaattaacacacacattatttttaaaaagacaaattactaattattttgaatgcac

SEQ ID NO: 473682 - DNA, 917 bp, Homo sapiens
agcatcccatctgcaggactagcttccctgggctgccgtaataggccaccacagactgagggcgaggggctcctcccacaactcagtcagcgccggcctcctgagtcaagtggggccagattcctccagggcgtccgctggacatgctcaatgcacacagaggtctcatcatccctgggaggagcctgggctggcgtccatctgtccccatgggctggtgcccactcacagatggatgtaaagccagctccggtacccagatccccatgactcatatgggcgtccacaccccacagccggtctccctgtcaggccctgctgagctagcaaggaagtccagcactttggagggtcgcagaggacaaatctttgtcttcagaaagtttatcagggaaaacactgcatttgggaatagaggtgggacccagggaggagacagaagaggaggccacgtgaagatggaggcagagattggagctgtagggctacagccaaggcattcctggggtccccaggagctggaagaggcaggaggtggattaggcagctcaggctgttgtaacaaaatgctgccgactgggcagcttcaacaacagacatatatttcccaccatccaggagcctgggaagtccaaggtcaaggtgctgtcagggatgttttccagtgaagcctacttcctggcttggagatggtaccttccttctatgtgctcacacggtttgtatgtgcctggagacagacagctctagtgtccctccctctccttgtaaggtcacagtcctattggattaggaccccacccttatgacttcacttaacttaattacctccatgaagggcccacctccaaatagtgtcacgtgggggtggggcttcgacctagaaattttgggtagacacaatttagtccatttcc

SEQ ID NO: 473683 - DNA, 877 bp, Homo sapiens
gcaagaaagtgtccttcgagtcacatttagccagggcgccttttgcagcctcctccagcctggcacagacacagatggccacatggcggccacagctggtggagagcggagctgccggcctactagtgggagctggctgcccactcctcttcttgggagtgcttggctatctcctctggctgccgatgcagcctgggagggacctgagcgtctttgaagacagtcaggagcaggcagtggcaggggtggagaaggatgagcctaggagtctaacccagtgccacctgctgagccacccccaggagttctcagtccaggaacaggatgctcagttccctggatctctcctctcatggcagggtgtggagacctctcagagcagtccttgcaccagctcagggaacctgccttccaccactcgcgacaacccccaagcagcaaaccctctcacagccacttccacaagctcatggcaggtctttctcaaggtggcctctggttgtggggaggcccccacggcccctccgaggtggagcacggagctcgccagcgtcttgggaagctgccgcaggcgcttcttccttctcggcaggaagatggcgcccggctctgcagtggccctgcctcccctcgccgttagatgtctctgcaatcagtcgaagccgtagcctgtcaccggagtggggggctgctgcttttctcctcagaaagagaacaccgttgccacccaaagcaaattaaaattaagtgcaaagctatttccgggtcagttaagcacagcaggtcactagctttctccattgctctcagagcacaaagcaaacatctctcagcttgcatgttctgggaccctttgaattgctcgctgaagatgaaa

SEQ ID NO: 473684 - DNA, 569 bp, Homo sapiens
ctcctgactgtcttcttaggaaagcccactcctcccctcctcagcttcacaatattcaacattttgaggtggaaaagtcacggcattctcacacacgcctaggaaaagtgtgaaatggtcctgttgatctggacggcgatttgtcaatgtgcacccagagacttacaagtggttagtagtcaaatcggtccacgcggcgggaactgctggtgtgtgagagcaaccttggagtaccctactccacttctaaccaggtcaggtctgggagcagttggtggcagtgccagccaaaaggagcatatgcaaaatgaattaggagctcccactagtaggccggcagctccgctctccaccagctgtggccgccatgtggccatctgtgtctgtgccaggctggaggaggctgcaaaaggcgccctggctaaatgtgactcgaaggacactttcttgcggaatgaccttagattctccttccacatcaagtttcttccatatgacccccgcagacttgtgcatgcactcacacgtccatgcccacacacacacgcattctgtcttcgaggctaata

SEQ ID NO: 473685 - DNA, 668 bp, Homo sapiens
aaggaaggaggagggtatctgaaaccagcatccagacatgcagtaccattttgcatctcaccatggtactgggggcagaagtgatttttatcacaacccaagtcgaaacacatgctcctaaatatttatttaatgctgtcaacactggagccatcagaaataccatttgcggtatacaaaatgttctcatgcatatcacctcatttgattttgggaggcagagggctgatcatgtttctgttttacaaatgagaacattaatgccaaaagagcttcgtgccccttctagaattccctataagatcagaggagggttctatgacagatcccctctggctcaccgagccctcttccccagctcctctgaaaaggttatgtctaggattcctaaggtaagtgttagtaatgaagtgtatgacttagcccattgtatcatgggtgactcagctgcagcagtgcctgacatcaccaaccctagtcagcaagaggtcatttcctgcatgtcagctgaaacactcattcctaatgaggtaatgacgtgacacctactgttcgcagaactgcatgtctctggactacgtggccgaagtcactatctatggactccttttattggggtagaaattattcttcagggcaccagcatgatgaagtacagagagcttggc

SEQ ID NO: 473686 - DNA, 797 bp, Homo sapiens
tgtttcaaaggcaggcactaggccatgactgagaccttcatggcagcccctcccaccacaggcccaaggcccaggaggaaaaagtggtttcatgggctgggcccagggtcctcatgctgtgtgcagcctagggacttggtgccctgcatcccagccactacagccacggctgaaaggggccaaggtagaactcgagccttggcttcagagggtggaagccccaaggcttggcatcttccacgtggtattgagcttgccagtacacagaagtcaagaattgaggtttggaaatctctgcctatatttcagaagatgtatggaaatgcctggaagtccaggcaaaagtttgctgcaggagtggggcccccatggagaacctctgctagggcagtgcagaaaggatatgtggggttggagcccccacacagagtccctactggggtactgcctagtagagctgtgagaagagggccaccatcctccagaccccagaacagtagatccaccaacagcttgcaccacgtgcctggaaaagctgcaggcactcaacaccagacagtgaaagcagccgtgagtatcctgcaaagccacaggggcagagctgcccaagaccatggcaaccaaccttttgcatccacatgacttggatgtgagacatggagtcaaaggagatcattttggagctttaaaatttgactgcccccctgcgttttggacttgcaaggaccctgtaaccccctttgtcttggccaatttatcccatttggaacggctgtgtttacacaatacctgtaccc

SEQ ID NO: 473687 - DNA, 720 bp, Homo sapiens
agcagcaacgagctggaaaggacgggaactgacaccatgggttcagccaggcctgtctgccacctcccacgggctctcccacccccacccccatgctcaggttcagccaggcctgtatactcatcctggcacatctccacctccaaaccccagcacaggtcaaactccaaagcacctccatccactctgggttccctttatcacatcacaaacaatcaccctgtacaaaatgtgcccaactcaagcacaggggagagtcacatgtcctcttcaaggcagactgtgtcctgtgtatttccaattgttcactgatgatccccattccccagctcagtgataagcacttcataaaagaatcacccaaggtgatagctgaaattcagatttctaggctccacctccattgtcctgtatcatcatatccccagaacacactcaaggacaattctcaaatccaagtactgcttcaagttcacctaattactacagcatcagagcgacacgcgttccagaataagaggctgtccgtggatttgcttcagcgctccatggcttggcagacttcctctttgccagggccgttgtatacgtagctaagtctgagtaaaaagacagttccacgattcaggtacaagaaacataacaccaaactagactgtaaaaaatgacaagtgctgaaatttgtttttataccacattttccttatctattcatccatc

SEQ ID NO: 473688 - DNA, 1354 bp, Homo sapiens
tgacgtcttgcctctgcctaacaccatgcggctgtctcctacgaccacccgggacattctggccacagtgtggagcatggatggagggtgtcaaggccccagtttatccattcacctgctgaaggacatcttggttgtttctagttttggcagttatgaatacggctgctataaacatcagtgtgcagatttttgtgtagataagttttcaattcatttgggtaaataccaaggaatacgaatgctggatcatatgctaaagttttcaagttcatctatgttgacacatgtatcagtacttcattcctttttatggccaaataatattctattgtgtggatattccatattttttattcatttgtcaaatgatgacgttttggactgtgtacacttgttaacgtttatgaacaatgccactataaacatttgtgttgaactttacgtataagcatatgttttcgtttctcttaggtatatctctaggaacagaattgctggatcataaggtgactctatgttgaatcatttgaggcactgcccgactgcttttcaaagcagctggaccatttccaccagtagtgtgtgagaattctgacttctcatgtattatacttaccagcacttgctattagtcagctttttaattccagacatcctattggatggcagtggtatcgcattacactttgattggatttaatttaatctgatgactaaaaagttcaacatctttacatgtgtatattggccacttatataccttcttggcagaaatgtatattataatcttctgtcaactttttagctgggttatttatcttcttattattgagttgcaagtattctttatatattctcatacctgtgccttatctaatatatgatcagtaaaagctttctctcatcctgtggattgtcttttctctttctttttttttttttttttttttacttggaggaataaaatatattttaaatgttatgaaaatattgtaatattgtaaaattattttcttattattatactttaagttttagggtacatgtgcagtctctttcttaatggcattctttaaagtgtggattttaattttgataaagtccaatgtatctatattttcttttgtttgtgattttaatgtcatatgtaagaattatttgccaaatacagttacagagatttattcctatgtttttgcctaataattttatattattgcatttagacctctgatccatactgagttaatttttgtttatggtgtaagttaagtgtccagtctcattcttttgcatgtggctgtccagttgtcccagcctcagttgttgaaaggactattctttcccaatc

SEQ ID NO: 473689 - DNA, 701 bp, Homo sapiens
cttttctaagatctgaaaaataagtctgaatttgacacacatctgatacaaagggtttggggcaagggtttgagcagagatggacccgatgcagagacaggagcctcagccttggaatggtaagggcgttcattcagccagcaaggagcttggaaacgaactcatcccagagtcctcagaaatgaatgcagccctttcattcaatcttgccatttgccctttgatggcaaatgctcagaagacaatgaccctgcaagctcctacaaggtcagagggtttgttgagccttaaagagccccagtacaatatccccttttgcctggaacagttcctccctttctggcatcagcttctatcaatgtacggcaccacacaggctgctcgctttgagccccagattgtggtccagaaatatcattcctcaggaaaacaaattagaacttctcaggaaactggagcagaagggtacaaaatgagcccgggacatcgtgacataccaaatggaaagaaagctatcaaagactactggcgtcatcttgaagacacaaggttcaccctgaagaggccccaccacccaaagatggaacagcttgagcttcaattaggaagataatgataatgcatagaaacctaatgaatatgtttaaatccacctcattagaaaactttttaaaaaattaaacggtcacctttgaaggatg

SEQ ID NO: 473690 - DNA, 1110 bp, Homo sapiens
gaaatatgatgcagcgattaaaaataagatatatgacttatatgctaagcagaaaagcaggtttcaatcacattgtgattgcacaaaaatgcaaacatatctgtgagagtgtgctaattaatgcatcagcaagcttgggagagaaatatcgaagatacaggtggaaacaggcttccaagaacttgaaggccccaattattagccatgtatgtgttaattactttgaattaatgaagatgaaatacgatcaagaatgcacttccttagccacggcagcctcattcaagcagcttgtgactttcatgtgggacagcacagaacaggcaacttcatcccagaaagctccatcgggcatttcaggctctcatttccataaccaagtcacattttattttaattattagaaagctttttcttaaaaacatcagggaactataaattagtgaagtgtttactagattaaaacctcagatgtacaattaaaggacaacataacctcctcattctgactagactctcccatcacagagtgctggcttctcatccttcttgctgcccagagtcagatgtgggggcccatgaagtccaagaaagctcacttctcagagccactccagaggagcccagaattcctccaaattagaagaggccaaatttaattaggtgtgaaatatgaagagacctcaaacaatgtaacatgtctcatgaaaggaaatgtgtccatctttgaaacctagaccaaaaaataacaaaaaatgtgtgtgtgcaaagtaataatatatatttatagtttagtaatatatgtgtatatatattttaaataactttaaaacttcagtacttacaattataaggacaataaattcttccttctgttcatgtgtgacaggaatactgtatatattaaaaagtcatccggaagttaaaaaatcaatgtatttaaaaatttttgaaataggttgtataagatgcattattttacatttgatttgatgacatgatttttgtttgaaagtatgcaatacaattcagtagtttctgatgtttgtattaaatgtttcataattttgaaatgaaagaatggaatgctaagaaacatttcattaaaaa

SEQ ID NO: 473691 - DNA, 2869 bp, Homo sapiens
gattgctcacacctgtcgtatttaaataaaagaacacttttgtgacacccgatcctcctgcggccttcagcaagagtcctgtgtgctgtgagacctttcctcactcatcataaggttgcgacctggctgacgctcctagaatgaaacgcagcctctctgggtagcacgctgtgggggctcgggaatcgataccccaaaatgtggggctttgacgtgttgaactgaagaaacagcctctccaggtctctctgatcaccctcctcatgtcccatctgaatcccctgcgtcccaaagcacagggtgaagctgctctctgagtctgaacccaccaaagaaggaaacggtcacccctgtctcttccctgagtttttctcagctggattcctgtcacagaaagaaagaccaaagtctcaatccacctggacagacatgtgtcataagccattgtctgctctgtgggcccaacagacattgcctcagatcactgtatattctccaagcccattgaatttcctaaagggcatttactacccgctaaactcatccacacgccccatctccctttcccctaaaagggcgggtgtatcagcgtctgtcccatcacatgcatcctgcaactcaaagaacaccacagccaaggcgtgtaccttggggtatcatgctctgagccccaacatctgcaaaggtaggtgtcattatctccttagtgcaccacaggaaaccagctgagaaagccaaatgctttgtcccaagtcaccgggcaggtgtgtggcagtgcagagagcccagtctgagccccctgcaccctgagagctgcccccagatgaagagcccaggggagcatctgagctccctccaatgcaccacttccttccgtgagacatcggcccatgcgcgtgaaggggacaggaggcaggcggtcctgtgggtgactcatgggaagaacagcactgtgaccgcagcaagcttgcagctctcaaaaaaataaagaacaaaggaaagaaaattaaaagttagggctgaagggggagctggaactaacatcagaggctttaagtgtctgccactgggctagaaggtgaggtggcccctccctgtgtgacatggagcccaggacaggctctccctgtgtgggaactcgtgcagagcctgcggtccccattcacggccccgcaggagctcaccaggagagactgcagcagctcatcagagtctgcgctctcctcctggggcaggtggggctccagttcccgcaccccttctcctcaggtggagcctaaatagagcagtcagatatcaatcagtttccacagctgcggccttgtaaactagacttgcaagaaacaggttaacatgagaaaaacagaagtttattcacacgtgcctctcacagagggagcagcatgaaataggagcatgtcagcggtgctggcagatcagtcacccaaactcaagccctcctggaaggggaagcaggcccaggctgtggaaccgcggagagccggatttgaatctaggcaccgccatttaccagctgcgccaccttggaaggctggtcaactttctctgggtttccatttacgtcgtgtgccaaacacaggtcattagacacgcacaaggatcatcgaagagattgccaaataagctccctacgctctactcacaccagctgctcacacggggacagccgtgtgcaagatactaaagggggcgcttagaagaggagctcaaaggtggcctggcgtcaggggctggagggcctttgacagaggccgggactgaggctacagcatcatcggagcgctggccttggaaagagtgagtggttgcggattggacgggcttctggagcagtgagacagaggaactctcctgtaagtgaaaggaaaggggtccctggggcactggccggtctgagactcaacccatccccctggggcacagctgacccagagatgcctacctggtcgggggccgggacccctctgggccatcccccatgtgctcggctgttctgagagccagtccaggggacaaggtggcagccagggcaggagggcagaagggcaggatggagtgtggggagggtcagcagcccatgaggcagggtggacacccaagtctctccctgccgtccctcctcagcgagctgcctgggctcaggccactgcgggctaagcccctggcccctgcctgacccagaccctgcctgatctgagcggggggtccatcccagagtgtccagagctcagcagggggactgggggagaggccccgaagagaggcgctgcctggctgctgcacagcgggacggtctgggtggtggaggtagggagctagagaaggaataagctcagtggttaggtgcaccccaaatggctaaaatacgacaaacagaagtgggacagagcctcagcaaaggctgggtatccccttccctccagcagcctgtggtctctgcctgcacctgctcctctgggagcagcccacctgaccttgaacaccctgtgggaagagctgacttccagacaggctggaggcgcattccctgtggctgctgtaacaaagagctgcaaactacagccttcaactacagggttcagaagcctgcagtccaaggtagggcttgggcgtgccctgctccctctgcaggctggggagaatgcttcctccaggacctcttcagcggccttgtggctggggatcccacagacccctggccaggcctctgcctcggcctctcatggccttggcctctgcatctctgccttccgtcttttcaaaaggactctagtcactgggttcaggtcccggggttctctggtacgagttcatcttgactacatctgcagcagccccgtgttccagc

SEQ ID NO: 473692 - DNA, 1685 bp, Homo sapiens
gctgagcagctcacagccactgtgccgtggtggtgcctgggtcttacatcggtccccagctgccatgggctgtgaaaggccaaggaccccagaaaaccacaggcgccctgtcagcacactgcctggcagagacgaggctccagggattctgtcgggttcggccttcctcgggacccgcgcgtcaggtgcccgcccgtcatgctcgcccacggcggttttccttgtcttcctgctccagtttttccttccctcacgtttcccattcgtgcgcggagtgctgagcacagacctgtcccggggcaaggggcagggatggtctgcgtttgggggccctccggctgcaggtgtccgcagagactcagtgtggcctgtgtgggtgctgcctggggagctggccccgggacggggcgggccctggcagccgcactctggtgccctggtggtgacggtgatctcaggatgtccacagacctgattctcaggcgtgcgttctgaggagtcctcctttctgtggagttatgaagacctgtgaacgctggcatgctgcttctttgctcattttggcctcctgaagaagtagtcactgaaaatgtgtgctggttgcaggggacacctgagtgggcaggaggggtctcccagcagagcaccccagggagaagactgactttgtgtttgacttaagaggaaaaaacccacttttcaaaatgagaaatttcgtattcaggaaaaattagaaagaatgagttatatcaaaaggtataaattgttgaagtatggtaaatggaaagaaatagaaacactgggtattctgtacaatcaacgacacccgaggaaagatggtctcttatttaatgcttcaggactgatggagaaagttgtgtgacattctttttgtgtttcctttgtggtcttgaaggatatctttgtatctgataatatactctgtgtcaaagtatatgatgatgcccctgccaaatttatacacgagttaaaagatttgagggaaggtattcacctatttatgtatgtgctatcattaaagttatccttttgatttttgcttttttccatatattttggaagtgaaaatggccgagtcaggccaggccagcactgcccttctcacgcggtgtcaaggacctcagtgagcacctctaggcctccctcgcccttatccagtcactagggtggacatctgtgcctagtgttcagttgtatttattgaatcatttgataattttatgtattgttcatacaatgtaggaagtctagtgagtgagctatctattgatatctgaatttgaaatgactaggaaaaaaatttgggcaaaaatctggatctaagaaaataaattattcatttgtattaaataaatgtaatcactgagatttttttaaagctgatatatatttgactgcttatattcttttctacacattttaagaaatatttttcaaaattggtttgttataaaatctctttcaacagatttttgcataacaaccggattacacatttagttccagggacatttaatcacttggaatctatgaagagattgcttccaaatatactttttgcttatactgagctatttcttataattaaggcattttaggactggtggagaaagttgtgacattcattttgtgttttccttcatggtcttgaaaccgttagtttc

SEQ ID NO: 473693 - DNA, 705 bp, Homo sapiens
agcgttggggtaaaggttgcagcttttcttggctgcccgaagtgtgtgtgatgcagcatggccccaggggaggtccttgctgcccgaggactggccaagccatgcaaaggtcagggctgccaggaaggaggagaccctggaagtaatgagctgagcatgaagacagattcccgcctaaacttgctggacgatgggaccctgatgatccagaacacacaggagacagaccagggtatctaccagtgcatggcaaagaacgtggccggagaggtgaagacgcaagaggtgaccctcagccgcatcaagtccagctgtggcctctcatccatctgggccccatcaggttgcaaactctgctctgatccacctgtgttatccatggccattgctcagaagaggagctgggcccttgaagaacagcggattgaggcattgggtgtacccaccatggctctgggaaatgatacagatcagttcatgcctctggacgggtctgcctgtcgtcctgtgcagaagccggtagagtcggagcccttacccagggaggctgcaggtgtaacttcctctctgaaaccttctggctgcctttagcttcagccacaaatcatgccagggttgctgcttccctggtattttgtatttcaggccattatggttataaaaccttttgtttggcaatgtaagtggttttggtgtttcttgttt

SEQ ID NO: 473694 - DNA, 2683 bp, Homo sapiens
ggttacttggttggttgtttgcttggttgggagactggatttattatgtcagacctgctcactcacactggagggtctacggaacatactcctcacaacgatcatgagaaagaatattgtgagaggagcccagtatcctggaagagctttgagcttgtgctctcattagggggagagaggaaggtagaaggacaagagttgaaaaaaccaactgtggggtattatgctcactacctgggtgatgggatcactcataccccagacctcagcatcacacatcgtacccatgtaagaaacctgtacatgtacctcctgaatccaaactgctccaccatttgcaccagcaattccaagactgggcatctacccaaaggaaaagaagtcattctaccaaaaagacacatgcatgtggggtaccggataaagcaaaagtggttcttctacagcatcgaatactacacagccatgaaaaagaataaaatcatgtcctttgcggccacatggatgtagctggaggacattatgcttaatgaattaacacaagaacagaaaatcaaataccacatgttcttgtctggataaagcaattgtggcccttctacaccatggaatactacacagccacgaaaaagaataatgtcatgtcctttgcagccacatggacacagctgaaggacattatgcttagtgaattaatgccaggaacagaaaatgaaatactacatgttctcaactggataaagcaaatgtggcccttctacaccacggaatactacacagtgatgaaaaaaataaaatcatgtctttgcagccacatggatgcagccagagggcattatgcttagtgaatcaatatgaggaacagaaaatcaaataccacatgttctgcactagataaagcaaatgtggtccttctgcatcatggaatactacacagccatgaacaagaataaaatcatgccctttgcagcaacgtggatgaagctgaagggcattatgcttagtgaattaatgccagaaacagaaaatcaaataccacatgttctcaattagataaagtaaatgtggtccttccgcatcatggaatactacacagccatgaacaagaataaaatcatgccctttgcagtcacatggatgaagctgaagggcactatgcttagtgaattaacgccaggaacagaaaataaaataccacatgtttttgcttataggtgggagctaaacattgcctgcacctggacacaatgaaggggcaccacagaccctcaggactaatagagtaggaagcaggggcgggggtacaagggttgaaaaactaccctgagattctttgaatttcaggcagaaggcagcaactggagagatctttggtgtgtgaacttttatgtttgtgtgtctacatgattatgtgagtctttttgtgactgtgtttccatgagtgtgtgactgtatttgtgtgtttgtgtgtgcttgtgtgattctgagtgtgtctatgagtgtgtatgacatatgtgagtgtctgtgtgggtgagtagccatccacgtgtttatatgagagtgttttcatgattctgtttatgagtgactttgtatgtatacgtgtttgtgtgctttgtgagaatgtcaatgtgcatgtgcacccacgtgtgcaaaaaacccacacatttttgtaattgtgtttgtgtgtgtgtccctgcatttgtgtgagtgtgcatgtcttcgtgtgtccatgtgtttctatgagtgtgttttgtgattctgtctgtctttgtgttgatgtgtgtttgtgtaagtgtgtggttgcatttgtgtcagtgattctggagcaggtgagctgatcacaagtctgagccgagaatccatggagctcttttacaacagaagccgggaccctgtgcaaatccttctgaaatatccccggtttacagagctcctaggggtggggaagaaaaattccctgacttttcggcctcagggaaagagagagacaccccgctggccgtacacctctgctgtttctcagaaaacaggtggggtatcactctttcccaaatgacggtgattttaagaacggttcaccttttgaagagacgtttctgccctggcgatccatacatattgaacccaaatgaatattttttaattaaaaatttttatataaatatacattgtgcatactttatattaatatattgatataaatatattttattaatataaacatgatttttatagttcatataaatagttatatatagtgtatatgtaaaatatacttttatttgtgatacataattttatagattaaattttatatactaagcaaagttatatgtgatatatacatgccatataacatcatttatataatatatctttatgtaaataagtatataataaaattgatcttatatttgttaatacataattatgtatatatactatgtaaaaataaaattatatattgtatgtgcataatatttctataaatacacgcttatgtgtgtatttatacatgaatgcctgtgtttgtgtgagtacttcagtgagtgcgtgaatgtgtgtgtgtgcatgtgtgccagtgtttgtgtgagtgtaagagtgttgtacatttatacacacacattttgtcttctggttaataacaagatctatctttgatttaggatatgaagaattc

SEQ ID NO: 473695 - DNA, 635 bp, Homo sapiens
tgctctccgatgccgtagccactcgccatgagtgaccatggagcacttggaaagtgctaccaggtgcaacaggaagtgagcaaagtcaggcatctgagaagcaagtcacaagaaatggttgtcatggcaccagtgaagtctgagggctggagtgacatcttggggtatctgggacctgactcctgcaccccagtgccaggccctctggatcctaggggcttctgcaatatcttcagagacagagatgttgccccagatggctgggagctggcctggctctatcagtcaggccttagtgttgctacaagctggcctggcaccgacagccaggccatgatgttctcatgtgaaacacaatttcaccagtatcaacatcagacaaggccactccgtgaccatgatgaagacaaaaccaagactataatcgcacagacaaaacatattgtccacatcacaaaaattgcccaacatcattaatgagtaactgccccttctttaccaatggtagctttaggttcactccattcttcttactttctaggctagcagtgcctctggtagccactgtgcctaaatcataggtagaaaggaggaaaaaaggaaacagataacgagagagagaaatcaatggttgt

SEQ ID NO: 473696 - DNA, 1075 bp, Homo sapiens
aggagccattgaaggattttcagtagaagagagacacctgttccaatttgtgttttggaaaaaattctgcagacaatgtgggggtgtctaagagagaggaaaactggggtgggaatgatagaagggcatttcagagatcttcacagcagcccctcccatcacaggctcagagacctaggagagaaaaatggttttgtggaccaggctcagggccctgttgctctgtgcagtcctggaacacagcacccttatcccagctgctccagctccagcagtggaggccaaggtacagcttgggccattgcttcagagggtgaacctctgacaagatttcagaggatgtatggaaatgcctggatgtccaggcagaagtctgctgcaggggtggagcccttacgaagaacctctactcgggaagtgtggaaggaaaatgtggggtcagagcccctacacagagtccccactgcagcactacctagtagagctgtgaggagagggccaccatccttcagaccccagaatggtaggtctactggcagcttgcaccaggcacctggaaaagccacaggcactacatgctggtttataaaagcagctgcaggggctgtactctgcagagccacaggggtggagctgcccaaagccttgggtgcctaccctttgcaacaatatgacttgaatgtgagacatgaagtcaaaggagattttggagtgttgatatttaatggctgccctggaaagaccaattgtcctcacccaacccaggacatccacccaggaggagttatgctgctggttcttaccagaactctccaggattcaaatccaaacaaggaagacaacaggaacaccagggagatgagaaacaaggtgagtgagacatacatcacccatccttgcagcaatgggtttgctacctgggtggtggctaccaggatccagacccagaacccaaatatctggaagataaaagcataaaagaaggagcttcattagccagtatagagcatgtttccctttgcagggcatctcttttctgtctctagttaaaagctcaggtgaagttaggagggaa

SEQ ID NO: 473697 - DNA, 670 bp, Homo sapiens
agggctcccacagtgtgcgctgccaacctgctgcccgtgcagaaactctaggatcctgagaagagtttggcaggtcaatggagggtggaaaggatgagaggaactggggagagagacagagaagagggaaggaaaaggaagggagaaaagaggacattgtgtatctgagaacaggaaaggagcaagtggaatggaagaaggagagggaaggcagcagcttcaccctcgctagaacttttccttgctcatttcaattttcaagattttcccaagcttctaaacctacaaaatctaagcgacacacatttactggagaaatcacaaacagatcccagccctcctgtggacctctctgcatctgtgccctggatacctctttctcctttgtttctgtggatgaaacatctgtgttcctagctgaggatgatacctctacctgtcttcacccacccttctcacctactcaggaacattgctccagcaatttctcttctctcctcttcagcaccagcttttccctttctaccaaatcattcttatcagcacttaaaaatgctgtcgtttctctccatttaaaataaaccctcacctgtgtatcatgtagaactatcaataagaaaaatattaaaaaataagaaaataaagaaaaaagataaaatatatcctctgt

SEQ ID NO: 473698 - DNA, 1269 bp, Homo sapiens
agtgccacagtcttttcagagtgcctacggggacatcgtgatgacccagtctccagactccctggctgtgtctctgggcgagagggccaccatcaactgcaagtccagccagagtgttttatacagctccaacaataagaactacttagcttggtaccagcagaaaccaggacagcctcctaagctgctcatttactgggcatctacccgggaatccggggtccctgaccgattcagtggcagcggggcagaaacgacactcacgcagtctccagcattcatgtcagcgactccaggagacaaagtcaacatctcctgcaaagccagccaagacattgatgatgatatgaactggtaccaacagaaaccaggagaagctgctattttcattattcaagaagctactactctcgttcctggaatcccacctcgattcagtggcagcggcatgtatcagtaggccattcctttttatttttggatagtattccgctgtacggatatatcacattttatttatctattcacaggttgaggaacattgaggtcctttgcactttttggttatatgatgatcaacaatgctgctatgaatatttgcctgtaagtctttgtgtggacaccggttttgatttttctcagacagacctctacaagtggaaatgctgagccatatgataaatttctgtttattttttaaaaactgccaaactgttttcaagagtgtgcagcatttaacacttgcaccaacagtgtatgaagccttcttttctgtcacattctcaccaacttttgttattgtctgttttttaaattattaaaatcattatagtgtatatggaatggtgcctattgtgaatttaatttgatttttgttaatgactaataatgttgagcaccttttcatgtgattactgtctgttcatatatcttcttccataacatctatactaaaatattttgttcatttttaaattgggttgtcttatgacttatatattctggaaatatggcgtgtatcagataaatggtttataaataatttctctggtctgtggtttgtcttttcattttcttaatggtatcctttgaaatgcaaatgttttgaacattaatgaaacctaatatattagcattttctttcataagttgagcttttgatgttgtaactaagaaatatttggtgaacccagaaatggaaaagttttaacctaaagtttttataatttcagattttaggaatgggcagaagctggaaacattcccctt

SEQ ID NO: 473699 - DNA, 1105 bp, Homo sapiens
gcctctggctcgcctcctgcagcccctcatctccttctcttcatggaaatccatccttaagacagtcacctctcaatgctcgtctaccatgccaccagcccccaaggctttctcagccctcctccttttcctacgcatcaggctcgtggatttactccaacacaagattggcagattgacttcactcatatgccccatatctgtaaatttaaatatctcctggtttggattgacaccttcactggtcaaatcctccaagctgtctctcaagctcttgatattcagtggaaacttcataccccctaccatcctcagtcttcaggaaaggtagaaaggagtaatggtcttttaaaaacacacctcaccaagctcagcttccaacttaaaagggactggacagtatttctaccacttgcccttctcagaagtagagcctgccttcaagatgctacagggtacagtccatttaaacttttatatggacttactttcttgcttggccccaaccttgttccagacaccagccctctggacaactatcttccagtcctccagcaggctagacaggaaattcgcccgactgctaatcttctctttcctactccagattcccagccatatgaagacaccctagctgaacgatcagttcttgttaagggtctgagccctcaaactctacagcctcgatggactggaccctatctagtcatctatagcaccccaactgctgtccatctgcaggaccctccccattgggttcaccattccggaataaagctgtgtccatcggacagcaagcctgatctctcctcttcctcctggaagttgcaagtactctccactacttcccttaaactcactcacatttctgaaaacagtaataacccttatgaacctaatatgttccttcattctattaggtctattcatccttactctactttttgcaacagggctttacacagtcacccccactacttggactgtgccccaaaacttgtcatccctactatcttctgtctagtcatactcctattcaccattctcaactactcataaatgccctgctcttgtttatactgccggtttacactgtttctccaaa

SEQ ID NO: 473700 - DNA, 592 bp, Homo sapiens
ggccgggcaggggaggaagttatgtttttaaagagctcatttttagaaatacttgctggcagcacttgcagctacagtgtttacctcaaaaagaagaaggtgagaatgtggtcaacattccacaatgatactgtgattgaagtagacaacagaaatggagagaaaactaagaagtcatatgccactgtggactatagtcatccttgctctgatgatgtcatacctcttcacctgtatggaagacctttccccaagagatatcaccaacatcaggggagcgaaatccaactggtcactgcaaagtttgctgcttgtgcaaagacgagcctagcaagacaatctgaagagaaacgtgatatttttgtgtggaatgtgatattccgctttatgttgttctgtgctttgaaatttaccacacaaaaaattattaaatactgattatcatatacatttctgttatattaggattagagacaagttctgtttagaaataattccaagaacggattttatattttatttcacattgaaaatcagtcagatttgcttcagcctcaaagagtgtgtttatgtaaaattatatgaatgctgg

SEQ ID NO: 473701 - DNA, 620 bp, Homo sapiens
atagcattaggagatatacctaatgctaaatgacgagttaatgggtgcagcacaccagcatggcacatgtatatatattgaaatttgctatttcgtgcgcgctgtgttccctaccgccgcttgctcctgctcaggtggggtgagcctcctcccagccaattactggaaatttctgccaaggggcatcttggagcctctctcacccccgttctcaccaaatacaggcacttcctctgagaggacggcagagggcgcagatttagcttctgtcctgcgaatgaagcacgcagtacaaggttccaaactgcaagatgagataggcggtcagcacaagatacaggtcatgaagaccttgccgataaaacagtttgcagaaaagaagctggctaaatcctaccaaaaccaagatagccacaagagtgacctctggtcgtcctcactgctacactcccgccagtgccatgacagtttacagatgccatggcaacatcaggaactcccttgaatcctttgatgtgtcccctttaaactcctccccctcctgcctctgtccacccccaccagacatttctctttcccagcccttggctccctcagccatttcagtccccctgccccaa

SEQ ID NO: 473702 - DNA, 1894 bp, Homo sapiens
tgtgcatccttacctagaactcggactctctggggacctgggaacacgctttcagccagtgccacagtgatttgggtggggacttcctgcaccaagtgttacttggggccgtgaaaatttggttctccctctacagatttctgcatgaatccccagacagtgctgctcctgcgggtcatcgccgccttctgtttcctgggcatcctgtgtagtctctccgctttccttctggatgtctttgggccgaagcatcctgctctgaagatcactcgtcgctatgccttcgcccatatcctaacggttctgcagtgtgccaccgtcattggcttttcttattgggcttctgaactcatcttggcccagcagcagcagcataagaagtaccatggatcccaggtctatgtcaccttcgccgttagcttctacctggtggcaggagctggtggagcctcaatcctggccacggcagccaacctcctgcgccactaccccacagaggaagaggagcaggcgctggagctgctctcagagatggaagagaacgagccctacccggcggaatatgaggtcatcaaccagttccagccaccccctgcttacacaccctaatgccagccctgggctctcttcctcggcagcccctccctcaactctgcagctcctctcgcacccagaggagctcctttccccagcaggcctcactggtaggatcctgaccatcttctccaaaccttccccaggagagactctgcctttagggtcatccaagtatccctgctctcagaaccggaggtccactggttttctataatgtactctttccctcctgccacatcctgcccccttcacattcacgagtcattaccagccagggaaggtcatccaagtttcctccagcatgggcgatatctttgggaccgagactttccttggagagctgctgagagcggacagtcccaaaaacaagtgtcaaagggcccaagggaaaggggactgtgccctggaggctcacttcacagggatcagtgtttgctccacagctgtagctctgggctgacgccccccagaccccttccttctcggagtgacccgcccccaggccacctgctccggggagttctgtgcactttactctttggacttctcctcacgtgtgccctggttttatggggagagggaatcgctgttgggaaggcagagcagttgcaaccctctctgcccttgcttcatgtggctggagcccaggcaaggagagcaggagccagcgtgagactgaggccccctggtgcctatcaaggaccagagtgaaggggactacatctcccagcccttcaccttttaaatatgagtggttttaaaaggaaaaaaatgaaaccaggcaacagcaacaatattctgtttttaaaatagggacaagactgttgtcactttttagacatgtatcccattccttttggctctgcaatatttggggctgtagctccttccaagcccatggtagtccctccccgagtctctcccagtagaatgcagcctcccttccctggccccttccctctcagtgacggtgactccctggggccttctcctgagtgggacagcaacacagtgggtggtaaggggcttcataagatgtacaagatgagggagaggcccctccagccaaccctgtgtctaaagagtcaggctatggctgctgcacctgtgcatttatcatcagcaaggggcaagagtacaaagacatattccttctggctcccactgtgcaactgcagccccatctcttcctggtgggcagggtccactactcctgccaggatggtggctcctgcttcttgcctactggttccttggtgtacttttgctgtatcccttcatggaaacatttccttat

SEQ ID NO: 473703 - DNA, 1241 bp, Homo sapiens
ggagaggattaccccatactagggatccttctataagcatttctaatggagggtcctgccttgcggatctttggcttcaatatccgcttggcatcttgggctaatgcctggccaaatagatgggggctacccctgaatgcttgggtagcccctgcttttgctagaatgtctctccctaacaagggagtggggcgttcaggcataattagaaaagcatgtgaaaagagtaaagttccccagtcacaacttagtggctgggagaagtatctagtgactggttgtcctaggacccctcagatagtgacagatctggaggacaggacaggagatggtcaagcataccccgggctctgtgagggtgatggcatgggctggcacttgccccgggcaccctcagtcctgctgcttggatcatctgacccagttccaattgttaaagtactgggtcatcagttctaaggccctggccaaggagccaaggcttagagattgcattgcagagggatatgttttgaaaatattttctccagttccaggcttgccttttcattgtcttacttgtgtctgaagaatacaaatatttgattttgatgatgttcagtgcatcaaaaaaaaaattttaatggtttgtgtcctatctaagaaatctttgcttatccaaacataacagaggtctatgttttcctttagaaatgttatggttttcatttttacacttatatcaatgatacatattgagctaatttttatatatgatatcagaaaatttagattatagtccccttgttactatttcaatctatgttttttgttgttgtttttgttgcaagtacttggaatccactcaaagtagtttaagcataaatatggaatcgaatttgaaagatccaggagtgtctcaagaagctcagaattcacaggcaggaaaggcacttgcgcatcataaggtggtagaaaaaggaactgaaaaggcattgggagctgtggccatgagagtgcactgctcacatctctgaatgcaggggagcgtaacatggccccctgctgctgggctatgaaattctgccactgcatttgcactgagaccacccttcttgtgagctgctcccacccggtgactgagtgcaggcctgccatactaaggcaggcccatttctgggatatggggactcctctgacaggtggctttggcacaagcacacctcatcagctcttgcagagctttcttagaactacactac

SEQ ID NO: 473704 - DNA, 1937 bp, Homo sapiens
aacaacagacctgctttcaccccagcagggctgggtctgtgcccagggacctcctctgagaggacagcctgagagggcagggacttggctacctcgtctgtacctgtgctcctcgccctctggcagagcctggcccggagcagctgcccagtaaatatttgttggagaagttctcttcaaagtgggtgggcagaactccttgccccagttgtcctctgactcctgctcagaggcctgatggaaggagggtggactctgccctgtgtcctgcctgctctcaccccatgctttcatgggctccaggactctcccatggagagcttcagcaggccctctccagtgtggagctagtaggggaaggttctcaggcagctgtgtcaaatgtgccacatgtgagcctatgcccttcttgctgtgcccattccagacatcagtaatgggccccagagctctctccatgactagagacgaagttgcagggagtcccaggtggaaaacaattgctggtgtgaaagatgaaactgtttgtccctcagatctgtggagaaccccagccttgtccttgatgggtgcaggggaaagggctgcccaccctggtgtgaggggtgtcatccagggcagtaaagagggccatctccggagacctctaggattcctgtgctgctgctgcagctgttaccccctggatctggtaagggcacgggtcttctggagccctgctgcacacccagcacccttgtgtcctgagaatgtcttagaaacccagtcagtggagggcgggagacaggaccccgttgagtgcaggcaaaaggaaccaggtttccaagagcctgcttggaggaagagaacaacgtggtgctttgaatttgatttctagcccttctgttctgcaaatgaagaaatctggcccaggtggtttagggatgtatcccaggtcctgtgtctgatgatgcttggagccactctagagcccaggaacactgggaactcatctagcttcgtagcaaccctacaaggttagagccacagttatctattttatcaatgagagaatcagggcacagagagagagccctgaaggcttggtggcagcctctgaggttgatgggatctttaggcagaaggtggctgccacctagctatcaacccagaaagaggcctggcaatggtgggagcctcagaagtgagccccatccctcatctagaagctgcaggtcttggggctaatcagggctcactgccacactgggactacagagagcccaggtccaggcctggcctgctctgcccagcagccgccagtcctggaccccctctcctgcagggcctttctgttttctctgagggaatttggggcaactataagtaaagccaataggaacgttcatacatatgtcttttggtgcacagaagctttcatttcttttgggtaaatatctagaagtggagttactaggtcatacgataagcaaatatttagctttcgtggatattcaatcttccaaagtgagcctaccaatgaacacttccaccgccagtgtttgagagttccggttgctccacatcctcgccagcatttggtgttattggtcttcttgcttttggtcattctggttcatccacgttgcagcaggtatcagtacttcattcctttttgcaatgaaatgtggatagaccacattttgtttatctgttcagcagcgagtgtgaagtagtatctcattgtgattttaatttgcatttccctaacaaacagtgatgttaaacatcttttcatgtgctgtttggccattcatatattgtctttggagaaatgcctattcaggtcctttgcccagtttttcagttgggttctttgtctttttgttattgagttgaaagagttctttatgtattctggatactagatccttatcaggtgtgtaagtatttgattt

SEQ ID NO: 473705 - DNA, 759 bp, Homo sapiens
acttctgcagacttaaaacgtccctgtctgacagctcggaagagagcagtggttctcccagcatggcgttcgagctctgagaacagacagactacctcctcaagtgggtccctgaccgctgtgtagcctgactgggagacacctcccagtaggagccaacagacacctcacacaggcaggtgccgctctgggatgatgcttccagaggaaggatcaggcagcaatatttgctgttctacagcctccccttgtgatacccaggcaaacagcatcaacatcaacaaaaaggacatccacaccaaaaccccatctgtaggtcaccaacatcaaagaccaaaggtagataaaacaacaaacatggagagaaaccagagcaggaaagctgaaaattccaaaaatcagagcgcctcttctccaaaggatcgcagctgctcaccagcaacggaacaaaactggacagagaatgactttaatgagttgacagaagtaggcttcagaaagtcagtagtaacaaacttctctgagctaaagaatattctaacccattgcaaggaagctaaaaaccttgaaaaaagattagacaaatggctaactagaataaacagtgtagagaagatcttaaatgacttgatggagctgaaaagcagggcacgagaacttcatgacgcatgcacaagcttcagtagccgattcgatcaagtggaagaaagggtatcagtgattgaagatgagttgaatgaaatgaagtgagaagagttt

SEQ ID NO: 473706 - DNA, 901 bp, Homo sapiens
ctggcctggaatgcaccaactgggcagccctccaagcccagccaccgcccctaggccttcatgcccctccacctctagctctgggggccccaggagtcaatgcccacttcagctccagccaacatggcctgggatctggtctgatctaggctctgacctcagctctgcccctagctggctgcgtggccttggaaagctcacttctcctctctgcctcaggcaagccctgctcctcagcctcactcaggactgcggaaaaatgcatgttcttgggcccttgctcaatgaggaagcccagggaatcctgtgggtgttggcaggtcctgtgggagatggtgtggtgacagcacttggccataccttacaggactccaaagggggaaacaagctctcagcgagtgcacagtatgggaataggctcctgctgcaccacactgtccctgctctcttcaacccaggtgggatccctggcccagacaggaaaaaggacatccaagcagatgacacggacccggaatgtgggagcaccaggggtttgctctgggccaaacacccctggacacccctgctcctctgcccccacccactctttacttcttctttccctcccaataccacaagtccccacgccatggcagagacaggagcctgcgtggccagcaagcccagcgaagggggctcaggtgtcatctccacccccagcagaggagggagaacacccccagccagctttgcagctcccccatttctccctctcccgctgctgctactggttcaaaagataaaataaaaaccctctgcatcaacaaataaaataaaatcacaataaaaaatttatattcctgggatgtaggtctttccaaacaggagcagctgctgccagagctgagtttggcagaag

SEQ ID NO: 473707 - DNA, 716 bp, Homo sapiens
cgggcctgtgccaggtctggctggaaaagcccaggcagacggttgcatggcctgcagagcccagaggcccccactgtgctggaggagtgccaaagagcacatggttcacctctctgttccagaccacaatactgactctaccaaggaagttcagaggaacagcgtgaactggggataccatcgagggctccagacaccaaacctgcaacaggaggtagatgtacaacctgcattgacagacacagggccgtcagctctgagggcaaatgccccttgcatggcttgtcaagaaataaaattttctcccacctcagaactaggggatctttatgtcttcacaagagcctgtgaccagacctacacactttcaggggcagacactgtggttgcaagcaaagagaaacactttggctatggagctctaggttcgagggctgggctttatgatcagacctgggttagaatccggactctcacaccttctagatatgtgacctttgtcagtgacagcatctctgctacagactctaaagcggttgtgcataatgggtcagggagatgacaagacacgatgttcagtgcagaacctgaatatttattcatttaggtatacagtttgctgatgatgttctgtgtgtggactcccatcttcagagaagccagctgtgatttcaactatacatatttgtgtgtgaatatataaatgtatgtatata

SEQ ID NO: 473708 - DNA, 546 bp, Homo sapiens
tcctgcccacgagcttcccggagtttaatgcaactctcaccactgtgcttatacatgtgtgaaattctgggctcagcactcccgagaaaccttcttagatcacccccttccaccaagtcccctttctttcctatgggtttctgtgcaggcacgtcattctttggtaacatcctgcctggcatgaccatcatcctgattcataagaatgcccagcgcaaggagactgctcaatacatgttagttgtccccttctcctgctcctctttgtatcatcatcatcatcatcatcatcatcatcattatcatcatcgtcatcatcaccacccgcatttagagctgtccaggaatggagccaactcttcacaaagcagtagacttcatgtttctagaagaacactcaacccaaatggtactggggacatagcagaagtgtctgctttggcgagctttcttgaagtataattttatgcaataactttcatccattttaaatatactgtttgaatttcatataaatagaatctaacagtatacagttttttatgt

SEQ ID NO: 473709 - DNA, 521 bp, Homo sapiens
cctggaagaaacctgacagagaggatgggaaggggagaaacagaagagtgtgacgaggtgggtgtccaagggcagtgggacaggctgtccgggtgggagagtggacttgaggaagtagctgcaggcccagactacttcagccacaccctgatcccctgggaccctcagggcacagaaggcagtgctggctccaacctcagtccaaggagctgtggaagcctcagaggcccttggcagagggaaggaggaaggggaaaagagcaggaaggagcaagagagaaagcagggcagactcaccccttttatcagaaacctgctccttcaataactaactcccatgataacatcattaatccattaatgaggacaggcccaataacccttaaatatccatcctcttaacactgttgcattggagattaagttaccaacatttgaactctgggggacacattcagaccatagcagtcagttataaaagtgtgatttatgttttttcctagtttcataagcataagatg

SEQ ID NO: 473710 - DNA, 1351 bp, Homo sapiens
caataacagcacagtgtgaacatacgtgatgtgtccaagacacacagagccatggaatctcacaggtatctcagaattcctcctcctgggactctcagaggatccagaactgcagcccgtcctccctgggctgtccctgtccatgtacctggtcacggtgctgaggaacctgctcatcatcctggctgtcagctctgactcccacctccacacccccatgtgcttcttcctctccaacctgtgctgggctgacatcggtttcacctcggccatggttcccaagatgattgtggacatgcagtcgcatagcagagtcatctcttatgcgggctgcctgacacagatgtctttctttgtcctttttgcatgtatagaagacatgctcctgacagtgatggcctatgaccgatttgtggccatctgtcaccccctgcactacccagtcatcatgaatcctcaccttggtgtcttcttagttttggtgtcctttttcctcagcctgttggattcccagctgcacagttggattgtgttacaattcaccttcttcaagaatgtggaaatctccaattttgtctgtgacccatctcaacttctcaaccttgcctgttctgacagtgtcatcaatagcatattcatatatttagatagtattatgtttggttttcttcccatttcagggatccttttgtcttacgctaacaatgtcccctccattctaagaatttcatcatcagataggaagtctaaagccttctccacctgtggctctcacctggcagttgtttgcttattttatggaacaggcattggcgtgtacctgacttcagctgtgtcaccaccccccaggaatggtgtggtggcatcagtgatgtacgctgtggtcacccccatgctgaaccctttcatctacagcctgagaaatagggacattcaaagtgccctgtggaggctgcgcagcagaacagtcgaatctcatgatctgttatctcaagatctgctccatcctttttcttgtgtgggtgagaaaggtcaaccacattaaatctctacatctgcaaatcctgccccttagtcacattattgttgttgcttgatggcttttattcatttccacatttcctatgtgaatattcctttcttcattttgcctttaactggaatggtacatctccaacattaccctatgagaaagtggtgtagcctttgatcaaaatttaaatcagctaaccaagaaaccattgctttctaaacaactacggtaatttaatcgaaaattatatttgggtatatttactgttctaggcaccatcaactttaaaatatgatgtttaatacattatccttataa

SEQ ID NO: 473711 - DNA, 572 bp, Homo sapiens
caaagaaaggaagactttgctggacaatgctgccaggacatgcaaatgtcacctgcatatgtcactgctctcagcttagtgacacatgctgtctgactcccacattacatttgtccagtttttcagaaaaaagctacaaaagaagcttattagaggggaatattccctgtgagaagcccgacttcaacaccaatgtggcactcaaaaagctggctttcctagccagacagaccagacctcagaatatcaacagctcagacaatatctgtgtgctccacgaggagactaaggagctcttcttaggagcaactgcatctgcaggaactggaaagagaagcaaaagagcttttccaacaactacaagacagtcaagtgagaatgacccaacatttagaaaggatgaaagacatgtacagagagctgtgggagacgtgccacatgcctgacgtggagctgctccaggtgaggagggagggtccatccccaaagaaaggaagcctttgctggacaatgctgccaggacatgcaaatgtcaccttcatatgtcactgctctaagctaagtgacacatg

SEQ ID NO: 473712 - DNA, 632 bp, Homo sapiens
tggtgatgttgaagacggtgatagtgatggtgattatggtgatgttgatgatggtggtgatggtgatgataatgttgaagatgatgatggtgatgatgtttggtaatggtcatggtgatgttaaagatggtgatggtgatgacgatggtgatgttgaagatggtgatgttgatgttggtgatgttgatgatgatgatggtgatggtgatgttgaagatgctgatggtgatattgaagacagtgatggtgatgttaatgatggtgatgttgaagatggtgatgttgatgttggagatgctgatggtgatgttgaagaggatgatggtgatgatgatggtgatgttgaagatggtgatggtgatgttgaagatggtgatgttgatgttggtgatgttgatgatgatgatggtgatgaggatgatggtgatgttaatggtggtgatgttgaagatggtgatgttgatgttggagatgctgatgttggagatgctgatgttggagatgctgatggtaatgttgaagaggatgatggtgatagtgacgttgatgatagtgatgttgaagatggtgatggtgatgttgaggaagatagccaaccttaattgaaatagtaagaaaattatttttaaaga

SEQ ID NO: 473713 - DNA, 1686 bp, Homo sapiens
tgaacaggtttgttgaccaaggtatcgttcccgtgccacagtgatccagtggtgtcacatcactatggcaattgctgcccagggcaggaatgcagagcagctgggttctacgctgtgcctgtgtcccgtacacgcaggtgacagacccttaggtaagttagcagctctacttgcctggcctgcaaggcagtgcggagctgggagtgtagccacggtggcctcttactcctgtgctgcttgcgggcagctggggctgaggccacctcccggagcattttcaggccctgagaggacacagaggcctgaaaccttttcctgcgtggcctgcagcagtttagacctgtgtcaagatctgtcagaactgggatgtcttacaactggtgtaggggaaggcagtcacaggtacaggctgagtgccatggctggaggccagatgggaacatcaccatgctggtgggtaccagcaagaagagatgaggatagcaaagaatcaggcaggatccctacaattctgaagatgcccggtggacagatggaggctgaggacccgaggcctcccccgacgggagggagcatagatgacatgcctcctctgggtgaaggggagactctaactttgaccaaatttaccatgaatccattaggcaagctctgatctgactatgtttctatgaattgaaaaacattttcctttagaggacagaaggaagatttgagtttctattgagacagatactcagttcagttgcagaaaagtaaagagagttacagtttctgaaaacctgagtgtggagtaagaaatattaagaaatatcatacccatttcaacaccaattcaatactgaattttaaacagatatttggagtagaagagacacagccaaatgcttgaatttcatttgaaaacctttaagatacatgattagcatagcctcacaattgtaatctgtgtgaggctgaatttatctcattttcctttgaaccctaaatttaaaaaatttatttattggttaaaatgcctattaatggttgctgtccctaagtggtttcaaaactcccagtgggaaggacaacagccctctcagaggcagagtggcctctctctgtgagaaatattcacctacaggtatgcttttctggcttgctttatcgctggctttgcaacttggagatgtaacgtagcttgaaatcaaccgtatgtgtattgtatttatatacatgtgtagatacagggaggataaagtcacataaaatgtcttctttgacctcaaagggcttaaagtttattgttttgcaaatagcgtatcgatattttgctcaacacatttatgtcattagagtaaaattaaagcaaaatgataaaaagatcattgaatattatgtacaacatgatattttaaaatatgtatacactgtggaatggttaactcaagctattagcatgcgttacctcacatacttaccattttgtggtgagaacacttaaaatgcactctctgcattttcaagaatataatacattgttatgaactacagttaccatgttgcacaatagatctcttgaacatattcctcctatctaactgaaattttgcatcctctgaccaacagctctcccctacatcccagttgcaagacattccagttctgccagctcttgacacaggtctaaactgctgcgggcca

SEQ ID NO: 473714 - DNA, 586 bp, Homo sapiens
atttcatgcggtaaaaagtgttctgatgtcagagtctgagaaagccttctgctctcctcagcaggtaggggaagtaatgaagaccaagcagttccattgcaagagttgctggcatctaggttggtgcataatgagactagggttgtggctttggtccccaaccactacctcctggttcttcacccaccaccctggctgcccctcttacaaaggaaacatcttttgtaagcatctttctgtctttccccttcatgttactggaactctcctacagcctgctctggggaccaattttatgctgagggcaggagctgctggctctgacgcggctggggcgcaaaccctgcggcccgtgcacacggggccggacccgtcgccagcgccagtgcgccggccaggggcaatgtctgtgttactcttgctgtgtctcacagaaggtattcctgacttctggagccacctgctgccctagtcgctgacatcccaggggactatttcacctcttgtattagtccattttcacactgctgataaagacgtacttgagactgggtaatttataaagaaaaaaaggtttgacggactc

SEQ ID NO: 473715 - DNA, 596 bp, Homo sapiens
tgaagccgtggaccttcatggtgagtgttacagctcttaaagatggtttgtctgtaatttgttccttcagatgttcggatgtgtccggagtttcttccttccagaaccagccatctggatgtgtacgtgcaggtcacaggggatatgaaggcttagcttgggctcagaggcctgacactgatgacatgtgcccactgtggtcaggccacagcttggttttatacattttagggagacacgagacatcattcaatatgtgtaagaagtacattggttctctccagaaagaaggggaaatattatgtgaaacaggggagaaaatgaagacagacgaaagaagaacaaggaagtcctcagaggaggaggtctacaccagtctcaaacagctgccccagcatcacctggagggcttcttagaacagtctgcaggtccatccccagaggaagtctggggtgagtccaatgataatttacattattaacaaattccaaaacctttgctgaagctattgttcccggaaccaggcatgggaacaggttggagttaagaatacatgaaactgcagaggtgttcatgaggtctttctctcttgtct

SEQ ID NO: 473716 - DNA, 1134 bp, Homo sapiens
atactacctgatggtcatcaccaagcactcagtatgccagacactttctacaccttcactcatttaggactccccccagcttttgtgaggcaggcgttgtcattcccattgccagatgtagaaaatgaagctcaaagagataaaataccaaagttcacagctgagggctatcacattacaacagaagagtcagaaccctcccagaggaggatgcaggaagaagactgggatggaatcaggcggctctcacatgccctggctctaggctctctttcttcctcaaatctggagggaaatgtcagagcccatgagcccatagtgccttgtgtttacttccctttagagcagggctttggccccaatccttccaaggttgaattgtcccaggaacaaagatcctggcttcctgtagcagcatccttgaccttccctagctgcctgaaaagcacatgcaaaggagcccgagcaaagcgaccacatttcccattcccacgcccttattctctgggggttagaaacattcccttcactcctcccatcctgcagtgtaagaccacaggcagcaggagtgtggtgcatcaacccacagggcagcaaggatggacagaggttctggggctgtgattgtctcatgagctgccctggcttgacagatgggacactggcaaatgaagcctccctgctccttgcttggatacccacacactgagccctgggtcccctgcccactccttctctcaacagctgtgccatacattggcagcttcggagatgatgcagagccttcagtgtgagtgaatactgggaatcatttctatgaatggggtatattatgcagtggtccccacatttatttgaagatagaatcttggttttgtttttggctttgtatgtgtgtgtttgtttttggagggacaatatgtgaacttgtgagactagaataggctggaacacactctggaaaatgctgacttattaaaaaaaatagaggcatgtctggaatttaaagaattttggatatctcttcatcaaatatttgctaagtacttaaatcactgagaaatggcatgaggccccacacaagggagctctaaaatccagtgccccttcagagcagcaatgctcctaattgcc

SEQ ID NO: 473717 - DNA, 637 bp, Homo sapiens
gacagccacagaggttcctggctgcatcgcttcctctggcacaccttcatccatttcctcacagccactttcgtcacttacgtcatgagttcacctgcactaagttcccctggctgcatacccagaatctctccagtggtagcagggtcaacattcccaggggtggaatctgaggagaccaagtacagatcaggactttcatccctgacaggtgataaggaagtccccacaccctgtggtagcagtggagaccacatagggaacccagacttggactcacatccagaaaaacaaagcctccctacccttccctgctggtggggtatcagaggaggcctaccagagagtcagaacttctgcccgtgcccagtggaaacaacgccacctcccacccccatggtgtcaatggaggccacaaaggaagcaaagacagagtccctgggagccctgtgggaaggagacaccacttcgctgtgggaagtctcaccatcgctgtcgtgccaggagccgttggagtgtccccttctctaaagccatgtcaagcacagtaagaataaatagaggggaagtggaaccgtgagaacatgctcttaaaccctattttacagtattcctttgttaaatgaaatgaaagcaa

SEQ ID NO: 473718 - DNA, 767 bp, Homo sapiens
ggaaacgggagagcagtcattcactacccatctcctcagcagcaaatgacaagcatgagtcctttgccacagactgatcagaggcccctgaacctatctctgcggcagctgtggaggtccttggaccctcccctgcttcatccggggctcgtcattgccagggtcaagtcaaccatttcacctttgaaaaattctgccctctttgctgcgactgactatggtgggactgggctgtcagatattgaacaaaattcctatgatcaaggcatattacgcatgtgtgggtgtgtttggctgtgtggaaaaatctgctccgtgcctctcccctggtttctggaggatgagtggtcttttgtgttctttggcttgaagaagcatcaccctgatctctacctttatcttcacttggcgttctccctgtggaagtcactctggcttaagtcactacctgctgctttccagaaagccaaagaagcaacctatctaggactctttctcaaacagccaagatgccagtcttcctgctgtgaactctttgtccctctcagcagcccccactgaggagacaatcactgacccacagatgagcaataagctcatctgtgagtaaagaggtcagtaggatgagctgaaaatgccacacctggggggtgggaaatgagttcaaatgaggcagaaaataaatggaagagtcaacatagccttccagaaaactcagaaaacttgaagcctcaggttcatttttccgacctgcccatgatgtttct

SEQ ID NO: 473719 - DNA, 626 bp, Homo sapiens
ttttcagcttgccagcagttggttggttggtcttcatgagggatggtgctttataggggactcactgttggtttctgttgccaggactttggtcattctgcagtggcaggtctagaggtgttggtcactggatgtagatgtaaggccttctccattgcggggtgtggcataatacctaaaatgaagcctccactgttacgtgctgccttgacagctggtaaaattgggagagctgcaagtggcctaattccaacttcccatcctcattcaactcccatggataaggtccgccaaccaaactcccagccttatcaaaggccccagacacagttcctgctggtcctgagcaccaggtctcagttccctgccagcccatggaatatgtcaaacatgacaatcacatctttgtgtgggagccaggggtcacctcactgtcttgacactgcacagcctctggtggttcactctgttcccaaatgcaaattctgtgtagccctgcatggcgtgcagtgtctcctcccccaagctccattctagttgttttcaatggagagttgctctaatacaagttaaacttttggagccagagtagaaatctagctcatgcagcatttcttgaatattta

SEQ ID NO: 473720 - DNA, 458 bp, Homo sapiens
tcctatcccagccttccagtcactcaagtagtttgaggctgccatgagctatgattgtgctgcagcaaaccaaaaaccccaagccaaaaaaatttccaggttatatttcatccaagttgtgggaaataaatgcgaaacagttcatctagtattcatctacacttgtatcttcactttctgtactgctgttgattatatacttggtgagaaatacagttacaaggtcaaagatcaggaagaagacgtccctcatgtggtcaggctaggggagtgggacttctcacgccgcagttcaggactccaagataaagtctgctccatcaccccttcctcatgtcatgccctcctccccgggcctgcagttacttcagatggaatgcagaatagaggtgcgtttggagaattgcagttcactagcatgggggcacagggctgtgaggggctgactcagtgatggt

SEQ ID NO: 473721 - DNA, 1099 bp, Homo sapiens
ggaaaaaaggaagataaccataaggtttgactgcctgcagggttgggcagaatagagccatagttttcttctcacagaaagcctatacatggatgtgtgaataggagaaatatcgctgaattcttttcccagcatggagtaatcctggggaagctgataatgagacagccaaatggctaggcagataaaaaggggtccccagagagtctcccacctgccccacagtttacatcagatacttttgtgcagattagggaacctgcccagggcttttctgggcatgcccatagtgcactggagcccaacgtgtgcactgggggaactgggtggagccatggggaatgcctgccttatgcaggggaggagcctgccctcttcagctcctgtggtgacctgggaatcaatctgcgaggtggagggctgtaaattctgctactcacctttctatgtgtctgcgagtctaatctttcctggtcaagagagatatcaccgtggtaagcaatgcaggtttgatagcaacaccagctcagacggtaattccacaggacgtaccggtacctcagtcacatctttgtcatgttcgaagctgctaggaaaggctagcagaagactcaccagaaaggttctgaagatacaaacaaagagcctgaaatgttggaaactttagggtcaagcattggtattagagccttggaaagagaatagagttgtcagtcaatttacattacactggaaactataataaattgggcaaatgcaatgcaaagaaaactgctgacagcagatatgttcctaaaatgtatgtagaatgatgtagttgttaatttaattagttgcttaaagccagacaatttctttccaaaaattctggcctgtcaaaagttaacgatcatctttcttaatctagcaaattaaatatgacactgaatgactttaaataacactgacacttccataggaatgttgatatgaagcatggtatttaattttttatgtaaaatatgaatgcacagaaagacatgaatgatgcatagtatgaaaacatgattcaaaaataaaaatatgactggtgaaataaaaactttagagaaatgtcact

SEQ ID NO: 473722 - DNA, 791 bp, Homo sapiens
agaaggaatttcacaagggtacatgtgcataatgtgcaggttagttacatacgtatacatgtgccatgctggtgcgctgcacccactaactcgtcatctagcattagactgggcagccgggcagaggtgccccccacctcccggacggggcagctggccaggtgggggctgccccccactcccggatggcagctgccgggcggagatgctcctcacttcccggaccgggcggctgctgggcggaggggctcctcacttcccagagggggccgccggtcagagacgctcctcacctcccaacctcccagacggggtggcggcggggcagagacactcctcagttcccagacggggtcgcggccgggcagaggcgctcttcacatctcagacggggcggcggggcagaggccctccccacatcccagaccatgggcagccgggcagagacgctccttacttcctagacggggtggcagccgggcagaggctgcaatctcggcactttgggaggccaaggcaggcggctgggaggtgcagcgatgcagctgaagacaagtgcagaatacgtcaagcaggacaaagtaattggggatgaatagtcccgtgtgattaattacattgttaaagcaagcctgaaatcaccagtaaaattatctaaacctacggttttatttctgaataagcttttttttttttaaatcaaattcctaaatgaatacaggactcttctgattttctctttcatattgtgctctggtatagggtttatttaaattatatttttatagaaa

SEQ ID NO: 473723 - DNA, 696 bp, Homo sapiens
tacacaaattctctctcatcaccatatggccactgctggaggatgggggggattggccttggcaattcaaaactgtcttttttaccctttcgtgtattttctattaatctctcttccatttggtcatcctgtgaatctgaagcctcctttctttctctaactttatttcaattcaggggtacatgtgcagatttgttaacgggtatatcacatgatgctgagatccggagtacaaacgattccatcacccagaaaataatgaagattaaatataaaaacactctcttgatcagcatcctagcagcagtgaacagaaacttggatgtggaaggtttccaaaataacccatacatcttcctcctttgccttacggtgcttcctcctcattcaaagtgtgaatctcatgggaactctgaaataaacattctgaatgctgagctgtgtctcagggtctccctggaggacccacacagcttcaatataaagcacattgcatgtgtattggtgattccattacattagcatacttcaaaagatatataacagaaatcaaagaagtaaactggtcttcacactaataaccttataggttgtggacatataaagataaaatttccacgaaatcaaatgtgaggctctacaaaactattaagaaaataaattatttaaggtttttcttccttacagtgtttcaaa

SEQ ID NO: 473724 - DNA, 628 bp, Homo sapiens
gggtttgccaccgctgcccacaggctcaccatggcctgagtaaatgctcgcactgctcatacatccatttttaaaaattgggataagtatggatggggaggctggaaaaagggcatccttccccatgcggtccccagagccaccctctccaagcaggacttggggaacatccttctccatctgggacctgaaggatgtccttctccacccaggacttgggaggtgtcttatccacccaggacttgagggggatcctattccattcaggagtgggggaaattcttcttcatctggacttggggggcatccttctccatttaggacttggggggcatctttcttcatccaggactggggggactggggggcatccttctccatccagtattgggggtcatcctcctccatccaggacctgaggggtgtccttttctgcgcttccttggatggcaggctttcctatgcagtcattcagaaagtcaggctgacacatgttgtcgtcttgaactctggaatctcatctctattctaggtgaatcccttcatgtttatagtgatttaccattaaatcactgtgcatacatgcttatgattattaggttttctaagcaaatcgactcattagcat

SEQ ID NO: 473725 - DNA, 563 bp, Homo sapiens
aaactgggctgttcgtaacagtggatcaaggtggacctctccgtcaagatggctcctgttcttgccacagtgcgtgcgggcatgggtgctacagaatcactgcccgttagaacccagggatcaccgggattctctaagcttgattgctgtttgagatgtgagaacactcaggctcagaggggcatggcctcttcagaccctcaggctgggtctgacatccccaccagcaaagagcctctgtgtccagcctgcagatctttggcccaagcaaatgttgccatcatgggaataactcccggatttccaaaggctctatcagtcactgcgtgggagccaattctgcccggagatgctgcctccaggaggcaagttattacaacgcaagccagatatgaatatttaacctatctgatgctaaatgatttaacaggtgcctctgcagtgtctgaggaaatgtgttccttcagggcctaataaaaataggcattgtttccacgttagtgtgtaagaatagaaataaagacttctattcaaactaggttagtgtcatttgcatcagggat

SEQ ID NO: 473726 - DNA, 518 bp, Homo sapiens
ttcgcgtaagttcctctgaggatctacaacccgcatttttttatttatctctgtgaaggatgctgcagaatccgcaatgagacatgaaggttctgctgaaagttggttctctcaggcccctggagagctggacacagcagcattccgagaagtgcagggactgaggcagggccctcaaggatgtcctgggaggaccaggagggaagagaaaggaaggaccaccagtgggagtgggcagacgacaagggaaaggagacatacggggaagaaggagaaggcaaaggaggcacagaaagaaaatcttaaacccagatcagtactgtggtctccaagcaacaccacaggccttaccacctggacccttagagataaagttcctctgagtctccatccatctccagccatcacagggcccagagcccttcatgaggccagcgcgagacaggtcatccatcattcctggccaatgtatgggtgtgcagatgctccggtgtgaaaggacctggctaccttccttc

SEQ ID NO: 473727 - DNA, 557 bp, Homo sapiens
gcttcagtttagtcccctgtaaaatgggagtagtaacagcacctgcctcacagagacgccctccgtcagtgcctgtgggagacctggggcactttctctccaagcagaggcacagattgtgcaaatgcattgggtctcaggggcagacacatgtgctagaagtacaggagcaacgcagggcctgggaaagcagaatatgggaacaaatcagttacatttttggggggattctacctattccaagggcggtacagtattctttacattatttaaacttgacaatgatttataaaataaacattattatccttattatcaaggtgaaggaaatggagaaagaacctgcaactgtagcccatctggattccaagctttgcagaatggattctgtgaatgttaggtatctaatggctttccctcagtttcttcgtttgtcaagcgaccttaaaaataatttcccagcctgttctacaggacgtgtttaaaagtgtctggcaagtggttaaaataaatccgtaaactcttctctgcatatttttctctgtatttggagagct

SEQ ID NO: 473728 - DNA, 678 bp, Homo sapiens
gtttacaacagcaaacgccaggaggcccggcctcacttccactgtcatccagtggccaacaccagccaggacggccggaaactcagtctcgtgtccaggtctaatgagcagtgaggtgtctctgccacagtctgcaaactcccctgtcctctgtactccgtgagaatgggaagaaaagtgcagccctctcctccagtctccgtagcatctcaggctctaaggcaaagcgccaaaagccatgaaaagcagtgtgctacagaaacaatgactggtgtgggaatattttttttaaatatccaggcattgtcaatgctgcaactggaagcccagagagacataaagctgtcccggttcaaaaccaagagggatgaggccaagagcagaggcgaagcaggagcgcggatgcagagacaacagggagcaggaacacccacgtggtgtctggtagaccagggctttgaggaagatggacatgagaaggaaaactctaaacagagagatgcatgctatcatccagctgggggcaaacggcaatgtggaaaccaaggagggagtgacaggaggtgttatgtggtgaaaggaccccatgaccgggttgctggggccagtccagagcagtgaggacaaggatgaactggtgtggagtagcatgatcagttgtattactctgtaagggac

SEQ ID NO: 473729 - DNA, 491 bp, Homo sapiens
ctctactgctggcattagcaatttgaaatacagatcagtaatgccattattttacatcaaattctttcttctgaggagacaagaattgagattgctgcagacccatacggatttaccaccagtaataatttcttctgtcaaaaataagcggagctccttagcaggcattgaagaatgtagaactcgagagttgtcttggttgctctcaaaaggaatcctggaagaagaactggatgcatcttggtcctctgtgagaaacataaataaagggttcaacttcatggaccgagcacttgcacatcctctgagaattcaccgcattcctccctgcatgcttcctttcttggcaaatgcgtttccctgggaccttttagtacatttcttaagtcctggagttaggctttacccaataatgtttggacaagcagtcagaaagagccaccactaggcagggttttctctataaagtcaacttcctgctggaataactt

SEQ ID NO: 473730 - DNA, 550 bp, Homo sapiens
cgtatgactttggacaagcaaacaggaatggtaagagaatttttcaaggaagcaaaaacgcagagaaaactgagattactactactactagctggctatgtgcccggccctgagcaagagctcatcacacaaaacacttgcttcttcaaaagacagctagaggctgactactatcgttacccgcaacacctgctacagataggaagagaaagagggaaagaggctctcctggaggtgttaccttcactgcctgtggctggggtagcggtgacacaagcactcccttggctgtcccagctgtcccataatcactgcactctctctcccccaagcttacagattctctctccacacaatgtggctgctgccaggaaatgggcaagggctggtgtggacaattcaagactttcttaccctcctcagtgtctctttcctttatatgatgttaagaacaggtatatcatcctgtaacactccgaacacgattgtacgttacactgggcatttcgatgctatgatttcagtgtcgtggtcatattactccatttcc

SEQ ID NO: 473731 - DNA, 821 bp, Homo sapiens
cgtgctaacgtccacttacgtggccacaaccttcacccatgcaacgcagttgctttggctttgaaaatgggatgacggcagtctggcaggtgagaactcttctcattgtctaccaggtaaagcaaaattataaaattgaacttgtattgcctgatgtgaccatttcaaggtcgttagagggattaagtgacaacaataaatacaaaatgaacatgaaaactgctaggtgcatgaaacggctgggtgtgtgggctttcagatggcatttttggtgctacctctaccagaaagcaaatccagaaatgcagcaaggatcagatcttccaggccatgtaatgacattggctttagctgtggctgctgtcctgagagaagcctgtaagcaggaagtgggcacagtagactgggaagatatggctagtgaccacaaggaaaaccaggagtgtggggtgttcagaaagacaggggaagaaagcgtctcagacaggagcaaacaacagactgtgttgaatgctgctgggagatcaaataagataaagatgggaaaatggccaccagatttagcaataaagaggacattgatgacttcaagaaaaaccacttccttggagtggtgagaacagaagcctgatttcagagatgtaagatggaatggaatgagaggcagtgcacacagagatgtaaacagaatgtgaggattttggtgttaaaagtgaaggaagaaatgaagcggtagctggaagggatgtggagtcaagagaacatagagagtgaaaaatatccattgattactgaaaatgaaaacattgaaaccaaaataa

SEQ ID NO: 473732 - DNA, 623 bp, Homo sapiens
gaggcttggctccgctgagcagctttgacacgctagccctgtcgggcagggggtgtgacatgatctctgaccacaagccaggctttagctgctttagctttttaagtatcatctcatttcatcctcagaacaactttatgaataagaaaacctcacaggcccagacgtcaggggctggggcattagaaatgtggaagggaaggtgccccagggggccggaccttacaacagctggcttccacctggccttcttgtctgatgcctgttggctatggggcactcttaactacaatgctcatgctctgggtagctggatgttcgttgaagaaaggcagggctttgcacatccgctagagagagaaaaagaagaagaagacgtccttcagttcacgtgttctcaacactacattgttgctaggagtggagagaaaaatttctgggcaattttgaaaaatatgtctcccctgccaaaacattatattgtggatattctggggttcctccttcattcctcttctttctccacaacactcttcctggtggtcgtcattcactttgatgacttcagttcctacccatgagtcacccacccaacctcttctaagtctttgcctcttacatcc

SEQ ID NO: 473733 - DNA, 529 bp, Homo sapiens
ttgtcatttgtttgaagatgccagatgtgccatcactttcctaatgccaaatttgtggaaaggagatggaaaagggtagatccactgacagcttgtatagtgtgcctggaaaagtctcagacactcatgggctggaaaagccagcccatgaaagcagccaggagggaggctgtaccctgcaaagccacaggggtagagttgcccaagaccataggaacctacctcttgcatcagcatgacctggatgtgagacatggagtcaaaggagatcattttggaactttaagatttgacttccctgctggatttcagacctgcatgggtcctgtagcccctttgttttggccgatgtctcccatttggaatgactatatttatccaatgcctatactctcgttgtatctaggaaatgttgttttgttctttaaactcctacttttctagtagttgtgcacattcttcattgttgaaatcaaacagcctttaaatttaatacattctcttttaattaactcaaacacatgcttgt

SEQ ID NO: 473734 - DNA, 804 bp, Homo sapiens
actgtggacctgtctttggaaatacttatcatgcagggatttcttaggcaggaacataaccaatcctgcctccaagaagcagatccctcaccatcctccagcatggggctgccggccatccagcaccaagctcaccaagtagcagaaaagcccagtgcttccggcttccctttctggatgcagccttggacactgtcttcattttccaggtggtatttccagggccaaagagaattttctgacactcattgtaagtcacacataaaatccctgctttcatcccaaagcacaggcgctgcgttgcggagcctggtcctttcctttgcgcagctgacaggaggctgccacatggcggcggctgcagaagactgtggtgagccagtcagtgatgtgccaatgcagaatgggagcattcatacatcaaacctgagcgggaaagaggtggagtgccgatcatcaggatatggtaagctgtccaggcccagagggaagtgcttctgaacattccttccggaaaaatccgccagcgagagctaaaacgcagacagagctttctaactgttcatttcattattatttatcatagtgaaaaaatgaacattaccccaatgttatagtagtagaacatttgaataaattataatttcaacatatgatggatattatacaattattaaaaaacgggcttagtgagctatgagtttttaaaggattctctatttactcatccagaaagttttctcatttttccacccatatttgcattacttagcacatgtgcacaattccattttcacaattgct

SEQ ID NO: 473735 - DNA, 928 bp, Homo sapiens
ttttttttcaaacccagctcctgctcagtgaaataggtctggctctcaagactgcaggaaccggaggctgcaaattgacatggtgcagggacagccagtaacctagctggcctgatgtggacaaaggagggacaggaagttgtccctacagtcacaggagctcaaaaagatgggctcctcgtccctggcttctccaatcttacgactccctgtagcaacaagtgcttccactctccccaggctggggatggatccctggagggactcatgctggtattaaatcctccaccctgtgtcacccccaccccccactctagcctggaccagtcacatggaaccacccaaggactgggaaggataatcgcttcatgggaccagaaggtcccagaaggcaaagagaacaggatctggatgagcattagaaggctgtcctataattctttttcagaatgcaggcttctccctcattcctcctccctttttctcgcctatgttccctccctacgtcctgtgccctctgttctcacttccctgcagttgctgccctatatcctccaaagcagaggctgaccaaggatgatgttgccacaactatctgaattaccttgagaaagagagttgatgatgaggctttgacagaaaagtgattgacaaactgattccatagctcttgtgttttaagtgttttaacatttattacaagatatttaaattcatatcacatttgcaaactgattaaaaaaaaaactccaaagcaaatcaaaagaaatttcatatgtggtggatttttaatacagtattttaagacaagtgaaacaaggttccacaagtcacatgtgtttaccagtgccccacatttgtgttcccatcagcctttcccacactcaatcaattcacccttgaatagctgtactcgatgctagggagc

SEQ ID NO: 473736 - DNA, 570 bp, Homo sapiens
ccaccaccactgccgcagccatctcatctatccttttgtccatgggtctgtctcccccaattcaaagtctgggtgggagtgtctgtttggctgcactgggtcaaatgttcttgccctgtcaggcccctctgctgcaggtctgctggagtttgctggaggtccactgcagaccttctttgcctggatatcaccagtggaggctgcagaacagaaaagattgctgcctgttccttcctctggatgcttcgtcccagaggggcactggccagatgccagctggagctctcctgtatgaggtgtctgtcgacccctgctgggaggtgtctccctgtcaggacgcacggggagccggcaggcaggaacgtttacgtctgctgaagctgcaccctcagctgccccttcccccaggtgctctgtccctgggagatgggagttttatctataatcccctgtctgcctttctttcagagatgacttgcccagagaggaggaatctagagaggcagtctggctacagcggctttgtggagctgcagtgggctcacccagtttgaatttcccagaggcttc

SEQ ID NO: 473737 - DNA, 3758 bp, Homo sapiens
ggagattccctaatcacctcctctctcctgcagctgcaaagctggcttggctggctggctgacttggctggcttgtgtggctggctgggctggctgcggtggctgggttggctggctggctgggctggctgggctggctgggctggctggctggcttggctggctgggctggctggctggcttgaatggcttggctggcttggctggcctggctggctggctggcttggctggcttggcaggctggctggtttagctgtcttgggtggctgggtggctggctggcttggctggctgggctggctggctggcctggctggctggctggcttggctggcttggcaggctggctggtttagttggcttggttggctggctggcttggctggcttgactggctggctggcttggctggcttggctggctggctgagttggctggcttggctggcttgggtggcttggctggctggctggcttcattggcttggatggctggctggcttggatggctgcctggcttggctagcttggctggctgactggcttggctgccttggctggcttggctggctaggcgggcttggctggcttggctggctggcttggctggcttggctagctggcttggctagctggcttggctggcttggcttgctggctgtcttggctggcttggcaggctgacttggctggctttgctggctggctggctttgcaggcttggctggcttggctggcttggctggcttgcttggccggcttgcctggctgggtggcttggctggcttggctggctggctggctgggtgtcttgggtggcttggctggctgggtggcttggctggtttggctggctggcttggctggctggcttgctggcttgcttggctggcttggctggctggctggctggcttggctgtctgggctggctggctctcttggatggcttggctgactgggtggctggcttggctgtctgtgctggctggctggcttggatggcttggctgactgggtggctggctggcctggctggctgggtggctggctggctggcttggctggtttggctggctggctggcttggctcgtttggctggctggctggcttggctggcttggctggcttgactggcttggctggctggatggcttggctggcatgcctgtcttggctgccgggcgggcttgactgggttggctggcttggctgcctggctggcttggctggcttggctagctggctggctggctggcgggcctggctggctaggtggcttggctggcttggctgtctgggtggcttggctggttttgctggctgggaggcttggctggcttggctggctggctggttgactgacttggctggcttggctggcttggctggctggcttggatggccaggtggcttgtctggcttggctggccggctggcttagccggctggatggcttggctggcatgcctggcttggctggctggctggttttgctggcttggctgcctggctggcttggctggcctgcctggctttgcttgctgcctggcttggctggcttggctgcctggctggcttggctggcatgcctgtcttggctggctggcgggcttgactggcttggctggcttggctgcctggctggcttggctggcttggctagctggctggctggctggcgggcctggctggctaggtggcttggctggcttggctggctgggtggcttggctggcttcgctggctgggaggcttggctggcttggctgtctgggaggcttggctggctgggtggctggctggcttggctggcttggctggcttggctggcttgggtggctggctgcctggctggctgattggcttggctggcttggctggcttggtggcttggctggcttggctggcttggctggcttggctgtctgggctggctgactggcttggctggcttggatggtcgggtgacttggctggcttgagtggctgagtggattgcctagcttggctggccggctggcttggcaggctggctggcttggctggcttggctcgctggctggctggctggcgggcctggctggctaggtggcttggctggcttggctggctgggtggcttggctggttttgctggctgtgaggcttggctgttttggctggctggctggctgactgacttggctggcttggctggcttggctggtttggctggctggcttggatggccgggtggcttgtctggcttggctggccagctggcttagtcggctggatggcttggctggcatgcctggcttggctggctggctggtttttctggcttggctgcctagctggcttggctggcctgcctggctttgcttgctgcctggcttggctggcttggctgcctggctggcttggctggcatgcctgtcttggctggctggcgggcttgactggcttggctggcttggctgcctggctggcttggctggcttggccagctggctggctggctggcgggcctggctggctaggtggcttggctggcttggctggctgggaggcttggctggcttggctggctgggaggcttggctggcttggctggctgggtggcttggctggcttggctggctgggaggcttggctggcttggctggctgggtggcttggctggcttggctggctgggtggctggctggcttggctggcttggctggcttggctggctggcttggctggcttggctgcctggctggcttggctgcctggctggcttggctagcatgcctgtcttggctggttggcgggcttggctggcttggctggattggctggcttggctgtctgggctggctgactggcttggctggcttggatggtcgggtgacttggctggctggctggcttggctggcttggctggctgactggcttggctggtttggctggcttggctggctggctagctggctcacttggctggcttggctgggtgggtggcttagctggcttggctgactggcttggctggcttggacattaaatataataatatatttggtacattaaatataaattgtatacgttaaatagaaacatcttttatacatcaaacataaacattttatacattaaatgtaaacatatcttatatgttaaatataaacttcttttatacattaaatataagaatacatttggtatatttaatgtatacagtacattaaatatagacattttagacattaaatataagcatatattcagcacattaaatgtaaacatattttatacattaaatataaatactgtgtatgttaaatataaatatgtattttctatattaaatgtaaatatgtatcctgtacattaaatataaacatattttctatattaaatataaacatgtattttgcatagtaaatatatctatacattttctatattaaatatcaacatgtattatgtatattaaacaaagacatatatttcccatattaaatataaacatatatttttatatgttaaatataaatatatatttcctgtattaaatatacacatatatattaaatataaatatatttttctatatgaaatgtaaacatattttaaacattaaatataaatattcgtcttagatatggcccgtgttggaatgtgtagtagattgagtatataatgtctactcaatataaaatttatatttatatatgcagtaatgattcaagttgattgtagttaagaaaaacaagctccaaattc

SEQ ID NO: 473738 - DNA, 1780 bp, Homo sapiens
tctcctgccccactaaccttaatgacagctttctctggacaagggactgatttcagtaactttctcctgataagagaccatcctccatggactggttctggccagttttggaggctgtgcctgtacagaggggagactggatttattatgtcagacctgctcactcacactggagggtctacggaacatactcctcacaacgatcatgagaaagaatattgtgagaggagcccagtatcctggaagagctttgagcttgtgctctcatacacattatatacctcaggaatgtacaatgctcagcgcctgggtgacgggattattcataccccaaacctcagcatcgtacaatatccccaggacacaaagctgcccgtggatcccctgaatctataataataataattaataataataataataataaataaaaagtgactttgtcattcgcagggaaatgtgaatgacattcactctgcctctcaggcccttggattcccaaagtttgttttcgtcacgcccaggggacactcagaatgtctgtaagatactagctattaaaaaataaatatatatatatactgcaacagctgattagtctggaagagtttggtcagaagacagtgtattaagaagactgtgagtccccagaggaatataagaatatacatcatgttgatatattatatataacataaatagctaactacatctgtgtatatagtataaacaaaagtacaaaaatatttgtatataactatatgtaatataaatatatcagtgtaagatattagctattaaaatatatatatatatatatatatatagagagagagagagagcaaccggtgatttgtctggaatattctagtcagaagacagtgtattaagaagacagtgagtccccaggagaatacaagaatgtgcatcatgttaatatattatatataacataaatacctaacaacatctgtatatatagtataaacttaaagtacaaaaatattagtatattactatatgtaatataaatatatcagtgtaagatattagctattaaaatatacatatgtgtgtatatatgtgtatatgtgtatataaatattatatatatatatatagtaaccgctgatttgtgtggaagactttggtcagaagacagactattaagaagacagtgggtcctcacaggaaaataagaatatacatcatgtttatattatatataacataaacaactaattacatctgtatatacagcataaacataaagtacaaaaatatttgtatataatcgtatgaaatataaatataccagtgtaagatattagctattaaaatatacatgtgtgtatgtgtatatgtgtacatataatatatatacatatataacatatataatatataagatatagcataataatataatatattatatataatatgtaatatgtaacatatattatataattaatatataatatataatatattctatgctatataatatataatatattctatgcaataaaatatatagcatatatatatatagcaacagctgatttgtctggaagaatttggtcagaagacagtgtattaagaagacagtgagtccccagagaaatataagaatatacatcatgtttatattatatataacataaatagctaactacatctgtatatatagcataaacataaagcacaaaattatttatatataatataaatatatcagtgtaagatattagctattaaaaatatatatatatatata

SEQ ID NO: 473739 - DNA, 1371 bp, Homo sapiens
agccagcagagagagaggaatggctgcctgttttctcccccaatccaaggcactaggttttggctaggttgcaggttccaagctgctctcctgctgtgtcggtgccagaccacggggaggtccaggggttgcaggggagggctgtgcatctgcaatgactctcaggggactcccggtggtggcaattggtgaatctgcacgacctgatctgggtcttgcaccctgggtgcagcatgacaggggtgggcaggggctggctctgggccagaggaccctttctgatggacttcagctgttggccttccaggggagactgatcaacctcacaagagtcatacggaagacctgcaggtgggagtaccaggttgaaaccaaggacacattcctggaggagctgctgtttgagccagctctgagaacaggtggggacaggactggagaggaggagggggtcccctatgagcaaagactggccaccaccccatctaacacccccacagggcccctgtggcatccctgtccagtccctgtcaccacccagtttttccctctggacccaggaattcaaagtaagcaaggaggtccactgctccagttgactgcaaataattacaaccttgagcccaagcagcactttgggtcctggtttgggaccacgaagcggctcggtagccagaaggggttgtccagccagcacctgggctttggcactcctcaagaaggtggaggaagtttcaggcacctggctcctcaggtgtctgccatccaggtgctcttcaggcctgcccagaagagctctcttgatccagctagaactggccagaactgactcactcaggaatgtgtagactttgacatcaggggctgctttaatttgcacaatttccaaatacctcttttttcttctttttctgatgagtcatctccctagacttgcattttaaagagatagatagttatcagattccagagaagacatggtagaacatttatatgtcaaagacacagagctgagactttagttttagataccataatttgcctaaaccaaaaaggaaggtgtaggtaaagttctagtcaagacaggatggccaggaaaaacaccttaaaccaagggacagcttgctttgctgatttaagccaatggcttctttatcataagacttcccagtgatttagtcctccctctcttccagtgcacagagacatacccctccttacaaataaaaatgttctttatagatgtaaatttattttacaaaaatgtttcaaaataaccagatgaaaatcatccttatgccagaaagacttgtttttttttttttcattactagaaatgaaacagtaagtatttgctgtattgacatactt

SEQ ID NO: 473740 - DNA, 1813 bp, Homo sapiens
gagggtttctgctgactgtggatggcttttgcatcactataaagttgaaaactgttaagtggaactgcgaagaagcgatgctgtcctcagtcatcaagcgttcactaggcgcttggtgtgtgccaggccccgatgtgggtcttgggcatgttccagttctcacgtcctcagggctccttggtgagtcgagggtgaggaggacacagaggcacaggaggccatggggcaggtctgggtgcactcaggctccagagctcagccctccctgctgagtcagggcgagcaggatacacgcctgctcctggaactcagtgggatggccaagctggaagcagagctcattcctgagcagggcacccgggcctcgctacggtgctgggcaggcttctggtgtggagggtgggctcagatcctgctgtccctgtggctgtgggaggcttttctaggcaccctcctgactgctaacaccaggagggcctatgatatgggaccgctgccccatgacgtgtgccaggtttctgcacgcgactgctgggaaaggctggccctgggctgggtggacccgcactgcctgctggcccctgcacccagatggtgcagcccacacccctctgatgtccacccatgctcggctctgggacttccctccttccaccgtgtctgaccctggttgcccttgttctgccactggcttgtagcagcccttcctgaagccacgtcctccagggagatttgattatgtcctggtgttgcaacctcgctaatgcaatcaggaagttttctcaagacttcagctgctttgttggcagccaggcctgactctcagcagctctgcaggctggaagggcccaagagacccctcacccacctggtgtctccagcagtggggagggctccggggcatagcctattgctgctctgctctcctcctttctttgggctaagatcatctccagaaatattaattttttagacagtgtgattatagttatttaatactcatacttatcaaaatattgtatgttaaaaccaataaccatctgaacttatttgaatatagtttttcctattctgttcttagaaatttcagtcattaacaatctttacacttagaaagtgttttaattttactttgatgacaggaatagtgttcttctcaatgaaatatataatagcagcttataagtgataactgttttcattctgtttttaagagaaaatactttggtcttttttaccatagtttagtgtgtgatgtcataaaaatgggctgtagccatttaaattcttgttcaagtgcagaaactaagagactgcagtttctattaagccatgtcaactcctattaggagacctttagtggttccagttccagggccttcttgaagaaattgtgatacttgtgtaagtatatctagagttttctttccagcattggctaagtcacatagctgagaaatatgatacatggagaaggttgctgactggatgaacttttctacattgaatactttaaatctggattctagaataaaatatattgatgcatatttgagttgtcaactgtttatgtcttgttcttttcagcttcaacattgctttatggcatgtgtggtcgtttttcactccattgttgttgtttacccagtttatgggggttataatgtttatcacactccttggatgatttccgaaggtaagatatctggaatggtttttctaaaaatgaactcatttgaaaaatgtcttttatgacaattttcagtggatggagctgtaacagactatttgtgaattattttcagtcatgttt

SEQ ID NO: 473741 - DNA, 532 bp, Homo sapiens
gcacgtgtatatcatgtaatgacacctcatggcccagattacctttctacagggagaaaggaagggccaagaaaatttgaagaaggatcttgtgaggaggatcaaaatgttggagtatgctcttgaacaggaaagtattattgtgaacgaagtgaaaggagtagttgatagaacaagtattgtggaaacagaaaagagaactggaaggagatccaaaagtaaaaccgaattattaatgttacagaagaattacctacctagcagtggatttatcaaagcatccctgtctgggaagacctgggcttcccagacaggcctgaggatcatcacacggtgttcagcacataccaccaggggcaggtgcaccctggcttctgaagtagcacctgagaatcccctgtgtctaatacctgcttcatgaataacattccataggcttcggaaagactgtggtttaggctctaatttattcaacttgaataatttctccttgaaatactgagaatagcttctcttttgctgtacaaattcc

SEQ ID NO: 473742 - DNA, 1570 bp, Homo sapiens
tttttataggctggtcacacccggagcaggagtcagtcccagtcaggacacagcacagacatgagggcccccactcagctcctggggctcctggtgctctggctgccaggtgccagatgtgacatccagatgacccagtctccatcctccctgtctgcatctgtaggagacagagtcaccatcacttgccgggcgagtcagggcattagcaataatttaaattggtatcagcagaaaccagggaaaactcctaagctcctgatctatgctgcatccagtctgcaaagtgggattccctctcggttcagtgacagtggatctggggcagattacactctcaccatccgcagcctgcagcctgaagattttgcaaattattactgtcaacagagtgacagtacccctcccacagcaggaaaaggcatcaaatatccacaagactcttttgaaattatatattctgcagtgggataattatgttacctaaccagaatagtaatgacacatgcatttaaagctgataaaaatgaaagtcttgtcaaaaggaagtgacagcccaacttgtcaggccaaacatgctttggcatagaactttatatgctctttaaaatgattttaataaaaataataagctaatcaatgcaatcaaactttgaagatggataaagttcagtaacttaataatatggtagaaaacagacatttatatgttagctgtggtgatataaaccagtttcactttatagaggacaactggtaatatctgtcaagtttataaatgcatataccctttaactcagcaattttagaatgttatccttgaaatatatatttgtacatacatgaaattatataatacattactgataaaacacagacaagaatatgtatacaacccaaatgaccacctaaaggagactggttaaataaatgagtataattgaaagaaaattaggacctgaactaagacctttgagaaaagagtaaaagactatgagaataatgtcaatcttttacctttttttctctagaaaactaagacattagaaacaaaaagtcttaaaacacattcctacataaaaaaaagaattccttctgtaaaacgacctcagtcgaaaacataataattggtataaattcttactcttttaaaataaagattaaattccagctaaaaattctccagatatggcagtatattgctctttgaattgaactgaggaaaggcgagggtgagagacataaaagatgaaaacagtgaaaggaagaaataaagggaagggaaaaagtaaaaagaaaaagaggaaaatagaagtatggagtcttatacaggccttcaagctgacagatgagtacatactagctttttgattctcttccaaattccttatttatgactatacttttggcagtctcctgataaaatgaaatctaccaatgtatttcagttcaatcacgtgtttgggaaatacctacttcccatcaggtctaaactgctgtaaaggagaatataggaaaaacaaataaaaccaagtttctacccacaatgtacttccaatctagttagggt

SEQ ID NO: 473743 - DNA, 4672 bp, Homo sapiens
cttggctggctggctggcttggttggctggctggcttggctgtcttggctggcttggctgcctggctggcttggctggattggctggcttggctggctgggtggcttggcaggctggctggtttagctgtcttgggtggctgggtggctggttggcttggctgtctgggctggctggctggcttggctggcttggctggctgactggcttgactggcttggctggcttggctggccggctgggttggctggctggctggctgggtggtttggctggctggctggctggcttggctggcttggctggcttggctggcttagctggctggctggcttggctggcttggctggctggctggcttggctggcttgactggctggctggcttggctggcttggctggctggctgagttggctgtcttggctggcttgggtgtcttggctggctggctggcttcattggcttcatggctggctggcttggatggctgcctggcttggctagcttggctggctgactggcttggctcccttggctggcttggctagctggcttggcttgctggcttggccggcttggcttcctggctgtcttggctggcttggcaggctgacttggctggctttgctggctggctggctttgcaggcttggctggctggctggctggctttcttggctggcttggctggctggctggcttggctgtctgggctggctggctggcttggctggcttggctggctggctggctggctggctggcttggctagcttggctggctggctggctctgctggccggcttggatggcttggctggcttggctggcttcgctggctgcctggctttgctggcttggctggctggttggtttggctgccttggctggatgactggcatggctggcatggctggctggctggcttggccggcttggctgacttggctggttgggtggcttggctggcttggctgggtgtcttggctggttggctggctggctgtcttggctcgttggctggctgtcttggctggttggctggcttggctggcttgtctggctggctgtcttggctggcttggctggctttgctggcctggtggtttggctggccggctgggttggccggcttggctggctgggtggtttggctggctggctggctgggagtcttggctggcttggctggctggctggctggctggctggctgccttggctggcttgtctggcttggctggctgggtggcaggctggcatggctggttgggtggctggctggcttggctggctgggtggctgggtggctggctggctggctggcttggctggcttggctggctgggtggcttggttggtgtggctggctggcttggctggctggcttgctggcttgcttggctggcttggctggctggctggcttggctgtctgggctggctggctggcttggctggcttggctggctgactggcttgactggcttggctgacttggctggcttggctggctgactggcttggctggcttggctggcttggctggctggctggattggctggcttggctggctggctggctggctgacttggctggcttgtgtggctggctgggctggctgcggtggctggattggctggctggctgggctggctgtgctggctgcctggcttggctggctgggctggctggctggctcgaatggcttggctggcttggctggcctggctggctggctggcttggctggcttggcaaactggctggtttatctgtcttggctggctgggtgactggttggcttgagctgtctgggcttgctggctggcttggctggcttgcctggctgactggcttaactggcttggctggcctggctggcttggctggctgactggcatagctggcatggctggctggctggcttggccggcttggctgcttggctggttgggcggcttggctggcttggctggctgtcttggctggttggctggctggctgtcttggctcgctggcatggctggcatggctggctggctggcttggccggcttggctgacttggctggttgggtggcttggctggcttggctgggtgtcttggctggttggctggcttggctggctagctggctagctggcttggctgacttggctggctagttggcttggctggcttggctggcttggctggctggctggctttgcttgctggctggctggcttggctcgctggctggcttggctggctggctggctggctgtcttggctggcttggttgcctggctggctgagtggctttgctggctggctggctggctggcttggctggcttggctggctagctggctagctggcttggctgacttggctggctagttggcttggctggcttggctggcttggctggctggctggctggctggcttggctggcttggcaggctggctggttgggtggcttagcttgctggctggctggctgggcttggctggctgggtggcttggctggcatgcctggctgggtggcttgggtggcttggctggctggctggctggctggctgtcttggctggttgggtggcttggcggacgccttgcttgtctggctggatggcttggctggcatggattgcttggctggctggctggcttggcttgcgtggctggctggatggcttggctggcttggctggctggctggcttggctggtggggtggcttggcggacgcctcgcttggctggctggatggcttggctggtgtggattgcttggctggctggctggcttggcttgcgtggctggctggatggcttggctgtcttggctgtcttggctggctggatggcttggctggctgtgtggcttggctgtcttggctggctgggtggcttggctggctgtgtggcttggctggcttggctggctgggcggcttggctggctggctgctggctggcttggatggcttggctggcttggctggcttgggtggctggctgcctagctggctgattggcttggctggcttggctggctgggtggcttggctggtttggctggctggctggctgggtggcttggctagctggctggcttggctggcttggttggctggctctcttgtttggttggctggcttggctgccttggctggctggctgacttggctgtctgggctggttgggtagctggctggcctggctggctgggtggctggctggcttggctggcttgtctgtcttggctggctgggtggcaggctggtctggctggctggatggctggctggcttggctgggtggccggcttggctggcttggctgactggcttggctggtttggccagctttgctggctggcttgggtctcttggctggctttgctgggtggctggcttggctgggtgactggctggcttggctggctggctggttttggctggctgactggctgggctggctgggctcgctgtctggcttggccggctcggctggctggctggctggctgggctggcttggttggcttggctggttaactggctggcttggctggcttggcttggctcgcttggcctgctggcttggctgccttgtctggctggctggcttggtttgcttggctgcctggctggcttggctggcttggctgccttggctggcttggctggctggctggcttggctgacttggctgtttgggttggctggctggctggggctcctgggctggctggctggcttggctggctggcttgcttggctggcttggctggctggcaggcttggctggcttggctggctggctgtcttggctggcttggctggctgactggcttggctggtttggctggcttggctggctggctagctggctcacttggctggcttggctgggtgggtggcttagctggcttggctgactggcttggctggcttggacattaaatataataatatatttggtacattaaatataaattgtatacgttaaatataaacatcttttatacatcaaacataaacattttatacattaaatgtaagcatatcttatatgttaaatataaacttttatacattaaatataagaatacatttggtacatataatgtatacagtacattaaatatagacattttagacattaaatataagcatatattcagcacattaaatgtaaacatattttatacattaaatataaatactgtgtatgttaaatataaatatgtattttctatattaaatataaatatgtatcctgtacattaaatataaacatattttctatattaaatataaacatgtattttgcatagtaaatataactatgcattttctatattaaatatcaacatgtattatgtatattaaacaaagacatatatttcccatattaaatataaacatatatttttatatgttaaatataaatatatatttcctgtattaaatatccacatatatattaaatataaatatatttttctatatgaaatgtaaacatattttaaacattaaatataaatattcgtcttagatatggcccttgttggaatgtgtagtagattgagtatataatgtctactcaatataaaatttatacttatatatgcagtaatgattcaagttgattgtagttaagaaaaacaagctccaaattc

SEQ ID NO: 473744 - DNA, 2303 bp, Homo sapiens
ctggactgggatctttaagtaaaatgaggataattgaatcctggggtggcagggaacatgggctgtccttaatcaccaaagatgagataaagcaaatgtggtctttctgcatcatggaatactacacagccacgaaaaagaataatgtcatgtcctttgcagccacatggacacagctgaaggacattatgcttagtgaattaatgccaggaacagaaaatgaaatactacatgttctcaactggataaagcaaatgtggcccttctacaccacggaatactacacagtgatgaaaaaaataaaatcatgtctttgcagccacatggatgcagccagagggcattatgcttatgattctggagcaggtgagctgatcacaagtctgagccgagaatctatggagctcatttacaacagaagccgggaccctgtgcaaatccttctgaaatatccccggtttacagagctcctaggggtggggaagaaaaattccctgacttttcggcctcagggaaagagagagacaccccgctggccgtacacctctgctgtttctcagaaaacaggtggggtatcactctttcccaaatgacggtgattttaagaacggttcaccttttgaagagacgtttctgccctggcgatccatacatattgaacccaaatgaatattttttaattaaaaatttttatataaatatacattgtgcatactttatattaatatattgatataaatatattttattaatataaacatgatttttatagttcatataaataaagttatatatagtgtatatgtaaaatatacttttatttgtgatacataattttatagattaaattttatatactaagcaaagttatatgtgatatatacatgccatataacatcatttatataatatatctttatgtaaataagtatataataaaattgatcttatatttgttaatacataattatgtatatatactatgtaaaaataaaattatatattgtatgtgcataattatatttctataaatacacgcttatgtgtgtatttatacatgaatgcctgtgtttgttgtaagatactagctattaaaaaataaatatatatatatactgcaacagctgatttgtctggaagagtttggtcagaagacagtgtattaagaagactgtgagtccccagaggaatataagaatatacatcatgttgatatattatatataacataaatagctaactacatctgtgtatatagtataaacaaaagtacaaaaatatttgtatataactatatgtaatataaatatatcagtgtaagatattagctattaaaatatatatatatatagagagagagagagagagagcaaccggtgatttgtctggaatattctagtcagaagacagtgtattaagaagacagtgagtccccaggagaatacaagaatgtgcatcatgttaatatattatatataacataaatacctaacaacatctgtatatatagtataaacttaaagtacaaaaatattagtatattactatatgtaatataaatatatcagtgtaagatattagctattaaaatatacatatgtgtgtatgtatgtgtatatgtgtatataaatattatatatatatatagtaaccgctgatttgtgtggaagactttggtcagaagacagtgtattaagaagacagtgggtcctcacaggaaaataagaatatacatcatgtttatattatatataacataaacaactaattacatctgtatatacaacataaacataaagtacaaaaatattgtatataatcgtatgtaatataaatataccagtgtaagatattagctattaaaatatacatgtgtgtatgtatgtgtatatgtgtacatataatatatatacatatataacatatataatatataagatatagcataataatataatatattatatataatatgtaatatgtaacatatataattaatatataatatataatatattctatgctatataatatataatatattctatgtaataaaatatatagcctatatatatatatagcaacagctgatttgtctggaagaatttggtcagaagacagtgtattaagaagacagtgagtccccagagaaatataagaatatacatcatgtttatattatatataacataaatagctaactacatctgtatatatagcataaacataaagcacaaaattatttatatataatataaatatatcagtgtaagatattagctattaaaaaatatatatatata

SEQ ID NO: 473745 - DNA, 888 bp, Homo sapiens
agccagcagagagagaggaatggctgcctgttttctcccccaatccaaggcactaggttttggctaggttgcaggttgcaagctgctctcctgctgtgtcggtgccagaccacggggaggtccaggggttgcaggggagggctgtgcatctgcaatgactctcagggggctcccggtggtggcaattggtgaatctgcacgacctgatctgggtcttgcaccctgggtgcagcaagacaggggtgggcaggggctggctctgggccagaggaccctttctgatggacttcagctgttggccttccaggggagactgatcaacctcacaagagtcatacggaagacctgcaggtgggagtaccaggttgaaaccaagaacacattcctggaggagctgctgtttgagccagctctgagaacaggaggggacaggactggagaggaggagggggtcccctatgagcaaagactggccaccaccccatctaacacccccacagggcccctgtggcatccctgtccattccctgtcaccacccagtttttccctctggacccaggaattcaaagtaagcaaggaggtccactgctccagttgactgcaaataattccaaccttgagcccaagcagcactttgggtcctggtttgggaccacgaagcggctcggcagccagaaggggttgtccagccagcacctgggctttggcgctcaagaaggtggaggaagtttcaggcacctggctcctcaggtgtctgccatccaggtgctcttcaggcctgcccagaagagctctcttgatccagctagaactggccagaactgactcactcaggaatgtgtagactttgacatcaggggctgctttaatttgcacaatttccaaat

SEQ ID NO: 473746 - DNA, 550 bp, Homo sapiens
tgaaatgtgaatgaacttgaaattggaaaatctgggcagtgaaaagcacacagctctacgattcaggagatggtcgcatgaccttgaagctggaaagcatttttgtgatggctgggctgcagggccattaagaaaatacctttgcacaccaacaaaaaagactaaagccttaattgctgatccaaaaggcaacaggaaaggatgcaccactgcatatatgacctcagggggaaccaaagagcagcatgagcagggggccatggtcatgggcattgactgggtgcttgctgcatgcaaaggctctgtgttaagcaccttgggaacactaactcatttactgtcccaacaaatccaggatgtagcaggcttcatgaacatcaacactcatttgaggttactgagagcatttgcctggccttaacattgtcatcccaaagctgtttgccaattcattcccatcttcacagccctgtctttctccagtaggcttggtctgtggttctaatgaacacaggaggcttggttcattcggatgcaggaagtgaggagg

SEQ ID NO: 473747 - DNA, 1363 bp, Homo sapiens
ccacttctggctgcctaagcagatggcagaagaaggaaacaagctagccagccagccaagccagccaaaccagccaagccagtcagccagccaagccagccaagcctgccagccagccaagccagccaagcctgccagccagccaaaccagccaagcaagcctagccagccaagccagccagccagcccaggagccccagccagccagccaacccaaacagccaagccagccaagccagccaaggcagccaagccagccaagccagccaggcagccaagcaaaccaagccagccagccagacaaggcagccaagccagcaggccaagcgagccaagccaagccagccaagccagccagttagccagccaagccagccaagccagccagccagccaagccagcccagccagccagccagccagccgagccggccaagccagacagcgagcccagccagcccagccagtcagccagccaaaccagccagccagccaagccagccagccacccagccaagccagccacccagcaaagccagccaagagacccaagccagccagcaaagctggccaaaccagccaagccagtcagccaagccagccaagccggccacccaaccaagccagccaagccagccaaccagccagacagcccagccagacagccagcccaggcagccaagagacccaagccagccagcgaagctggccaacccagccaagccagtcagccaagccagccaagccggccacccagccaagccagccaagccagccaaccagccaggcagccagcccaggcagccaaaccagacaagccagccagccaagccagccagccagccaagccagccaagccggctagccagcccagacagccaagccagccaagctagccaagcctcccagccagccaagccagccaagccacccagccagccaagccagccaagccaatcagccagccaggcagccagccacccaagccagccaaggcagccaagccatccaagccagccagccagccagccagccaagccagccaagcctcccagccagccaagccagccaagccacccagccagccaagccagccaagccacctagccagccaggcccgccagccagccagccagctagccaagccagccaagccagccaggcagccaagccagccaagccagccaagcaggcaggcagccagccaagacaggcatgccagccaagccaggcaggcaagccagccaagccagccagcaagcaaagccaggcaggccagccaagccagccagcaagcaaagccaggcaggccagccaagccagccagacagccaagccagcaaaaccagccagccagccaagcc

SEQ ID NO: 473748 - DNA, 846 bp, Homo sapiens
gtgtatatcatgtaatgacacctcatgggagtagttctcatgcacgactacccatggccagaccaaggtagtgcagcctatgcacaaacctcctcctgcttttccagaggactggatttctgggaaatggctaccgaacaggctgccaggatccatatatccagattcagagagatacatctctggattcaaatgcactttttctttgtgcataattttagcagtcattgttactatgccttggggattctagacattatacttcagctgactctctatggccctttctccccttcactgctctatctgaacctggggaggcagctcaggctgcaaatgaggcagacctcatggcctggaattagcatcccctaggacggttgtcaatcagtgatgacaagggaggtgtacacatcccccagctccctcacctctcaggtggaataacagagacatttttcctgtgtttctatgtgggcttgagctctcgtcatcctcagaggtggctccttctgaggcacttttcactttccctttccctcctcccctcccttgctcacttgcttgtttcccgcactttgtaaatatactgcctgcatgcgaatctttggcatccttctcactgaggggacccaacctaatgcattggaaaaatcctcattcttggagggcatcgttggtttgaattattgccacttctcatgttttaatgcctagggaaattccaaaaatttaggaaatctttaaattccctttgccaatctttcttagatttgattttagcagagattcattttctctaggtcacaaaatcacagaagccttccacaaatggctacacaacat

SEQ ID NO: 473749 - DNA, 3786 bp, Homo sapiens
ctggctggtcctgacctggaatacttgagatcaaatgtactcaacaaaggggcctctaaaggtgacatttctgggtgttgatggctggtggctgaaaaagcttgggtctcttggctggctttgctgggtggctggcttggctgggtggctggctggcttggctggcttggctggcttggctggctgggtggcaggctggcctggctggctggatggctggctggcttggctggctggatggctggctgggtggctggctgtcctggctggctgggtggctggctggcttggctgtctggctggcttgctggctgtctgggctggctgggtggcttggctggcttggctggctggctggcttggctggcttggctggctggctggcttggctgtctgggctggctggcttggctgtctgggctggctggctggcttggctggcttggctggccgggtgacttggctggcttgagtgggtgagcggattggctagcttggctggccagctggcttggcaggctggatggcttggctggcttggctggcaggctggtttggctggcttggctgtcttggctggctgggtggcttggctgggtcggtggcttggctggcttggctgcctggccggcttggctgccttggctgtctgtccggcttggttggctggcaggctggccggcttgactggctggctggttggctggcttggctagctgaatgtcttggctggttggctggcttggctgggttggctggctggcttggctggccgggtggcttggctggcttggctagctgactggcttgactggttggctggcttggctggcttggctggctggcttggctggccgggtggcttggctggcttggctagccggctggcttagctggctggatggcttggctggcatgcctggcttggctggctggctggcttggctggcttggctgcctggctggcttggctggcatgcctggctttgcttgctggctggcttggctgcctggctggcttggctggcatgcctttcttggctggctggaggtcttggctggcttggctggcttggctgcctggctggcttagctggcttgactgggtggcttggccatcttggctggctgagtggcttggccggcttggctggctggctggcttggctggctgagtggcttgcgcagcttggctggctgggtggcttggctggcttggctggcttggctggctgggtggcttgactggcttggctggctgggttgtttgcctggcttggctggctgggtggcttggcaggcttggctggctggctggctggctggcttcgctggctgggtgtcgtggctagcttggctggctgggtgtcttggctggcttgggttgctgggtctcttggcaggcttggctggctgggtggcttggcttgcttggctggctcggtgtcttcgctggcttggctggctggctggcttggctggcttggctgcctggctggcttggctggcatgcctggctttgcttgctggctggtttggctgccttgctggcttggctggcatgcctttcttggctggctggaggtcttggctggcttggctgcctggctggcttggctggcttgactgcgtggcttggccatcttggcttggctggctgggtggcttggccatcttggctggctgagtggcttggccggcttggctggctggctggcttggctggcttgactggctggcaggcttggctggcttttctggctgactggcttggctggcttggctggcttggctggctgggttggctggcttggctggtttggctggctggctggcttgactggcttggctggctggctgtctggcttccatggcttgcttggctggctggcttggccggcttggctggctggctgtcttggctggcttggctggctgggttggctggcttggctggctcgctggcttgtctggcttgactggcttgggctgtcttggctggctggctggcttggctggcttggctggctggcttgtctggtttggctgcctgggctggctgtctggcagggctgtctggctggttcgctggcttggctggcttggctgggtggccggcttggctggcttggctgactggcttggctgggttggccagcttcgctggctggcttgggtctcttggctgcctgggctggctgtctggctgggctgtctggctggtttgctggcttgtctggcttggatgggtggccggcttggctggcttggctgactggcttggctggtttggccagctttgctggctggcttggggctcttggttggctttgctgggtggctggcttggctgggtggctggctggcttggctggctggctggtttggctggctgactggctgggctggctggctggcttggctggcttggctggctggctggcttggctggcatgcctggctttgcttgctggctggcttagctggctggatggcttggctggcatgcctggcttggctggctggctggcttggctggcttggctgcctggctggcttggctggcatgcctggctttccttgctggctggcttggctggcttggctccctggctggcttggctggcatgcctttcttggctggttggcgggcttggctggcttggctggcttggctgcctggctggcttagctggcttgactgggtggcttggctggcttggctggctgagtggcttggccggcttggctggctggctggtttggctggctgagtggcttggccggcttggctggctgggtggtttggctggcttggctggctgggtggcttgactggcttggctggctgggttgtttgcctggcttggctggctgggtggcttggcaggcttggctggctggctggctggctggcttcgctggctgggtgtcttggctagcttggctggctgggtgtcttggctggcttgggttgctgggtctcttggcaggcttggctggctgggtggcttggcttgcttggctggctgggtgtcttcgctggcttggctggctggctggcttggctggcttgactggctggcaggcttggctggcttttctggctgactggcttggctggcttggctggcttggctggctgggttggctggcttggctggtttggctggctggctggcttgactggcttggctggctggctgtctggcttccatggcttgcttggctggctggcttggccggcttggctggctggctgtcttggctggcttggctggctgggttggctggcttggctggctcgctggcttgcctggcttgactggcttggctgtcttggctggctggctggcttggctggcttggctggctggcttgtctggtttggctgcctgggctggctgtctggcagggctgtctggctggttggctggcttgtctggcttggctgggtggccggcttggctggcttggctgactggcttggctggtttggccagctttgctggctggcttgggtctcttggcttggctggcttttctggctgactggcttggctggcttggctggcttggctggctgggttggctggcttggctggctggctgtctggcttccatggcttgcttggctggctggcttggccggcttggctggctggctgtcttggctggcttggctggctgggttggctggcttggctggctcgctggcttgcctggcttgactggcttggctgtcttggctggctggctggcttggctggcttggctggctggctt

SEQ ID NO: 473750 - DNA, 682 bp, Homo sapiens
agcctatccgatggcgaggagagatttctgctctgtaggatctgcctcgccctggacctctggggacaatggacccacttaattgtgccatacttttgggaaacccctttgggtcccctcccattgtatgcgagctctgttttcacttattaaatcttgcagctgcacacttttctggtccgtgtttgttcctgctcgagctgagctttcactcactgtccaccactgctgtttgccgccgtcgcatacccgccattgacttccacccctccggatctggcagggtgtctgctgcatttctgatccagcgaggcacccattgccgcttcctggcaaatgggggcaatgagcgaacatccttctgctgtgttcccaaaatccatctacaaaaagagagagaggaaagagagaaagaaaagagggaaaaagggaaaagagagaggggaaagagagagagaaaaagagagagaggaaagaaagaggaaaagagggagtcaaagaaagaggagagagaggggagagagaggggaaagagagagagaggaaagagagagaggggaaagagaaaggcagagacagaaagagagagataaaagtagtaaagaaaaaaacagtgcaccctattcctttaaaagccagggtaaatttaaaacctacaattgataattgaacatcttctctg

SEQ ID NO: 473751 - DNA, 4385 bp, Homo sapiens
agcctcacatgaagtctcacctgagggggagcctcaccaagtgtgatgttcctgtcatccagctatcgagaccccttgggtcattggcagcaacagcaagaggcagctctgcagaagctgtgcagccagcagcagcagcagcacacacacaagcagccctggtggcccaggctgcgggaccccaggccagccccctccactccttcacccttagtatcacacaccgttggagaagtgggcccacgtcaggccctgcggaaggctgcctggcccccaaaaggatcctggaatatcaggtccaaaaaccacctgtggagaactgctaagctaaatgacttgcccaagctcctagactgggaagtgatggagtcagaactcaaacatgggactcctagcttcgaaccgtgtgatttttccacaaaacctgttggggtcctcaataaatcacatatctcttcctgtgagtgtgtggtggtaaagaacacttaataagttgagaaataaaactaaagttcaaatactatttttattactgatagaaccaagttagtgatattgcattaggtctgttaaccaagtgggcatgtgggcttgataattccaaaccccatcagccatgcagcccagcctggaaagaggtcctggggcagagggaggagcattcccccagagaggcagagcagaataggggctctctgtggctgctgcctcctaggagataggaagacggaattaggcatggccagttattcctaaatcagttaagtctctccaccttcataatacaggggagaaagctcagccatagaacaggattctcagatgcttactgcactcatgtttcatatttgaaatgttttccctccatctcacatttgtatcctcatcctgcccagccaaatggtctcagtagccaatttccagtcatttcttggatgtgctcagcatctctcctcttgcctttgcaactttctacaaaataggttaaatgcactcagatgcttttttagacaaagcatattgggagtatagaaataaccccacccttattaagaaacagtggggaggtggggaagagaagaagtctagtatctgattgagcctctgaggggccatattgtgatggggacttcacagctcaaggcgcaggtgttcacagatgtccagagcagggcacccagaagtgaccagcctctggaaaactgggtccccactggtcctgttcatgtccttgtaatgtatcaatcaatcgtcaatgaaggatgcccctttaaaatgaccagatatttatgtctgccctccaagaagggccattcctgggtacctggaaaagcaaacacattgttagatggctaaacagagttaaggacccaggagtgagacaagcctgatcccctgcagaacagtgatgaaatatctgtgctgccagatgtacacagccttcctcccctggccagccctccacaagcacaatgggctctgctttcgaagactccatagtgaccagctgtcagctcctttcatccatctgcttgtgcttgtcatgacatcaccttcttcattttaacacatcgccctttcatggcagtccactgtgtccgggtttacacatcattttatgttgattgcatttctcgaatggctgcttccaggtggctcactcccagtcactcccacagcagaatttactcctgcgaagatttccttttagacagttaatccctatcaggagtgtggattcccattaggcctgatcaaagcgcttccagaagactgccctgcccttaaagcaccacatgtgttggtttatttaactaatagctgctgcccttaatgttgccaggagcccatgggggcttacattaaatattctttaagccagaaacaatagaaagtgtatatggggcttaagcagagccatcctttgagtttaagagtttgggattttgaaactgaaacctttccctccatctccttacaaagactttttttttaaagtaagcaaacaattaaatgttgttaataggcatttaagagctaatctttagaagaaacaaagccttaaagataaccctaggtctttccattcaagtgtgaactcccccttaaaaccctatatttaagaagtttcatttggagattatctatttgttcactgtagcttggtctcttaattgtttataagagctctcactactaaagcccattcctaaggaaagtggtctatgaaggagccagtttgcttaaaaaccaggctcttaacttaattgagtacttggtttaaaagagttgactccatgcatttgggtaaatttacatgttgtaagatgcctggacacctttttgtgtccaatcagcttccaggatccatagatcactgttttcatttgaacacattgcacttttgcgtcatgtcatatttctcaggtttacagataactttgtgttggttgcattttagaacagcttgtcccctgggaatggagggaagcaccttaattcagcactgaatctgaaattctggggccaagatatgaacatccatgttttcaccgaaagctttttcagtgattctgatgtatgtgaaaactagtgtttcagaacttaccagacaacttctgtcacttctggtttgttccatcctgctctaagatgtgtcttaggtttgcaggactcaccagactcttaaaagatttccatcagaaaggcagtggcaaccttgagcttccagcacaatggaaaatgcctagcagtttgtacaagtctgcgtgcttcctcctgccctgctccctggaacttgggctttcttcaggggttcccccaaccctgaaagtggatctgaaggtgctgaattcaacctgagggcaatgtgtgtatgttgtagagaagaggataaagaagcgagtgtttggtttactggcgctggcatacacacattaatttagggtcttcatctgctttggtagacaaatcacaaacatttccatgaataacagcgtctgttatgcaaattggtttccgtctgctggtctgttgagaataatcttccataattacaacagctatttacttacgggcaaatcagctttctcaccaccttctccattcgagagaggcctccaactgctgctggagcccatgtgattgagggctgatggactctgatgttgtgagcctgttgtttgagtttgtgggtcccaggacagaaggatccacagtaccgccagtcaacgagtggggattaggctccctcaggcttctctgcactaagatgtccaggacatagtcgtcacaagttttatagcgagttgaggaaacaaggcatgtggaactaatggaagagaattaagccctgaaatgtgtggttctgcttagaatggatgcagtaagcatttagcaaagaagatattagtgtgagctgaagaattaatactgacacggcttatggagagaaacttgccctgggcttatgaagaggggaaggattcctggagaagtctcagatggcaaggacttccaggcccagagcagaggctggaggaaggaattcatggaacatgacctgagtgcagaggaggtaggcttcccaacctggaagtaactgacgtgcattgaacaactaccctctgacctgtgccatggcaggttcacttagttatctgctaacaatagtgacataggtaggggagctgaggcagggaaaattaaagtatattgcttaaggtagcaaaattgggaagattgagagtcagtgttggagatggaggcactatcagaagacatgaaagttctagaaatctggggggaatcattgggatatgactctgatggatcttgatctatagtaaaatgacaatgttgggaggataaatcatattggggtgcagtggggtagggggctgggttgttgtgcttacttttctgtatttttaaatcttccctccccaacatgttttttttccacagtgattttgtaaactgaacccagtaagaatatttcccagtaggacagggcagcatttactctcctgttttacaggtaaggggaacgacattaagaaaaattgtttcgccagccatttttatcttttttactagttagtcccagggtgctgactctcttgggatgtggtctgttactcataattaataataatgttgataacataggaaacatgggagattcattccatactttctctactatccatagtacctgataggacacagttcttgtctccaaacagctttcattcaaagatggaagaattcaaagtttttattgggcaggggctttgggggatgctgcatcacaagctgaaaagcccccttcattttcctggcttccacctgggtgagaaagggtcagaaatctaaaagactga

SEQ ID NO: 473752 - DNA, 486 bp, Homo sapiens
taccctgacaagctgcaagggtggagctccccaagaccatgggaacccacctcttgcatcagcatgacctggatgtgagacatgaagtcaaagaaaatcattttggagctttaagatttgactgtcctgctggattctggacttgcatggggcctggagatgggagttttatctataagcccctgactggggctgctgcctttctctcagagatgccctgcccagagaggaggaatctagagaggcagtctggctacagcagctttgccgagctgcggtgggctccccccagttcaaacttcccagcagactgctgtgcttgtagggagaatttcaaaccagtagatcttatcctgctgggctccatgggcatgggatctgctgagatataccacttggctccctggcttcagccccctttccagaggaatgaacagttctgtcttgctggcattccaggcaccactggggtataaagaaaaaaaa

SEQ ID NO: 473753 - DNA, 702 bp, Homo sapiens
aggaaaaccagagacctttgttcacttgtttatctgctgaccttccctccactattatctcaaactccgtgctgggagaaccactactctcttcaaagctgtgagacagggacgtttaagtctgcagaagtttctgctgccttttgttcagctatgccctgcccccagaggtggagtctacagaggcaggcaggcctctttgagctgtggtgggctccacccaattcgagcttcctggccactttgtttacctactcaagcttcagcaatggcggacgcccctcccccagcctcactgccaccttgcagttcaatctcagactgctgtcctagcagtgagcgaggctccgtgggtgtgggaccctctgagccatgtgcaggatataatctcctggtgtgccatttgctaagactgtttgaaaagcacagtattagggtgggagtgttccgattttccagctatttgaaagaatgtgggtactgcaatttaagctgtatctgctttaaggggaaccccaagcaccatagtgctgtggttctcacagactcacagatgtaccatcttcatggtcttggacaaggtctggaagaattctctggattacaaggtggaggggcctcaccccatggccactgctacctcaggcccacaaagagtactgccagaccaccattgatgtttcctaaggcctgagggctctt

SEQ ID NO: 473754 - DNA, 579 bp, Homo sapiens
ggacccaggattacagaaattggctccgatgattatggaggctaagaagtcccacagtctgccatccacgagttgggagaccgcggaaagcagtggtgtaattcagtccaagtccaaaggcctgagaaccaagggacctggtgttggcagtgtcaatctggcctccaaggccctttctggctattatcccctgggacttgatgattcagtactgccacagatcctggatttgttggctaagcacacccatggagagaggcatgggagaatggaaagaggagtacccggccgtgtgaggtgtcagtctgcccctactgggctgtgcctcccaattaggctgctcgggggtcacaggtcagggacccacttgaggaggcagtctgccggttctcagatctccagctgcatgctgggagaaccactgctctctttaaagctgtctgacagggacatgaataggcttcttcaagatcagaattgttaaagtagtgtagcaaaaggaaagatatttcagagaatgtcctaatagctcagatgaggatgccatcatttaaatatgaccagactctacatgtatta

SEQ ID NO: 473755 - DNA, 656 bp, Homo sapiens
aaaatctcatcaattaggtgaggtgacgccccaccctgcttcagcttgccctctgtgggctgcccccactgtccaaccagtcccaatgagatgaaccagatacctcatttggaaatgcagaaatcacctgtcttctgcctggctgcagaaatttgcataagtaacaaggagctgaatgttaatcaccaagacaatggggaaaatgtctccagggcatttcagagacctttgtggcagcccctcccatcacaggcccagaggcctaggagaaaaaatggtttcatgggccaagggcccttctgctttgtgcagcctagggacttagtgccctgtgacccagctgctccagctgtggctaaaaggggccaaggtgcagctcaggctgtggcttcagacggtggaagccccacacgttggcatcttctaagtggtgttgagcctgcaggtacacagaagtcaagaattgaggtttgggaacctgcacctagatttcagaggatgtatgtaaatgcctggatgtctaggccaaagtgtgctgcagggcagaatcctcatggagaacatctgccagggcagtgtggaagggaaatatggggtgggagcacccacacagagtccccactggggcactttcaagtggaactctgagaagaggg

SEQ ID NO: 473756 - DNA, 614 bp, Homo sapiens
tccacagcttcattcttgaagtcaacttccagtgcctgacaccgtaagatgaatccatatgttgatctatctcttgccttctctcagtcccaggtctacctttcgctcctggaagcctcctgcgttccttttcctgtgaccctctccaacttcaaaacactgaagtgtagaggtcttgttcttcaaacatctctgtcttatctttctgccttctctgccatgagccagagaaaactctctgcttttgcatgcttatgtggctctagtaggactaaagactgcaccctgcctttcacatgcaagtacaagcagcacacatccttcctgagcattactgccggagggtccacgggggaccaggccctcttcaatagacactacattggctatactctggaatccaattcagcccttcatgggggttgcaagggtgggcgtacaaacatgggctaaaacagttggtcttcagatttccaggccagtatatttttaaaacatcatgtggatcagtaggttgtttgtgctttttagccttttagttctttcttttttctctaataagctacaattgagctggggtatgattgctttttttaatcattctgtgtttctat

SEQ ID NO: 473757 - DNA, 794 bp, Homo sapiens
gcgttcgggctgatgtgcctcccgtggcttctgagaaagcagagagaacatagccatgatccggcagagtgtccgctgtgctcctgattcagcgaggagcccattgccactcccaatcaggctaaaggcttgtaattgttcctgcatggctaagtgcccagagcagtttgagcctgcgagagggctgtccctaactctgctccactacagaggctcccgcatcaaactctctgggctctacaccaattgtcttgctgcctctctcacttctctaagccaccctccttgccaacttgagtgtccctgtggtggtcaagaggtttctcatgcccatctgcctgaggccagtggcaagagcaggttgcttcttgctagtccaactcaccggtttccctggagccatcgaagtggaaagcaggggttcccagaacttgtagtaatccttggatttccagaagaatgtgtctttcatatcactatggttactgcatgccttactgacataggcaaagaaatctgcagccagcttaactcataaactggtcttgctaggctttggtaacagttttgggttgctcccttgttaacttcacctcaacttagcttcaagaggtgcttgctcctggaccaccctttatcttgtcttctgctttccttgtgtatactccagactgactgttaatacacttaaagaagaaaattgaaaatagaatttagagtcttttctcaagaaagtagccagatttaacataattttcttgctgtaaaattaaatttttgagtgtaagagtctg

SEQ ID NO: 473758 - DNA, 1611 bp, Homo sapiens
tcatcagttcattttaacgaatatttgtttaagatctactattcccccgactctgctagaccatgataaaatggcgacaaaaacacacaagctcttgactctcagagttcacagtctgatgggaaaagatcacatcaatgaaggaaagattatacctggcatcatcaccaccaccacccctgcaggggacagatcacactcaatgactgctctgtgcagtacagcgatgcctccccccacctgcactcaggacaagttggaaatgccatccctgtacccctgctccccagggcctctgctggctcagatacctggtttctcaggtaaggaaaccaagcacagcaaggaagcagaggtgcagctatttagccaagtgcatcacaagcaaaagattcctgtgtgtgaaaggaaaaagaatgaagatagatatgcattattcatgctgatgattaaaaaggaagagattcccatggggcctgctgttagcatctcaactggacctgggttgggttcagcatgacattagtttttgggttatctatttttttaaaattttttttccaaagaaccaatattttgattagttcttctgttatttttattatttcttattgtgcattagcttattttcttttacaagcttttgaattgaatatagttttttattcattatatgagtgaaatttattattaatataagtataaaaagatatgaaattttatctgataattgattcaattgcatcctataaatattaacatgttatgcttttattttcatgtttttaattgaagatatgttctgtattttctctattacccaagactgctttgatagaggggtagttttgtcttgtgatttattttgttatttttttcagtttgttttatgtctagtatattatgttttaaaaatattttatgtgtacttaaaaagaagaggtgttttctatcaaagagtgtacatttggtgtatgtccatagaaactgtgtatttttgttgcaatgtttaatgagactgttaaaaatggaaattataaaataaagtactattacatataattcacctcagaaaaagtaaaattcatgttccaacatcagaaaatctattggcatcatattaaaagagtaaaaaggaaaaatcatatcttctcaatggacacaggaaaaagtattcaataaaatgcaacagtcatttataataaaattctaagtaaactaagaatggcaaagaagttttttcacctaataaaggacatcaaaaggctttacttgatatttgtataacagcgaaacttcaaaacgttcccattaagattaggaaataaagatgccccctactctttctattctgtattccattttagaatcaatattacaccaattattctagccaatgccataagtcaaaagaaaggaaaataaagatgtccaaatttaaaaattaggacaaaaatatcaatttgtataactttatgattattactataacaaattcaagagaatatacaaactgttgacattaatatttagcaagattgctacaaaccattaatatccttatatattaatactaataaaatataaccaattacatgtaattcataataa

SEQ ID NO: 473759 - DNA, 474 bp, Homo sapiens
cgcatagtgtgcctgtgttttctcattatggtatatttggctgtgatattcttgcttccgggccagcttaatttgctcaatgcatctcacactctcatttttcttcttgatccccttacttatagtcaatatcatatcattcaggtgttgctttataattgtcttatgtgtgtcaagtttctggaggcaaatgcttccactggtcaatttccaagcctgggtcagttctggctcaacttcagcctgctgacgacattaaccacaaaaaggaaagaaataatggcattcacagcaacctggatggaactggagactattatgctaaatgaagtaactcaagaatggaaaaccaaacatcatgtgttcttactcataagtgggagcaaagcgatgaggatgcaaaagcataagaatgatacgatggactttgaagacttcggagggaagggggggtgaaggataaatgatacaaat

SEQ ID NO: 473760 - DNA, 577 bp, Homo sapiens
gcgcactctccacccagccctgagtctaatgtcttctgccagcatctatgaaattcagcaccaacaagggtttctggccttgctggggatagaaatcacctccaatgaggaggatcagagaagtcctccgagggaggcagcttttgatctgaaccttaaatatgaggaagattttcaccagcaagtgtggggagaagaggatggaggaatacttggcgagaggagggtgagcaaatgcctggaggcaaaagaacaacaacaaaacaaaaccataagaataatcagaagtgttagtcctgccaggtttccctcctgtggtttcccagagaaaggtctgcagcactggcacagcccttgccttagtgctctatgtgataatcaatgtttttcacaaggaatcagagaaaaccgccagacactggatatggctgttccaaatgaccaatattggaagggttaaacatctcaacacaaaggccatcatagttgacaccaagatccccctttcaggactgaaggactgagttgtccctccctccctgttttagtccattttcaagctgctgataaagacata

SEQ ID NO: 473761 - DNA, 2177 bp, Homo sapiens
gaagttaaaaccaggtactcttgctctatgtcctggaaggctgacctctatggactgcctcaattgggctcccctggattccttcctggtggtcagtgggctagctgtggcagcatccagtcattgaaggccagaagtcctgtgggaagcctttccctgctgctaagccaggcccacaactctctaattgcctcatcagttttaggagtgaaaaaggggcaccctatgccatgcaagtccacatgtggaagcaccaggcttgcaaaacataggcaaggacaaataaaggaatacaagctggccaccccagccagccccagcaacacgctcaggtcctcttccacactgtggaagctttgtcctttccctcttcacaataaatcttgctgctgcccactctttagttccgtgccacctttaaaagctgtaacattcaccacgaaggtccgtggcttcgttcttcaagtcagcgagaccacaaacccactggaagaaaccaactccagacacactaagacattcaaaatgctgttaggttgtgaaggggcagattttgttcagaactaggcctgacctctaggagttttgggcagggagagctgagcttattataaggagaagcttttctatcagaagtactaagtaaagtagtgagccctctgttacttgcagtattcaagcaaaggccaaatactcacctgtgagaatgttgtgggtgagattcagctggattacactgtgtacccgaatcttgggtgaggtttcccagagaattagcactcaaacgagcaggaattttcctgtatttgaatttctacaccggaaatacaatgaatctcggtttggggaagacaggtaaacttgaaaatactttaagtcatgctacagtgaatgcattgtagattcaaataatagaatcaataaaagatgaggcaaagaaattaataaaattttaatagtggtttctctgtgtctgacctcacaattcaaaatatcggtgttgttataaataaataattttaaaataattttaaaatcatgcaatatagcaatacagtaagagattacggcagcggttcttatttaggggtgattttgccccatcaccagtggacatttggaaacttttggagacactttttattgtcatgactgagggagtgctcccggcatccagtaggtggaggccatggatgctgctaaacatcttacaatgcacaggacggcccccacgacaaggaattatccagtccaaatatagtgctgcattgagaagccttgttctgtggagatcatgaatgtaactataagagtaataaaaattgcttcaaccacatcacatggattgagaaaatgctatacttcaaataaccgttaagggagtgaagatgatgtgttttgaagggatgtgctttgaagggctgtgttttgtgttgtgtgactcgaaatatagctctggtgacagcagacattctgttgtcagcagtgtgtatgaagagtttcaagaaagctatttcataagatgcgagggagaaaaagccacatttctaaatcaacatgttactgtatataataagtgacattaaatggttatatataactaatttaatgaaataaatcatatagctatttagcaattttatctgctttaaaagttgacatatggaagtgagtcagacacaggttttttaattttctcatagggaaaatggctgcatgccttacattcagggtagccttgaatttggacatgtacagaacatcgatttcagagtcctaagttctgtgttggttatggcataatttttttggttatgatataaaattacttcaatcttatgagcctggaaacaacttcaaaaggcaatcaagtctttcctgcttttatttgctttaaaaagattacatactgtaaaattcagcacattgtatgaactttgacaagtggatagtcgtgtaaccaccaccacaatcgagatgcaaaataatactaccaatccagcaaactccctcatgctgtccctttgtcatcaacctctttcctctgtgttcctatttttatatttattcttacacattttacaagtagaatatttattttcaaaataaacttttctgcagagacccagcatctaaataagacccatgcagagcttctttggacaaagcaaagcatt

SEQ ID NO: 473762 - DNA, 740 bp, Homo sapiens
aaccagacaggtccttaggaaactcctccagcaagcactgaccccttcacagccagtcctgccacatgctgatcaactatgcctattgctgctcactctgcaccttcctgggtcctgtggttcagggcctcagctcctgtggttcaaccagacactccggagttccgctgtctacatttatgctcgtccatatcacctgaccacctgcctgttggatcctatggtcccctgccctcttccctcgggtccccaggccctctgctcaattcatcaggttctgattctcaaaaggaggttccactcactttgacaattcatttggctgtttgcctggctctgaccctcacagtgtctcctgaaataatcttaaatttcctgctggcccctgcacagctgtgggtgggaagtgttcctgctcacccctcgcccacacttccctcacatcaggcctgcactgccgcatcccccattgggcttccctgccggctgagaagcatcagacaatttgagtgcagcagcaaaacagaatggtgtaggctaaatctcagaggtgggttttgcttattttatgaaagccagagagctctcggttaagaacatctgtgcaaataggatttaacttctcccctcactctggcttatattcgtatctgtcttgtttctggaaggtgtggctcctttttaaaaaccactatttcccagtgattccaagtgacatgctgaaatgaaagccctaataa

SEQ ID NO: 473763 - DNA, 767 bp, Homo sapiens
gcgttcctacttctccacatcctctccagcatctgttgtttcctgtctttttaattattgccattctaactggtgttgatttcagactgctgcgctagcagtaagcaaggctccatgggcatgggatccaccaaaccagatgcaagatataatctcctggtgtgccatttgctaagaccattggaaaagcacagtatttgggtgggagtgtcccatgtttccagataccttctgtcacagcttccctttgctaggaaagggaaatccccagaccccttgcccttcctggtggaggaagcactgaattcactcgcaactcaggaaagtttacatgacttcccaaaattcaacttccctgctgagtcactgcctctacagaaggctacaacccacatcagacaactcattcagccaactcacacttgtacttcctgtgtgctccccagcccacacctcctcaacacacacctggtcatcactccctccccttgctctcattcaagtccaggtgtggtcaagctcctgctgttaagagccacaggtaccgcaccatacctgatggtttttcctaaactctgtcctcacctttgtaaagaattcctttattaagctctgtccagttacccagctctgaatgggccatgagacaggattccgaccgatacaccgactaaactcaccattggcagtaaagttgtttttgtatttctttacttgcaggcagatttttaagaggaattggtgtagcggtttcctagcttgtgatg

SEQ ID NO: 473764 - DNA, 724 bp, Homo sapiens
tggggcaagtatgaagtctaggtctgcaagggctggtttggatttgggtccacagcaaagtgaactgatgatctgtggccccctctcccagccctgcggaaccctcattcttcctcctatcagtaatggcaactctgcctttccagtgcacagaccaaaacacggagtcatctttgactccctcttccttgtctcacaccccacatccagcccatcaagaattcctgttgagtctgtcttaaaagtagaccgggaatccactccttttgcatcacttccactgctcaccagtctggttcaagccactcttgtctctcatctggagagttgccatcacctcctaagtgactgctcttcttctgctcttgctgtcttagatgttgatattcacatctggcctcagatattcatgcggtcaactaattccctcaagaatgttgaaaaatatgaagaagaaaaattactactcttttataacaatattgtcatgttttataaactaacgtcagttaagagaaatgaacatagatcttatacagatgcacaaattccaacggaaatggtttaaaatatcttgtgattttatctttgcttgagtgcctatctgaccttcctaactagattttcatttttgaggccaagaacactgtcctgttcttggtgtttccatccttggggagcattgtgcacacagcatgtttatagtgaacattgacttgaaatg

SEQ ID NO: 473765 - DNA, 963 bp, Homo sapiens
tccagcagggaagagaggcactgtgagtcactcagggaagaagagaaagacaagaccaggatgcatgtggagtgtgctatcaccttagggaaacgggactcagatttatgcgagcttcggataagtttaatgaaatatctcagaactgtccacacaaggaaagataagaaacagtatctaatggctcccactccagatgagtccactggtgggccaggacagctctcagagacacacagacactgggccacagaggactgggtcaaagcaaaatgcacctctcagagcctgcaccactgcgtgcgagacagctgttttaggtttattgagtctccacttcgggtcaccacctcattggcacagatggaacagcaactctccctgagggacatgggccccacttctgggagaggagaggcgtgcttgttgtcctacaggatccaggagggggaagctgcagctctcggtgacaacgtgatggtcacggctgatgtggaggtgggagagctgcccacgcctaaactcacggactccacattctgtgaagagtccactgctaacaaactagtgtgtcatgctaaggacaagggccgcctccctttaggtgacgcttgggaagccgccaatgaaaagtgcccaggtggggcaatgcttgcctgccttaacatctcttcagcactcacctggcagcccctccagcagttacctgccagtggcagggatggcatttatattctggtgttgggaatggcccgccatatggcatcctgcatgcacgctgggaagaagcagtctcctgaggaggtgtaaacacacaatcttacaccgaatgtgtcaatacttctattactctttcatgtttgtctcattgccaaaggcttactttgatcttaaaacatacattttttcttacaaaaaaatgttaagacacaacctagttcatcctcttctatatcacaatgc

SEQ ID NO: 473766 - DNA, 1012 bp, Homo sapiens
gggagggtcagcatcagctggttggttgatgtcagtggtggagtcttttgaaagggctgctttctattcggtgttagggagaaagcctaattatgtactggaaaacaatgctgtttacccagggaacactcaacaaagccagggaacactcaacaaagagcagctgttggtgccactcagcctgaatgcaggcatcttgataacaatagatggcaaagctaaagttcacaaaggctgtgtctttaaagcagcggtgtctttactgcagtgtgagttttcacggcggtggacggactccttgctggacgtcagccctgcccctggcatgcgtagccccgagcctgggctcctgccccacagagacaggcagtggaatgacagcggcaccaccagggctcaggactctgagagacccctgcgtccagatcccgactcccctgcttcagaggacgaacatggctccaactttcttgcaactgagaaaatgttagccaattgcctaacacacagaggtgaacttcaaaagacgctgtaccgcccagatgcactggcccgcagaggagcaaaggcggctccctggagggagagaggatggtccatgtcctgggggctccaggcatccccctcccttctaaggggacatagaacatctgaggaaagttgataactttctcaagaatcagctcatttcagcacaaatcttgatgcattactttctgttaaactgatttctgcctcatatttattatatttgtcttttctactttcttcagtagtttaatttgttcatcttccaacaatttcttttgaaatcctagctcattcatgtattctgacgaatgtaaagtgccatatgttgaagattcatacatattactcctaaccaccttttataagcttagactcatatatctcagtgtaaactggctatttacactaatggctacaacatctcataagagacacccaaatggaaagtcatcaggtttactgaaaatggacttttcttccc

SEQ ID NO: 473767 - DNA, 825 bp, Homo sapiens
tcaggactccgatgaaaatgacatgaagtctatttcctccctcacagttattagcctttgttgttgctcctccaaaaggttgacatttggggtatctccacccttaccctgtgatgacaatagctttgatgaggatctcttccactctttatgtgaccaaatccagctgttaaacttcactaatgccagcttattgcttattgtcttctacgttattctgggcatgaattttgctacaaattacttcattcaagttatgcctcttttgatggattcctttctgtggtcagtgtttaatgtttgttctgacatcagaaggactccatctagctgtgttattttccagtacctaggcaaactaactgtcctgaagtctagccgtatctctagtagatccatgagtctcttcacaattgacttttcaccacaatctctctttttcttaaggaaacacttaggcttgaacttctctatgctctgtttcaagagaagacagttactttgggaaaggattaggagctatctactctttagcttgcttccccacctccccccaacctccaagtaagaactcagaaggtggaattaaggacaacagcaagcttatgtctagcgatcccagctctaacacatgagagtttaatggaaggagcagcagtagcatggacgtgttagttggcctcttccagcatagacctacaggattgtaagtttcctgaagcctcctcagaagctgctgtcttttctgtacagccttcagaactgtaagccaattaaacctgctttatttagaaattactcagactcaggtatttttatattagt

SEQ ID NO: 473768 - DNA, 656 bp, Homo sapiens
cacccatgaatgaacaaggacagcttagaggttagaacgaagatggaaaatggcaaatccacaattaacctttccccacaaataactaaaaaaagtggacaaaatagaggagacacaatttacagacattggcaacaagcagtccagaacttgcctccctctgttctttcctcctctctattcccaaggagaaaacacttaagaatgcccggacttactgctttagtacaattttcagacggtggtgcagggaagaacataattagaacttggccaccttacaaaggaattggctttctgaatatttcatatatccgtctgcttcatccctgtttacctgtggaatcacaggctttgatctcctgcttgggacattgtgagaactctcttcctggactttcttcttctgtctatcccactctggttccctctccacactgtagcaaaaccacctgagtaatttgcaaaggaaatttgaataaagcataactttatcttatgttaagtgacacaaaacactaggacactgaattgagtccattgaaaatcggcttcaataatttacagcctgcaaagcttcaaactcttcatctattttgttttaagtttggatttgtcacactctgacattttcatatgtttccaaaatgtcacca

SEQ ID NO: 473769 - DNA, 471 bp, Homo sapiens
ggaggccagttccgatgacccatgcttactgcagatagtgagtttcctccagccctgggcagtccagatgctatctgggagctaaggcccagagtcagaaatcttaggaatctatcttgtgcttattgtactgtggctgagctggcagctgagccacaagaaaaagtccttcttaccctaccatcccctttccagaagcagaggaatctctcctcttggcctccactgctccaggcttatggcagtgggctcttctctggcccagggccacactggtattctttaccatcatcagctaaccttgccttagaaatgaggaaagctgtggcccagagaggcaaggatatgagatcttctatccaacagtctgtgaggagtggaatccttctgaaaatgacacaggtgagcctggatgcagattctttcatcccacttgagtctggagacaactgcagccctggatgacagctt

SEQ ID NO: 473770 - DNA, 633 bp, Homo sapiens
cctggaggcagaggtgaggactgggtgatgggtgtgatgtgggagctgacccaaggagcagcactgaagatcagcaaggcgagccactctgactggcaggcaggtggccccttccctctgtccatagcaggcctgagagtcacactgtggaggagaggggcgacctgcctgccctcttcatcgccagtaccaccactgcttctctctttagccaagtttctccccgtgccctgccttgtggagatcttccaatgcgtcctaagtctcttccccaagaagacgatgttggctgctagctgccaagaggtgggggctgggagctgggggctgggggaggacctgcaccccaagccccctcctctggccacagcctttgagctgaaggagagtggtgatgcagcgggaggcacttttgcggggctctgcagtggaaaggctgacctcacagagggtgaccagcagccgcacaggcgggacagtcgccctcagcgttcattctccgtgttcttggccccctgactcagccctcccttggtttatgctggtgcctgacaactagtaggtgcccagcacaaagttgtgaacagactaaatggatgggtgctattttatatttaatggtttagaaatgct

SEQ ID NO: 473771 - DNA, 841 bp, Homo sapiens
gttcacccagcaccccatcccccgccatctgactctcctcccatgaccctctcctgaggagccaccgcacacgcacacgtttgagcttttcctccctggtggcagtggtgaaggcctgtaatgcgtcctcctccgtctctctgcgtccctggagtgaagggcagctctgggcagcaggaaggactgagacgcatggccccactgatgcccaagccagagacgcgggaatcctctcgagctgatggctgctgccacccgtgcacctgtgcttggcccagttgccaagatgcctgtgccatgggacacccctactcaccctgccctgtgcttcgtccacagggtctgatgctgagtcggctgggccacaagagcttggcccagaaggtgcttcgtgatgccgtggagaggcagagtacgtgccacgaggcgtggcagggcctgggcgaggtgctgcaggcccagggccagaacgaggctgccgttgactgcttcctcaccgcccttgagctggaggccagcagccctgtactgcccttctccatcatccccagagagctctgacgacgctgcagccgcagggagggaggggctggccagagggagaggcagcagggaacgtgggtcagggtggggcaacagtggcatcagccgtttcttcatctgtacaataagaatggtggtatagtgcctgctctgtggattatgattaagtgatcctagaacagtgcctggcccatagtaattgctcaatacacatcagcaattatcactcaatacacgtgagcaattatcttctctgcctttgctggctccaccctcctcttcccgctactgacttcac

SEQ ID NO: 473772 - DNA, 1281 bp, Homo sapiens
cacaattctggaacgtgctggcagccctcacagccctcgctcgctctcggcgcctcctctgcctgggctcccactttggcagcacttgaggagcacttcagcccgccgctgcactgtgggagccccttcgtgggctggccgaggcctaagccggctccctcagcttgcggggaggtgtggagggagaggcgctagcgggaaccagggctgcccgtggagcttgcgggccagctagagttctgggtgggcgtgggcttggcggcccgcactcccgagctgccggcaggccggccctgctggccctgggcaatgaggggcttagcacctgggccagaggctgcagagggtgtgctgggtaccccagcagtgccggcccaccagcgctgcactcgatttctcgcccggccttagctgcctccctggggggcagggctcgggacctgcagtccaccatgcctgagcctccccctcctctgtggactcctgtgtggccccagcctccccgacgagcgcagccccctgctccacggcacccagtcccatccaccacccaagggctaaggagtgcgggtgcacagcgcaggactggcaggcagctccacctgccgccccgctgcaggatccactgggtgaagccagctgggtttctgactctggtggggacttggagaacctttatggtttgtgaatgcaccaatcgacactctgtatctagctactctggtggggacttggagaacctttgtgtccacactctgtatctagctaatctagtggggacgtggagaacttttgggtctagctcagggattgtaaatgcaccaatcagcgccctgtcaaaacagaccactcggctctctgtaaaatggaccaatcagcaggatgtgggtggggccagataggacaataaaagcagggtgcctgagccagcagtggcaacccgctcaggtcttcttccacactgtgagagctttgtttttttgcacttttcaataaatcttgctgctgctcagactttgggtccacgctacctttatgagctgtaacattcaccacgaaggtctgcagcttcactcccgaagccagcgagaccacgaacccaccgggaggaacgaacaactccagacgtgctgcctgaagagctgtaacactcactgcgaaggtttgcagcttcactcgtgagccagcgagaccaccaacccaccagaaggaagaaactctgaacgcatccgaacatcagaaggaacaaactccggacatgctgcctttaagaactgtaac

SEQ ID NO: 473773 - DNA, 612 bp, Homo sapiens
tttcttctttaggtcagttttagatgcatggcaaaattgagcagaaggcacagagacttcccatatactctctgccccatacaccgacagcctccatgcttatcaacatccctcaccagagtggtacatgctgttacaggttccaggccctggatgctgggtggaaagctgacgcgaccccatgccctacggagcttatattctcagggtgtgggcaggataaacgaataagcaaagaagagagtttgaaagatagtgctaagaaggaaataacacacagagaggtgagcttgtctggggctggtggcaccaagcaaggcagtggaggctgtggctggtgtaacatgattctcatccatgcacagatccagaacaggagcccgaaggaggtcagaggtagcagggagcccagtcagctacgtgccttccttccacactgcctccacagctgggccaagctgtttgtttggattgtagagtgattttttattttctgctaacaccgcaaagcagcacatttgtgcatgtttatgtgtgaaatggtatgcatttaaaatgaaacaaacttttatataaatgtacaaagttacagaactgtatttctaagctttc

SEQ ID NO: 473774 - DNA, 987 bp, Homo sapiens
aaacatacaattaccataaggtccagcaattccactcctaggctgaaatgcagagctggtgccagcaagggtggagctctatgacaacctctatgatagggctactcaaagtctggtccacggactagctactcgacacagtcaatgagcagggctgaccccatcggctcctggggcagcaaatcagcacatttcactccctggctgcagttatcagttcaaggctgggctcaggactcttcaatccaagaggagcctgggcaggactttggaggaaaagggcagaccgaggctgtcagcggcggaaacttccgttttaacatgatgttacaccctctcctaaggcctgaggaactggagcccaagcagccttcacagatggcctccccaggtggtcagaccagaccttccctgaagagagagacctctggagctccccctaagcccagctctgcctgctctgcggactcccctatagcagtagaatgctgtgtgaaggatcagagggagccttctaaagaggccactgtagcagcggaggccaagtggaaagtatgccgggagccaggatcccccagcccaagtgctgacaccgccactaatgggctctccactcggtgccttaacttctacatctgtgaaatggggtggcccagtgacctctgaggttcctcctcaccctccctctctgagacttcagaagctactccaagctgaacacggctgggcctgaggtgccgatactctggactgctctggcaggcctgcccatgctccttggagaggagaaggaggcccaggaacacctttgatcttgaggtgggacccaggagccaagtcagtgcacaggcagggccctgagagatccacgatgggtcaggtacttttctagaacattccatacatcatcttgtactatgttcacagcagccctgtcagtcaggcatcctttgccccattctgcagagggacaactgaagcctgagc

SEQ ID NO: 473775 - DNA, 929 bp, Homo sapiens
ggcgtttatgctgagctggtgctgccaggagcgagcgggctttccctgcgctacttgctaagagcagtgtggctccttctcccgtgtccccagcgccgtcaagccccagagtgaagctgtggctccttctcccgtgtccccagcgccgtcaagccccagagtgaagctgtggctccttctcccgtgtccccagcgccgtcaagccccagagtgaagctgtggctccttctcccgtgtccccagcgccgtcaagccccagagtgaagctgtggctccttctcccgtgtccccagcgccgtcaagccccagagtgaagctgtggctccttctcccgtgtccccagcgccgtcaagccccagagtgaagctcctttcagagcagcagcatttgtgtaatgaaggcaaaataaaccttcctgagggaggaaaactcctatgcaagaggaggcaggggcagccaagtcacaggcccagatccttgctgccagttcctgtcttgctgttgcaccaggctcctctgtcagcccctccagatggtgtgctctgctggctccactgcagtcctcagctccttctgctggaccggggcttcccttaggaaaaagctacttggtcactgtccggaggaggcacggcagggccagcttggagctgcagtgcaacctggcagccctgttgccaggctggggcctgcaggctctcaatcttcatgttatttatggactggaaggaccaacccaggtctgtaaggaaggtgagagtctggctgttgagtcagtctcatttccttgggctgttgttcgctggatcccagctagcaagtctctttatctttttgggtaacaattctgtcatatacgtttcttcagattttcaaagtaatacatgctcattttaggtaactagaatgcacaaaataaaaaatatgag

SEQ ID NO: 473776 - DNA, 549 bp, Homo sapiens
gacaatcctaactgccctcttgagcaggtgttgctgtccctgatgtatccagtccatattcagttttccctaaatgtcccaagagtgtcttttatggctgtttttgttgtgttgtgttttgccacacacagattgccatgttctgcccctccatgtcagagcaagacaggtgggctggagcaattaggagaaagtccaaagccctttgcacagccaccaaggccctgtatacacgtcctcccccctgcgcccttgactcgggcccactgggccttctgcaagcacctgtgttgtgctgtggtgcttcctccagccaggccctgcacctgctctctccctggcacaccctttgcctcactatctttgcacagccaactcatagtctattgccctttgtgctccccagaagccattcagatcttagttcagactgggtcaagtccaatcttccaactcccatagcaccagctgccccagaggcccttaccacgatttgaatgtttgtgcactatttgttgaatgtctgttctccttacagaacttgtggct

SEQ ID NO: 473777 - DNA, 757 bp, Homo sapiens
ttggtgttttttcagggtcaggtagatgagggaggaagggtcaccagaagtggcacaggcttctgctgcctacctctccagcatcctggattcatgggcctcatctgactgcttcccatccttctttggaaaaaagacagagaaaccagcagcagtgttcccagacagttctgggatacatgtgcagaatgtgcaggtttgttacatagaaaactgtgataaaatagaaaaattcattgaaagaacaaaactaccaaaacttgactcaagaaacaatggaacatctataacaaataatgagattgaattagtaatcaaaaatgttcccccaaagaaaagctcaggaccagatggtttcactagtgaattctaccaaccatttaaaggaaaactaacacttatctttcacaaagtcttaaaaaaaaatagaagaaaagggaatacttctcaactcattataaaacaagatgaagataacatacccaaaaaaaccatctcttatatagaccaaaaatcccctataaaatgctagcaaatcattccagcaatatgaaaagaaatttatacgttgggaccaactgggatttatcccaggaatgcaagtttctatggttaacagaattggctggatgttacttttatttttataataaatttggtgctttattttgctcatcatattggttcggtaattagcatatgtcaaggcaaaaaaatcccactagatgacaatggcattcctgcattgttttaatcc

SEQ ID NO: 473778 - DNA, 566 bp, Homo sapiens
ctctcttctctcatgcagctggctgtctttggaaagagggatccaacctgtctttgctgggcagccaggccaccaaggttactaactctccttcagtcttgggagtccaaccacctggaagtggctttttcttctgaatgccctgtaagatgtctcactggcactaattgtactgtggtaaatattaacacatttttatccactcaccctcctaacaagtttaccgaagtgttaaccagctcagtgccctcttggtacccaggttcttgtccaacatccaggaaaactgggtcacacacagacttgaaagatggtgaatgcgggggtttactgagtggtggagatggctttcagtgggatagatggggagctgcaaaggggatggagcgggaaggtgaccttaccctggagtatggccatccaccagcaaatctcccttccaaccatccccagctgaactcttcttgacgttcagatgcttctcttttctccttctctgctcttttggcactcttctgcttttctgttcatctgttcatggagactggggtttggaatttatatgc

SEQ ID NO: 473779 - DNA, 1075 bp, Homo sapiens
ggcgctgagtaaaataaggctgaaacctactgggctgcattactagacagttaaggcattctaagtcgcaggatgagacagaaggtcggcacaagggtacatgtgcacaacgtgcagatctataaggtcagcccccgtggagcagagagtctggtacagatagtagaggaggatctggaaggactgaggaaaggcagaatgaagaaggtgaccaagagcctgcaagccactgcagcatggtgctcacaggacagggccctgcatgggcttttctggccaccagcttgcccaagagctgatggccaggtggctttggcctggtacctccccatcccctcagtcagcctgaggttttctgctgtgctgcagctggaaggcagagctatgaacataaaggcaggactggcagatgtgcttctgactgggaatctgttgagaaaaaagcatttttctatgtgtggggaggatgccagggattcacccaaagggccctcccagtttggtcctttcagtccactgccccaaccttcttggcactgaagtcacttttttccgtccacgacatcatcagagacctatgcccctttcctcttctcaaggcagaattaactgttcctgtgtctctgatgcctttgctttaggtgtattctcatgtgagggcacttttcacatttgcaatacatctggatgttaatgggtctgctttctcccttacagagttgcacatttcgtgcacacgcaattatgcttgtaccttcattaagggcttggttcatttttgtattcccatctgtagtgcctgggacctgattggcagtgttttgtactttacaaatctttttaacatactttgtctcattcttcacaacgggtccatgaaataggaagttatcaactgagtcattttcaggatcttcattaatagcatggattaatgcactgtgtggaaataaatgttatctccagggcatactgaatagaataagattttctttaaaaattaccttttgcttagtgtgcatgttgttctgtgtgttttaggtattttatctcatttaattctggaataatccaa

SEQ ID NO: 473780 - DNA, 630 bp, Homo sapiens
tgcctccagcaggtaaacccatacttctgaaggggctcgcactgctctctactgtgatggttgatgagaagcaaagctgcccttgggtgctgccgcttggaatcccaactgcatgctcctttcttgccaagctctctctgctcactgatgtgactttcacaggaaatgctcgttggagcattctgtgttttgaattttgggatttggatgatcaactggagcagatagctgtatgtggaggaggtcgttgttttctgtatgagagcaggatgaggaaatgccagcctgggtccaggagcatgaatatgcaggtgtctggagccatgggcaggttgtcagatgtatggtcgccagatttattaccaagggacatggatgaagctggaaaccatcattctcagcaaactaacacaggaacagaaaaccaaacactgcatgttctcatttataagtgggagttgaactatgagaacacatggacacaaggaggggaacatcacacactggggcttgtcagtgggtgaaggggtaggggagggatagcattaggagaaatgcctaatgtagatgacgggttgatgggtgcagcaattaccatggcatgtgtatacctgtgtaacaaacctgcac

SEQ ID NO: 473781 - DNA, 756 bp, Homo sapiens
ttgcccaggtcacctaactggtcctggcacccagatagctccttcccacccaaatctgccaggcctcgggggcagtggcagctgacaggcctctgagtcaggatgggtgaggaggaggagctgaagggccggccaaggaggaggagggcccggctggcctatctgcagagagagcccacacttcaaatggagcagcctgtggcccccagccatggtcccttggtgggagctgagctgtgtcctcgaggggtgtggactgtggacattgttcacaggaaccagagacatcactctttaggattctaccagcaacacctgaattggctcgacatttgtggagatgcttcccagggtagctccaagtcctctgtccagcaggcagccttgcctgcacagcctccctctcctcctcccgacaagcaccctctcacccaggcagacactgctcctgctctgcccactggtcctaagaccacagagagcatcacttccacccatccttccctgcaccagctttccccaaatcccggtgtccagtgctgagccactaggctggggcttgggggatgactttctcagagctgccatggatagctgtacagactgtccactgcacaactccaggaggctctattttcctagactgtcatggcactggttcctctgtgaaccctgtggcctcttctgtaggtactacagggtcctttctctttaatccactggaaatcaggcctttgctgttagcctgagttgccc

SEQ ID NO: 473782 - DNA, 725 bp, Homo sapiens
cagaagagcagtaggaaaaacatgataggaaagattggaagtctttgtccgacacctgaacaggctgttggggactgggggccgggccatgaaatgacaagcattggactgctacttggtgtttctgctgcaaaactaggcaccatggatatgtctattactcggcttcttagcattcgcattcctgctctcttacccccaacgtccacagagctggatgttcctcacaatgtccaagtggctgcagtggttggcattggccttgtatatcaagggacagctcacagacatactgcagaagtcctgttggctgagataggacggcctcctggtcctgaaatggaatactgcactgacagaaagtcatactccttagctgctggcttggccctgggcatggtctgcttggggcatggcagcaatttgataggtatgtctgatctcaatgtgcctgagcagctctatcagtacatggttggaggacataggcgctttcaaacaggaatgcatagggagaaacataaatcaccaagttatcaaatcaaacatattgctgtgaggactggttaagccagaaatacttatcattagtgtgatcttggctaccatgtaaaacaatggtttttgcctacttcaagagcttttgtaattaccaaaccgtctaccttcctaacttgctatattaatgctgatgcttgaaagtaagatctttggcatttatgctt

SEQ ID NO: 473783 - DNA, 1204 bp, Homo sapiens
acattttctatggtctttaatgattatccaaaaattaatgactgggaatatttactaaattcagactaccaccagagtgttgagtctcatcttttgaacagatctttatgtctgagtccttcagaagcttcacagatgaaggatgaggatttttcacagaatctcagtctggattcttctacacttctctttactcacatacctgcaatttttttcgttcttcgccttgtgtatgaggagcttaagttgaatactctaatgggagaaggaatttgttcactcttgaacttatcgttcagttggcaagagactacccaacgcttgtcagaactactggacaagtgtgcacaattgatccagagtattgcactgtacatacttggtgatgagagctcagtttctgatgaatcctcacagtatttaaccagaataactgtaggattcactttaagagatttggaaactcttccctttggaattgctcttcccatcagagatgcaatttatcactgtcgtgagcagcctgcctcagactggccagaagctgtctgtctcttgactggacgtcaggatctttccaagcaggcctgcgaaggaaacttacccaaagggaagtctgtgctctcatcagatgttccttcaggtacagaaactgaggaggaagatgacggcatgaatgacatgaatcacgaggtcatgtcattaatatggagtgaagatttaagggtgcaggatgtgcgaaggcttcttcagaggcgtgcccctcctcggaacacaacagtagaccttaatagtggaaacatcgatgtgcctcccaacatgacaagctgggccagctttcataatggtgtggctgctggcctgaagatagctcctgcctcccagatcgactcagcttggattgtttacaataagcccaagcatgctgagttggccaatgagtatgctggctttctcatggctctgggtttgaatgggcaccttaccaagctggcgactctcaatatccatgactacttgaccaaggagagagcatgccaaacaggaatgagagctctctagtccatggatttatccagaacttgtagcttggttttcaggctttcgactgtccttggcttgaaggttgagtttcatctgagaatttacctgcctcctaccgccatcaatccccgctctgaagaggtatatctaactgctgttc

SEQ ID NO: 473784 - DNA, 931 bp, Homo sapiens
tttattggactcacagttccacatggctggggaggcctcacaatcatggcagaagacgaaggaagagcaaagggacttcttacatggcagcaggcaagaggcatgtacaggggaactccccttcataaaaccatcagatctcatgagacttattcactactacaagaatgccatggtgaaaacctgcccccaagattcagttacctcccactgggtccctcctatgacacatggggattatcacaattcaaggcacagcattaaggtccgaggtgacttgtatgtgtccccagattggctgagaagtaattcattgtatgattatagcacagtttgtttagtcattcacctgctgatggccatttgggctatttccaattttgtagtacagtagtccccctcctatccacaggataggttccaagactccccagtagatgcctaaaactgtggacagtactgacccctatatacactgactgtggatagtattgacactatccgtggatttgataactgagagggctactaagtgacaaatgggtgggaagtgtatatggcgtggagacactggacagagggagtatcactgtccctggtggaataaaacaggacatcacgagatttcatcatgatactgagaagaaggcacaatttaaaacttatgaattgtttacttctggaattttccatttaataattttggaccatgattaaccacaggtagcaaaaaccatggaaaacaaaactgtggaaaagcagggactactgtatcatgaataaagctggtaagaacaagtacaggtcattttgtggacaagtgtttttacttctctttggaaagtagaagtattgctaaaccatacataagtggatgtttaatgtataagtaactactaaataattttccaaagtggcgtatgttcccact

SEQ ID NO: 473785 - DNA, 901 bp, Homo sapiens
gagagaagcgccgcccaagcggtagagacaaaagaagagcctaggcggtcgcggggcgggacagtccgaccctccgctcctaccttccacgtcccaccttcccaaaactgccctgggcatctcccgagatgctccccgcctggcaccgacagcacagtcagccagctcccccatcatcccgcccccccgccccctgggcccggtctgcccatcccggggcccggcccggctgcactgtggaggggtttgccagaatccgggaatggggccgaaggaaggaggaggggggaacaggaaagaaaaagaaaggaggaggtggcaggagggggtatccggttcagtcactttctcagttgctgcttttagggtggggagcccctcggggcctcccgggcattcaactggggagagcaggtacgcggggaaaaggattctctcctcggcacgttcacgggaggacagtgaaaatttgccttgggtggccaatttcctcattcgcccctattaaaagaaaaagcccaagaaattcaattaaagccaccctggccaatgctctatttgaggcatgaatgtctcccctaaagctgcagcaatcatgtggcattagacacttccggaatcctatagccaacctgaaaaatcccagaccccctttttccctaatttttgctctgatctgtaattttatccacatttgcactagtttgagcattctggctctcccatctgaaagcctgcaattactatataattcttcgcaatttcagatgtcctaatatggactgtaatttttgcgcaagacaatttcctgctatttcaagcatcaacattgtcaaagttgtatgtacataataaatgggaatatcaatgcatagtttttagcataacatcttgactcctc

SEQ ID NO: 473786 - DNA, 489 bp, Homo sapiens
gtgagagcccacccattgtatcagcatgacctggatcatttggcatttctcctgcttacactcattctctctcctgctgtcctgtgaagaggtgccttctaccaagactctccccatccgactgaaagccacatccactgctcaacaaaatcctccacattcactactcttcaactcatttgcacaacctgattcttcttggatgccagacaaggccctgggtgcaggtgcaagaggctgtcccattgaccctccactgagttgtttaacacttaagccatccatgaatggcaagctaaaagagcaccctctaatgcaggccctctgggtctccaagtgtcatgggcaacctccagatgctgctgcaggccctgaaagagttctgctcctgccagttgccaagaagccctcatatcagcctctgtacctgctcacctgcatgctccctctcccacaaggtgttgagagctatgagctaagtaaataagc

SEQ ID NO: 473787 - DNA, 648 bp, Homo sapiens
cctcatcagcgagtgttaacatgaactatcacatctaccatatattaaaaatttgtggccatcatattatggaagcagttgaatgcaatattaagaagtttatgctaaattcagagagcaatttggagctactggcattttttaagtgggtgagaaatgttgatagaattaggtttcggaaggggacagatttacagcagaccagtaaggatgatgatgagaggaaaggagatactaggaagcttaatgtggcagcaaattcatggataaattggatgggaaagaagccggaggtaagaagtgtagctctgaagacatcagcagacagtgaagaggaaatgaaagggtcatgtgacttggagattaagcaaatgcaccagaggaaaagcctgatacatagttggtcacattgcattaagggaattgctttctctatatagaaattaatttgatatcaattttattgatttttggcactttactatctctttattcagtttaagatgctcatcattaagaatatttgagtatcagccttgtaagttagaagctgtcacttatattttgttttctgaaagattttgttttaagagttgtattattgcttcattaaatatttgcaagaatatgtgagagtagccagttaga

SEQ ID NO: 473788 - DNA, 676 bp, Homo sapiens
atcaaattgtcaatgaacggaattgaatggaatcatagaacggaatccaatgtaatcatcattgaattgaacccaatggaatcattaaatggactcgaatggaatcatcgaatggactcgaatggaatcatcatcgaatggaatagaatggaatcatcgaatggaatcgaatggaatcatcatcgaatgaaatcaaatggaatgatcatatggactggaatggaatcatcatcgaatggaattgaatggaatcatcgaatggaatcgaatggaatcatcctcgaatggaatctaatgaaatcaccgaatggacacgaatggaatcatccaatggatttgacgaatggaatcgaaaggaatcatcatggaatagattcgaatggaatcattgaatggaatggaatggaatcatcaaagaaaggaatcgaagggattcatcgaatggaatcaaacggaatcatcgaatggaatggaatggaatcatcatcgaatggactcaaatggaataatcttcgaaaggaatcgaatggaatcgaatggaacaatcaaatggactccaatggaatcatctaatggaatcgagtggaatcatcgaatggactcgaatggagtcatcatgaaatgaaatcggatggaatcaatgaagggactcgaatgaaatcatggaatggactct

SEQ ID NO: 473789 - DNA, 568 bp, Homo sapiens
aggcacaggatgggggaggggcgggctgtaggcttctcaccatgtcctcagattgtactccctttctagcccttctgcagcaaataaacctttgccatcagttcaccaaaagcactcatgagaggaaaaatggcatatcactaaatatagagttctttaaagatagcatcaatgccaatggagaaaaaatagagaagatccaaataaacataagtagaaatgacaaaggggatgttaccactgatcccatagaaagacaaatactccctagagactactatgaacatctctatgcacgcaaactagaaaatctagaagaaattaataaattcctggactcctataaccttccaagactgaaccaggaagaaattgaatcccagaacagactaataatgagttccaaaactgaatcatcatataaagactatcaaccaaaaaaagctcaggaccagatggattcagagctgaattctaccagatgtaaaaaaaagagatagtaccattcctgccaaaactattttaaatattgaggaggacaggctcctctgtaacttattctatgagg

SEQ ID NO: 473790 - DNA, 1655 bp, Homo sapiens
gtgaggggttgagcacagtgggtttgagtgagtgaagtttgtccccgccagtgttgaaatggctggctggacccagagctggtgcacttcagttcttgcctacaaaagggtcaaggagactctcccatctcagttatccccaccatcaatgtatggctttgatgatgatagaagacgcttagggagtatttcccataagcccactctttgcttccaaatgacaagggtggaaattgacggctgcagctttcagtgctgccctctgtacaaggacattcccccattcatgttactaatggttccccctggccttaggtttctaattcttctcatccaaaagattgtgccttttcacactgatgcctcctacatttctgggcagggcatgtggctggcacttatcctctggcctaaatctgtgcagctggggaagtattttattcccatatccctcatctcactggaatctgacaccttctgttttctccaagtgacttcaagtggttacctttcatttaacgtttgaattttatagggttgatatctatttgggaattactctttagtcagcatgccactattatgcctcaaccgtggctgtgtagtggaatcacctggagaggcaacaagttctccaacttacaccaatctttgagcacctccattcaatatatgcaaaagcatctggtgtattgaaatgagtcagaaaaaatatagaaataaaaacatatatatcaatgacggtgacatgacagcaggcgggaatttccaatcattcttaacagaatgtaaaaagcttatatctggacaatgccccgagaaaggcagtacaaagaaagaaattaaccgatagctgagacctgattctatgagaaatatgcagtatcacacagggataaacagtgcaggttctgaagctctgcgtcctgggtttgaatttggtttctagtagttaataacagtatgttgaacaaattatttaatctcatgtttttatgtttttaatctgtaaaatggtcatagtaataatagcacagatatcatactgttgctgtacgataggtattgaaatgacttggtaaacatgaacgttcaaaacacatcagccatgtgtgaaatgcagagagtgatattaacatattttatctttttgttgaaaaggtgtcattgtattatttgttaccattagagtccataattttggtgatccagagcaccttttatattaaaaatgcataaatgcattatttttcatatgagtcaatccctcctcaccatgatatctgtcatgtatgtatcaaatataatatgccttaattgagatgtatttttgtttaaatagaaatactacaaaatatgttttcaatatctcacttataattggatactaatattataattactttgcagaaatagattacaatatagctgataaaatgatgtaaaatttccatgaaaaatttgatgttgttcctttgtttttcttttgtatacaagagttgcatcaagtctttggatccagcgtttacgtatctagcatgtaaatgtctaattgactttatctgaatttgtttgtggcatttcaagattggtggatattattccattcaaatgttctaattaaatagtgataacagtaaaactttatgctgtat

SEQ ID NO: 473791 - DNA, 648 bp, Homo sapiens
cctttgaatattttaaacaaatccttcttggaaagctgcctcaaccctgggagaatcctgaggaaaaatatatgttcaatgttcgctatactgccatagtcactggcagaatacagtctttaattttctttgttcttagactatcatgtgtatgcccttatactttcaagtcagtttccgttatatgtagtttttccacggtgagcagacatacacaacactaccctcaaaggctgagagagttgagaggcctaagaaagaggctgacaaatcccgtttctcagaaagaaacatttaatagagatttaggaacagaagctatgtcctggcagcctcgagaggaggtggtggatcctagcactgttatcctccagacccaaagcttattccttccacagggaaggaatgtgtgggacagtcgactcttcagggaaaggcaaggatttacctacagacgggatttatgtgaccaaaattctgatcactcaacccaagttaggtgacaatagccataagctaggttttctgtcagggtatttttccaaagtagctggaaatgaattctaaagttgaggataaagctatgtcaggctagaccagactgaagacaataaactaagtttgatacagatcagattataacatgtc

SEQ ID NO: 473792 - DNA, 654 bp, Homo sapiens
tacacctggtccagtggtagcctcacagacagctggcacgggtgttggcacctgaacctaactcgaaaaccatgagtgaggatgcaaaaggctgtcacactgaccctttgcactggctggcggaaggcagccgactcacgcaaaaatgcagagcatccactgagctattaacacttaagccatccacagctaaaagcactgtaacactctttctggggcttcaggggtcacaggcatccccagatgctgctacttgtatctgcatggagtttgctcctgcgagtgcccaaaaacgctcaccttggctcctgcacctctcacctgtgtgctccctcccacaagggcagcatgatttatttaactatcgcaaggacaaaaagcaaacaccgcatgttgtcactcgtagatgggaatggaacaatgagaacacatggacacaggaagtgggacataacactctggggactgttgttgggtggggggaggggggagggatagcattaggagatatacctaatgctaaatgacgagttaatgggtgcagcacaccagcatggcacatgtatacatatgtaactaacctgcacattgtgcacatgtaccctaaaacttaaagtataataataattaaaaaataaaaataaaatgtgatga

SEQ ID NO: 473793 - DNA, 826 bp, Homo sapiens
gcacagtggaccgaatgaacagggcacacccgtcgcaagtctgatgaaggggtcaagaaaaactcttacatcattagtggtcccagagactcctctttgggtcatccctgacaaccgtaacttgcctaaggtcctcaagtgccaaaaagctgccctcctcagtctcatgctttatgcccttagagagccgattgctggtcacataatcatgcaagcagcaacctgcaagctcggcatggctacaaaggtgtccttgttacaggatgaagccggactggctctctggtatgtcccagctgcaggaaggagtggccttccttcttctcagtattttttcagacaccatgtgtctggtaaggtcacccctttcccaggcctcattgcttcctggggagtcactgggtatgaattgagtaaacagcaatgggagtttgtgcacctcacagatagtgttgccactgtcacgtatcagggagctcagtggaacattgccgctttttatcctttaaacaggacatccttgataaaagacaggccacaagggccagtacacttggccaaacttcaggcaattattttagcacaggatgcttgggccagtaatgaagccatctacacatttcgtatagactctcaggctattgtctaagaactggcacctgtggaatagagaattctagggatcttttgccccaaagatacaaaaccaaggtcatatatgtttgtaaacatattaaatccataacacgaagcctcaccaaatgcttcttatcccctcaagttccaaacatcattgatagtgtcctaggcactaatttcatatctc

SEQ ID NO: 473794 - DNA, 578 bp, Homo sapiens
tctgcaaactttctgcagtagatgtggaccagtcttttggaaatgaggtgttgaaggatatgagctctttggatgacctagttaaaatcggcttgtacttcgtcagttcaaaatcaaagacccgagaggctgaaaacatctttgcacttctgatattccatcacagaccgactctacctccaaatccaggaattcaggtcacagtcaccaatagatgccatggacctcaagaggagccacagaaagactcatcagcagctgcattagatactcataggagtgtgaaccttgtggcaaactgcatatgtgagggatctagattgtgtgtttcttatgagaatctgatgcctgattatctgaggtggtacagtttcatcccaaagccatcccctacaaccctgatccatggaaaaattatctttcatgaaatcaatctctggtgccataaagtttggggactgcttccatggacaatagacagatacttttacttcatgaaaaaccctcctctaaaacaatgggcaaaagttggtgtgatgtagagaatgttgggtaaggttttattgctttgcttctgt

SEQ ID NO: 473795 - DNA, 600 bp, Homo sapiens
cagacttcttggtcaaaaggatgtacaggaaacatggtggcgtatgcttgtgaggaggcctcaaggaacttttactcatggttgaaggcaaaacgggagcaggcagtttacatggttgaagaaggagcaatagagagtgagggggaagggtctgggtatggtggagagttcagatggttgggggttgtccaaaggttaacttctctcttttcaaaggagggccatggctgccctcaaccaaaggcagggtggccagcatttagcaactgggtccaactgcatgaaaaagtaggatactacgtggttctgaaagcaactgtgatatttgaagataaaaaggataaggacattacctgcattctgtcctgccaacctgagagtgaaactgccagtgcgaaattaacggagacagtgaaagagatcgaacccaatcaactccatcttgcttctaacctccaagttgtccttgttcatttcggggtgtacgctgaactaactttgcaaggaacttagtttatagtttgtagtttaaaacaaagacggtaacagccctttcccaaaacaaacccccttcttgcctgggacaaggctgcctttgta

SEQ ID NO: 473796 - DNA, 720 bp, Homo sapiens
gaccaggactgcaaacacttcccctggtggggccagccagcctgcccacggcctcagtgccctggaaaaccgccagcgtctcactgtcgcttaacactttgtgggaagtcactcctacactggctgcagacactttggaagaaaagaaaggatcgatagacttgcaaagccaggaggggaaatacaataagcatttggtgttactggcaaggaaaggttcattttgaggttgctgcagcactccatgtggcagcacatcacccagactccacctcaactgtgtttccctcgagcaatcgctgcacccgcggagctgtcttttggtcctcatagcaaccccaccgacgaggaaggaagtgtggctcagagaggcagacactggacccaggcatcagagcgcctcagaggcaaggtctgcatttggtgcagcttccaacgctccccacggctccactgctgcttcttgtacatgcttggctgccatgccccaggaaaccccaccagcatctctgttgagaggctgtgcacatcagccccacctcccttgggtggcatgttccacccagtgctgttcagaaccaaggacctctctggtgttttctgcctgaggagcccccgcctgcacccagcagggaagacccacagcaaggtaaagctgtgagtgcagtttgaggacagacagacctgacttcaggccagacacacccacagctagctaac

SEQ ID NO: 473797 - DNA, 1085 bp, Homo sapiens
actgcctgggacattccttctggggccatgagctacctttccccagagtgcgggcaggtgtcctataagcctgcaacccccacgggaaagcagacatcgccacagctggctccgccctgcagcacaaacagggaattgtcttatgtggagagtggcctcctaacctgccagccctgtccctgcaagtctgtgtggctgttgaggctgggaggctgggacgagcagacacagctgcggctcttggttgtgaatgctccagggacagcacaagctgcgagcaccagggacaggcgggtaatgtgcaggtgtgtgtgtgctggtggggactggggagtccatggccgcattactgccgtctctgcctgtatcgccatcgggccgtcctccctctgcatgaggctctgtgacctcaccccttccgtcaagaagccagcgactggtcatagggtctacctgaaatcctaccttgatgacatctgcacacgccctattccaaacaaggtcgcactcacaggcaccaaggccgaccctgcttggtctgctgccctcaggggtcccctgctgcatatccttcacctcctgcttccacagctcaatcccagcaatggattcccaggcaacgtggccgggcccagggccccactgctctgtgcagcttttggacatgacaccctgtttcccagccactacagctccagccatggttaaaaggaccccagatatgtctcaggccactgccccagaggttgcaagccataagaaaccttggtggcttccacatggtattaagccagtgggtgtacagagggcaagagttgaggcttgggagcccccacctagatttcagagaatgtagggaaatgtctggatgtccaggcagaagcctgtttcaggggtggagacctcatagagaacctctactagagcagtgtggagttctctactaggggaatgtgaggggtctccactggggcactgcccagtggaactgtgagaatagggccaccatcctccagcccccaaaatggtagattcacagacagcttgcactgtgcctctgtaaaagctacagaaactcaatgcca

SEQ ID NO: 473798 - DNA, 783 bp, Homo sapiens
gagctgacgtctaactgggagcagggaccccattacccaacatcagccccgacccctacatggtgtctaagtagtccctggcacaaagtgaaggttcagtagagatgagcttgctcctcctgggcctcagcaccatgcagaagggaggcccggcctctgtgctcacctcggtggcatcagccccaacctctacacgggccatgggcgccgacacgtccagcactggcgcagagaagactgatggccgctgtgagagcatagcaggggagaagtggaggaagtgcagatttctttttctacgccccaccggaatccccatctcttcctgtctgattaactctccttcaacctgcaggccacccagtgacaatcacctcctcaaggaagcctccttggctgccctggagccggtggtggacgaacccccagtttacagagttggggctgcaggcaaactacatctgcatggagacttccttgacggcttttggttcaggattggggtgcagatgcccatcgatgtagaccaagggacagagtgcagagggccgacggggcgcagccttgggcctctggctcatcccagctggagtggagatcagggtcatggatgccagttccctggaagctcaaatatcctggattcccagtgctgcaggctgtggcacccaaagaaagaacacacttcttatgcctttattctgtgagttgttctgaagaattctgctgggttccatctttggttttcagctctctatcgtttgactcccatgtctggggccc

SEQ ID NO: 473799 - DNA, 1666 bp, Homo sapiens
cctggatagacctcacttcccgacatcaccccccaaaatgatttcacaaggaacaagggcttagaactaaatgttgatgaattactctagtgccactgaattttatctccttggcttccctggctctgaagaactacatcatatcctttttgctatattcttctttttctacttggtgacattaatgggaaacacagtcatcatcatgattgtctgtgtggataaacgtctgcagtcccccatgtatttcttcctcggccacctctctgccctggagatcctggtcacaaccataatcgtccccgtgatgctttggggattgctgctccctgggatgcagacaatatatttgtctgcctgtgttgtccagctcttcttgtaccttgctgtggggacaacagagttcgcattacttggagcaatggctgtggaccgttatgtggctgtctgtaaccctctgaggtacaacatcattatgaacagacacacctgcaactttgtggttcttgtgtcatgggtgtttgggtttctttttcaaatctggccggtctatgtcatgtttcagcttacttactgcaaatcaaatgtggtgaacaattttttttgtgaccgagggcaattgctcaaactatcctgcaataatactcttttcacggagtttatcctcttcttaatggctgtttttgttctctttggttctttgatccctacaattgtctccaacgcctacatcatctccaccattctcaagatcccgtcatcctctggccggaggaaatccttctccacttgtgcctcccacttcacctgtgttgtgattggctacggcagctgcttgtttctctacgtgaaacccaagcaaacgcaggcagctgattacaattgggtagtttccctgatggtttcagtagtaactcctttcctcaatcctttcatcttcaccctccggaatgataaagtcatagaggcccttcgggatggggtgaaacgctgctgtcaactattcaggaattagccttgctctgaggacttttacatggtaaagcacttagtatggattctagaataatctgaaaagaacttgctcatctttgaactgcatcataattattgccattatcaaatgatttgcatgcaacaaaatacttttaagttacagctacggtttttagtatgcttagttgttacttgaaactcagtctattatttttaagacatgtcttgctatctagctatctatctatcatctgcctttcttaagatatgatgatttcacaattaaactttgaaaaattaaatgtcagagatagactatctatatagtctagaaaatagactagtggttgcttagggctgaggggaatgcagacatagggtagtgatagctatggggtacaggctttctttttgaaatgatggttgtaaatatctatgaatataccaaaaatcattgaactatacattttcaatgagtcaactttatggaatgtgatttatatttcaataaagcttttgaaaatagtatattagatcatgaagaagtattgtgaagaaaagtgaaacaggaatgaaagggaatatctcttgcaggagtgttgaaatttcaaataaggttttcagggaaggattgagagaggtaaggtggtgatacattcggaaacttgtt

SEQ ID NO: 473800 - DNA, 594 bp, Homo sapiens
gctctggattctagttagaacagatgcagaaagaggcagctgctgtatgtctggacaacactctggttggtaacatgacgggagtcgtctttggcagttttctgacaaccacatccagtcaagtcctgttctacttcttaaatactcctgccacatctgcttctctcctattgccactctccttctccaagccaccatcctttcaagaaaaacctactaactcatccctcttgccctactccagacctccccagcccagtaaaagattaacatcaataactaataatcaactggaacaatacaatgacagtcaatctgatgaccaagatggctaccgagtgacggaagagtgggtagcatacacagcagggagacattggacaaaggatgactcacataccagatgggacagaacaggctcatggaaggttgcatcaaggaacctcaattttggatctagcctccagaactgtgagtctgcagactcagtatctcctatctagagccaggcttcatactgatgcctctgcatttgtgtcccatggtgataatgaaaacaataccgacctaatcataagccttcaagcttggctc

SEQ ID NO: 473801 - DNA, 992 bp, Homo sapiens
gctgcagtgcctcacttctgtcaacaaaatgcggcaagtatatacactggaatggacttgtggggtttaatggtacatccatatctaatatcactaagcactgccaggatattcccccaaatgaccgaatatgaggattccctcccccttgatctcctcaacttcaacatgactttctcatgtttgacatgtggcaaattattcaaaatgggtcataaagcagcaaagacaactcgcaacatcaacaatgcatttggtccaggaaccactaacaaacttacagggcagtggttgttcaagaagttttgcaaaagagaccagagccttgaagatgaggagcatagtggctggccattggaaattgacaacaaccaactgagagcaccggcatcggtcaacagaggggacccagttctctttcacaacgacgcccaactctacgtggcacaaccaacacttcaaaagttgaacggattgggctttaaagttttgtctcatccgctacattcacctgacctctcaccaaccaactaccacttctttaagcacctgaacactttttgtggagaaaatgctcccacaaccagcaggatacagaaaatgatttccaagagttaatggaatcccaaagcacagatatttaagcaacaattttctcaatggcaaaactgtgttgattgtaatggttcctattttgatgaataaaaatgtgttttaacctagttataatgatttaaaattcatggtacgaaatcgcaattacttttctgccaacctaatacatgatacttctggacctttgatactgttcctttagtcagttatcttttcctacaccagtgtcatgctgtttttactctttgtactagatcccaagtgttgatatgacacattcccccttttttttatttaaaaaagtttacatttatttatgggcttttatttttccatattaattttagaaagccagtttctcaaatttcatgaaagaa

SEQ ID NO: 473802 - DNA, 1099 bp, Homo sapiens
ggaggcttcattacgtaggcatgattgatgcctctatttgataagcgatttgagattattaatgcaatttatgaacccacagaagaagaatgtgaatggaaaccagatgaagaaggcaagatttcggaggagttgaaagaaaaggccaagattgaagaagagaagaaggatgaagaaaaagaagagcccataggaattcctgaattttggttaactatttttaagaatgttgacttgcttagtgatatgcttcaggaacatgatgaacctattctgaagcactttaaatttattaaagtgaagttcttggatgctggccagcctatgagttttgtcttagaatttcactttgaacccagtgaatattttacaaatgaagtgccaacaaagacatataggatgagaaacattaagaagcagcagaaacacaagggacatgggacagtttgtactgtgactaaaagagtttccaatgactcttgctttaatttttttgcccctcctgaagttcctgagagtggatatctggatgatgctgctgaagctatccatgctgcaaacttccaaatcagtcactttttacctgagtgtataatcccaagatcagtgttatattttactggagaagctattgaagatgatgatgatgattatgatgaagaaggcaaagaagcagatgaggaaggggaagaagaagatgaggaaaatgatccagactatgaaccaaagaaagatcaaaacgcagcagacaagtgtggaagaagaagaggaagaagaagaagagaagaagaggaggaggaggaggaggaggaggaggaagaagaagaagaagaagaagaagaagaagaagaagaagaagatcttcagttatttgatgctttttgtaaaaaaaaaattaaagttcattttctttggtctgacgctcattcctgcccaatcctgcttcttccacccttaatttttctcggacattaacccccaatgaatcttgtatgcttctgactctttctctgaatctaactctgcagaacccaatgacacatagcatttaccatgattgcaatctataaatttatttatgtaatacctagtaaatatt

SEQ ID NO: 473803 - DNA, 1400 bp, Homo sapiens
tctctctctcttttttttttttttctttttttgagacggagtctttctttgtcgcacagacgccagcgagagccgctccttccccacgagtctatggctttcgggttacttaagccacggagaactctatggttccggggcgggccgggaggtttgagtttgaagactggcgggaagatgtccgcagctgttgccaggccagggttctcccgagagggaggacgctgggactgtggcttgccctgatcggccgagaagagtttgccatgaatcttctgcgtcggagtgggaaacggcggcgttcagaatcaggctcagattcgttctcgggaagcggcggtgacagcagtgccagcccccagttcctctccgggtccgtgctgagcccgccgcccggccttggtcgctgcctgaaggccgcagctgcaggtgctccaggaacccgggaggccgcgggcaacgggggcagctccgccgggccatgggtcgggaggtgtcctcaccccacgggacttgcttcgttgcataccccattgggcttctactccccttctctgtgactggggcctggtgtggcaggtcactttctttagcttcatcccatcatctgttgggcggctcgttcctggtagtacccagtactccttacagacccttaagacaggattgttgggcctggagtacggcacaggctgttcggcgtccaggggaaggctggaagggattcgtaatgagattggttgggtgtcccgtggatcctacagttcctgactacgaaagagacaagctactattggcaaactggggacttcctaaagcagttctggaaaaataccacagttttggtgtaaaaaagatgtttgaatggcaggcagagtgccttttgcttggacaagtcctggaaggaaagaatttagtttattcagctcctacaagtgctgggaagactcttgtggcagaattacttattttgaagcgggttttggaaatgcggaagaaagctttgtttattcttccctttgtttctgtggctaaagagaagaaatactacctccaggaagtaggaataaaagtagacggttatatgggcagcacctctccatcaaggcatttctcttcattggatattgcagtctgcacaattgagagagccaatggtctgatcaatcgcctcatagaggaaaataagatggatctgttaggaatggtggttgtggatgaattacatatgctgggagactctcaccgagggtatctgctggaacttttgctgaccaagatttgctatattactcggaaatcagcatcttgagttgtcaaggcattacttcattttctcattgctattgagaaattcagtgctatgctggtttttcatcctttgtaaacaattttttaaa

SEQ ID NO: 473804 - DNA, 578 bp, Homo sapiens
gcagcgctgacttcagcgccagtaaatgggaaagcagctagttactgctaaaactgtggattggagccagtggtttaagccaaaagatgagtagacctgcacaaagttctgatgatcaaatgggaaagagattaagctgggactgcctaagaaaacacagatgggttctgtatgaaaaacggtcctggatgagccatgttggaggaggaactgactctggagcccctggccactctatccggctcgtcatccacagtcttgcctgtgacaagtggttccaaggaggagggttgcaacgcccaggctccccctgcatggtaggccaagccccttttgggttcatggattatttgggcttggagctgccccaggaccctgatcccagaaatggagatgatgatgaaggaaggcagatcaaaatggctgcaagggacgtggttgccaacattggggttgccatgacaactgtaatgcctgtgatagttgagctgagaaagcaggcggtaagaaaggggaggtgaagaacctgtgttaaacagcatgccaattgatttataaaggactgctatgtctgtgtt

SEQ ID NO: 473805 - DNA, 575 bp, Homo sapiens
gccacagaccaataagtcatagtccagtgtttgagggatgaggaggtatgttagtttcctcaggctgcctaacagaatgtcacaggctgactggcttaaacaacagaaatgtatcttctcacagttatggagactagaaatccaaggtgaacttgccactggggtgctgtctagtcagcgctcttctccactgacttgcgcaggctcccaaagggagctcctaagagaagacatcaagggttcaaatcttgagttactacacatcgcagaagctgaaacccaggactccttccagaccccgctttgtgcattctgtatcagccctgatccttacccatctctccaggactcatcttctctaattctccccaaatactgcagcccaattagcctcttggattactttttctatttctcttcttcaaaattaaaaaaaaaaaagaagttgaagggttgtactgcgaccataattaatctttccaattcgtccttgcactgtgggaaatagcttatcccaagtaatggaaggagaaaagtctccttccctttttcctgagtttagtggtcttgtcatg

SEQ ID NO: 473806 - DNA, 805 bp, Homo sapiens
gctttagttaccagtttattataaagaatgcaaacgaagagccagacgacgagaaacagattaaggttcagaagtgtctggagcactggggtctgcttccctcttgggcccatctcaatccatgatgatggcatcaagattgttaacggaattacacccacaaaactcctttcatacattcacagcttccaggaggacattatctttggaggcactaccttcaacctgatgctttttcctgaaatgacttttttctttttacatttggctactgtgaagccaaaagttcagggtaatcaagatactgaatgtgccactgagatgctgcttgaactagccacctacatcaaagagctatcagtaccacaaagggatgctgtatctcatctcttctttcaaaacctcatgtgaatatctttccttcagcaaccagcatactttgttcaacagtgtctttgacttactgtccatttctctacacagtattctgagaagacataataggagaggccatgaattgaaggcattgactcttcttgctatttgtttctatatatatcgagattaggagccagattgttgcctgacagctggtctttgtgaatacagtggtgtatggttgacattcagctgcaagtttttttttttttttttaaatctgtgaattgatgctggttggtcagtcagtataccaaaagataatagcacacttaaaaccaagatgaggcggctctgcctatggagtagccattattttattcctttactttcttaataaacttgttttcactttaaaaaaaaaaaa

SEQ ID NO: 473807 - DNA, 702 bp, Homo sapiens
aaaatccaggtgttgtcaatgtgatggtattaagaggcgggggtctttaagaggtggcaggtttggctttagataagcgcagggacgattcttccatgatacgaggagggactgcagagtgcactggcacagctgcaggaagatgggaagatgtggttgggtaattcactgtggcatcttggggcacctgctggccctctctgagcctccattttcttacccacgaaatgtggatttggacccagttatctccaaccacccaagagtctgtgattctgctactaagaaaagcaaaaggcaagtacaagatagcatgtgtttagttgctggggaaagctcactcagcccacagctaacagctcagctcagaaagttcctaccacccactccgcttctaacgccttttaatattcgcacagagttttctcacattgtggctctcacacacttcctttatacatgctgtttcctcagcctggaatgccacctctttctttacctggagaacccctgtcccttaaagacgcaggtcagaagtcacgtagtactcctctgctaccacctaatgcaaagcgtgattattccttcacttctcttctgcatttaaattattgagggaagaggcttggtctcattgcctttggaatagctctggatctgcgttcatgttttgtatataatacgactcagtaaaggttgtgt

SEQ ID NO: 473808 - DNA, 931 bp, Homo sapiens
gtttttttttttttttcttttttttcttttttttttttttttgagacagcttaaaaggacaaaaggacactgctgggggctgctgccaggactcaagtgtaagccactggcagtgaccctcctgcccccagcagtggagctgctatgcatttacaagtacctggaggacaggctaccctgactgcagctgccacttggaggtgaaacgtgcactccccagccacctgactatggctgctgccactgaaagcaaccctgtccatcctagtagcagggccacagctcagccactgctgccccaatctgagcatttcaccagggatccagaatcaccccatcccttgcctaccacaagccagtgccttgcaaacaccatcgggggcctgagaacccatccgcctggcccagctccatatgcctgcagtgcccaagcatgctctctggggttctggggatcagacagcaccatccaccatcattggcacctgagcatgcctcctgggaggcagaaggcaggccaacccaacttgctatcatcaccacagctgataccaccccacgtgcaacctgttggcctgggcactttcctgaacaacccatctcagccaccaccaacaccagtgcaaattgtttgggagcctgagggttgtcctaccactgctactgcaatggcctatagtatgcctgctgccaaggagcctgaagacctgccaacctgcccagcctgccactgcagctactggctcctaagcaagccacctggagtccaagaatcagcccacctggacccactaaaaacagtgttggtatatgtcaccctggggcccaaggataggcacactcagcctgctaatgcccccaccagggcctcaggactggcccacctggtgtccccaaccccaacaaaacttcaccacagcctccactaata

SEQ ID NO: 473809 - DNA, 918 bp, Homo sapiens
gcgctgtgcagcgatatacctctgccgtccagatgtggtagcaaggagaagcacagagtgaagtccgggaaagcctcttgtaaacccatcagatcttgtgagaactcagtcactattatgagaacagtgtggagccttgcagaccatttgaaaggcgagaataatgggatttactgggaaaaaaggataaaagggaaacagcgactctccacaaagccagaacccctggtggtgcgcttctcgcctcgcagttttaaaatcccgggttctacacaggaagaggaagggccaggctcctctctgctggaaacggtacgaacttccgtggctccaccccagggcgcactcctcccagtgcaccggcgggttgcagttctgccaggaagcccttcccacccggctgtctcattgtcatttgcgtattttttctatttatgtcaaactcagcctaacagactgcgtctacttcctcactacctagccacttttttcgcctcaacatttttaagcatttactcagttcaaagagccactagataaataggaattaagcaaataaaaaagaaaaagaaaaggaggggaattctaagaaaaagggaaggtacatttgagctgaagcaatcttttgtttctctccattttttgcccaaagccaacttctccccttattagcaggaatgcatctttaatccatctttcttttaaaagactgacaatgactttacctaaaagctaatgtttcattcaattattaaaatatagagtgaaggtaattttctctggtggtatgttttaatttctttcttttaattttttctgcgtctgttctatgttttttgatttgaggctaccatgaggcttacaaataatatcttattacccattgttttaacctgatgacaatttaacactgattgc

SEQ ID NO: 473810 - DNA, 745 bp, Homo sapiens
ttttcctgtaaatgtcgggtggcatctcataccatccccgactggataatgaagcagataaactggctattccagttcctgtagcagtagccattcctaaccctataactgcttatgctgctgttctcccctctccttcccattttgatggctttggcagtgtgatagtccctttgtggttgccaaaatgtgtctggaattggtgggttcttggtctcactgacttcaagaatgaagccacggaccctcgtggactgaagctgcagaccttcgcggtgagtgttacagctcttaaggcagcacatctggagttgtttgttcctcctggtgggttcgtggtctcactggcttcaggagtgaagctgcagaccttcgcgaatacattgtatcattaactacagtaaccttgttgtacaatagatttcttaaataaacattttacctttcaatcaacataggaaatctgtcattagctcaaagcagttttgatttagcaaattatttgtaaactatggatgtacctcccatttcaaaatacataatgtatatcttttgtttcaagagatttttaccacaaagaagtttaacaaacagggctaaaacaatacaatttttaaagtaatagtttaataaaaaaatttttaaaagagtaagctatgccaggcaatacttcctataaccttcaaaaggtgttttacattgtgcactcagttcctttaggtttatttcttggggcatcgttccc

SEQ ID NO: 473811 - DNA, 1136 bp, Homo sapiens
tccctgtagaaaatgggtgaagaaagccccctgttgggctgtttttctagcactcattggagacccctgaagacgctggccttgtcttgggctccagggctccagctcacacgcacagacactatttatcaacactcaagccaagaggggatgatttccaactttggcttaacactgtgtgggagctggccatttccaagagtctttgggccaatagatgagactgcaggaccacatgtccctattcctggtctggaggctagaggtctgaaatcaaggtgcttgcagagtcatgttctctctgaagactctggaggaggactcttccctgccttttccggcatctggcagccccaggtgtttcttgtcttgtggcagcataaaaagctgaattggatcaaggactgcagaggggtgtggtgcggaatgtcgtgaaggggccaaaatgtacagagggagacccagaacctgatgaaatttcctcgtagtttaagtctactgtatgcatctcagatgcatcccctggaggggatagggacaaaactctgagaagtaattgaccatagtctccatgctacttgtgaaaagagcactctaacatcagcagagctcttgaattaggtgacctttaaggttttgccaactaagattctgtttttatttaaactggttaatcttatccacaaaatatcaatttaatgctgaacagttggtctaccagtgtataattgtatagaaaatagccagttgcatagcaaacaacagattatatgtctgaatttttttaactctacaatttttttggcagtacatactgcaggatattgatgtgaatggccatattttctttcagagatgagtattctttcttaatgtgtgtttcactctgcaaaggattggttgttgacttaattgggggcttaggaatggtttcaggagaagcgccgatggggtagaatgtgagttattttctgtggtgctggtatgtccaggttttctcctgtgcagtagtaataaatttctgaaaggataggtctaggtaagcaggtgaggttttaaatatcttagttatgttatgtaagtaaacttatattaaatatgtttacatatgctgcccaaactctcagagaggaaac

SEQ ID NO: 473812 - DNA, 1305 bp, Homo sapiens
ccaaagactttgcgttggctttgctgtgagctgcgcagtatctgaaccgcattgtggaaagccaggaaatgggctctttttctctgaaatccccagttctcacctgtgacttctggtgtggatgctaccaaggtcctatgagagatggcattgtcagtgtgccaagccacttctcaggtcctcacagcatgcaagctcttacaattattatttcttctccaagtgaacctcactttgtgaggttcagtgtttaccagtgtctttcattgtgtgacacattcttcaataagccatcgtgtattgagaagcgggctgtgggtcattgttcactgcacttcagggcactcatcctttcctctgtccctaaggaacacaagaaccacacctgtcttttcagcatcctgtcttgcaagcccagtcacacggtccttgagcagaagtgtcctgggttatccagtcctcagcatcagcagtgttcatctattgatcaattggagcctcagtcaggatctttgaacagctttccttgggccaagggccagcttccccaagtgagtgttctgcatagaggcctgcacaccccagccaggtcataccacctaaagtcactccacggagtaacagcccctggaatgctttctacaagcacggaattaggcaatggtaagcacttcttgaagattactcttctgtttcatcctggtatcttgaggtggatctccttggtatctctgatccacgatgtttgcaaagccagaccactcccttatgactccaaggggcttcctggtttactgcttctctggcctagcccttccaatgttcagatgtggtatatgacacagttacctgctctgcggtcttgcaatgatcatttattgtgttttttttataaatcatgtccccccaaatttgaaaatgatgggcttatagttggcattttttgggtgggcccatatatatggatgctgtggaatcgaagtgtggtatggagtacacgcatgtacagctgtttggttggtggcagaggtagcactaggaaaatgggaatggtggttgcaaaaggggccacaggtatggtgtaagatcttgacatatgggaagctgtcagtacctaacatacgggaaaaacattattttagagctacatgtgcctgctctctaaatcatagaagcattgaagaaagactttggatttacctgaagtcctgagttctagtcctgtttttgtctccaactggttgtgtagcctacaataagtcacttggactctatagacctctgttgtctcatttgcacctaagc

SEQ ID NO: 473813 - DNA, 750 bp, Homo sapiens
agttcactaaagctaagacaagggaagaggatgctctgccaaactgcccctgctgcgtcatagtggaccagtttcaatgatccagactgtcagtcaccccatccagcctcatcctcatctggacccatttctcaccacccaatcagtttcaatgatccagactgtcagtcaccccatccagcctcatcctcatctggacccatttctcaccacccaatcagtttcaatgatccagactgtcagtcaccccatccagccacatcctcatctggaccagtttctgaccacccaatcagtttcaatgatccagactgtcagtcaccccatccagccacatcctcatctggaccagtttctgaccacccaatcagtttcaatgatccaaactgtcagtcaccccacccagcctcatctggaccagtttctgacgacccaatcagtttcaatgatccagactgtcagtcaccccatccagcctcatcctcatctggacccgtttctgaccaaccacccaatcagtttcaatgatccagacagtcagtcaccccatccagcctcagcctcatcctcatctggacccgtttctgaccaaccacccaatcagtttcaatgatccagactgtcagtcaccccatccagcctcagcctcatcctcgtctggacccgttctgacgacctaatcagattcaatgatccagactgtcagtcaccccaaccagctctaaagagaggatttgaaccactaaggcc

SEQ ID NO: 473814 - DNA, 768 bp, Homo sapiens
gtctgggaggtgtacccaacagctcattgagaacgggccatgatgacgatggcgcgtccagggcgcattcctcaccacctcatccacgtagcggcagtgctggactgcgtcatagcgctcattctcgttcatcacctatgttcatactttggagaagggacagtacaacaggtgaccaagatctttgactctgaaataaacctgctgtgcgtgtctgcatcaattaagtccttaaacatgttttcctgttttattcacactggactggaccacctaacatttccttggcagacttttgtactccagttaattcaaaatgataaactgaaatctaaagcaaatgttttaaagtggacaacggaagtcacggctgctcctgtgaccacagaaactcagctacaagcagtgaataaatgccagatggcacagtcgaggagcttgaagctcctctctccaggtttagtttgctggtacccatatacttcatgtgtgttagagaggctgtactacatccttcatttaaaaatggaaacaagagccagtgtactcagctgagaaagacagactgtactatcatctttttctgcacagcacctgaagtcaccaaatgttttcttacctcccacaatgaggcacaacaaataacagagaactgtcaacttagaagccaggaaatgatttcccggggaacaagactaattccaaagtgaaataaacattaaaaacagaatcagcataatggtccatcatgctttaaataataaatct

SEQ ID NO: 473815 - DNA, 757 bp, Homo sapiens
gtttagactgaatgtcttgacggtccatccattcacttctgctttgaaaatggattttttttttcattttcatttttggtatggaagaaattggcttttttaaaaaaccttttaatctgtggaactttgaacttgagagagatgatttggggtacctggtggaagaaatttctaggcagcaaagtgttcaagaggaagcagagcataaaagtttagaaaatttgcagcctgatgctgcaatagaaaagaaaaagctattttctggggagaaattcaaacctgctgcagaaatttgcataagtaacgaggagccgaatgttaatcaccaagacaatggggaaaatgtctccagggtatgtcagaaaacttcacagcagtccttcccatcacaggcccgaaaggctaggagggaaaaatggtttcctgggccagatccagggacccactactgtgtgcagcctcagcactgcatcccagccactgcagccatggctaaaaggggccaaggtacagctcaggacattgcatcagagagtggaagcccccagcattggcagcttccatgtggtgttggtcctgtgggtgtgcagaagacaagatttgaggctcgctatgttgcccctgctggactccagagctcaagggatcttcctgcctcagtcccctgaatagccggggctatagaaaaaacaaatttgtcattgtttgaggcaaagccctacacatatattccatataatttccatttttaaaattt

SEQ ID NO: 473816 - DNA, 1849 bp, Homo sapiens
ctgctgcctttgactgcaatcagaatgcagctcttttcttccaactttcatgacgtgacatgggcaatgagcattttccttcccctggcttctctcaaactacccttcagcttttgcttccctgttggtcctcctcactcagacttggctttgaggtggtcttaccaactccagagcgccttctctcttgtgattcacacctgggtcaaagacaacgctagacatgtgttgcctctgacctgcctggccataaaccttccctgtgagacagaaaccacagctttcaggccatgcccctctcagtccgtctgtgaagtaggggcatccagttcctgtgcccatgactacaacacacttcccactgacccctttgttctggccaaggaggtttgtcccaacttgaaattacatcatgaatctcaggagcttccctccacctgtgaccaccaactgagttcgccaacagacttctgcgaggtcccctgggaggcaagagacataaactcttcgtgcatcgtgtggaagatgagggtgtgggatgggattaggcattctcaagtggcagcacagggagggtgtacttaaatagcatatcttcaagacccatgtcataattttatacttaagacgatagcctacagaataaaaaccgtagtgagcagaatgcagtgaaatcagctaatgaagcatatattaaatgcactgaaaaacacaggaataaaatgccaaaatatttcccagagctgatagccttggtggtccctaatgacggatgctaattccttcttgttcatacattgttgccttagtctctacttcctcatcattgttggtttgttactgcatcaagtccccttccagggtcttgggaaaactgtcctgtgagcacaaaatcattggcagattttaagatgccaaacatatcacttcttgcattgtatttaaacactattatttaaattcagttcaacaaacatctttgtatccttactgttattttaacatatttattgcgttttgattaactgtgtataaaaatgcttataataataactaaacacagaagaaaaaatgttcacacttaaggcctgtagttacagaaaataaatagaaaaatttaacgtatataaatattattgcagcatataaataggataagagtatgagtgaaaactttcaaagatgaatatatcaggatagaatactgagagaaaggaaaatgaaaatatcaggtcatggaaaataaaacaatgtataatttcacactgtttaagaagtcattcgtacacttttaaagcaacagtggttatcaactcactatggtattttgattctttacctacatttaaggtttttatgttaaaatgtcctggtttacagtatgagagaaattacagtttttgttacttcttaagattttaaaacttgtctacttaaaacgtgttgttttacatctttttttcataatttttttcgggggtacttcaacaaaaatttgaagactactgcttgtgatggtacttgtagccaggagagactgtttttctactcagcatcatttatagttttcagtatacaggtcttgtgcttctttcgtcgactttattccttagtattttgtaagctttatgctcttttagattatattgtacgttaaattttgattttctattccctgttgctagtatataaaatcataattgatttataaatgttatttattctaaatcttatataaattcccttattagttctagtaacatattttcaattccatctgatattctacattggcaattatgtcaaatgtgaataaaaataattttagttatttctttctaatatggac

SEQ ID NO: 473817 - DNA, 865 bp, Homo sapiens
cctttcatttcctcatcagctgctgcagccgtcactgaaaggggccaacatagagctcatagcttcagagggtgcaagccccaagccttggaagcttccatgtggtgttgagcctgcgagtgcatagaagtcaagaattgaggtctgggaacctctgcttaagtttcagaggatgtatggaaatgcctggatgaccaggctgaagtttgctgcaggagcagggcactcatggggaacctctgctaggatagtgcagaaggcaaatgtggggtgggagcccccatgcagagtccacactggggcactgccttgtggagctgtgagaagacaaccaccatcctccagaccccagaatggtagatccaccaatagcttgcactgtgcacctggaaaagttgcagacacccaataccagcctgtgaaagcagccaggagggaggcagtaccctgccaagccatgggggtggaattgctcatgaccatgggaacccatcatcagtttgactcgcatctgagatgtggagtcaaaggagatcattttggatctttaagatttgactgccttgctggatttcagacttgcatggggcctgtagccattgccaaccatgagaagagagaagagtatttctggcagaaggaacagcatgtgtaaaggtcaaaagtgagagaacacagtggctgggccctactttgtctttgctttattaattttcatgcaagctaaggaacgtagaatagtaaacattaatactttactgttttatttgggagggaaaatacttttaccttgtgtattgtattagtctgttctcatgctgctatgaagaactgcctgagcctgggtaatgtataaaggaaagag

SEQ ID NO: 473818 - DNA, 1873 bp, Homo sapiens
ggccgaataggaacagctccggtctacagctcccagtgtcagcaatgcagaagatgggtgatttctgcatttccatctcaggtaccaggttcatctcactagggagtgccagagagcagatgcaggacagtgggtgcagtgcacagttcatgagccgaagcagggtgaggcactgcctcactcggcaagtgcaaggggtcagggagttccctttcctagtcaaagaaaggggtgacagacggcacctggaaaatcgggtaactcccaccctaatactgtgcttttccgatggtcttaacaaacggcgcaccaggagattatatcctgcacctggctcagagggtgacacgcccacggagtctcgctgattgctatcacagcagtctgagatcaaactgcaaggcggcagcaaggcttggggagggtcgctcgccatttcccaggcttgcgtaggtaaacaaagcagccaggaactcgaactgggtggagcccaccacagctcaaggaggcctgcctgcctctttaggctccacctctgggggcagggcagagacaaacaaaaagacagcagtaacctctgcagatttaaatgtccctgtctgacagctttgaagagagcagtggttctcccagcacacagctggagatctgagaacaggcagactgccttctcaagtgggtccctgacccctgacccccaagcagcctaactgggaggcaccccccagtacgggcagactgacacctcacatggccgggttctcctctgagacaaaacttccagaggaacgatcagacagcagcattcgcggttcatgaaaatctgctgttctgcagccaccgctgctaatacccaggtaaacagggtctggagtggacctctagaaaactccaaaagacctgcagctgagggtcctgtctgttagaaggaaaacttacaaacagaaaggacataaacaccaaaaacccatctgtacatcaccatcatcaaagaccaaaagtagatacaaccacaaagatggggaaaaaacacagcagaaaaattggaaattctaaaaagcagagcacctctcctcctccaaaggaacgcagttcctcaccagcaatggaaaaaagctgggtggagaatgactttgatgagttgagagaagaaggcttcagacgatcaaactactctgagctacaggaggaaattcaaaccaagggcaaagaaataaaaaagaataaaaagaaacgaacaaacctccaagaaatatgggactacgtgaaaagaccaaatgtacgtctgataggtgtacctgaaactgacggggagaatggaaccaagttggaaaacactctgcaggatattatccaggagaacttccccaatctagcaaggcaggccaacattcagattcaggaaatacagagaatgccacaaagatactcctcgagaagagcaactccaagacacataattgtcagattcaccataggtgaaaggaaggaaaaaatgttaagggcagccagagagaaaggtcgggttacccacaaagggaagcccatcagactaacagcggatctcttggcagaaactctagaagccagaagagagagggggccgatattcaacattcttaaagaaaagaattttcaacccagaatttcatatccagccaaactaagcttcataagtgaaggagaaataaaatactttacagacaagcaaatgctgagagattttgtcaccaccaggcctgacctaaaagagctcctgaaggaagcgctaaacatggaaaggaacaaccagtaccagccactgcaaaatcatgccaaaatgtaaagatcattgagacaaggaagaaactgcatcaactaacgagcaaaataa

SEQ ID NO: 473819 - DNA, 1755 bp, Homo sapiens
tgccaagaaaaaaatgaataagtatttttggtacatctatttcatcatttcatttcctcatttcatcatttcatttcatcatttcatttcatcatttcatcatttcatcatttcatttcatcatttcatctcaacatttcatttcatcatttcacttcatctcatcatttcatcatttcatttcatgatttcatctcatttcatcacttcatttcttcatttcatttcatctgaacatttcatttcatcatttcacttcatctcatcttttcatcatttcatctcatttcatctcatcatttcatctcatctcatttcatcttttcatctcgtcatttcatttcgtcatttcatcttttcatcccatttcatcatttcatcaattcaacatttcaattatttcatcatttcatcatttgacttcatcatttcataacatttcatttcataatttcatcttttcttttcatcatttcactttgtcatttcattttgtcatttcatttcctcatttatcatttaatttcatcctttcatcattttatctcatttcatcctttcatttcattatttcatcatttcatctcatcattgcattttgtcatttcatttcatttcaacatttcacttcatcttatcatttcatctcatgatttcatttcatctcatcatttcatttcgtcttttcatctcatttcatcatttcatcttttcatctcatttcatttgatcatttcatcaattcatcatttcatcgtttcattatttcatcatttaatcatttcacttcatttcatcatttcatcatttcatatcatttcttcatttcatcatttgatcttttcatttcatttcaccatttcatgatttcatttcatttcacttcatcatttcatttcatttcaccatttcatcattccatcatttcatttcaccatttcatttcatcatttcatttcatcctttcattatttcattgcatcatttcatctcataatttcattatttcacttcatctcatcatttcatcatttcatctcacgatttcatttcatctcatcatttcatcacatttcatctcatcaattcatcttttcatctcatttcattatttcatcctttcatctcatcattcatcatttcattttatcaattcatcatttcatttcatatttcatcatttcatttcatttcatcatttcatcatttcacttcatcatttcattccatcatttcacatttcttcatttcatatcatttcatcatttcacttcatcatttcatttcctcatttcatttcaccatttcatcaattcatttaatcatttcatctcatttcatttcatcatttcacttcatctcttcatttcatctcatgatttcatctcatcatttcatcttttcatctcatttcatttaatcatttcgtttcatttcaccatttcatctcgtcatttcatttcatttcatcaattcatcatttcatttcattatttcatcattacacttcatcatttcatttcatcattgcatatcatttcttcatttcatcatttcatcttttcatttcaccatttcacttcatcatttcatttcctcatttcatttcaccatttcatttcaccatttcagttcatcatttcatttcatcactccatttcatcatttcatcattttctttcatctcatttcatcatttcttcatttcatcattttatttcatcatttcatttaatttcagtgatacatgtattc

SEQ ID NO: 473820 - DNA, 758 bp, Homo sapiens
cagcaggtttagtggttcctgtggcgtctccttggcttgcagatggcggccaccaccttcttgctgtgtcctcacgtggtctttcctctggactgtgaggccacaggccagaggggcaggtatgggattggaaaggagcctgtggtggctgcctatgtccagctacatatgcagagtggtgagcaggtggaattcatggtggattcttttgatggggattttcctgctttgaaaggaaataataggacgttttcaatgtggaacaaggctgaggttctgactgctggcctaaaagaagagggaaaaatggtttgtgggtcaggcccagggccaccctgctctgtgcagcctctggacttgatgccctgtatcccagctgctccagctccagctgtggctaaaagggaccccagaatggtaggtccaccaacaacttgtactgtatgcctggaaaagccgctggcactcaatggcagccatgaaggcagccagtgtggagggttgtacaaagtcacaggggtgcagctgcccaaggccatgggagcctctcctttgcatcagcatgccttgaatggtgataaaggttgactcttacgattagttctacaagttttataattttcactcataagtttaggtccatggcatattttgagttactttttcatatggtgtgaggttttgatacaagtgattttcaattgaaccctgggtattttgaatattgaatattatgagactctacttttttaaaaaaa

SEQ ID NO: 473821 - DNA, 4205 bp, Homo sapiens
ttctagcacaaccagtcacagtgacgctctgagaacatttcggactcataaagccgccgcaatcgacggtgtagaggatgagcgagaaattatctagtagttgctctaggcctgtcttaggtcacgtgcagaaggcacatctggcttccttggtgaactatgacaatgtagtggacacaggttctgaaacagatgaggaagacaagcttcatattgctgaggatgacggtattgccaaccctctggaccaggagacgagtccagctagtgtgcccaaccatgagtcctccccacacgtgagccaagctctgttgccaagagaggaagaggaagatgaaataagggagggtggagtggaacacccctggcacaacaacgagattctacaagcctctgtagatggtccagaagaaatgaaggaagactatgacactatggggccagaagccacgatccagaccgcaattaacaatggtacagtgaagaatgcaaattgcacatcagattttgaggaatactttgccaaaagaaaactggaggaacgcgatggtcatgcagtcagcatcgaggagtaccttcagcgcagtgacacagccattatttacccagaagcccctgaggagctgtctcgccttggcacgccagaggccaatgggcaagaagaaaatgacctgccacctggaactccagatgcttttgcccaactgctgacctgcccctactgcgaccggggctacaagcgcttgacatcactgaaggagcacatcaagtaccgccacgagaagaatgaagagaacttttcctgccctctctgtagctacacgtttgcctaccgcacccagctcgagcggcatatggtgacacacaagccagggacagatcagcaccaaatgctaacccaaggagcaggtaatcgcaagttcaaatgcacagagtgtggcaaggccttcaaatataaacaccatctgaaagaacacctgcgaattcacagtgccattacccagttaagaaacaagttggagaatggaaaaccacttagtatgtctgaacagacaggcttacttaaaattaaaacagaaccactagacttcaatgactataaagttcttatggctacacacgggtttagtggcactagtccctttatgaatggtgggcttggagccaccagccctttaggagttcatccatctgctcagagtccaatgcagcacttaggtgtagggatggaagcccctttacttgggtttcccaccatgaatagtaatttaagtgaggtacaaaaggttctacagattgtggacaatactgtttccaggcaaaaaatggactgcaaggctgaagaaatttcaaagttgaaaggttatcacatgaaggatccatgctctcaacctgaggaacaaggagttacttctcctaatattccgcctgtcggtcttccggtagtgagtcataatggtgccactaaaagtattattgactatacgttggaaaaagtcaatgaagccaaagcttgcctccagagcttgactactgactcaaggagacagatcagtaatataaagaaagagaagctacgtactttaatagatttggtcactgatgacaaaatgattgagaaccacaacatatccactccattttcatgccagttctgtaaagaaagttttcctggccccatccctttgcatcagcatgaacgttacctttgtaagatgaatgaagagatcaaggcggtcctgcagcctcatgaaaacatagtccccaacaaagccggagtttttgttgataataaagccctcctcttgtcatctgtactttctgagaaaggaatgacaagccccatcaacccatacaaggaccacatgtctgtactcaaagcatactatgctatgaacatggagcccaactccgatgaactgctgaaaatttccattgctgtgggccttcctcaggaatttgtgaaggaatggtttgaacaacgaaaagtctaccagtactcaaattccaggtccccatccctggaaagaagctccaagccgttagctcccaacagtaaccctcccacaaaagactctttattacccaggtctcctgtaaaacctatggactccataacatcaccatctatagcagaactccacaacagtgttacgaattgtgatcctcctctcaggctaacaaaaccttcccattttaccaatattaaaccagttgaaaaattggaccactccaggagtaatactccttctcccttaaatctttcctccacatcttctaaaaactcccacagtagttcatacactccaaacagcttctcttctgaggagctccaggctgagcctttagacttgtcattaccaaaacaaatgaaagaacccaaaagtattatagccacaaagaacaaaacaaaagctagtagcatcagtttagatcataacagtgtttcttcctcatctgaaaactcagatgagcctctgaacttgacttttatcaagaaggaattttcaaattcaaataatctggacaacaaaagcactaacccagtgttcagcatgaacccatttagtgccaaacctttatacacagctcttccacctcaaagcgcatttccccctgctactttcatgccaccagtccagaccagtattcctgggctacgaccatacccaggactggatcagatgagcttcctaccacatatggcctacacctacccaactggagcagctacttttgctgatatgcagcaaaggagaaagtaccagcggaaacaaggatttcagggagaattgcttgatggagcacaagactacatgtcaggcctagatgatatgacagactccgactcctgtctgtctcgcaaaaagatcaagaagacagagagtggcatgtatgcatgtgacttatgtgacaagacattccagaaaagcagttcccttctgcgacataaatacgaacacacaggaaaaagaccacatcagtgtcagatttgtaagaaagcgtttaaacacaagcaccaccttatcgagcactcaaggcttcactcgggcgagaagccctatcagtgtgataaatgtggcaagcgcttctcacactcgggctcgtactcgcagcacatgaatcacaggtattcctactgcaagcgggaggcggaggagcgggaagcggcggagcgcgaggcgcgcgagaaagggcacttggaacccaccgagctgctgatgaaccgggcttacttgcagagcattacccctcaggggtactctgactcggaggagagggagagtatgccgagggatggcgagagcgagaaggagcacgagaaagaaggcgaggatggctacgggaagctgggcagacaggatggcgacgaggagttcgaggaggaagaggaagaaagtgaaaataaaagtatggatacggatcccgaaacgatacgagatgaagaagagactggagatcactccatggacgatagttcggaggatgggaaaatggaaaccaaatcagaccacgaggaagacaatatggaagatggcatctttgattccacagaaattgcaaatcctgattatcctgatttgtaagtgcacccagtcagctttctctctttcactccatggaatatgcctgttagatttggaacgaaggataagcccccaaaatgttaaaaatagactactgccctggcaggaaatttagcattggcaagcacagaactcagaaggaattgatctaacataaggaaacattcagagaaagatttgtgcattatgatcctgttctgaccattttcagagcagtcaaagggaagtaaagtgtatgtgggtgtgcgcatgtgtgcgtgtgtgcaggtttgctaagtttgtgtgtgtacatttgaatagctgtgtttcttaaaaaaaatactcaagacatggaaaaagtctgaaaagaagtgcttttcagacattttacattttgttatcttacatcgaagacatttaaaatgttgatactggaaaaataaaaggttccgaagacagcctcaccaaaaaaaaactatataatttataagatatgccaacaacaaaattgagaaaatattaaattatctttactcattttatgggaaacttagattttagttaatgacctttccttaaacatgaaaaaatcacgtttattcattcctaaaacggtattattatagggggaagaagtac

SEQ ID NO: 473822 - DNA, 707 bp, Homo sapiens
aggccaggcctttatgccctacattcactcggtgcccaccagcggcctcccctgtgtccctgtgaccgtggcggcaaagacggactcaggagtgcaagttgctgatgaagtatgtcacattttttgtgacataaaagttcataaatgctccacatcagaagaaatcaagaaaagaaagaagactgtcattttttgtctcagtgcagacaaaaagtgcatcattgtagaagagggcaaagagatctcagctggagatattggtgtaaccataactggtcctttcaagcactttgtgggaatgcttcctgaaaaagattgctgctatgctttatatgatgcaagctttgaaacgaagaaatccggaagagtattgtttgtttgtttgtttttgtgggcaccagaactaccacctctgaaaagtaaaatgatcttcacaagctgtaaggatgcaatcaaaaagaaatttcaagcaaatggaccagaagatctcaactgggcttgtattgctgaaaagttagatgggtacttaattgcagcttttgaaggatgctctgtgtaggccatcattcagtgccacaaatggaaagcttccatgtttaatgttatccgcttgctatataaataaagcaaacatatgtttttaaaaaagagaaaacaagagtagtgctcagatagaatgtgtagctcatggaattcagtactgggag

SEQ ID NO: 473823 - DNA, 938 bp, Homo sapiens
ccagcagtgcgctctgcagcatgtcgctacatgcctgggagtgggaagaggaccccgcaagcatagagcccatctcctccatcactagcttttaccagtccacgagcgagtgtgacgtggaggaacacctgaaggccaaggccagggcccaggagtctgactctgaccgcccgtgcagcagcatcgagtcctcatctgagcctgccagcactttcagctccgacgtgccccacgtggtcccctgcaaattcaccatctcactggccttccctgtgaatatgggtgtattccagccggctctcctcctgcttctgctattttgctggtgcacgctgctgactcgggcaggcaatgtggagtgctcagcctctcacaacatcaagctccagggaactggggagacgggtctgcttttccacatgaggttaaaacgagactttttcaatctgtatcttcaaggtcagaagggaaaatatgcaagtttgattgaaaaatataagaaacaccctaaaacagacagttctgttacaaagatgcgtcgtttttaccacattgagtatttccttctgccggacgatgaagaacctaaaaaagttgacatattgctatttccaatggtggccaaagtattcctggagtcaggagtaaagggcctttagagaaccaagtggttctggccttgaaggcattttacaatctgtttccaagcctcctcctcactgccactgccccttcacaccacagcccacctcctggtccctgcagacacgtggctctcccttgtggcctccctattccctgagatacacaataccaaaattaggtcaattaataaccttacaatggcctctaaagtgttcaagtgaaaggaggccttgcacatctctccctttaagtcaaaagcttgaaatgattaagcttagtgaggaagccacatc

SEQ ID NO: 473824 - DNA, 654 bp, Homo sapiens
tttgagtcgagctgggtttattcagattccctctctctctctcaaaccagggagatacgataaggatgaagatagccatctctaccatcatcatcgccaactgtggctttaagaagggggaagaggaaaggtataaggaggaggagggaaaagagagagacaaagaggagacggaagggaaggaagaaaagcagggcttccataacaaagtaccacaaacgggggtggctcacacaaaagaaatgtattatcccacagttctggagcctggaattccaaagtcaaagtgtcagcagggttggtttcgtctgagggctgcaggggaaggatctgttctgggcctctctccttggtttgtagacagtcatcttctccctgcatctcttccatcggcttcctttccttccttcagaaaacgtgtctccgtgtccaaatttcccctttttataagggcaccagtattgattagggcccatcctaatgacctccctttaacttgattgtttctgtaaagtctttattttcaaataaggtcacattctgaagtactaagatttgggacttcaacatacaaattttggagggacatattccaacccatagcattcgggtactatttttaatatccagtttacttctgtagaaattgagttt

SEQ ID NO: 473825 - DNA, 1143 bp, Homo sapiens
agtagtagtgttgggaagcaaggggtcacccagcgatagatcgcgctgagaccacaggacttatactggcttgccctttataacatcaaagttcatggtggccagagcacgctccgcgtctgccggctgcaggaagttcacggacacgtagcccacgaagaggtgggtgagccagtccctaaagacccggatggtgagggtggacctgtcgagctaaacttctcttggaacatcaattcagtcacgtcggggtgcaggtcccccacatacagcgaggccatgtggtagctgggggcgctggggttcatcgcggcacggctgcccacagggctacaggccgcgaccctttcgtgacaggaggagagcgagtgccgggccgggggtctcgcagccgggggcggggagcaagggcacgcgccgagggacaaaaatcatccgaatcagaaacaactcactggccacagagcgaggtcgcttgtccgccgctgtctgctggctgccggtgtccggttcgggcggcgggaaggcctgggtctcgtggttcctccttacggctgctgcagggccgcgggtgggagaaagagctgaaattgtggaaaaacagacacaagctctgcgagtggctgatctgcaatgaaagatgtatgcacagcctcaacaggtgtctactgttaaagtgagggcattgattggaaaagaatgggaccctgaaacttggaatggggacatgtgggagggccctgatgaaactggggacactgagtttgtaaactctgatgaaacttttttgccagaaggagcagctttcccatctctagtggagacaatatcccctccctatcctatgctgccatcagcctttccacctttgtctgaggagataaaccctgcactgcctgaggcagcagtgatgacctcccctgaggcagttgccagacaaaataatgttgattcttctcaggagaaacccccaacacccctgtttgcttctacaactatagctagactgaagtcctggctggcccctggagatgagattgagactgtgacccatgaggaagtgtgctacactcaaaaagaactatttgagttatctaatttatataaacagaaatctggagaataggcatgggaatgaacatt

SEQ ID NO: 473826 - DNA, 822 bp, Homo sapiens
ttgcttttttttttttttttgtcaggtttgtcaaagatcagatacctgtagcttttgcccattcagtatgatgttggttgtggattctttggcctgggccctcactgagcatgttgtcccgggggcactttcttctgcttccacagaagccctctccctgaagaaggcagccctccccagtccaggggtattgcaggcaacaaggagctttcacacagggcagccatgtcttgctcctctaccacctcttcctgaatatggaggagaagttcatcttgggctgatccctgaggaattcttccattttctttatactaaaactggtataacaggaccttatgtgtttggaactggacttacgttgtatgctctttccaaagaaatatatgataccattgatttggagaagtcacagcaggctgtgggtcacaagtgccattacctttttgatgccaagaggaataacattgctatgactttggagaatactcttcaggaatggctgcatcgagtatataaggaggagctgccagagagactccagcttctgtcaattgaggtattctacatccacaatgctgacagggaaatgaggaagattcaacctcagacttgagggattttatctttctttgaacctaaagtaattataagaagaaatgtatatatggatatgtaaacatgtgttatagccaaagtctggaacaggtgatttctgacaatagatagcaaaatttataattaacttaagcagctggctaagcaccgaagtgtcacacagaagaaaaaatagtgtctcattgcaagccaaatatcactgct

SEQ ID NO: 473827 - DNA, 466 bp, Homo sapiens
ttctgctctaaagacacatgcacagggacatggatgaagctgcaatccatgaatctgttcctgtgtcagtttgctgagcattctcaggaacagaaaaccaaacactgcatattctcactcataaaggagttgaacaatgagaacacatggacacagggaggggaacaatacacaccggggcctgtcaggggatggtgtgactatagaggatgttgggcagaatcttttggccttgcttctgtagccctgtgcacttctgtcaataggttttgtattgggctgtatggtccaacctataagccagtagatgacacttatgggcaatggggtgatccatggagggctcagtggtctgagctccatgctcagccccagggagacaagaaaaagatgggaggggccagacagggctggcccatctacagtttccctgatggcgggcactagtactaagggagaattctgt

SEQ ID NO: 473828 - DNA, 784 bp, Homo sapiens
ccagactcagctggtagatggaactatggctgggcgtcgcagagaagtggcttggcctcagagggacagcttgatgatgagtcgtgggtaccctgcccggatactgctgcggacctgcacggagttcactccagccggcacttcagcatccgtctggttcctgtacccgctcacctatgtgctccctcccatgaagggtggaagtcagtgggtccgagtgagtggagttcgatcctgccggcacccaagcagccagcctcttccagcactcattcactcgttcccgcactcattcgctcatgtgctcccttcagcggaggagttgagatccgttgtttcagttgtccaaggagcatccaagaagagctttctagaggttgtccttcagatgcttgccaatgcaacatttgattataacctatatgaaagagaatccacattttttagtcaggaagccaaggcttccaaaaccagccttgaagaaaaacttctctgtgagacattagataggtcctaactaaaatattgtatcatgtttactttcatccatcttttgaaacatgctatggaaaactgaaggtcctatggaaagaaatcaaaataaagaacatacttgcacaagtttccaagtgaaagcccatcaaagtttcttttggtcaattgcaactggctactattacataagagggacattttaatggcctgataagtgtgctaccatattacaaggtcagcttcacttcattgtaaaatgctttggaagactgactgatatgtgttcatc

SEQ ID NO: 473829 - DNA, 1476 bp, Homo sapiens
gaatatttagataagactttagcaaaggctctggtctacagctcccagcgtgagtgacacagaagacgggtgatttcttcatttccaactgtggtaccaggtccatctcactggggcttgccggacagtgggtgcagcccacagtgtgtgagctaaagcagggagattatatcccgcgcatggctcagagggtcccatgcccacggagcctcgctcactgctagcacagcagcctgagattgaactgcaaggcagcagcgaggctgggggagtggcatccaccattgctgaggcttgagtaggtaaacaaagtggccaggaagctctaattaggtggagcccaccacagctcaaagaggcctgcctgcctttgtagacaccacctctgggggcagggcatagctgaacaaaaggcagcagaaacttctgcagacttaaatgtccctgtctaacagctttgaagagagtagtggttctcccagcacggagtttgaaatctgagaacagacagactgcctcttcaagtgggtccctgaccactgagtagcctaactgggagacatctcccagtaggggctgactgacacctcataccgctgggtacccctctgagacgaagcttccagaggaaggatcaggcagcaacatttgctgttctgcaatatttgctgttctgcagcctccactggtgatacccaggcaagcagggtctggagtggacctccagcaaactctaacagacctgcagctgagggtcctaactgttacaaggaaaactaacaaacagaaaggtcatcaacaccaaaaccccatctgtacgtcaccattatcaaagaccaaaggtagataaaaccacaaagatggggagaaaccagagcagaaaagctgaaaattctaaaaatcagagtgcctcctctcctccaaaggagcgcagctcctcgccagcaacgggacaaagctggacggagaatgactttgacgagttgagagaagaaggcttcagacgatcgctaataatgaacttctctgagctaagggaggatgttcgaacccactgcaaagaagttaaaaaccttgaaaaaagattagatgaatggctaatgagaaaaaacagcatagagaagaccttaaatgatctgatggagctgcaaactgtgtcacaagaactacatgacgcaggcacaagcttcagtagccgattcgatcaagtggaagaaagggtatcagtgattgaagatcaaatgaatgaaatgaagctacaagagaagtttagagaaaaaagagtaaaaagaaatgaaaaaaacctccaagaaatatgggactatgtgaaaagaccaaatctacatctgattggtgtacctgaaagtgacggggagaatggaaccaaattggaaaacattcttcaggatattattcaggagaatttccccaacctagcaaggcaggccaacattcaaatttaggaaatacagagaa

SEQ ID NO: 473830 - DNA, 525 bp, Homo sapiens
ctgacaggacagcactgagttcaatgactcacaattgctgtgttctccctcctgcagtaccagagagggtctctataacacgccactgttgcagaggatgtggggggagcagtggcttcagtgattccagactgtattttctatctcttcagtgtccctttcagggatatgaggataaaaccaggtacccagaaaaatctctccctgtggccaccactgcctctggcccacagcaagtactgactggttacagtcaatgttcactcaaggccaaagggctcatcagtcagtttgtggtgaatgcttccaggcctgagtctctttcttcagggaagggtgggctcccccctgtcccaaagcaggtccagaaatgtcatccaatagccaagggatatcctaaccagaaacttataggaacactgggaaatgtagtttagcctagccaagtgacacattgcaaagccaccacaactgttttatattatttcatgtattccatattttggaattacaaacatatttata

SEQ ID NO: 473831 - DNA, 1337 bp, Homo sapiens
ccctctgcggtgaggttaatgaggaaagacttgtgctaacagcacccgaggctctggcccttcctcacagtcttctactgtcactgaaaacaatgccacatggatttgaggagtatggacgtgtgtacgtcctggcatatgacctgtcactgggcattaggtctacttccagaggtaagagcagatttctctggggcaatgtcacctgagctgagatctgaggaagaaattaactatgtgaaaatcagagaaaaaagcatatcagggatcaacatgtgccaatgcctcatggcaagaggaaacaagacctgcgtcaatatggcaactttcttggaaaaggctctggtgcaaaagtgtactcattttcttgtggtcatctgtggagaccaattcaatagcatggtaaaaccagagctggatgacctcaaagagctcttgttgtatggaattctaccaattgccttggagaaaagtgatttttttttctggtcaatgtttccaactctacaaaatgagggatattttccagaggggtattgtacaggatctgatttgtgattgaatgtgcattttgggactgagctgtcaggtttgatttcagcctagttttcatgtatagttggtgcattgagattattttcccattattgtttaatatgtgcttttatgagagtagaagtaattttcggccatcctgtcaatcatttctgcatagtttggacatacatatgagaaatatatatagagagacttgagtcatctcttccaaacagtctaacttatttacttatataaaaacctttattttgtgctctttgttggaactaaccataatttaagttaaataatgtaatgaaaatctatatagtgctaatgtcatggacataaatcattttatctgtttatacaaatgaattcattcagttttaatgccatgctcctttgtatattgcattgactgagtggtatttatctaggtagcttggaatataatgtcagctgacctaatctttttttagccttcttaagaatttaagggttttggatcatgtgaagaaattctgattaatataattattaatgaatagggaaagctttctgtttttattttataggatgatggtttaatatcactgttctgtatttattattcattcttcaaacatttattgtgtgcctgctttatataattaccctgttaggtggaaagggtgatactaagatttgtaacacaagatctctgagctccaggccgcaacaattcaactgcatgtaaaggtgtgtttataatggatactgggcttaacacctagatgatgggttgacatgtgccgcac

SEQ ID NO: 473832 - DNA, 683 bp, Homo sapiens
ccctggacccatagtgaaggcatagctcatcagcccctgtttaaaacttatccaggcgcaggaaccaccgcattgccaagtccacatgtggcctcggtcgtccagtgtcccctcaagcggggcacctgcttcagcgccttctccatgctcatgggggacccatgtactgttgctcaggtttccaccagagcccattcatgcagcatagctcaggatcctgtttgtgattccaattgtcaggttctaactaaggtccgaggagagtcgatgggccagtggcaggtagctggcaaaacactcgtggaatattttgacatggctttactctctctctgggcacagatcgagagctttaggagacagccacatgatggtgctgtagtcatcgatagagagatggagctaaatgagggcaaggaggtagtcattgatagagagatggagctaaatgagggcaaggaggaagaaaaattggcaaaaattggattaaacactgttaatgaagaaactaatgtaaggagagaagatgagttacttgttaccaggtacaccccagctgaaggaaaagactgaaagcatttattatctttcttagctgttagtgctgcattgtggaacaaataaaacaatgtgtctgaaaaccataaagtactgcaggaagataagaatttatttcaagacac

SEQ ID NO: 473833 - DNA, 741 bp, Homo sapiens
aaactgttctaacctctgcctgttacccagttccaaagtcacttccacatttttggatcctaaatctttaatctctggatatgacaatgtgatgcctaggtcctatcccctggttggtcacaaaataatggatgaagcaaacagtcacacaggaccctcagctgcaggtctgttggagtttgccggaggtccagtccagaccctctttgcctgggtatcagcagcagaggcttcagaacagcggatattggtgaacagcaaatgttgctgcctgattgttcctctggaagttttgtctcagaggagtacccagccgtactgctgtgctagcaatgagcgaggctccgtgggtgtaggaccctccgagccaggcacgggatataatctcctggtgtgccatttgctaagactgttggaaaagcacaatattaggatgggagtgacccgattttccaggtgccgtccgtcacccctttccttggctaggaaagggaattccccatccccttgtgctttccagagccttcagagagttgtcatctttttgctggcggagggtcttcccttgatgttcatggcttctgactgaccagagtgatggctgataaagattggggtggctgtggcagtttctttaaataagacaacaataaagtttgccatattgattgattcttgctttcatggaagacttctctgtagcatgcaatactgtttggtagcattttacctatagtagaa

SEQ ID NO: 473834 - DNA, 852 bp, Homo sapiens
tgtgttctcactgttcaattcccacctatgagcgttgactgggctgcactcccttcagaagtgctagaggagaatccatttccttgtctttttcagattccagagctgaattctttagttaatgatgcttttctacattttcaaacccagcagtgtaacatcttccaaattctgctttcattattacattgtcttctgccatcagtccttccacctttctcttataagtctctggttatgcatttagtgctcgcttggaaattacagaagactctcctcttctcaagaaacttaaccacatttgcaaagatttttttgtcatataaggtaatatttacagtttctaggggtcagaacctatgtatttggaggccattatttagctttcccagttttgtttgggtattagcttaacactagtctcataaaatgaatagctggaggggatggggcagagtggagattgtctgttagtaggtacattgtttcctttagtaaggaaaaaaatatactaaagtcagcgatagttgtaccatgctgtgaatatacttttaaaagcattgaattaaatattttaagtagtgagttataaggtatatgaatcatattccaataaggctattaaaaataaattaagtaggggctttgttttctttgtttctgtaacatacctacaatggacaatttcttttctgataaagcacattcaattaacggtagcaggaaatccaaagtaatgaaaagaagtgagactaggttatttttggcagccagtgggagaggtgtttatctcctcctctacccttccaaagcactctgccatacatgtatattgcagaaataaaactatat

SEQ ID NO: 473835 - DNA, 1197 bp, Homo sapiens
aagtagcaaggagcctaatgttaatccccaagatcatggggaaaatgtctccaggccatgtcagagaccttcatggcagcccttcccatcacaggcctggaggcccagcgaggaaaaagtggttccaagtgccattcccagcacaatccctgtgctgtgtgcagtctatggacttggtgccctgtgtcccaccctctccaactgtggctgaaaggggccaacatatagcttgggctatggcttcagaggttggaggccccaaaccttggcagcttccatgtggtgttgagcctgcatgtgcacagaagtcaggaattgaggtttgggaacctttgtccacatttcagaagatgtatggaaatgcctggatgctcacgcaaaagtttgctatatgggtggggccctcatggagaacctctgctagggcagtgcacaagagaaatgtggggttggagcccccacatatagtccctcagtgggacactgcctactggagctgtgagaagagggccactatcctccataccccagaatgggagatccactgacagcgtgaagtgtgagcttggaaaaacctcagacactcaatgccagcccatgaaaacagtcaggagggaggctctaccctgcaaagccacaggggcagagctgcccaagaccatatgaacccaccttttgcatcagcatgacctggacgtaagacttggagtcaaaggaaatcattttggagctctaaaatttgacttgactgctccgctggatttcacacttgcatgggccctgtaaccgctttgttttggccaatttatcccatttggaacagctgtatttacccagtacctatacccccattgtagctaggaagtaagtagatagcttttgattttccaggctcatatgcagaaaggactcgccttgtgccttctgtggatttttgggttaatgctgaaatgagttaaaactctgagagcctgttgggaaggcgtgattggttttgaaatgtgaggacatgagatatggaggggccacgggtggaatgatatgggttggctctgtccctacccaaatatcaacttgaattgtgtctcccacaaaacccacatgtggtggcagggacccacggggaggtgatagaatcatggggggccagactctcccgtgctctctcatgatagtgaataaatctcatgagatatg

SEQ ID NO: 473836 - DNA, 605 bp, Homo sapiens
ggagcccaggcagaggaggcaccgagagcgagctagggctatgccagcagtgtcctccacttataaccacccaaaatgtctccagatagcgccaaaggcctgtggggagcaaaataatcaccggaatccatctgtggccactctttacgaaatatgcccaccccaatgtagcagaaacctatcatgccctgcttcccaccccctaagcccacgtctgacttcagccgaagctgaagtggaccttttgtgccctcaaccttgctttgtgcttgcagcatcctgccccaagcttgcacctcctcctccttctttctgtgtcagtgctgtctccctgactgtgtgtggacctctcatcctgctaggagttaatggccctggggtctggatggatgaagaattggagtcttctccaaaaccatatctcaagatcatccctagtaaatgaaacttaaaatcaggtgttttggatttccaagtcaatgcctttttcactccttaatacttgctttccctgagtaatgaaacagaattttcaacattagccatcaaataaaacttgataaatttagtaggggctggatttctcttatgaaaccatttttcct

SEQ ID NO: 473837 - DNA, 587 bp, Homo sapiens
ctatagtgttggctggggtgattgacccaggctatcaagatgaaatcagtctactactccacaatggagaaaagtagaaaaaacactgaagcacaaatatttggttacaaagattccctcaagaaacttcagaatgagttcccagttaggggagaagaaaaagtccgagagagagtaatgagaacagaaatattggtgggtagcagacagatgagctctgtgcactatgacttaggtcaaagctttagggagagagtaaaaatcccaaatagttttatgggacctgagagcagaaaggacctgaggctgttcctagggaggagatatggccctcttctcacctttgtcctctatgcagatgtaatggctgaaggccaagcagccatctttggtctacgaggtagaaagcatacgttgagaatgatgaacaaatctggatctttgatgaattcatgaagctgccttatgcatacttgaagaacctatctctgacctttaatgtgagaaagagagaaataaacttcctaagctacaattaacattcaacttatatagcaactgctccagcatataaacctgttccaacc

SEQ ID NO: 473838 - DNA, 893 bp, Homo sapiens
aaccaaagccaaagccatgtacccaacttacattatagatacatcaacaggaaaaaatatttctctatggaagctactttataaaattgggaaaagtgacagttataccagctgtggaaatatcaatagttgcagttctggaaaacgtctttctagtgccgatgtttcaaaagtaaatcgctggggtcctggaagaccaccatttcgaaaggcccagtcagcagcctgcatggagatttctttaccagttacaacagaagaaaaccgagaaaattcctataatcgttctagaagctctagtatctccagtattgacaaagattctaaagaagcaattacagcactatacttcatggactcctttgcacggaaaaatgactctaccatctctccttgtctgttcgttggaaccagtctgggaatggtgttaatcatctccttaaacctaccattagcagatgaacaaaggtttacagagccagtcatggtattgccaagtggttccaatcctcgaggattaactcctcctgtaaaagatgaagaatgtaccatttgtgtgaaaaagttccaaggtggaatgaaccagaccccacacttgtcccattgttaccctgatgcttctgagctccccttcttactcaccatggggattgctttaagagtgggaattgaacaatgagatcacatggacacaggaaggggaatatcacactctggggactgtggtggggtcgggggaggggggagggatagcattgggagatatacctaatgctagatgacacgttagtgggtgcagcgcaccagcatggcacatgtatacatatgtaactaacctgcacaatgtgcacatgtaccctaaaacttagagtataataaaaaaaaaaaaaaaa

SEQ ID NO: 473839 - DNA, 730 bp, Homo sapiens
ttgcgaagaccatgggaaaagcgtggtatatgggccagaatgcactgttcctcacagcacacgaaccattcataatattctctggtgggctgtcctatgacaaagcttgtagaagaccaagtttaaccatcatgcatggaaaagcaattacagtacttgaaatggatcatcctattgttgaatttctaactttatgtgaaacgccctatccaaatgaatttcaagaaccctatgctgtcgtggtacttctggagaaagatctcattgtagttgatctgacacaaagcaattttccaatctttgaaaatccatatcccatggacattcatgaatcaccagttacatgcacagcatactttgcagattgtcctccggatttgattctagtactgtattctataggagtcaagcataaaaaacaaggatacagtaataaggtgggaattgaacaatgagaacacatggacacaggaaggggaacatcacactctggggactgttgtggggtggggggaggggggagggatagcattgggagatatacctaatgctagatgacgagttagtgggtgcagcgcaccagcatggcacatgtatacatatgtaactaacctgcgcattgtgcacatgtaccctaaaacttaaagtataataataataaataaaataaaataaaataaagaaaataaaaagactcaggtcttcctagtttataattaattaatggttt

SEQ ID NO: 473840 - DNA, 1015 bp, Homo sapiens
tcttcttgaaatggttcaccattttagaagccgtgaatgttcttcaaaattaacaggagtttggaagaaatttatttcaaccctcatggatgactttgaggggttcaagacttcagtggaggaaggaattggagatgcagtggaaatagtaagagaacaggaatttgaagtggagcctgaagatgtgactgaattgctgcaatctcatgctcaaacatgggcaggtgaagagttgcttcttatggataaacaaagaaagtggtttcttgagatggtatgtgcttctggtgaagatgctctgaacactgttgaaatgcccaagaatttagaatttcacattaacctagttgataaaacagaggcaggatttgagaggattgactccaattttaaaggttctaccatgggtaaaatgctatcaaatagcatgacacgctacagagaaatcttgcgaaaggaggaatcagtctatgcagcaaactttactgttgtcttattttcagaaattgccacaatcacctcagccttagcaaccaccaccctcataagtcagcagccatcaaacattgaggcaagacccaccaccagcaaaaagattacaacttgctgaaggctcagatgatcattggcattttttagcaatacaacatctttaaagtaagatatgtacttttattttagacatacgctattgcacgcttaatagactatggaacaatgtaaatataacttttgtatgcactgagaagccaacatatttgtgactctgtttattgtaatatttgttttattgtagtggtatggaaccaaacctgaaatatatgcaaggtgtgcctgtaatctgccttccagcttctttaagactctttggtccaaggaagttgtgttaaaaaaaaaaattcctatggttaaccttctttcttgttattttgttatttgcttctctccccaatagatttcaggctatttagattttgggttcctctctcaagcatgattaacttaggatgattaa

SEQ ID NO: 473841 - DNA, 1711 bp, Homo sapiens
caccaagtcagtcttaaccaacacaggccccagcacccgcagagcagacactgcgatgacaacggacgacacagaagtgcccgctatgactctagcaccgggccacgccgctctggaaactcaaacgctgagcgctgagacctcttctagggcctcaaccccagccggccccattccagaagcagagaccaggggagccaagagaatttcccctgcaagagagaccaggagtttcacaaaaacatctcccaacttcatggtgctgatcgccacctccgtggagacatcagccgccagtggcagccccgagggagctggaatgaccacagttcagaccatcacaggcagtgatcccagggaagccatctttgacaccctttgcaccgatgacatctctgaagaggcaaagacactcacaatggacatattgacattggctcacacctccacagaagctaagggcctgtcctcagagagcagcgcctcttccgacggcccccatccagtcatcaccccgtcacgggcctcagagagcagcgcctcttccgacggcccccatccagtcatcaccccgtcacgggcctcagagagcagcgcctcttccgacggcccccatccagtcatcaccccgtcacgggcctcagagagcagcgcctcttccgacggcccccatccagtcatcaccccgtcacgggcctcagagagcagcgcctcttccgacggcctccatccagtcatcaccccgtcacgggcctcagagagcagcgcctcttccgacggcctccatccagtcatcaccccgtcacgggcctcagagagcagcgcctcttccgacggcccccatccagtcatcaccccctcatggtccccgggatctgacgtcactctcctcgctgaagccctggtgactgtcacaaacatcgaggttattaattgcagcatcacagaaatagaaacaacgacttccagcatccctggggcctcagacacagatctcatccccacggaaggggtgaaggcctcgtccacctccgatccaccagctctgcctgactccactaacacaaaaccacacatcactgaggtcacagcctctgccgagaccctgtccacagccggcaccacagagtcagctgcacctgatgccacgattgggaccccactccccaccaacagcaccatagaaagagaagtgacagcacccggggccacgaccctcagtggagctctggccacagggaatcccctggaagaaacctcagccctctctgttgagacaccaagttacgtcaaagtctcaggagcagctccggtctccatagaggctgggtcagcagtgggcaaaacaacttcctttgctgggagctctgcttcctcctacagccccttggaagccgccctcaagaacttcaccccttcagagacactgaccacggacatcgcaaccaaggggcccttccccaccagcagggcccctcttccttctgtccctccgactacaaccaacagcagctgaaggacgaacagcatcttagccaagaccacaacctcagcgaagaccacgatgaagcccccaacagccacgcccaccactgctcggacgaggccgaccacagacatgagtgcagatctaagggtggggtggtggcatgtttcttgagttggttcctggaaagggagctgaaatggtttaatcgctcttccatgaaac

SEQ ID NO: 473842 - DNA, 494 bp, Homo sapiens
tgcagaaccccagaccacagggccaaaaggaccttgtagatcatgttgatggaggcccagagagggcagataacttgtacgttcacacagctcctggctctgagatgttgtgattccctgatgcggatccagcaggctttcttctacccaagagctgccttcatcagcgctcctgccctgaaattcccaagctaccttgtctggtcactggccagtggccataacagttcacgtccgtggcacatggagggaccccgtgccttcggtctggccaatgttcctggctttgactgggatgcagaatcacaggatgatgaagatggaaggatgttagcaattagagttgtcccatactggggagccgtctcttctccccaacgcttgaggatcagaatggatgtcggggttctcgctcatttactgagcacctaagatgtatatatttttgataagcatcagctgtgtagcaggcactgtgtaagagctttactgtc

SEQ ID NO: 473843 - DNA, 683 bp, Homo sapiens
accccttcgcagtctgctcgcaatccgtgctgaagtctaaaataggaaagaacttttcacaagatggcactcaaggcgaagaaggaagctcctgcccctcctcaagccaaagccaaagtgaagactttaagggccaagaaggcagtgctgaaaggtgtccacaggacaaagcctccatcgcacctgcccattccccagagaccagtcatccacatctggtggcccaagacactgcgacaccacaggataaaagaatataaaggggccattggtgctgctggagaagctgccatgctccaggggaagacctcaaggatatgtcagtgcctggagcccggcctgaccctggctgacttccggtgctggatttcaggggcagtttatgccaagcatttggatgcagcaacagtcttcttgggaggtggtggtggccacgaaaagcttcctaaactgccccacccccaattctctgtctatcatcgggcctgcttcagctccctagcaacagattcgctgattcgattgtaacttctctgggcatgaaagccaggaccctgtgcatttcagtaactgtacctctactctcctaatcaccagtggaaaagaggggtggcgaagagaacaacactggcaccaagctacagcctaatagacagtctgtttttgttcctggctggactgcc

SEQ ID NO: 473844 - DNA, 676 bp, Homo sapiens
actactagtttacaggaaatgccaaggacagggaacgtgttaaatgatactgctgaatgcagtcgccaaaactcagatgaacaaggtgtggtgtatataaatgactatgttatccatgtcccgatttaggaaaggagatattgcagaaattgaagtctgttaccttaaatgccaaggggattcggcatttctgtcctccccctggcttattctgaaatcgagcaccggcagccactcagctttcactatctccacggttttaccttctgcagaatatcatatggttgactcgtacagctccccatcaccttccaccatgagtggaaacaccatgaggccctcaccagaagctgagcggtttctagaaccgggcttcttgtacagcctgcagaaccaagggaaaaatgagtctcttttctttataaatcaccagcctcaggtattcgtttatagcaacacaaatggacaaagacaccagggtcccatacttctgcctaacgtggctacaaagttgaaggttcccacacgctatcccgcaggaacactcagcaagtacctggtagatgaaatccaatgtaaattctctgattaacttaggctcttatctacatctctgttgcctctctgttttttgcatatatatatatatatatatatatatatatatatatatata

SEQ ID NO: 473845 - DNA, 814 bp, Homo sapiens
gggcctcgcacccggcgctccgccgccgccgccgcccagctgcgccggggcgccctccggagatgctgccgtggaagaagcacaagttcgagctgctggccgaggcgccgccgcggcaggcgtccaagcccaagggctacgctgtgagcctgcactactcggcgctcagctcgctggcgcgggcgtgccccgaaggcgcgcttagccgggtgggcagcatgttccgctccaagcgcaagaagctgcacatcactagcgaggacccaacttacaccgtgctctacctgggcaatgccaccaccatccaggcgcgcggcgacggctgcaccgaccttgctgtgggcaagatctggagcaagagcgaggcgggccgtcagggcaccaagatgaagctgacggtgagtgcgcagggtatccgcatggtgcacgccgaggagcgcgcgctgcgccgcccgggccacctctacctgctgcaccgcgtcacctactgcgtggccgacgcgcggctgcccaaggtcttcgcctgggtgtaccggcacgagctgaagcacaaggccgtgatgctgcgctgccacgccgtgctggtgtccaagcccgaaaaggcgcaggccatggccctgctgctctaccagacgtcggccaacgcgctggcggaatttaaacgcctcaagcggcgggacgacgcgcgtcaccagccgcaggagctgggggcgaacacaccatcccgctaggtccaaggatgtgttcaatcctacacggaccctgtttctatattccggcggtggggcgcagccttagcgcgcacaagcttgtc

SEQ ID NO: 473846 - DNA, 3634 bp, Homo sapiens
gtgggctctgtttaaacctgaaagctcgattcgccccaagccaatggaatccagtgtcttttcaaagcctcctgaaggattcgaatgcgctcccagggctgagaactaaggaccctgcgcaggccgcgctgggcagctgtccatcagcacccctgtgcacacagagagcaggcagcagaccagcgccctggacggctgcttttaaaagcagggcttggtccttgaattcataaagtggtcactgagttgcatcatcgggggggtggcgggtggcgggaagagggtcagcagtgccaggagcaggtagcaccgttttgcagcatcacctccggtatctctgggtaaggtccgcattgcctgagccccttgtcagagcacctccaacgtatgggcagtggctatgtcatcagtgccctgaaggataaaatgtcaccttgtgagagcgttgtcatggcctgcagggagcagttatcgaagaatcaggtcaagtgggggtttgctggcattacctgtgtttctgtagtggtcattgccgcgatagtccttgccatcgccttgcggtggccaggctgtgagctggaggcctgcagctccgaggccgacatgctggattacctgctgagcctgggccagatcagctgccgagatgccctggaggtcacctggtaccacgcagccaacagcaagaaagccgtgacagctgccctgaacagcaacatcacagtcctggaggctgacgtcaatgtagaagggctcggcacagctgacgagacaggagctcccatcgtggcacaccctccggctatctacagtgatgacacactggagcagtggctggatggtgtgctgggctcttcccagaagggcatcaaactggacttcaagaacatcaaggccctgacagagtggggcaaagtccggcggcccatgtggatcaacgctgacatcttaaagggccccgacatgcccatctcagctgaggtcagtgccacacagttcctggccctggtccaggagaagtatcccaaggccaccctgtctccaggctggaccaccctgtacgtgcccatgttcccaaacaggacgtacacccgagccatggtggagaagatgcacgagctggtgggagtggtgctccagagggtcaccttccctgtgcggtcttccacagtgcgggccgcccaggcccactccagctggctgctgagccaatctgagaggtacagcctgacgctatggcaggctgcctcggaccccatgttggcagaggatctgccctacgtccaggataacactgctgtccaccacgtctactgtgatatctttgagcctttcctgttgcagttcaagcaggtggcctctacttggcagggtgccatgaggcttagagaggatggctgtagagctgtggcctacagaaggtgtttcatgaatagcagccacctcaccttggcgatttggggccccacagtgaatgccacatggaaacaaatgtactacacgggaggcagcctgatccctcttctccagctgttcgagggtgatggtcttctcaatgctgccccagggtggcagcatcctgaggttggagtcctgcctgcagcagctggccgcacatcccagacactggagcgtccatttgcaaatagtggagcccgcagccctctggccgtccctggccttgctggcatccctgtccagccttggcttcttgcatcggcctgtgtggatggggccaacatctcccacgggagcttttcagtcctcggccacatggctggcagagagctgcttacagctgtggctgaggtcttcccccatgtgactgtggcaccaggctggactcaggaggtgctgggcagtggctacagggaacagctgctcacagatatgctagagctgtgccaggggctcagcttccagatgcaggccaggccacggggccacagcacgcctggagctgttgccaggctgctggcatcctcccctggggctactgtcacagtggagcacagcccagctgggggcaactatgcctgtgagaggacagcgctgctgggagccagggctgtagacagaacccgaatctactacacgctgccccaggggtaccacaaggacttgctggccgatgtttgcagaaactgagcacccaggggtggtgggccagcagaccccagggtggagtcttcccatggggaggcaggaagaaataaagacctttgcctttctccaggcaaaacaaaacaaaaaagaaaggtttgaaaccctggtctggatatctagcttattgtgtgtggtcaatagaagatttttaataaatgaaaaatgttttactcaccttttcactgctttgctagaaaagacaacttggagtttccaagagaacagtctgtgccctggctatatttcagaaatgttcattctattcagtccagctgcagggaaaaggattgttgctggaagaaagggcctactttacacagctgtatctagggaaggctgagggttgctccccatggccctctggttctccccctgactgttttatggtcaggcccatgtgcagctgctgggatccctaatgatgcctgatatatggggagcttaagtggctacatttaaggcttagatattagcaggggactcttgcactgtctgaagacgagcagttgatgtattccgtgtgctgtagtctgccagcccattagaatttaattaggcacattctttcctgacagccttatggtgctcaggagcaagatgcttttggctttgtggctgcatttggaactcattctttctcctttttttctggaagctctcagcatctcctctgccttcagagaacctgtggtggtgtgtatcagaatcactcctggagattttgagtcagttggtctgggacagctatcttccttttaataatcctccacaggtgactctgaattgctctgaggcctgagacatgctgacctctgtaggttaatgatcctcaagccaacacctccactccagacctcccgagcttcagacatacgcaaccttctgtcttttgggcagctccacctggaatgtctacgaggcgcctcaagctccaagtagatgtcctataagttttggagtccctcacctgctctgtattcagttcattctatttatttattctttcttccaaaatatctcttcattctctcacctcctaaggaaaattctgccttttgtaaacaaggtctagttgtcactggatggagaagctgtttctctgattcacctgatttcccttttacttgagaatttctccctaaccattgctcccatctcgtaaataacttataataacttcggtaggggcctgtgatttcccccgcatgcatgcatgcttcttcccttagtttcctctagtacagctgagacaaggctggaaaacctgactggatttgtcccactggagactcagtgacaggtgaagggagatcaacacagggtgtactgtgacccaggatacctggcattcagcacctttccctttgaagcctgaagggcctgcctcacctgaactccccctagcatccctatggcaagtactatcttggcacttgccaagttgagtgtgtgcccagaacaggtcttt

SEQ ID NO: 473847 - DNA, 1695 bp, Homo sapiens
gaagagttcaccataatgcttaggtttccccggcacgctccgctcttctctcaaaaaccagaaaggcgccagatagagccattcccaggtttcctggtcagtttcctggtgctgagtgtcctttggcattttcccgcccagagtgggagtcaccaggcagtctccatccagtgtggcaccttcacctcgcaggtccccagagcactgccatcttcacacaatgctccacagttgggatcaaattacacgtggcctgtgattgtcagaggtaaaagacagagcagatttaagggttgctgctgcttccctactggaaggtgccagatgggtgccagtgacatgctgatgtcctggacagatgtgattccacccccacacagttcaatcacccgatatgagctgtgtgaccttgggtggaaaccagatgcccagaatgagaagggactcacctgggtcacggatgagtttgtggttgtgagaatattaactgccaggctcagctgggttaaatggtgtcctcggaattacccggtacctgtgaatgtagccttatttggacatagggtctttgcagatgtcattaacaagtcaaggtcgtactggattactgtaggctctgaatttaatgactggtgtccttgtaagaaggccacgtgaagacagacacactgaaggtagaaggctgtgtgacaacagaggcaaagactgcagtgatgcagccgcaagccaaggaatgcagggaaccaacgatcaccagcagcagtgagaggcaagggagggttcctccttagagccttcccagggagcagggcccggccacaactccagacttctggcctctagaagtgtgagagaaggaatttctcttgttttaagccacgcagtttgtgtactttgttacgagaaccctgggaaccgaatacacaggccaaggccctctctgctgtttcctggagcagcagtgacagggatgcgactcacctcatggagtgccacgctgagcctgagctaagcagctgacatacatcatctcaagtaatcctcctgagaagcgcaggaaacgattattattatcccacagcagctcccaaggcagggtgcttttttcaaactgtaattttgaatagtaatatagtcatatatttatattttataaaaatatgaaagctcccaaagggtgagacacacagtgaaaggtctctctcactccaccccatcccctgctagccggttccctcctctgggggagccattgtcaccagagtcttgcagagtcttccagagctgttccataagcaaacctgcaaataagctaaaatatcctcccgcttccaaacacacaacttttgaaaacacaaatgtgatatatactatacagacggttcctcgactcattttcactgttggtgtgtcttggagcttctgtcctcgtctcagcaacactggacttagatgggcatcctgacttcttgaaatgctcctttctggagccaccccctccttgctttcctttcaccctatcagttgctcctctgtaggaccctgggctgataccccctcccctcccctcccctcctctcccttcccctcccctcctctcccttcccctcccctcccctttccttcccctccctcagtgttggcaagccctgggcttaccttgctttctcctcacctctccctgtactctttctc

SEQ ID NO: 473848 - DNA, 594 bp, Homo sapiens
aaatgcattcttaggagagtgaacgggggtgagaaaaggggcctggcgagtgcagccaatgtggtcggaaagttttactgtgaagaggacagagccagcagaagctggtcagagatgggagaggatggggaactgtgtgttacaggaatgaccaagaccggagacagggagagagtggagctgaaacctagagtgggtgaggagaggggagagggcttcgagtgggaggcagagagtgatgacatcagcttattgcatgtgaatgcccagagaacaagccacacacttcgtcagaggacccccagatgccagtctctcaaggccacagaggtggctcccagccatttgatccagaaattctgtcatcccatgtgtctgtgtcatggtctggaagaggctgcaggggctgctgctggcatggcccctgaccctgtggatttccccacctggagctggagtaaggcctacactggggccatctgaagtgcagggttgaggcagagacttggactgcccagctgtatgggagattctgcacctaacgttcagttgactggaagactaggaacaactcactttccgtgtttattctgc

SEQ ID NO: 473849 - DNA, 694 bp, Homo sapiens
caggagaccaggtgggccccatgccctgggctcctgtgaattccagagcagctgagcatttagacaggaatcctcaggagaaggctggagccccccagcctccagctgcatcagggcaggacagcagggcgacaggcccagtggggtctgaagccttgaggggtgccctcgtcactgctgtcattgtgaaggctgctgtcattgtgaaggctgctgtcatgaagaaggtggagccgactggagggaaggtggtcactctccctgcaaatgcattcatctccttcactagttccagagctcttcaggtcgggctgtggaacaagggctctttacagacaatgcaggccatctttttggtatctgtggggacggtcctcactgccaccatccccctgcataccaccatccagaagtccctaaacagagctcctccatgtggttgtctgctaactgcagggctgggttgcatggtcacccttgcatgaaggcgcagctgggaaggcgagcattttccacttttcaggctccaccatggaaggactctgtaccaccgtagacaagacattcttttgcttctgtgtgtttaaactatttctctgtacaacagtaaatcattcttacccaggttgtgtctaggttggagtgctttggtgcctgcaggggttgctttgacaactagaatatttgttgggga

SEQ ID NO: 473850 - DNA, 2752 bp, Homo sapiens
ttctctggaggagaggtgccaagccaggtcccgtcatccccagaagggcctgagaggctccggctggggcggctgccctggcatctgccccagggggcatgggctcagccccagcagccagcactccattctggtcactgagccatgtaacatcctccccaaaccccaccatgagggacagccagctggcagctcagctaaagggacatgcaggctggagagcaaacaccgtggccgggactggctcgggccctggcttctcagcccaccctctcatgggattcttgaagcagcctcctcactccactgtctccctacccccaccctgctgtcctcagaagccccagaagcccacgctcctgcagccagagggaccatccaaagcttccatgagatcttctctcctctgcttcaacccccgccccccaccgtggctccccatctcctcaggcagtgatgctcagcacccccatgatgaaacagcatcacctgtgagctttaaaaagacacccatgctcaagctccacccagaccccaaaatcagaatgcagcggggggcggggggttggggtacagggaggcaggcatgaacaactttttaaagctgccaggtaattcaaatatgcagctcagtttcagagccatgggtttaaagagtaagggtggggaggggaatctccttagagtggaatgctggtgaggaaattctggtgcccaggatttagcagaaaaaaatgtgctgccctcccatgcaagtccgccagcattggcgcccccctccccagcctttgtgccttagctctccttcctatgtgtaccgcttcctctgcgtggaaacaccatatgaatgcaatcgatatttttcttacatgggcaaggatatctagggattccctggaatgtccaaggacagatgtgcagagacgggaatgatgatctaacagagcccctgtggagacctgccatgttaagcactcactgtgtgcagggcccgggatgagaactttaagtgcactgttttgtcaattcccaagaccaccctgggagcttcatcttacaggactgatcagagcctttaatgcactgaggagcactgagaatccccaagaaggggatccagtgtgaatggagtgtttcttaaacatttgcccaagaaacttttttgaccacagagtagaccccagtgtctcgttcccttctttgcgtccatgtgttctcatcatttagctcccacttgtgagaacatggggtatttggttttctgttcctgcatgagtttgttaaggataatggcctccagctccatccatgtttcctcaaaagacatgtctccttctgtttttttttggctgcatagtattccatggtgtgtatgtaccacgttttctttatccaatctgtcactgatgggcatttaggctggttctatgtctttgctatttatctgttcttttttgactttttaataatagtcattctgactggtacgatttgcatttctctaatgatcagtgatgttgagctttttttcaagtgctgtttggccccgtgtatgtcttcttttgaaaagtgtctgttcatgtcctttgccacttttttgtttgtgtttttcttataaattcgtttaagttccttatagatgctggatattagacctttgtcagatgcatagtttgcaaacattttctttcattctgtaaactgtttactctgttgatagtttcttttgctgtgcagaagctcttaaatttaactagatcccttttgtcaatttttgttttgttgcgattgcttttggcatcttcgccatgaaatctttgcctgttcctatgtccaggatggtattgcctcggttgtcttctagggtttttatagttttgggttttatatttaagtcgttagtccatcttgagctgatttttgtatgtgatgtaagggaggggtctattttcagtcttctgcatatggctagccagttatcccagtaccatttattgaatagggagttcttttcccattgcttgtttttgtcagctttgctgaagatcagatggttgtaaatgtgtggccatatttctgggctctctgttctattccattggtctgtgtctgttttcgtgccagtagtatgctgttttggtgaagtatagtttgtagtatagacgtgtagtatagtttgaagttgggtaatgtgatgtctccagctttgttctttttgcttaggattgccttggctattcgggctctttttttggttccatatgaattttaaaatacttttttctagttctgtgaagaatgttgttggtagtttgataagaatagcattgaatctataaattgctttgggcagtatggccattttaatgacattggttcttcttattcatgaacataaaatgtgtttccatttgtttgtgtcatctctgatttctttgagcagtgttttgtaattgatttctttgagcagtgttttgtaattctcattgtagagatctttcacctctctggttggctatattcctaggtaaggttgtcaatcttcctttttaaaaatgtcggctgcaattttaagaaatgatattgtgttttgcttcctagggctccttttattaatccccctcccttctcagggttttagcccaaccatgagtgtgtgattcgatctggaaactgtccagagcacaaatcaaaccaagagggctcttcctgggctccagcgtttccaccgagccatgttttcgcgtcggct

SEQ ID NO: 473851 - DNA, 501 bp, Homo sapiens
ccagtttttgagcctcagcttcctcatctgcacaatgggtatatgaaccaggagtccctcagtcttcaggctctggcctcactgactgcacagcctctgggccgggtgcttcctctgggaggaggcccagatgctggcccttcagtgactgctctcaaggctgaaggacgccccagagttgaaattatttctaaaggggtgaaaaaggcttatcccctctaccgtgggtctccaggtgactatgaagttcctcgcacgagctccaatactgtccacaccccgtaccattccttctaccccgaggctgatgcgattcctctacgagaaccagcagacacagaagccagagaaacccaccattcccttagacacagaagatttgggagcgttcctgccgaggttggagtaaagccgtttaaaaagacacctgagcctctccgggttcctgctcctcactcaaccccacagtagatctggtggggaggttgagggctcagtgaa

SEQ ID NO: 473852 - DNA, 2530 bp, Homo sapiens
gggcctcgcacccggcgctccgccgccgccgccgcccagctgcgccggggcgccctccggagatgctgccgtggaagaagcacaagttcgagctgctggccgaggcgccgccgcggcaggcgtccaagcccaagggctacgctgtgagcctgcactactcggcgctcagctcgctggcgcgggcgtgccccgaaggcgcgcttagccgggtgggcagcatgttccgctccaagcgcaagaagctgcacatcactagcgaggacccaacttacaccgtgctctacctgggcaatgccaccaccatccaggcgcgcggcgacggctgcaccgaccttgctgtgggcaagatctggagcaagagcgaggcgggccgtcagggcaccaagatgaagctgacggtgagtgcgcagggtatccgcatggtgcacgccgaggagcgcgcgctgcgccgcccgggccacctctacctgctgcaccgcgtcacctactgcgtggccgacgcgcggctgcccaaggtcttcgcctgggtgtaccggcacgagctgaagcacaaggccgtgatgctgcgctgccacgccgtgctggtgtccaagcccgaaaaggcgcaggccatggccctgctgctctaccagacgtcggccaacgcgctggcggaatttaaacgcctcaagcggcgggacgacgcgcgtcaccagcagcaggagctggtgggcgcacacaccatcccgctagtgccgctgcgcaagctgctcctacacggaccctgctgctataaaccgccggtggagcgcagccgcagcgcgcccaagcttggctccatcaccgaggacctgctcggcgaacagctggagcaggagctgcaggaggaagaggaagaggagcaacccgagggctgcccggaggaggaggagaaccgtgcggcagagggagatccagcagaggaggaggccgaggcgcagcgtgcgctagtggtcgccatgcactttgagtgcggggacttgttggatactctggagaatggccgtggggaggcgctaggaggcggcgggggctccctgggcccgggggccgggccgccgcctctgctgctgggcagcgcctccgacatgaaggctgagctgtcgcaacttattagcgacctgggcgagctcagcttcggcaacgacgtgcgcaccctgcaggccgacttgcgggtgacgcgcctgctgtcaggcgacagcacgggcagcgagagctccatcgagggcgggggccctgacgccacctccgccaccgccggggactcgtcccgccaggccgacggcgccagtgcagacgagccccactcgggctgagctcctccgcgcgtcgccggcgctccaccgtggctacccatccgtggtcccgacaacctccctgtcccttgcccgcccccaggaagggggaaatggggcatttggggcccagacctacacttggagcccaggtccagcgttcccccgaccgctttcccctacctcccggcccccgctcccgccccagcacttttggctctgttgcgcgtggggatgcggggagatttgagaggggaaaaccccgccaggagggagagagaggcacccctctgggatgcgggtgagggaaggttggctgaagttcctagtctcaggccgtaggtgcctggccagtttcctgtttgtggggcagctggggcctgaggaggaggggttcacttcctcctcccaccccctgggagcggccctgcgctgtcactgacatctcattaaaaaaaaaaaaaaatttgctctcaaggtgtttgaggctttaatgcaaccctttagcccttggttctttttggtgcaagaattctggctgtttacctcagactcagacccctgaaatgttgccaaattcttcaaataactgtttggggggtggggggagatgaaagagagtcgcgttttgtttacagttaaagacatccaatatcttaaaaaggagttttcctttagaaacacacacacccttcctcttgctcaaaagatctcactccatgatactgtgtaaaatatttttgcactgttgtgaagtatttttgacttttttctgtacataactgtgttctcagagctgaatgtttatatcttttgctgtgcaaaagaaacatgtaaaatgttgttcagttgtatatacagaaatgtgtataaaacattttgttattttttaaaagtagcactgttctggttctgtttgcacgccagtggggagagaataaagaggaaaatttaacagaacagagctctgactgatgtaattctagaagagatgtgaaggtgacacgtgattcacctcttctgacttctcagtcttccagggatgatatcactagagtaagaagagatgttttgaatgaaaataaaagaaagaccctaaaactactttgctcctggagctcagagggaaaagaatggagcgacaaaagcaaagctaagtcattagataaaatacaccttccagaaaacacctgaagtctggtttactcatcaaattt

SEQ ID NO: 473853 - DNA, 915 bp, Homo sapiens
tctgagcacccctctaaatgaccagtgcagctcttgtaccacaaagacacaaacatgaggaatggatggacgctatcttgatggctacatgcaccatcaccaagctactatgtatgcagacaagatcagacctccttacaaattatatcttgttttcttgcagtgcctttaaagagaaacgatggcttcagcagttagaaatagcaagagtcctggccaaaaagagcatttctaacttgactacccgaggaggtttctgccgaatatggattcccaggtatggcgaaatagccagaccgttatatacactaattaaggaaactcagaaagccaatacccgtttggtaagatggacacctgaagcagaagtggctttccaggcactaaagaaggccctaacccaatccccaatgttaagcttgccaacggggcaagacttttctttatatgtcacagaaaaaacaggaatagctctaggagtccttacacaggaagccattaagagattatcattggctgtacagaaacctaaagaggtgacagtcttacactgccagggtcatcagaaagaaaaggaaagggaaacagaatggaaccaccaagcggatattgaagccaaaagagctgcaaggcaggaccctccattaaaaatgcttatagaaggacccctagtatgggatgtgaaggacaaagtagacacagagaagtgaattgaaaaactcttccaatttttagtctgctagggagactcagaatatagagttgtctcaagccttagatagaaaagacagatatgaagagtcttcttcccttcccctctcttcctccacaccctccattttcaaggggttaagatttgaagaatcatattcctatcaattagcaactttatcatctctgatatttgaaccacag

SEQ ID NO: 473854 - DNA, 979 bp, Homo sapiens
caattaatcaacaataagcacagttcccagctatgcttcctgtgctccataagagacgtataaaaatgtgtccttcatcccttataaatacatgtagatttgagtactcccctgaaggcaaagggaatactggccagtgggctgtggagaagtttgctgctgccactggagccactcctgttgctgatggctctatttctggaacctttactatccaaatccaggcagccttctgggagccatgtcttctggtgcttactgatcccagagctgaccaccagcccctcacagaagcatgttatgttaacatacctaccattgctctgtgtaacacagattcttctctgcactgtgtggacattgccatccaagcaacaacaagggaactcattgagtgggaagggcagtctgcttctgagaaagctgtaaccaaggaggaatttcagggtgaaaggactgctccagctcctgagtttactgctcctcaacctgaggttgcagtctggtttgaaggcatgcagatgccttctgtgcctattcagcagttccctattgaagaccataacacagcctaccatggaaaattggtctgcagctgccactgcttaggccactgaatgggtagaaacaaccactgaatgtcttaagccatttttctacagacttttaaacaagatggaaatcaggttgatgaaaaataaacatcagttcctaaaactaaacaaaacaataattgtttttgaaaaaggaatgtatttttaggtgggaatgggatgggggaagcaatatggacttccttttttgatggttttttgttgttgttgttgcttcttcactttctcatttcttcatatttttttcttgcctctgtaaaatattgttaaaaccatggatcaaaatatacattgttaaatgtgtctttttgccttaaaatcctttttacacttataaaagaatatatgtttcttatataattctt

SEQ ID NO: 473855 - DNA, 825 bp, Homo sapiens
cggccatcttggctcctcccctgaaaatctctctctttgcctgctgccatacatgtaacacgtgacttgctcctccttgccttctgccatgattgtgaggcttccccagccacatggaactggctcagaagaagacaggaaaatgtgggacagtttggaacttcctagagacttgtcgaatggctttgaccaaaatgctcataacgatatggacaatgaaatccaggctgaagtggtctcagatggagatgaggaacttgttgggaaccagagcaaaggtgactcttgttacgttttatcaaagagactggtggcattttgcccctgccctagagatttatggaactttgaacttgagaaagatgatttagggcatctggtggaagaaaattctaagcagcaaagcattcaagaggtgacttgggtgcagttaaaggcattcagttttataagggaagcagagcataaaagtttgaaaaatgtgcagcctgacaatgtgatagaaaagaaaatcccattttctgaaaagaaatccaagccggctgcagaaatttgcataagtaatgaggagccaaatgttaatctccaagacaatggggaaaatgtcttcaggccatgtcagaggtcttcatggcagcctctcctgttacaggcctggaagcctaggaggaaaaagtggtttcatggggtgggcccagggtcctcatgctgtgtgcagcctagggactttgtgccctgcatcccagctgctctagtgatggctgaaaggggccaaggtagagcctgtttaacctgttttgatttggagaagcacagaaaatgagg

SEQ ID NO: 473856 - DNA, 613 bp, Homo sapiens
aagcatttcctgtaacagcctaaggatgagaaggctccctgatattgatagttctcattggtttctcttaatccctacatctgtgtgtgtggtccagaccagtcctgctgtcccagctttcaatgttatggccaccaaatgggtgtgtggccctcctgttcctgtagtcagtggagactggggagtaatttctgcttccaccttggctggcacaggagtcctctcatcttcagccactgtggctgctgctcttgcggatattacatgtgcctatgagcccgtcattgtcattatttcccattctggtgagctgaacacatcctctgtggcaggtggttccatagaagcatcactcagaactgaaacaactcctgagcccatggctatccctgggtcctggtggagtggaaactcaacaatgcctagagctacatctagtgtcaatgagctacagtcctgcagctgtgctggtaaagctggaactgaaatgtccttgagactacagatccaaacagttgaccttacaaagtgaaaaggacaataccccatctgggtgacactcaggtgcagcagtacagggtcccacagtaaggttgtgtggatctaatgtatt

SEQ ID NO: 473857 - DNA, 488 bp, Homo sapiens
aaaatgtataaaaccaaactgtgctctgaccccctagggcacatgtgggaccaagtgttttgtcaagcatttcttgagactgatctgtgggaaatttgccaaaaaaaaagtggctcaaatgttttgcagaaagctgcacttcttggaggggtggggagtgaggttggaggtgatggtgaagtccacagtgacagcctttggaagccagaccccttgatccaagctcaaccagtggatgctgccatggaggactttgactcttggaagagtgatgcaaagagttggggcagtcagaccagtcaaggcagaggtgcagcgagaggatgcaacagcaatgaagacctaagtagcttgttctggtggctggtcctgggctatctggctattaaatgcacacctataactaccacatcataaattatttggtagcttacacttcagtgtaattcgtttcccttgtaaccccatgcatttccttttctgcattt

SEQ ID NO: 473858 - DNA, 782 bp, Homo sapiens
tcacccgtcttctgcgtcgcttatgctgggaactgtagactggagctgttcctattcgctcatcttggaactgcccaacactccatccttatctataacccagcattcttctataccccatagaaagcaccccttacactcggacatgcacaggaaggaagctgctaattggagggaagactcactcacactgtccccaggctccactccaaaggtggccagtgcagctctttcacctccattacctccaagtggtgctgtcactcacagtcgtgaggatgaagtcttcacctatgggatcagtgcccttacagaaagacccaaaggagcttgtttgccccttccgccatatgaggatacacaaaaaccgccatttatgaggaacagagctgtcaggtttcagagcagcgtgtcagtgccaccccatgcctgcatccgggaagatcactcctccactggaccagcccagcctggaaaggggccagtgggaattgaacaatgagatcacatggacacaggaaggggaatatcacactctggggactgttgtggggtggggggaggggggaggggtagcattgggagatatacctaatgctagatgacgagttagtgggtgcagcgcaccagcatggcacatgtatacatatgtaactaacctgcacaatgtgcacatgtaccctaaaacttaaagtataattaaaaaaaaattgaacaaaataaaaaaaaaagattttaagtctagttacttttctagggtttgtcaaaggtcagatggttgt

SEQ ID NO: 473859 - DNA, 560 bp, Homo sapiens
tcacccttccccatgagtaaaagcttcctgagaccctcaccagaggcacatgccagcagtgtgattcttgtacagcctgaaaaactaaatatgtacagtaaaggccagcctgatgaggtctcagatggaaatgaggaagttatggggaactggagcaaagatcacccttgttatgccctagcaaagaacttggctgcattgtatctatgtcctagggctttgtggaaggctgaacttaagagtaatgacttagggtatctggtagaagaaatgtctaagcagcaaagcattcaagaaatggcctggctgcttctaatagcctatgatcagatattggagcaaaggactgacttaaatttggaactattaaatcaaactaaaatctggcctgagaaagcctcctcactcccatacttgagtccttaaggatgaaccataacctaactttgtagatctggtgttggaagtgcagtttgaagtaaaactctggtgacctacaggaacaccaggtgaccaggccagttgtgctcactgatcttttgattgtaactggaggttgt

SEQ ID NO: 473860 - DNA, 1447 bp, Homo sapiens
gatgctgtttcagcgctgcttcgcgattcgaagagcgctgggaatggctctggcgccagctagtggtaggagaggggagccgccctgtcgctctcaaatctgggaaggcgtcggtcttctcgcgtccccttatccctcatcctcctccttttttttttccatcagcataatgggggaatcattgcagtgtggccagagaggagcagacgagattatagatgaaagtagagaaaaacggtggggaacaaagagcttgagagatttataccccagcccaagatccacagtcattaaatggcagggctctagttcaaatccaggtggcgcccaggtctactgccgcgtctcgtctccgctgggcgcaaatcttggaacagctgtggatgttcgaggagtggttggagagatcaatatgatccatgtggagcagcttccctaccgtctgctccaaaaggcttttagcttaggaactcagagccagccaaatgcttactgcagctgcttgttggctggttcaaaggattttggaaaaggaacttcaaacgaaattggtaagggaggcaaatgcgtaagtggaaactttgaggaaactggcaatgagagactggaaatcaggcagtcatttacgttttacttcaccaccctttgcttatgtgagtacaaagcagggagctggcaaggctgtgagtcagaactctcctctcaggaactgagcagagagattcccagcatctgtttcctcaactatcacccagaggatactggtggtaaatcacagggaataaaaatagcctcagaaagagccagctgcgggaggatgaattatggtgtagacttgaaaagttatccgacccacggcccgtgggctgcatgcggccaggatggctttgaatgtgacccaacacagcctgctgagccttctgtgttttggggaaggtttgtattctttcttcctcgggattatggccctgagaaagtgtcttctagttctcatcaggaccaggatcgaggaccagccctgggtcaaaaacatgggatgtgggtgagcacacagtggggcactgggcagtacggactgagtcaccagacagtacctgagccatagagggctgctgctggggaggaagcagacagaggtgcaatggaggtgaatgtgccacgctagagtcaagcgccttcatcaagatttaaggagagggggagtgaaggactggagtagaaaccacaggtacagacatggagaagtaattttggacaaattgaaaataaaagtagtccaataatttaggatcaacagtgtaagcaccttgaattcatggcaagtaagacttggtgcatagtaaaattaagttttcttctgtgcctctcagactaatatcagacattgttgccaaaatgaatttccaactcaatccaaataaatggcagtggtgatagtaaagttgtc

SEQ ID NO: 473861 - DNA, 1126 bp, Homo sapiens
ggccggaggcacatacacttgccggtagtaaaactctaccttgtgattcactgatttctccagcagccatgcttcctgcagcattgaggcttggtcatatcacagtgctcagaggggaggttcagccatttctgccttgtgccactggacagatgattcctgcatttggtgagtttggcaaaagcaaacagtgctttaggcctaagggtaacttttacatttcaattggaaagaaagctgcagctttggcctgtgaaattgaccatggagaagaaaaggcttatttctggagcggcagtaggacccaaagtgagagttacggggagacaaggagatataaaccatcaattcatacatgtaagatgtaccttggtttggtccagaaacgtgggataactggaagcgggggctcccaggtcagaggtggattcaaagacttttcggattggcagttggatgaaaaaaccagcttcttccaagaagcctttcctgctgctccatgggtttccatagcatccagtgtggaccagctggagcaggactggcgagggaatgaactggatattgcagcagaaccacttcgtcgggattgtacacactgatcctgatccagttaaatatgaagtcaaacaagaaatgatttgatgcccctctgtatctcccaacagaatgacaagaattgcattttccgcatgtgtttttcataactcagtgctccatttcccttccaactaggactgagctgagggaatcagcctgtttttcaggcttaagaaattccaggattgacagaaaagggtggaaactattttcatgtttctgtgtaaagtgttctttacacagaatacccctttgtcattttttcccctgcaaaatgtggtagcttgagtggtgactaatgaaggtttgctccatcgtttagccctgggtcaagggagaagcacagaggcagacaagggtgggatgctgtcagaggtgaaagttccttctgggtaataatttatattcatcttttgagaataggtatttatattaacagatgatatagttacaaatttgatctctgtagattttaaatgtcagttttattacaatgctgataattcattatattttaaaagttaat

SEQ ID NO: 473862 - DNA, 529 bp, Homo sapiens
gattaatggtcaaataagagcttccaggatgagtcgtcatctgacctgtctgacagcgactagagaaacaaatcccatactttgcagacaaggattccatgcagaggaagggaatggtttgactcatgtttacgagagtgactttggctgttgcattgcgaatagtctcaaggtgggcaaggctgaaaagagagaggaggctgtggctgtcatcctgattacaaagaagaagctgcagcaaaccagtggagcacaaaaccaaggatgcccatataaaaagcatagcaaacattttactcacattatcttgtcccccagttcatcacagctcagcaccaagatggacccccttggctgtgacctcctcccagtgggaaaaaacagactagagggattctggcaacctttgccaccaaagacttcagcagtccttaccaccgctgcaaacacctgcagcttttgccaccaaggaccacccttctccccagttatcgccaacactggtatcagctgatggagctgatctgag

SEQ ID NO: 473863 - DNA, 906 bp, Homo sapiens
agacaaagaatccagtgactctgctcacccctgaggatacgtggagaagatggccatctgcaaaccaggaagtgtgtcctctctagacactagatctgccagcacttttatcttggacttcccaggctccagaactggctcagaagaagacaagaaaacgtgggaaagtttggaacttcctggagatttgttgaatggctttgacaaaaatgctgacagtgatacgaaccataatgtccaggctgaggtggtctcagatggaaatgaggaacttgttgggaaccggagcaaaggtgactcttgttatgttttagcagagagactggcagcattttgcccctgccctaaagatttgtggaactttgaacttgaaatagatgatttagggtatctggcagaagaaatgtctaaacagcaaagcattcaagaggtgacttggatgctgttgagggcattcagttttataagggaagcagagcataaaagttcagaaaacttgcagcctgacaaggcgatagaaaagaaaaatcccattttctgaggagaaatccaagccagcctcagaaatttgcataagtaatttggagccaaatgttaatccccaagacaatggggaaaatgtctccagggcacgtgagaggtcttcatggcagtccctctcatcacagagaaaatttatataacataggaataacgtgcttcttaaaagtttgggagaatgcatagagtgatcaggactcatttgaggagatacaattcattggttactacattaatttttttctttggttatcgacctgtttgaattttgtaattcttgagtgggttttctaaactcgtgtactgaatatttcatagcaaatatttaaattaaaacaattaaggatgacatttattttttaataa

SEQ ID NO: 473864 - DNA, 702 bp, Homo sapiens
cttgttttgcctaatgtttctactcttgaaccacctcaaatctgttcttcatccagcagccataaacaaggtgatgtcccctcacatcccctgttttgtccttcacttagaaaggaatccaaatttctacaaggtcttgtgctatctgtcccccacatacctctacccttgtttcttgccactggccctatggtcacttgttcagccgcatttgtctttccctcagttccttcaggacacacatgtagcctcctctgcttttcatgtttttcactcctctcccccttcaataggtcgttcttgctatcccccatcacataaatctgtcacagcatctatcacagattggaaatgtacacacacacacacacacacatttgcacactagttctccctttttggtggttttgctttctgtggtttcagttacctgcagtcaactgtggtctgaaaatattaaatgggaaattccagaaataaactgttcacaagttttacattgtgtgccattttgagtagtatgataaaatctctcgccatcctgctccaacctgcttggaatgtgaatcatcctttcgtccagcggatctacgctgtctgcattcctcatctgttagtcacttagtagccatctaggtaatcagattggcagatcataagaagaagggaggagtttattcttaccttttgtacttgtgtttc

SEQ ID NO: 473865 - DNA, 1261 bp, Homo sapiens
tccacagccatgtcaggttggctgcagctgcacctagggagctcctgccctgccaactctgaagggccagggcttctgcttgtccctggctcctgtaggcttcgtggagtgtgcagccctggccatgcctccttgcagcctggggcaggggctccaggtccttcctggccgtgggctggcatccagggcaggggtgacatcgccacaagttcttttcatggccctggtgctcagtggtggtcctgggctcctcctcacttggctcatagccctactccatgtggtgcctctgggagtggattggggaccctaggcttgaccactggaagcatcaggctcagcagtcaccctgatgtggggcagactctggggacactgcctcatgcagagcctcctcccaaggcgcaggaacccagcatcatcagcggggtgggtgtccctgacttgctttacttacctgtgtctatagtgtacatataggacaaatgaaacctaatttacaaatccagttcttgtagatgttaaagaggttgccagtgtatgtccaaaatagttagtaaactaatatattttgtacattttgttttaaaagtcataggaaagattgtcttctgaaaatgtgagcattcttgcccactgggttgatgaagataggaaaggttctaggccagaatgttcatatttggaagactctttcaaattataactgttgttacatgtttgcagtttattcaagactgctgtgtggagtggatgaattcactccttacttgaaacatctagtctacctagatgtttagaggtgcccaatgtatgttaaatgtagaggtagtaaaataccactttgtaaatttctttttgctaaaattcatgggaaatgttgtcttttggaaatttaattgtgaagccacctttgtgagcagtatagtactgtctatacttgttcaatggttcagaggaggtgggagggaagaaattgccaaaagtaatatgctagtgtgttcataattggacattttcagacaccatttttctgtgttgaaagctctgttcatttttctttaatcttttttttctgatcttcagattagataatttctattgatttattttcagtcactaacctaccactgagctattctagtcagttttttatttcaattgttatacttttcagctcctaaattttcatttagttcttaaaaaactgtctctttattgagattttctacttattgctttattgttaaacaataggaag

SEQ ID NO: 473866 - DNA, 1053 bp, Homo sapiens
aaataactaatcacagatatgaagtatatgactatggtaataatgaaatgctctgaaggagggcaccaagtttttaatgctgaagagcataacaacaacagtgatgacggtgatagtggtgatggccaccatttatcaaatagcaactacagaccagctgctgggccaggtgctctgtgtgttaaaaaagcattattaatgaaaatgagaaaaatgacatatttaagagagtgtcagatgaagagaacagtgggccgggataacggctttgctgttcacgggaagcagctgcaaaggcacaggagtgggggctgcaaggcgaagtggaaaatgagggtgatgcaagttgctttgggaccagaaaaggcccaggatagactcagacccatgagagttgagttgagcagaaaaagccccagtgaagcaccagaagcaggaatgtcagcaaaaggaacagagtggaattttgtgcagtattaagtgcaaatttagagctgggaaattgacacttggctttgttatttctcgtctatttatatgtgggaattgaacaatgaggacacatggacacaggaaggggaacatcacacaccggggcctgttgtggtgtcgggggaggggggagggatagctttaggagatatacctaatgtaaatgagaagttaatgggtgcagcacaccaacatggcacatgtatacatatgtaacaaacctgcacgttgtgcacatgtaccctaaaacttaaagtataataataataaaaaaaaaactcccgatttcatgggttgaagtatgtttctctcagtttcccattttcccagtcccaattcatatgttgacatccttaccccagtaccttggaatatgactttatttggagatagtcttcatgaggttaagagatcacatgttggggtcccttgtgaagcccatgttctgtggattccatgtctgccccttattttagtcataccggatttgtgaaaatggttttttagagggtaatagtctggctgtcctttagaaattatatattttaagtggatggttgc

SEQ ID NO: 473867 - DNA, 483 bp, Homo sapiens
gcaacccagtgtggcatctgggtttgaaccagcaatggaggtcattttgcttcacctctcagtactagggtccaaagccctgaaagccttgagctctgacgtcccagggcaggagaagatggatatcctagctccagaagagtgtgccctcccccgccatatttttgttctactcaggccctcactgaattggatgatagctgtccacattgatgaggaacctgatttttcttggataaaccttctgtgcataaataaagctacagaccaatggctctttgaaggcctgtggacacctctgagggccagtcaaaatgaagagagatgccgactactgaatttaaagtcgctagctttggagctggaaaatgggaccatgggccaagaatgcaagcagcttctagaagctggaaaaggaaagaaaatggattcatgcctagactctccagaaaagagtgcagtcctgacactttggttgtagcc

SEQ ID NO: 473868 - DNA, 1004 bp, Homo sapiens
tcgatgggactgggcaccgtggagcagggggcgggccgcgtgggagcccactgcgagggggttcaggcatggcgggctgcaggtcccaagccttgccccatggggaggcggctgaggcctgtcgagaattcaagtgtggtgcaggtggaccagcagtgctggaggacccagcgccccctctgcagctgctgccctgggtgctaagcccctcactgcccagggccggcggtgctggctggctgctccgagtgtggagcctgcagagactgtgcacacccagaacttgcactggcctgcgagcgcacagccctggttcccgcccgtgcctctccctccacacctccacgcaagcagagggagccggctccagccttggcaagcccagagaggggctcccacagtgcagtggtgggctgaagagctcctcaagtgcggccagagtggacgccaaggccgaggaggtgccgagagcaagcaagagctgctagcacgttgtcacctctcagaaacaaagtaacatttacacaacatgagttaggcataaagaataatgaacacctatgtgtgtaccacacattttaagaacattagcattacctttaaagtcctgtgtgcactctccttgaagcctatcttcttcccagaggcaacctcaatcctaaatttgtatttattttgtttttcctatagttttattttcatttctctccaaagaagagaatgtagttttgcctggttttgaactttatagaaatggagtcattctgtttatattcttttgtatttccatttttttaaagagctcaagtttatgtttgtaaaaatcatctgtatgattgtaggttgctctagtttgttaagttttattgctctataacattcttatgcatgaatatgataaagaaaatatcttttttatttatgactgacattcgggttgtttataggatggggttgttctgaaaaatgttgtgctaaacttcttatttatcacttctgggctc

SEQ ID NO: 473869 - DNA, 427 bp, Homo sapiens
tgaatttcgaaaacatgatactatggctgtataacccaggggtccccaactcccgggccgtggaccagtatgatttgttgccttttaggaaccggctgcacagcagaaggagcacgaaccctattaacagtgcatgcgagggatctcggttgggcgctccttatgagaatccaatgcctgatgatctgaggtggaacagtttcatccccaaaccatctgcgctcctcctcctggtacatggaaaaattcttctagagctcatgccttgcattccttggctggtggccccttcctccattttcaaaggcagcagtctagcattttgcttcaaagtcacatttccttcttctgtatcaaatctccctttgccaccctctctgaagagcacatgtgatgacattcagggcccacccagataattcagcat

SEQ ID NO: 473870 - DNA, 944 bp, Homo sapiens
gagggtccgtggcttcattcttgaagtcagcgagtccaagaacccaccaattctggatacactatcatgtactaccaggcacagtgccaagagacggacatggatgaagctggaaaccatcattatcagcagtctatcacaagatcagaaaaccaaacaccgcatgttctcactcataagtgggagttgaacaatgagaacacacggacccagagaggggaacatgatacaccagggcctgtcaaaatgcctgagaattcacagaaagaagcaaaatgtgaagatgcaggacagaggattcaaattacactggagagacagcagtgttgcaacaccaggtggtcattgctagaggaggaagcaaagccaacaatatgcgccctgcaaagcttcctggagaaaagggaaagctccttaacagcccttatgatgaagattcttaccttaaaaggaattttcagcaagagcctaagatcaagaagctttttgacaataatgatacagcgaatactttatcctagctcacgaaaataaagggcagaaactcagttgttagaaaaagggaaagattagatgtgtttgggagatggagaaagttagttcacaaggaaatagcctctacttagtgtatagggaggataaatctgcctgacacttgggacccagggattcctgaaacttcagtttcaaagggagaaaaaaatctagtctttctattctcacagactcccttctgcttggaacaatgattattcaacaaaggggctagattttttcagtgactccagtttctccctgttcaagtcagttttgcaatctgctatttgattaatctttgggaaactctgatacactcatctgctcaaaacttggaataagctcacattgtttctataacaagagtcaaatgttttttctgttatttgaaaatgttaattttacct

SEQ ID NO: 473871 - DNA, 642 bp, Homo sapiens
ggattttatagtccagctagaggaggcagtgtctgatttacattgggctcacagattggtttgatcagtggagcctgggatttccatgggttcaggatggggggccagttgggccagggtggttttggaaaaggcaacattggattgggaaaacgaggatgtaaagttctcactttgggccacagttccagactcgagggtggagccctcccaggtggaaagaaccaagtacattattacatccgttcaagtagcaagagagaaatgtacctggcagtacattattttgatgagcatgggtacaattccagtaaacacactgcacatgctcacccaccaagcacaaggaaggcactgcgcatgcaggtggtccaccctaatggaataatgaagggaaaggggcacaagaggccggaaaaccactgtatgaacataccgggaaaaccaaaagaattcacaggccttttgaaagaagcgacttgcttctgcaaattccgtgagacagctgaaaaactgagtccccgaagtgtgaggggaaaatgtccacctccaaacacacatcctcactggggaaactaaacatctagatcatgggagaaggatttaaacttaccttagagctgaaacaaatttagagagctg

SEQ ID NO: 473872 - DNA, 3593 bp, Homo sapiens
tgcaaaccattagcacaagatgcataaacttctagtatatttacatcatcatatggaagcagagcatgaaagttctgaaaatttccagcctgacaatgcaatagaaaagaaaaacccattttctgaggagaaattcaagctggctgcagaaatttgcataactaatgaggagctgaatgttaatccccaagacaatggggaaaatgtctccaggatatgtcagagatctacatggcagcccctgtcatcgcaagctgacgtaggagaaaaaaatggttttgtgggccaggcccagggtccccttgctgtgggattcagacagtgtgttagcattgtggaaattcagcaagtggaggtgacacagaatacagcacgtaggagtatggaaaggcatatggaggaggtgatagttgagctgcgaaaaagccagacttggaaacactccaagagcactccaagcaggaagaatattatgtgccacgaccctagaataagaatgaaattccaggaactggaagtaataccaggaacaggttgaatgcttcaacctgtgtggttgaagcatagttaagtgataaggtcagagaggttttctcataatagtatgtcatattttttaaataaagtatttaaatatactatataggccagtatgaaatatctcttgcattcaatcattcttactttctccaacttaaaattctctgtccctcttttaaactctgataattacttccacttctgttggttattcatggttttctgtctttcattatatttatttgtgtaacttttgtgttagaatgtcgtttcaatgggttgtatgcaattccatattattcttaattcaaatgggcataactatgatagattcaacatattattcttgtactaaaaactttgtgacatttatgttagctaaaagtaccattatttttaacctcctatgagtagccatgaagacatacatttttcacagagggaatctaaaaagttacataatagtatgaaatttcctcagaaatgaaatgttaaacaatacagagcatctactgaattaatataaacactgacttagtaataaggagatctatgttttatttcttgttttaacctctaaagagtttagctattttctgaagcactggtgatcatttctggggaagtaaggtttcagattggagcaatgatctataagttttccatgcatcaaattacagtatattctctctttgttttgtggggggatgtagtctagtttctttcactccatgttgttgcatgtttcagtagtttactgctttgtattgctgagtcgacttcattgtatgagtatactaaatttgtccattctacttattaatggacatttatgttgtttccagcttggagtattgcaaatatgactgccaaaaactttcatgtacatacagtttcattcttttgggtaaatacctaaaagcataatggctggatcattagataggaatatatttaatttattaagaacctgtccaacgggttttaaagtggctgtactattttacattttcactagcagtgtatagcactgatagatctttcacatccacacaaaccttctttggtcaatatttagagttagccatactaataggtgtgtcgcactatctcactgtggttttaatttatatctccttaataattaatattgttgagcatcttatgtgctttttgctgtttatctttttttgctgaaatgtctattcaaatattttgctcggttgaaaaatgatttattttcttgttatcagattttgagagtgatttagatactctgaatatgaatcctttgtcagatatgtgattcgtaaaaattttcttctccttttctaaggattgtcacttcattctttcaatagtttctttcagagattcttttatttaagttttataaagtcaaatttatcatattttttattttatgtattatacgtaagaaatatttttctaagccaaggtcacaaatatttatgcctatgttttcttgaaatttcaaacaataattgtagatttgtctttttttccttgcagttctatcagatttcgcttcaaaaattttggacctttgttactaggtacataaacatctgaggtaggtatattaagttgtgccttttttttttgaaaaaatcaaatctgataatctctgccttttaattggaattttaaatctattacatttaatgttatttaaaattaaaatttatcttgcaattaatattatatttgttttattcgttctcgccttacattttctcatttttttgccttctttgaattacttataagattatggttattccttcttatctcctctaatagctttttagcttcaatcaattattttgttatttttgattattgcttttatgtttacagtgtacatatgtaataatatagtctaccttaaagtgacatacaaattcacatgtagtataagaaccttgtaataatatacttccgtttctcccctctgggcctgtatgttattattatacattttatttctgcacatagtataaagtccacactacattgttataattttgtttaaacaatctgttatcctttaaagagatttcaataatgagaaaaaatcatatgcatttgcctacccagttaccatttccaatactctattctcggtgcaacccgaagttccatctggtatgatctttctttcatcttaagggtttcttgtaagatttcttcagtcttatgctgataaattcttttaccttttgtatttctaaaaaagtcttctttcaccttcatttcaaaaaatagttttgttgggtatataattctatgttgctgagtttttttctttcagtgctttaagatgttactctactgtattctcatttgcattgtttctgttgataaatatatggtcaatgctaatgtttaacaagcttcttggatctgtgggcttataattttcataaattttgaaattttattttttaaaatatttttcatttcccattccctctattatcttcatcaagaactacaattacacatacattagactgcttcaatttgtttcacagctctctagtgttgtctttaagtctttcttctctctgttttattttcgaaagtttttattgctgtcttttcaaatacgttattctaatgtctgatatattatttatctcaaccagtgtatctttcaactagacatttcatttttcatctctggaagttaaattttgttctgtttttatattattcttgcctctataaaacatttctatccttttctccagttttttgaatataaagaatatagttacaagagttttcatatccttgtctactaattgtacaatatttatgagttccatattggcttcattcgatgaatttttctcctcactgttggttgtagttttctaatcctttgaatatctaataatttttgatatgacaccaaaatcttaattttatatttttgggtgctgaatatttttgtattcctgtgaatagtctatagcttttttctgagatgtggttaagttacttggaaacagttttatcatttc

SEQ ID NO: 473873 - DNA, 635 bp, Homo sapiens
tttagaataggcaccatggcaccaacctatttcctaagaaattggaaaataaaattgcgcaaagttaagcttctagtaagtcagtatgacacaggatttttcttggtcattttgccagccagggacctctggctggcaatgcacctgcccgggtcttgcttgggcacactacctgctgcaggaggtgccccactcacttggttcacccaggctgagtctggcttgtgcactggcccagcctccaattgggccaggtgtgcccagctcacctgtgttatagttagtacctgtgtttggcagttcctgagctcttgtcccacatccaagaagaatgaggctgtgctgaaaaatggagattatttctgtgaaatccctctcctgagtggcatttggaaaatcctttttggaataaatgaatatcatgctggacatgcacaaagttgtaaatgggaaacatcatcgctgctgctcagtgtgaacccttcctttgtgcatgagggagttgaggatcaaggagatgaaattgtttgcctaaggttaccataaagccttgagaacctatataggattgtgaaataaacacattccaaatcctagggtctgtcccctacttcgtaagcatgggaaaattctct

SEQ ID NO: 473874 - DNA, 1024 bp, Homo sapiens
gcttctgccaaagccttgtcaacaggattacccattcgagggatgcttgggtgttctgatgggtatttgagaagagggtacaatcactataaaacattgggtatgttccgtgtcacagtcaagcagaccgactttattctaagtatcaaatacagggagtcaactcagtgcattgttataagagcagaagttttagcatcagcagaacgtgtggctgtgaatgcgggtgtggatgtagctatggatgtggatgtgggcgtgactgtgaatgtgaatgagcatgtggctgtggctgtggctgtagctgtggacaaggataaggatgtggatgtgactgcaaatgtggatgaaaatgacttggatgtggatgtggctatggatgtggatgaggatgtggctatggatgtgaatgtggctgtggctgtggatgtagctgtagacgtgggtgtggatatggatgtgactgtggatgtggatggggatgttgatgtggctgtggatgtgaatgttgctgtggatgtgaaagaggatatggatgtggatgtggagactgtggatgtgaacgaagatgtggctgtggctgtggctgtggatgttgctgaggatgtagatgtagacaaggatatgaatgatgtggatgtgactgtggatatgagtgtatatgtggaagagggggtggatgtcactgtgaatgtggatgtgactctgtatgtggatgtagctatgtatgtagatgaggatgtggatgtgattgtctctagctagacttgtgaagttgtcatctaatatttcattcaatacgttttctaacctttatgttctttcttcacccttggaaataccaatatctagtcattttatattgttgcaaatgtcatgaagacttttctcatcctgaaaatacttcttctgcttgatctagtctattaaagctttccattgtattttatatttgatttaactttacattgttccaaatgtcacaaagacttctcattctgaaattattttttctgctagatct

SEQ ID NO: 473875 - DNA, 1916 bp, Homo sapiens
tgttggcttgctttctcactttggcgattatgcctcttcttatctgtaccactctactgctctgccacctctctgccaatggaacttggggtttttatgggtacagtatgtgtatattgcctcatgaattcaacacctttttgactctataccaaggtccagaagtcagacctttaactactgcctggaatggtagaaagggacaatacaagtctcaaagcagtaaacttgctaggcaagacataaaatggcccctgaaagaatgcatttacttatctgaaacagtgaactttatttatcagggtgttaggggcttgaatattccatttagcctgagagcactaaatggtttcctgaggaagaatgtgaagcaggggctcaacacaattctttatttctgctgcgatcacccagagcacatgaccacttccaagccatatgattcttcattgttaaatatagaggtattcatgtacattgggcctacatcttgaggaaaaataggaattatttaccaagtcatttttttcatccttcttttcccaccctcaaccagaaggtggtttctccttttggaatgctctttcttcttatatattaatattctgtccatacttcaaagccaaatcagatctggaattttgcaaagttattcaaatactcatcttaaattaatgtatttttcttttgccccaaatgtacctctgttatgaaactaatattattctgtcttgatttagactttcctttccctctagtttttaatctccttgtttcaatattttaacttatatactgctcattgttgccagattttttttaaatccattttggtaaatagttgagatttacagttctcaaaacttaatgtaaaacacaattttcctaaacatttttaaaaagcgttcctctacacttcattacttcacgagatttcttacaagcactctgaacaaatatcaagtgtagtgcagtaggtatttccacttcaaaagaaagttttgatgttcctttgtgcttataagtacaaaaatattaggatgttttatatgttagtttttaccagtggattaattttgtgggcaacattatgcattcagagctgaatttatttccaaaaaatggtataacattaagatgttaatttactttaatggaaatattaaattcattttttaaatgttatatactatatttttccgagtgtcatgtaactctgcatattactatggaaatagactccaagaatacaggtagtttgtccaaggctacatactattctgtgatagagctgggaataaattctgtagggctgaggcccactatgccaggaaactactttgacctggccacattgaatttcatgacatctgtaatgccaataaaatcatgattgtgaagcagcgtaaatgttctaaatatttgtaaaataaagaccttatcaacttgacaaaggcagaatctagttttatagagattagtggaattctctgacaatggctggtagaggaggaatgagaaagaacagtgtttttttcctacgtcaaatccgtaccaaactggtggagttcctaagccaaaagaacattggccttttgaataaaaatgtctcagaaatccttgaaaatttgaatttctgacacatgaaaatatttcttctccagaataaaattcatgctacacagatataacctaaagattgttttcagttgcttcctgtaccatttttactaatttcttatggatttgcatataatcaaatgtacaaataatttggaagtttataaatactgttcctttttaaaaagtattcttcttattaaaatatttaccaaaaattgagtatttttacatatctgattccaagtgttaaattgcaaatgaagcgttgtgtcattctctgagctctctgatgt

SEQ ID NO: 473876 - DNA, 827 bp, Homo sapiens
tcccctcctcttcttaagaactattcctcctgcatggtcgctaatggagctcctgctgctgggtccacctacagacacatgctcaaatcctttattacttccatgccaccttcaggaaatgcttcctggagttggcaaagaagtaggaagacccaatggggatttcaaatctggtttcatctcctatctggagaaactaggtaagccccacactcatacacaaatacacagtaaacaggatgtattgggtagcaaagagggtcagcacatgttgacttgcagtccttgtggcctagactgcctttcaagtttaggactccagggcactgtagcccatggtggcaaagcttgcaggaactcaagttccaaccactgggatctggattcctttctagctagggctggtttaaatgctcctcctgtgggcagttgccggctgaatttgcaccctctctagtacatctttctattttgtaatgctgtttcttactagtctttttgaaaatttaaacttattgatgattttttgtttctgttgcctgtattacctgtattctgtagaattcttagcctttttgcgttctgaagtatgaaacagcttaattttaaattctggttgatcttcctgtagcagatgctgttggtgtcctgcaagattctttttactaggctgctgcacacattcctctgcttcagggaatggtgcttgctaatagcttacatctgcagccttctttggaagctgctgtcctgatagagcattggaatgatctcttggtggtataattgagggatccactgacacctgccaatcttgggcactgctc

SEQ ID NO: 473877 - DNA, 829 bp, Homo sapiens
gcagctgacatttagaagagacaaggtcttcatgggacaatatggcactagggtccactggggtgggcctgttaactgggtcccaagaggggtcctagatcttgggtccacaggggtgggcctggatctcgtatcagcaggaactgacctagagcctgaatcttcaggggctggcctggcaaataacagatgtgtgaaggatttcagctattggaactgcagggaggaaatgattgctccttttctcttcaaaattagtcttgtcaaactggtggtctccacagatgccaggtctgtgttctcaggtacttctcccattccacacacggccaatcctaactttatcccaatgcttcaattctctgagcagaacagtggaaaaagagaaagtggcatccacaggagccagggaccccccacagagtcaggaggcattgtgacactttagggggggaaaagggtaggagtatgtgagagagacattccagcttcagctgttttctcaaaatgccatggtgccacattttggggtagtgtgtcctaaactccatcaatattcttaaagagaattcttaattaagagcagtctgcactaacattttatagattcaaaaacgtttccattgacctattccattgggcactactactggattgaaataatatattaagttctttgtacatttattaaccatagagctgcttcgtgtcacgtggagtgctgctcttagggatatcaatgtgcttagtgtatttccctgccctagaaggatgcagaagctagagatggtaatgaggtagaggctgtaatatatgtataaataggatg

SEQ ID NO: 473878 - DNA, 750 bp, Homo sapiens
tggggcagaagaaagaaagagagaaagaactgaaatctaagaagaaagtatccaaatgattttcttaagaaacattatgctacagtgcaaaatgttttcagtagtaattttactgaagtgcataaatgtctctcatcaaaaacatagaaccaaagacataagagggaaaaaccaaatggaacatgtaattactgtggacacaatgttgaactatttaaacaagccctgcagtgcaagaaagaaagagcaattacttagaaaagaagaatgtcccaattcccaaaggcaagagtgtgtcataacccctaatcttcagagagtcttcagcagagtcttcaacagagcctgtccagtaagatatactaatatttgctctataaatctggatgctccagtttttggtgcatatatatttagaattgatgtatcaattgcaggattgatccctttatccttgtatagtgcacttatttgtcctttttttaattgttcttaaagtatgtttaatctgctgatactttcttcattcttgacctttgagaatctattatatgcctttgggtggtcttatttgatcagatatgtttgatattctctgaccttcctatacctgaattatctcattctcagggtttggtaatattttttctcatttttttgagtaagctttctacaatttgctctttctcaacttcctcttgaacaccaataattcttagatgtttgtcttttgggataatttttatattg

SEQ ID NO: 473879 - DNA, 599 bp, Homo sapiens
ccagcccacggaaccacttttttctcctaggcctccaggacctatgggctatgtacttaagtgtgtttttgtggtagcagggtcttttggcttcaattctatagccctatgcacctctgtcagtaggttttatattgggctgttcagttcaacctgtaagctagtagatggcacttacagacaagactcagatgtggccagtgtggctgggtatatacttgatccttgtttactggaagaaactctctgttgcatcagccaatgggttgatctgtggaatgctcagtggtccgagttccctgttcagctccagggagaggagatgggggcaatatggaaggactgtatggttccccctggtgtttttggaatgcttgccctggaggaaatctgccaccatctaggaaatcttactacctggaatccaccattctgaagaggacacatgctgaatggcatatcattgtgtatgtataccatattttcttcacacattcatcaattgatggagacttagactgattgcatgttttggctattatgaataatactgcaataaacttgtgagtgcagatatcacttcaacatactgatttcaa

SEQ ID NO: 473880 - DNA, 1924 bp, Homo sapiens
ggtcctacttctccttatgttaagatggttttacaaactttttgtatggaggtcactttacttcctttagattgggaccttttggcaaaagctgttctaaccccatctcagcgtttacaatttcatacctggtggtcagaggaggcccgtttgcaggctcagctaaatcgaagtaatggcattctaattactcaggctcagctcacaggctccaatagtttctctgatacttatgcccaattaaactttgatgccctcaccacagaacaagtaacaaaggtgtgtatgagagcttgggataaattacgcgctacagaccaagctcctgtttcttttaccatggttaaacaaggtcactctgaattataccctgattttttagctaaattacaagacgctgttgaaaaacctgtctctgatgagcacgctcaaggcattctccttcgtatgttagcttttgaaaatgcaaaccacgaatgtaaaatggccatgcgttctgtccaacgacaaaatttacctgatcacaaggttttgcctgcatatattaaagcttgtgaaggcattggatcagacacccacaaagctattctgtgggcacgggccatgaaggacaccaaccaaactggtcccactaattcttctcttggagcctgctatacttgtggccaacttggtcatactggaaaaaattgcactgttgaaaacttacaagcggccaagccggctcaacacacatggccaaatgctgctcctactgtttgcccacgttgtcgcaaaggccccaacatcaaatgggacacttcaaactcacaccaatgttgcatttccacttcaggcggtcccaacgcaacccccagcacaaacaaatctacctccagccaaaccaaatgggtcccagcctctccttctgtctcagtacaaagcttgtccacctccacagtaggaggcggggtggttgatctctgtagtactattcttctgaatttactacctgattctttgcctttgattgtccccacgggggtcactggccctttacctcaaggttcggtgggcctggtgttaggtagagcatctacctctgctaaaggaatcaccattcatactggtctcattaattctgattccgttgatgagattaaattaatcgtgtctgccaaggttcctgtttccattctggccggtgagtcaattgctcaattgcttttactacctaatatcgttttaaacaaaggagataaggcacgtggccctgggatgggctccggcggtgaaaaggccgcttattggattaatgtaatttctaaacaaaggcccacgtgcaccatacacattcgaggaaaaaagtctgagggcctagtagatactggtgctgatgtttctgttatttcctctagtttatggccttcctcttggcttaaacatcccgctaacatgggactagtaggtgttggaaaggctgaggaagtttatgagagcacatttatcttgccttgcactggccctgatggtcaaaagggcacaattcagccctatatcatgccaattcccattaatctttggggtagagatttactggcacaaagggggactgaaattaatattccacataactcttatagtgctcccagtcagcatatgatggaaaacatggggtttgttcctggactcggtctcagtccaaagcatgaagggattactaaacccctcccagttactataaaagaaaacagggctggtttaggttatcctttttagtggcggccgctgccacgcctccgaatcctatccctttacaatggaaatccgacatacccatttggatttagcagtggctgctttctaaagaaaaactggaggctttaactcaattggtttctgaacacttacaacttggaaatgtggaatcttctcttttctcttg

SEQ ID NO: 473881 - DNA, 770 bp, Homo sapiens
gctccaggtgactttggaggcttatgagatgtgccagaaattctttcaagatagcttcaaaacacaacagcttggttttagagtcacctgtaaaggtggattttcacctcctcaaggctcttgtatgccagctgcttcccccaaattgttgaatcagacatttctggttcccaaatcccttccaaaagatatggaaaatggatataaaatatgcgtgcagatccagaaaaaggctccacctctgtctcctctgaatcatggggactttgtgaaatttattgcccacaagggacaaaagagcaaaacagatgcccaggttgctcagagagcaaaacttgcagcaaatgaatgtgcactagttctttgtcttggagcatccttggagatgctggagtatgaggagagaagagcagtccaataaagtgtttaggagagaaatattccttcagtagtctatgccagtttccttttgcaaggcagacaattttaaaataaaaatactttcagtcaatatggttttcacattgcttctgactaattacttacacagcaatatcaaatattttaaatacattttcatttacatataattaactatatccgtataatttgtgtttaaaagaaatctggttatttatttaaggagctaaaagaaacatcaaaatctgttctcaataagaatgattttatcgagttttttttaaagaatgtgtgttgaaggagaaatttggtgtcagtcatattttatttggtgtcagtcatattttatt

SEQ ID NO: 473882 - DNA, 712 bp, Homo sapiens
acatgcaaaatgcgcgttaattggctgtttttgttgccactaaggcttctggtcaataacattcttattcagtggctccagagcagttttagggctcagcctctgggcttatcagaatctgtagggaagtacagggcatcagtagttttgggaatcaccgactcactgtgcgtagagtgctgcctttctagccaggagcttgttgtggcaggatctcccctaatgggcactcctgtttttctggttggtggagggaagtctcaggcctgtggaggcaatgaagcttcggccaggcttgttgtggccgccaatattgtcctgttgtctggaattttccttagttttgttcagtgcataaaccttccttcctcttaccagtcaaggatttgtgtgaaggataccatacgtataggctatgaatacacacgacacggcagctgcgagcgagagtgactgattagactggctgtttctctcctatgtaaacctgttatggtgcctgaaaaccttgacttttaccttcaatcttttgtgtcagtttttacttctcttgcttctgatttgatatttatgcatttcttagaaccaatgaggtgtctaggttgattggtaaggtttaattcttgcaggagaattataattcttttccctattttcctgatttttcaatttttcttggaatctaggatttggaaaatcgtttcccatgaaa

SEQ ID NO: 473883 - DNA, 727 bp, Homo sapiens
gcaaacgtccggggttgagcaagtttctgaaggcaagcaaaagtatttggtgttgcatgttgcatagcatgaccagaaactcaggtgtgcccaaatcctgccctgacaaccacccctattcctcaggacagcacaagtggctgatgtgcccagaggaggaggactctcagctaagtgagtgcagttctttaaggcttaatggacccactcatgggaattacagcttaatcaatgttctggactctgatcagattactaccctttcctttgaggggaacggcttgatggacgctcatgactatgtcaccacacagtgtccagagcaagcccaaggcattttaaagtatgaaccttcagttcagcatggcatgcagctggcctcgcttgtgctaggctctggcctgggccctggaggaacacaggtgaatgaggcctgctccctgatctccaggaaatactttcaccatataataaatgttagtatggaggtgagtactggccctcccatgagggccagaggaggggcacatggacaacctggaggctcagagagcgcttcttggaggaagtgttagttgaagtgttgaaggttgagtcagagctttccaggtaagggagtgaaaagggcactgcaggaaaacaaaataaaatgtggcagaaagttccactttgtcaggcctggaaagtgcctgtggtatttggtgtagaggctggcagtgtgctttat

SEQ ID NO: 473884 - DNA, 445 bp, Homo sapiens
gaagcatccgtgtcatttcaagttatggtgatcacatttagcattctactgatgtttgaagggagaggaaaaggggaacaagaatggacaaccttcagagcaccatatgtgaaatactcagaaaaacatcttttgttgagcaagggatctcccccagcagaaaaggaagaggtggagccttgcagtttcttaagaaaggctactcctacaagaaatcttgcgcaaactgaagaggagctttcagttttccttctaacagtcaggccccctgcttcagttctgctggagtttgctggaggtccactccacagcctgtttgcctgggtatcaccagcggaggctgcagaacaacaaagattgctgcctgctcctttgtctggaagctttgtttcagaggggcacctgccagatgccagccagagctctcctgtatgaagtgtctgtc

SEQ ID NO: 473885 - DNA, 2956 bp, Homo sapiens
cagggtctttttgctcccgcaggatgtgcctgaacctcatgcagttccatactgtgggcaccaagaccaagctgtctacactcaccctgctctggccctgccccatgacctttgttgccaaagggcgccgcaaagcagaggctgagaataaggcggcagccttggcctgcaagaaactgaagagcctgggcctggtggacaggaacaacgaaccgcttacacacgccatgtataacctggcctctttgcgtgagctgggtgagacccagcgccgaccatgcaccatccaggtgcccgagcccatcctccgcaagatagagaccttcctgaaccattaccctgtggagagttcatggatcgccccagaactccggctgcagagtgatgacatcttgcccttgggcaaggactcagggcctctgagtgaccctatcacaggcaagccctatgtgcccctgttggaagcagaggaggtacgtctcagccagagtctgctagaactgtggcggcggcgagggccggtctggcaggaggccccccagctacctgtggacccacatcgggacaccatcctcaacgccattgagcagcacccggtggtggtcatctctggggacacgggctgtgggaagaccacgcgcatcccccagctgttgctggagcgctatgtgaccgagggccgaggtgcccgctgcaatgttatcatcacccaacctcgccgcatctctgctgtgtctgtggcacagcgggtcagccacgaactgggcccctccctgcgccggaatgtgggcttccaggtgcggttggaaagtaagcccccatcccgaggcggggccctgctcttctgcactgtgggtatcctgctgcgtaagctgcagagcaaccccagcctggagggcgtgagccacgtcatcgtggatgaggtgcatgagcgggacgtgaacacagactttctgctgatcctgctcaagggcctgcagcggctcaacccggccctgcggctggtgctcatgagtgccacaggggacaatgagcgcttctcccgatactttggtggctgccccgtcatcaaggtgcctggcttcatgtacccagtcaaggagcactacctagaggacatcctggccaagttgggcaagcaccagtacctgcaccggcaccggcaccatgagtctgaggatgaatgcgcactcgatttggaccttgtgactgatctggttctgcacatcgatgctcgcggggaaccaggtgggatcctgtgcttcctgcctgggtggcaggagatcaaaggagtgcagcagcgcctccaggaggccctgggcatgcacgagagcaagtacctcatcctgccagtgcactccaacatccccatgatggatcagaaggccatattccagcagcctccagttggggtgcgcaagattgtcttggccaccaacattgctgagacttccatcacaatcaatgacatcgtgcatgtggtggacagtgggctgcacaaggaagaacgctatgacctgaagaccaaggtgtcctgcctggagacagtgtgggtatcaagagccaatgtgatccagcgccggggccgggcgggccgctgccagtccggctttgcctaccacttgttccctcgaagccggctggagaaaatggtccctttccaagtgccagagatcctgcgcacacctcttgagaacctggtgctgcaagcgaaaatccacatgcctgagaagacggcggtggagttcctgtccaaggctgtggacagtccaaacatcaaggcagtggacgaggctgtgatcttgctccaggagatcggggtgctggaccagcgggagtacctgactaccctggggcagcgcctggctcacatctccaccgacccccggttggccaaggccattgtgttggctgccatcttccgttgcctgcacccactactggtggtcgtttcctgcctcacccgggaccccttcagcagcagcctacagaaccgggcagaggtggacaaggtgaaagcactgttgagccatgacagcggcagtgaccacctggcctttgtgcgggctgtcgccggctgggaggaggtgctgcgttggcaggaccgcagctcccgggagaattacctggaggaaaacctgctgtacgcacccagcctgcgcttcatccacggactcatcaagcagttctcagagaacatttatgaggccttcctggtggggaagccctcggactgcaccctggcctccgcccagtgcaacgagtacagtgaggaggaggagctggtgaagggcgtgctgatggccggcctctaccccaacctcatccaggtgaggcagggcaaggtcacccggcaggggaagttcaagcccaacagcgtcacatataggaccaaatcaggcaacatcctgctgcacaagtcgaccattaacagggaggccacacggttacggagccgatggctgacgtatttcatggcagtcaagtccaatggcagcgtcttcgtccgggactcctctcaggtgcacccgctagctgtgctgctgctgaccgacggggacgtgcacatccgtgatgacgggcgccgggccaccatctcactgagcgacagtgacctgctgcggctggagggtgactcgcgtaccgtgcggctgctgaaggagctgcggcgggccctgggccgcatgggcctccatacactgggccacggttccccagaggaaggaggaagctgtgtctccccagtgacccactcgctaccttcacagcacctcctgcagctggctgcccagctgacccatggcaggacgacataccctggagacccagtgggcaagggaggcaccactcaccaggcttgtgcttgatgttagccttagacccacacttggaggagaccttagagatgtccactttcttgttctgaatctgaacctgaagagaaggacacaaaaga

SEQ ID NO: 473886 - DNA, 2767 bp, Homo sapiens
taagtaatgcatccaaggtcatgcactgattgcagcgggatgtttcatgaaagcctagacccggaagaataggaggataggagactgcagcagctgacctctggaagccagagctggatgagggacctgagcgagaggagacttgggcagccggagctgaaagctgagcagcagatgccactggagcctgtgagggcacgattgagtgtggggctggcttgctgctgctcccacaccactgcagaggcgtcctctctggaacatggagacaaggtttttggacaggggtttcccagtcccctggaagagattaagagactactgaagatctccagggcactgcaagccagatctgtaccctccacccaggagaaggcaaaatgtctttctggagagcctgggcagccagaggggaaaggtcaagaaacctatcctggccctgggaaagtggagggtaaggcagagccagccatgagaaaggatgatgtttgcccaggcatgaaatgtatcagcggatgatctctcacatggaagaagccaaagcagctacacccaatggcttagcaataagaaacaccaaaccagacaaacaccactgctgctgggaaagggacctggcagaaggaaaaggctgttcagagagcagaggtatttcgtgtgagccttttagggcttcttgtctctttagaccacatgcacatattacttgtataaaataatgcaccagatacaaacaatgaaatacaagtgctgagagccctgcagctgacagccatgagctccttatatgtgaactgcttgactctttaaaccgcatgaaataatgcgacgacacacagtgatggaccagcagagagtagcgcgtatgggagactcacgaacattgaagggacggaaagccacatgtccctccagtccttgtctgacggtgtccaacagcccatgtaggccacacacaggtctatgagagccaaaccaagagcccagcactgcaggctgctctcctgctctctggccacccccggtgccctctgcaggccaggatgggctgttctgcttcatgtgtcaagactgtccaaattcctgcctggctcacaccccggccagttgggcggtgagcccacaggcgggagtacaggtgtgaaaggagccagctgccgccatgcacctcagggagaggcgaaccacaaggaaggaccagggctactgagtgacctcactgggcacagtcccaccaacgtgggctgctcatctttagagggttaggagagggaggtgccagcttctgtgtttcggggccactgcattggaggtgtctttgttgcagcagcaccttgaatgcacctgtgggaacctggggctctgttttcttgtaaccccttggatcaccaccagcataccaaggacggcccagccaagtgcaaaggcagcctggctgcctgcactggagagctgctgccctggaggaacaagcctgggcctctcccagccctgtcaaggccccttcctctggtgtttggggaaaggggttggactcacatcttcttggacagctgcctgaccccagagctggtgccctgctcacattccctccatggagatgaggccaggactcaggaccaccctctgcctccaggggacacagctcccaccacaggctctggcacagggctggtgcctttcagccgtttaggagtcaggcacaatttctttctgctcatacacccttggagtccagcgctgacacaaatgagtgaagcagcccaggtgtccaaagagcacatgggccttgtcaaggggcagtctccactcacctggccccctgtgaccacctgggtcatgcgggccatggcagctgggttccctgaatagtggagaaatgtgaagtctctttcaaacatgggcagatagttctatttcctatccactttattgaggtagccaccatgatggttatatagaataattctataaccccaaaaatgttccctagtgcctatttgaaatcagtccactccccttcagtactgacccctgccaaccactggtctgtttctgtcactatagttttgcaagtagaatcacatggtatgtagtctatagtggctcattttgttcatttagcagaatgcatttgagaccaatctacattgttgtggacatcagtagtttgtttctttttgttgctgagttaataaaatacagattgtccctgatttgaccaattcaagctggttctgggtcattttgaagtgtcctcatcactctttgatcactgacttgctttctggcaaacaagatgttctaggctcatctgtgtgtagggggcggtgggtggagttgtgtttattgagataaattcacatgaattaatcattttaaagagtgcaattcaatggcatttagtacattcacaatattgtgccaccaccacctcttgtcaaaatatttccatcatctcaaagggacaccccatacccattaaacagtaactcccaatttcccacctccccagctcctgacaaactctattctactttgtctctatgaatttgtctattctagatatttcacaaaattggaataatatatgaccatttgtgcctggcttatttcacttagtttaatgttgttgaagtttatcctgttgtagcataaactagtacttcattcattttcatgctaaataatattccattgtatggctataacacattttgtttatacattcatctgttgatggatacttgagttgtttctgcctttt

SEQ ID NO: 473887 - DNA, 1000 bp, Homo sapiens
tgactttagccacacaacgtgccccagtgtaaggaccatggctgagcccagaccagatggtcagaccacaggagtgagagcaaagaagatggtggttgttttaagcctaagttttgggtagttgctgccaccgccctcaccctgggccagcgatcccctctccctgatcacaacctcagcttggcttccttctggcttcttccctggagcccagcctccctgccgagctgtcctgccgtgaggccagtgctgtccttctctgtctgcacacttctcagcatgtgaatgaagtcctccttccgcttggagaacccacggagagagctcaggctgctgtttttggggaaatggtcccagagcttcctcatcatgggggagaaagacttctttccacctctgtgtcagcactgcctgcggcagacaccgggacgtgcagctccctcagctggaatgaggtggtcgtcccctggcggccagcagggcttggggccgccagctttccagctccttgggggtggtcaaggcctgcatcagggttgtgctggactcaaccggtacctccaccgatattcgcttcctgcctgccctccagcagtgtgggttgccagggcagcgcgcttcctgtatgtctctgtccatctcagagtctgcttcagggagatcaataccctgcttagagcaacgagctggccaggaaggtgcccccgtcccagccaggccacggcgctcctccccacatgaccccaccctgaaaagggtttgtggtcagacatccagcttttcaaatctttcacctttaagatggctgtaatccctactgtgtggggcagatgttggctgcccaacccagcagctacttccaaaaacttccactcttgccttcctcccacaccagaggctagaaaagcagctcattcctttcccagtctcccttgcagtaagtgtgaccagatagcccagctctgagtaatgaaatgtgaaagggacttctgggaaggca

SEQ ID NO: 473888 - DNA, 1525 bp, Homo sapiens
aagacaatttcatcagttaaggcaggaaccggccatctggatgtgtacgtgcaggtcacaagggatatgatgttagcttgggctcagaggcctgacactgtgtctcagcagggagcacagcatcaggaactccatggtgtgtctggagttttcaggctgtttgcggtggccctgaacttgcccagaactcatcgagttaccttagaagtatccagaaagagagaggagactgtctttaagcagataacccttgtggctacctgcctgtggctcggcaacccctcactggcaaaggatctgaaggccagcccaagcagccacctagtgggaagtggatatacttcccaggtccactgggtttgcttcagtctgtcctcatctgccaccactggtcgttcaagacacctagacggtaccatctatgaggaatgggccctcgtcagacatcaaagctggcagtgccttgatcttggtcttcccaactcaagaactgtgaaaaaataaatttatactgttcataaatcacccagtctcagaattatctatgtgggttaaccatcagtttatcagtttattaatcaaatcacagtatttctttgtgaagatagttctgcatgaatttttttttgatgagggagagacatagatgattttaggtaaacagatatagaacttcctttattgcggtaaaggaatattgtctttaatattttcattcccaattgttgtaacttttgttcagatacattttctatgcaaatattctctttttctgccttctctgtataagttgtttacttttatctatctgtggctttccattttaagtgttttccaacttattcttcatgaccatgtatttttaccagtaaattttttatttcctttccaattttagtgcaacttttatttctgaaatggctttattttcagtttttaactgaattgtactatgtccccttttagctttttacataaaatatcaccttttatttggtcttatgtctttttattttaatatatctttaagaatctatactcttctcgatttatttaataccatggaaagctgttttgtgttacctttgcttcagtttttaggattaatgattctgctgacatgtatcttagaggtggtatgacatagtagttaggggtggtaatatcagattgcctggtcgctaatctcgtctactaccttcttagatatatgatttacttaaccttgttatgtttttttaatctgtaaaataaatgcataataggaagttaattgtgagaacagtaccccttgggaagagattcctttagtttaatatagtcctaagaaatgcatcagtgaggggagcaccagaattcttgaaaaattctttagtgaagatcagagaggacagtggaagacgaattatggaactggatttcatgatttcagtgtaaaataggattctggaatgacagatttcatgtgacagtgcttaatctttggagtcagttatatatttactgtatataaccatagaattat

SEQ ID NO: 473889 - DNA, 1467 bp, Homo sapiens
tgagtcacctctctccacatttctcctaactctcggtgtcttctttttcttccatttccacgccatgtgtacattgcatcttcagtcaggaccctcagctgcaggtctattggagtttgctggaggtccactccagaccatgtttgcctgggtatcagcagcggaggctgcagaacaacgaatattggtgaacagcagatgttgctgcctgatcgttcctctggaagttttgtctcagaggggtacccggccattccaggctaagtattgcttgagtaaactcggagagctcaaaacacaagttagtggagctcggaatctgagagaaaactcacccatgacctccagttacaatcaagagaccagtgagagcaacggcctcagtgggtacctcaccaggtcacctggtgttccagggggttgccagagtttttcttcaaatcccacttctgacaccagatctgttaaaagaaaacttcagacaagttaaatttgatggaaatagtattttagttccctttttaaaaattatgtaatcatggtgaatattcactttggtattttgtcttttgctacctaacatattttgtcagcatttccatgctgccaagtagcctttctattaataatatcattttctgcattatgtaatgttgcccagagcatatttattgtgacccacctagctagctccttttgattggataccttggttatctctaccttttgtagccaagttctttaaaagtctgttagtatccagggtaatttcttttcttagttggccactgccctccctttttcaataggtggatgagaaaaaagtatattggatcgctatgattgccagtaattcatggtgatctttaagaaatatattttcatcaaatttttttaaaacctttgtcagatttcttagtttaggtgtatgtggaggtggaattaatctatacttgcacttattcacagaatttataaagataaaactgttctatgttgacgaatccatttgcaaaaaaagcacactttcaaattgttcttctaatattaatgaggagagctttcaaattgatgtatttgccagtaccacagcgtagtggctgagagcctgtattctggagctggactgcctgggctggaacccgggctcctccacttccttgctgtgtaccttagtttctcatctgtaaatggtgttgataatagtagctgttttgtagggttgtcatgaggattaaacaagttaatactttagccctttataagaatagtatctgacatattttcttagtttcatactctatatgttttgatcttttccagagaaaattagaaaagcccttcctagttcagaagaccttgtaaagttagcaccagactttgacaagattgttgaaagccttagcttattgaaggacttttttacctcaggtaaggaagaagctgtttgatctaatttaaaaattt

SEQ ID NO: 473890 - DNA, 557 bp, Homo sapiens
gcatagactagaagaagaactggattttcataaggcactgctatgctgctttccctcactaatccatgtccctatgtcatagaagagttaaaagaaataacaagaaagaagttacagacatgcaacctgccccttagaaaggggcagtttcacacgagggaacttgctgaactcccttcagtacacacgagggaacttgctgaccgactcactggtagttgcatgtttaagttcacactttacttcattggacaaaaggatctaaggtcacttttggaaattcccacaataatgcagatgaagaaatcaaagcccaagcccgtagcaccagcaccagcagagcagttggagcagcggtggctccacagagcagagctgggccctgactggaagcagaggccactgaaatgtctgctaaccctttgcttagcagaaagagtggaggaaacacctctggagaataaattgtacttgtgtcagcataggcagatgggagttcggggttgagaagaggacgtacaaaagcccagggtagcatagagtgtatttatagaccc

SEQ ID NO: 473891 - DNA, 505 bp, Homo sapiens
gtaaactcattttattacccaccgggagaatgcatctcaactgcgctctccctgggcagccaatgccagaggatcaggccctacagctgactcttcttctaccagctggacactttgatccagttttcctggtcctctttgaggtttctccccaaccaggcgttgacaactggtggaagacgatggtgataatgatttcaccacttttcattttcagtgctcttctacgttcctgtctgacctgtggtccacaacctccctgccaggtggagagtgctgcttgctctgcagctggtccaagaagcttcacctcccaggagcaccagacagatgatctcctgtttacagtggttccaggagcaccaaccccaaggatgagttataagcaggtctctaaagagattttaggagaagctgctaaaatggtggcaaagctctttagaaacatagaagtatgaacctttttatggggagaacttataagagtttggagaggtcttccagg

SEQ ID NO: 473892 - DNA, 725 bp, Homo sapiens
tcccagctctgatgacctgtcagcagccgcaggacctgcgcttaaaggcgcctctccaggcctggctcagggtggggctcctcgtgctcagcaccctggtcaaggttagggctgggtgtgcgctggaggcttggagtgccagggcacccagtgaagagcgaatgaatgaacgagtgaacaccggactgggggcctgcagacggttcttcgcaggtgagagctcccgcaggcagcttctccccggagtctggcgtgagaaaacaggagctgtagggaggagtcggacaggtccccaggcccagcaactataccaggtgaggcaggaatgtggcctcgtgttgaccagattccacagccacgggcttccatccctcttctctgcttgctttaagactaaccaccctggcttcaagagaagccacatgaaagtcttcagcagctttgcgctgtttctgctgcagcacctctcagggcagactggagaatcagggagtcttgtctggaaaaacgagacaggctgggcctgacacattgatttctggttcaagtttcccagtgaaatgtgaaggaggaattttccacttcttgtcctgattcaccttggcgaaccagtctttggagtcccagactgaggcagggaaaatctgtttcaggtggattttccagccagacttatacccaaagtgagtggtcctctatgctgttcccagtatcagctgtctccc

SEQ ID NO: 473893 - DNA, 701 bp, Homo sapiens
ctacacggaaagcaaatccaaaatggaagacagcttggcaccatgggagaaactgttcagtggctgtggcatggctttgacaaggataagaacactgggcagcccagttcctgggcccctggggagtgcctgtgggtgcacaatggctctgctactgaagtggttgaggttgctggccatggcatttgcaagccccaggtgggccaaccccctgggaagcttgcacaggtttgtggtggttctactgctggagggggcagggtcactggcagctggcaatggcaggcgccgcggcgggacacaggaaaacaattagaaatgatggaagatgatgataaacagaagtttaaacaactttacagggagccaggctgcctgggaatgctgaggatcagccagagggcagagcacagggtgcagagtgaggacctccaggtttgggagtcggctgctgagctccaggaggttccagagacaccgctgcactgggtcttggttctcagcaccttcaccaagggtcaaggtgaaggctgaggcatgttcaaagtccactaaagatgagataaaatggaatgaatgtgggctttggaatctgcaaaccaactcagtctctcagctggggtctttggcaggttcattaacctctctgagctcattcttgtgttgtgagaagagccgtggcggggggttagaaacttttc

SEQ ID NO: 473894 - DNA, 875 bp, Homo sapiens
tgatatgaagttaaaaccagtggcaaaccacagttgacatgtgggaaatcaaaagggaacctgccaagataatctttgttctcttgttcagtccacaactactgggcaatatattcaaaaaaggatgcatgagatactacacagacaggagaggacctctgagccagcatgaacccaatccatcagggctgcccctgggctttgcctcatgtgccatctccaaatcagctgtaatatgttttcttaccagcaacatcagtcctgaaattcttaacctgacctgcccacaaaggcacctgtttagacccttctggtttctctctctgtggacttgcctcaacatttacccctgtcaccctgcacttctaatctggctcttctttggatgcccctccctggccacagctctgtcttgggccagtcctctgtgggggctctcagatttctggaaccctcactttcagcatagccccctgcagaaatgattgaacactgggtcagaagcatagcctagtagatagaatagatttcctaatcctatggaggaaaaacaggcaaaataagtaacttacagaagacaaattgactttttatcagacaataaatattaccggcagcaccacataattgtgaactcatttgcaaaagcaaaacagttgacaagcaccagcatggattatagctctgatgtttttccacagatatatttggactattacgttatgttcacttttttaaaagattctgccaaattatagtatagacaagacattaatgtctaatattagaagatatagccaagggaataagtggtaataaaatttgatagcatgtttattactgatgcaaagaaacacttgtgtttattccagaaa

SEQ ID NO: 473895 - DNA, 766 bp, Homo sapiens
gtgttgctcccagatgggccatcaaccttccctgcttttcttcattctctgtgggtcaagttaaggtaagacatggagatgtacagatgccaagagggacctggtggtctgcagtgtatcagtgctctacttctactctgtgtccagttcatcttcccaatgctgcccctacagaccagcagctgcccctacagaccagcccctacagaccctaaccccattgttcagtcctggacttcaggcccacagagaggaaccaacaagtcaatgtggaagatagaactaaccaagcaaccacctacaatgtgggaagggcatcaaagaggtatgaacacaaagcaacgggaactcagagaagggagtaattcactctgcccagggcagccacatcctgagagctaccctgcaggaaggccattcctgctgataattcgcgaggaaaaaatgcatttaactggaagcctcatttatgaagggttctttctgtgtgacagaggacagtatgactatactttattaaacattttgaaaagcatttatcttagtttcactaaagattaaggctgtctttccaggtcttgttgtctcagtttttaagactacaaaacccagaaagagaaagtaccaacttcacaccaacattttcaaacaagaagcccatcaaaggttaaacaagagtcatgtgttcaagtttgcattttaagagcattcataaagaggcacattaagaatgtacttaaagtaatgaaccattaagagtctgtgt

SEQ ID NO: 473896 - DNA, 498 bp, Homo sapiens
atttgtgatttaatgacgtagtgtttttcagttcaagaaactatgaggaacagaccaaagccaagagctagggaagggaaaggagaagactgctttgacataggcactgggctaaaatcatatgaatctgattattatattagtctaacatcatatgagtcagataaggaagatgagaatgagaatgttcaaatggtttatccagagacagctaatacaactagaggaatgcagctgccttactccccatttggcttagcaactgatagcagcttcttagagcatgagctattaaaggtcttcaaggtgatatcaggtctcagcagcagacagtgtcatgattggtcatgggttatggtgcagaggactggcagtagtacccatgccatttatttgatccatctggaagcaacaactgtattagtcagggttctaaagagaaacagcaacaataagatagattagggtgcactggtgaccctatcctacaaactccag

SEQ ID NO: 473897 - DNA, 1621 bp, Homo sapiens
gtctttgctcaaggtttaccctgacccccagctgaacagctccagtctacagctcccagcatgagtgatgcagaagacgggtgatttctgcatttccaactgaggtaccgggttcatctcactggggagtgctggacagtgggtgcaggacagtgggtgcagcacactgtgcgtgagctgaagcagggcaaggcatcgcctcacccaggaagcacaaggggtcagggaattccctttcctagtcaaagaaaggggtgacagacagcacctggaaaaccgggccactcccaccctaatactgtgcttttccaatgggcttaacaaatggcacaccaggaggttatatcccgcacctggctcggagggtcctatgcccacggagcctcactcattgctagcacagcagtctgagatcaaactgcaaggcggcagcgaggctggggtaagggcgcctgccattgctgaggcttgagtaggtaaacaaagcagccaggaagctcgaactgggtggagcccaccacagctcaaggaggcctgcctgcctctgtaggctccacctctgggggcagggcacagacaaacaaaaggcagcataacctctgcagaattaaatgtccctgtctgacagctttgaagagcgtagtggttctcccagcatgcagcttgagatctgagaatgggcagactgcctcctcaagtgggtccctgacccctgacccccgagtagcctaactgggagttaggctacccccagtaagggcagactgacacctcacatggccaggtactcctctgagacaaaacttccagaggaacgatcaggcagcaacatttgctgttcaccaatatccgctgttctgcagcctccgctgctgatacccagacaaacagggtctggagtggacctcctgtgaactccaacagacctgcagctgagggtcctgactattagaaggaaaactaacaaacagaaaggacatccacaccaaaaacccatctgtaggtcaccatcatcaaagaccaaagatagataaaaccacaaagatggggaaaaaacagagcagaaagaccggaaactctaaaaatcagagcgcctctacttctccaaaggaacgcagctcctcaccagcaacggaacaaagctggatggagaatgactttgacaaaccaaatctacatctgattggtgtacctgaaagtgacagggagaatggaaccaagttggaaaacactctgcaggatattatcctggagaacttccccaatctagcaaggcaggccaacattcaaattcaggaaatacagagaatgccacaaagatactccttgagaagagcaactccaagacacataattgtcagattcaccaaagttgaaatgaaggaaaaaatgttaagggcagccagagagaaaggtcgggttacccacaaagggaagcccatcagactaacgctgatatctcggcagaaactctacaagccagaagagagtgggggccaatattcaacattcttaaagaaaagaattttcaacccagaatttcatatccagccaaactaagcttcataagtgaaggagaaataaaatactttacagacaagcaaatgctgagagattttgt

SEQ ID NO: 473898 - DNA, 1026 bp, Homo sapiens
gactgacaaatagagtttacgtacatgccactatgcaagggactcaggtcacattcctcttcattttgggctcccttataccctatagtcagacaatggccccacttttatttctcaaataatgcagggaatcagtgctttccagaccatgcatgtggcttggcatcacaatcttctgggaacgtggagagagccaaccaaaccataaaaaagtacctcatgaaggagacactcaccctaatcttatgcctggagactgggtatgtcgtcccaaaggacaaaaagccactggagcctctttggattagatcataccaagttctccttatgaccccaacagctgtaaatctccaaggcctctctgtggatttacctcttcagggtcaaggtggcaccagcacccaacaaagaacacttaaacctgtgaaccagttggagactttcatctgttgttcagaattcagcagtttcaccttcgaataatgctgcaaatggaatatcagtctctccccagtgatgctcactaactgaacaaatctcccttggattcagctggacaccagtttcaccttgacatgctccccatctctgatgagtcgcttcctccagcaagatccaatatcctaagtcccacagtccaggacaatgacccacaggatctcccgacagaccaacagccatagttagggtcaactctacacccaaggccagcaggaagtagttggaggataagaccactgccctagtgccaaagacttgtcattgttgttctgtcagaggggaaaaggggagtctgaggaaggattcccaggtgggggagggtcccctgtggggagaaacaataaacagttattctgagagatggctaatcacaaacaacccatggtcacagtgaccttgttccacacatagccccctccagcatgaccctataaatcttccctccagtccctcatctcttggcagatagccccttctctattgtactgtctgttgtaaccttgcaatgtatttcatactttctct

SEQ ID NO: 473899 - DNA, 952 bp, Homo sapiens
cctcggccttcacatttgctgtttcttctacctgaaaacttgctcctcacatcttaatatggctcacccttgccttctttcagatgttgcttcctcaccggctggatgctgctcatccatattgagggcagatcttctgcacttggtccacctggattcacacaccaatctcctctggaaatacctaacagacaccgtccccccaccccccaccaatgatactttatcagtactaggttatggactggaggtggacatgtgggctgctggcgtgatcctctatatcctgctgtgtggctttcccccattccgcagccctgagagggaccaggacgagctctttaacatcatccagctgggccactttgagttcctccccccttactgggacaatatctctgatgctgctaaagatctggtgagccggttgctggtggtagaccccaaaaagcgctacacagctcatcaggttcttcagcacccctggatcgaaacagctggcaagaccaatacagtgaaacgacagaagcaggtgtcccccagcagcgagggtcacttccggagccagcacaagagggttgtggagcagagggagagacactgagtatattttaaagcatattaaaaaaattaagtcaatgttaaatgtcacaacatatttttagatttgtatatttaaagcctttaatacatttttggggggtaagcattgtcatcagtgaggaattttggtaataatgatgtgttttgcttcccctttgtaaccaagtttattctgtactacaggagtggtgcttaccagggtctaaactccccctgtgagattaataaggtgcattgtggtctttctgtgttaataaaatgtgctctgaataacagaagtgggcctgtattctgattacttctttgtgctggtgatgacagcacaaaaattcaaaaatgaattatagtt

SEQ ID NO: 473900 - DNA, 1605 bp, Homo sapiens
cctgagccttaatgcttcaaggtgtagaccttttagtcgatgctgtagccattacaatggggccaaagggaagaacagtgattattgagcagagctggggaagtcccaaagtaacaaaagatggtgtgactgttgcaaagtcaattgacttaaagaataaatataaaaatattgaagctaaactcgttcaagatgttgccaataacacaaatgaagaggctggggatggccctaccactgctactgtactggcatgctctattgccaaggaaggctttgagaagattagcaaaggtgctaatccagtggaaatcaggagaggtgtgatgttagctgttgatgctgtaatagctgaacctaaaaagcagtctaaacctgtgaccacccctgaagaaattgcgcaggttgctacaatttctgcaagtggagacaaagaaattggccatatcctctctgatgcagtgaaaaaggtgggaagaaagggtgtcataacagtaaaggatgggaaaacactgaatgatggattagaaattattgaaagcttgaagtttgatcgaggctatgtttctccatactttattaatacatcaaaaggtcagaaatgtgaattccaggaggcatatgttctgttgagtgaaaagaaaatttctagtgtccagtccattgtacctgctcttgaaactgccagtgctcaccgtaagcctttggtcataatcactgaagatgttggtggagaagctctaagtacacttgtcttgaacagcctaaagattgattttcaggttgtggcagtcaaggctccagggttttgtgacaaagaaccagctcaaagatatggctcaatgaccattgctaagaatgcaggtgttgaaggatcttcgatagttgagaaaattatgcaacgttcctcagaagttggttatgatgctactagggtcggagattttgtgaatatggtgggaaaaggaattattgacccaagaaaggttgtgagaactgctttattggatgctgctggtgtggcctctctgttaactacagcagaagttgtagtcacagaaattcctaaagaagagaaggaccctggaatgggtgcaatgggtggaatgggatgtggtatgggagggggcatgttgtaactcctagaatagtgctttacttttattaatgaactgtgacaggaagtcaaggcagtgttcctcaccaataacttcagagaagtcagttggagaaaatgaagaaaaggctggctgatgtttaagaaatcattataaccatcagttactggttcagttgacaaaatatataatggtttactgctgtcattgtccatgcctatcaatactttattttgtatttttgaataaaaagacatttgtacattcctgatattgggtacaagagtcatgtaccaatgtactgccttcaacttaaataactgaggcatttttactactattctgttaaaatcaggattttagtgcttgccaccaccagatgagaagttaagcagactttctgtggagggtgagaataattatgtacaaagtagagaaatatccaattatgtgacaacctttgtgtaataaaaaattgtttaaagtt

SEQ ID NO: 473901 - DNA, 595 bp, Homo sapiens
tgtctgattgacgacatgcatttgttgtgttactcacggcgcttcaacttgagggatgctgttaatttattcctcattttggtggaacacaagttatagcggcaacccgaaaaggttgcagggaggttctgtgaagactaagagaagcgaggaagctgcagaagaaaagtctgaagctggcagaggttggtgcatgaggttgaaggaaagaagccttctccataatataaaagtacaagatgatgcagcaaatcctgatgtagaagctgcagcaaattccaataagaacatttgtgattcatggaaggaggtcaaaatatcaacgttaaaaggagtttggaagaagttgattccaaccttcatggatgactttgagggattcaagacttcagatgaggaagtaactgaagctgtggtggaaagtgtgagaattaaagtagagcctgaagatttgaacaaagaaatgtggactttatactataagaagaatgaaccttatgacgatagagaggaagaattgggtccctccattatactgtgaaagttgatcatactaattaggtcattcttgtcatacccagctaaatcagagtca

SEQ ID NO: 473902 - DNA, 1681 bp, Homo sapiens
gactgtggtgttattaatacacgcacacggatatttactgcagtgctgttcacaatagcaaagacttggaaccaacccaaatgcccaacaaggatagactgaaaaaagaaaacgggtacatatacaccatggaatactatgaagccataaaaagaaatgagatcatgtccttttgttacgggtggatctttgttcttagagctcccaaggtggtggcggctgctcccaagacggcagcaagccttttgttctctcacctggggttcttggcctcacagattccaaggaatggaaccttgggccatgcggtgagtgttatagctctattggaagccgtgggtcatggaagagaactgtggaacccagcgactagagttcagctcgatgaggacgaacctgggcacttagccctgcaggaacaatggcgagccttcagtgtgatcaggaactgtgatgggtgcctcactggatcagaagcacagcagacaccctgtcggatccggagcggtggaagtcagcagcaggtctgtgatggcagtgaacagcagtggtggacgacactggctacatggcaagcttacctaactatgggcttacttagaagctccagaactgaaactctctctgcccaggagattgcctcagctgatggcagtcaatttacatcctcaaggatgcccatgacagtactccatcccacctggagagtatctcagattatggccactttaaaacctagcactacctgtgatgatgccagctggaccacctggtagataaggcactgaatttaaaatataaatcccttactgtggctcagagtgtcctgcataactgagaggtgaagccagctgagcttctggatcgggtggggacttggagaacttttgcgtctagctaaaggattgtaaacacaccaatcagcactctgtaaaaatgcaccaatcagtgctctgtgtctagctaaaggattgtaaatacaccaatcagcactctgtaaaaataaaccaatcagcgctctgtgtctagctaaaggattgtaaacgcaccaatcaaccctctgtaaaatggaccaatcagcactctgtaaaatggaccaatcagctctctgtaaaatggaccaatcagcaggacgtggatccagcattatatattaaacaagctaattagttaaaaggcatttcaggaatatattagaaaatgtagaaacaaactccaagtgttttcccttgtttcttttaattgctatccccatactctgttttgtccaatattttcacaacttcaacagtcatctctgtttacgtgatttcaagtactatactttcagcttcaacatttttccaactactgatactgcctgttaaatatcttcactttgatgtttgctgagccttgttctaaacactagcacttgctcccaataaaatgtcaataccacagatatattgaatgtccctatatgtatggtgaaagccagtctttaaggtctgagatttttcctctcttggtctattctgcttttagtacttgtgattgcatcatgaaattcttgcgtgtgtttttcagctctgtcagattctctgaaaccacttggttagctgtcacacccttctatgaggcagtttcccagttactcattctgacacttgaatcccactttagaaattatgatttaatc

SEQ ID NO: 473903 - DNA, 564 bp, Homo sapiens
tcaagatatgcttagtgttgaccaagtaagccagaaacagaagacaatgagtatattgttaggctgccataacaacacaatgccacagactgggtggcttaaattacagaaatttattttctcacagttctgggatgctaaaagtccaagatcaaggtgccattggcattggtgtcgggacctccagaatcctagctgcaagagaccccacaagctccacgacacttgggtttgcaaggagggaagtttggagaggcagcaggggcaggactctagcttgaagaaccaaactgaactgatagagctgaacaactcactacaagaattttgtaatacagttgctagtattgacagcagaatagaccaacctgaggaaagaattccagaggtcgaagactggttcttcgaatcaactgaatcagacaaaaataaagataaaacaagacaaagaatgaacaaagcctccaataaatataaaattatgtaaagagaccaaatctatgactcattggcatctctgaaaaagggagagagaaagcaagcaacttggaaaacatattggac

SEQ ID NO: 473904 - DNA, 672 bp, Homo sapiens
tttcctgacacatacacaaggattcttgctgtggccattggtagaagcatccgtactatggagtggtctgagctccaaggttgcaaaagcctatttcattttgtcgaccggcagcttctgagcataatatgtgaagaggctaatggattttacggttatataaccactgttgaacctcctttgctggtgatggttgcagtggaaattgttgacaaatgctctgatcctgggcattcttcagtagagctcaccagatttccagacatattaattataggtcagaagaaaggcatgttaaaaggtccttactaccagagtcctatggagcttcccctctcttaccccttccacccatatttgtacttttcctttattaaagtaaaaactgatcaaaagggcaactatagttacaactgtttgaatgtcagagcatttgatgagtcaagacattgtagctcataaccattccttgagacatcgaagattttcattaactgtctaaatttgtttttgtgtgtgatcctcagaatggctacagatctaagcatgttcagatgaagcaggtgttgtgactatatacattagtatacggtgcactaaagattcttgaaatccctgtaaaaaacgtcctaagatatttggaacatattaataattctatgcaaattttaa

SEQ ID NO: 473905 - DNA, 747 bp, Homo sapiens
attggatttaaaacttgcattgggcctgtagcctctttgttttggccaatttctcccatttggaatgggtgtatttacccaatgtctgcaccctcattgtatctaggaaaaattctatgttgcatgagacgttcctggagatttgtcaatgccctcggtccatggtctgtttctcttcatcagaatcctggtgctgctttccttgatgatctgaagaatccctgtgagctgaagcccgaggacttgatgcaaacctcaccactaaagcagaccatgctgggcatcaagaacctttcttggaactcaaaatctgagcatcaactctctttgcgtttatattacaattataccattcttccccccagcaatggatgcctctggatgaataaagggaaggttttggatgaggaaatgcaaaagaaaaagcactttgatttatttcaagatgttttctcaatacagtctcaatcattcccacctattatccagcaaaatatgctcctagaagctgttgtgcttgccttccattttgtgcatggagccacagaaaagagactccttgtcacacacatttcatccataagccgtgacctccttgatttgacccttgctgcaggctgtttctcctaacagttggctgcctttgttatttctattaagcttttacattttcttaagtttgattcactctcttgctgccgtgttatgattttgtcttctccctgttattcatcttcagacaattct

SEQ ID NO: 473906 - DNA, 586 bp, Homo sapiens
gacatcaacaaaaaggacatctacaccaaaaccccatctgtaggtctgtaggtcaccagcatcaaagaccaaaggtagataaaaccacaaagatggggaaaaaccagagcagaaaagctgaaaattctaaaaatcagagtgcctcttctcctctaaaggattgcagctccttgccagcaacggaacacagctggatggagaatgactttgacgagttgacagaagtaggcttcagaagatcggtaataacaaacttctctgaggtaaagaagcacgttctaacccatcacaaggaagttaaaaaccttgaaaaaagaataaacagtgtagagaagatcttaaatgacctgatggagctgaaaaccatggcacaagaacgttgtgacacatgcacaagcttcaatagccaattcgatcaagtggaagaaagggtatcagtgattgaaaatcaaattaatggaataaagcgagagacaagtttagagaaaaaagtgtaaaaagaaatgaacaaagcctccaagaaatataggatgacgtgaaaagaccaaatctatgtttgattggtgtaactgaaagtgatggggag

SEQ ID NO: 473907 - DNA, 1510 bp, Homo sapiens
tacagaagattttctttttcttcagtctcttctgagcatacacgttgcctatggtcagggcagctggcagcactggagggacagtcacggtgaggaggatcagggccatggtcacagtatcttttggaggaacctgggagaggacagacattttcatacaggatagcccagcacagcagactgccacccttcctagtgccaaaggaatgagcacattgtctcctactgcagagcaaaggagacctttgatccctactcccaacacggaagagtttgaccctaaggactcagccttgtctagcgctgaaccagtgcagatagaggcagccaacagagccacaggttctgacccacaagaagttggggaggccttcattgtgtcacgtcatgtaaaagactgggactcaggaagtgtttgcggaatcatccagatttggtgccacatttggtatgggaaacaagaggagttggagatgttattaagagaccagcatgatggtgatgatattaacagagaaatttttgaagtccttcatgagtttgatcatggattgagagactatctgagagtaagaacaaagtttttctgctcaccatgcctttcctctactgcatttctagctaaatcaaagtcctcgtactgggagttggaagagaatccaacgggacttagatgtggtgtgtccctgagagaagaggtgtgcaccacagtagaacacgggaacatgcaacaaggttgtggaaacagcgcgaacagcaccaggatctgctgccctgtccaggtaaataggcctcagacagctcagagtggagtgggagcagcaggaagaagagctgccctccatcagacccctctccctgatgtcttgcacatcttaggacagtcagacaagggtgaggaagaccacctaactgatggggacaactgtctgactcatattagatattcacactggacacttttaaggatggcaaaatttggaaccgacataaaaattaagtgtagttataaaataaaggataacacaggggacagaaaggcagaggtgagagatgatttcatccatacagttccccagactgactgttggggcaacatcagcgagagaaagttccatgctgggccagccctggaagggcatgcatgtgacaaatccctgaaggacaagcacccaaaccttcagggaccacataggggccaactggaggcaaacaaagccatcaaagaagcacagaaagcacagagagaaagagaaaaattgatggggaaagtgtcccacttaagtccgtgtctctgggacaatgactaaacctttgtctttagatccttagttccttgcaaagtacctatttgttatttaacaaatcaatgaatatattaacttactcatttactctagaattatgtattgagctcctaccaaagaatcaggcactgttctaggtactgcagatatagtggtgaataacacaactaaccgagcaagcaaaatcctcatctccagggctg

SEQ ID NO: 473908 - DNA, 595 bp, Homo sapiens
tcctagcaaattaatcaaacccatggagggggaggtgtttggttaccgggaccacaatgtacggaaagccttctgccttgtcgcatccgtgctgacctgtgggggccttctgctggtgttctactggagaccccagtggagagtgtgggccaactgcatcccatgccccttgcaagaagcagacactgttttgctgaggacaacagtgcgtgcctttctgttttctattttgaaagccatgatcgtgtcttctgtattgcctctgtggcataactctgtggctggtattatatttcagaaggacgaatttcaaagatatatgaggaagaaggtattctgcctctacttatccacactgaagtttcctgtaagcaagaagtgggaagaatccctggtggctgaccgccactctgtcataaaccaagccttaataaagccagaattaaaagtaagttacttgaagggtatggtgttatgcatgtttacagagaaagcataaaataactgtttattaaatgaaagttccgaatatcacacttttggaatgggaatgacagctatgtatcaaagaaagtgagactggctgggcatggtc

SEQ ID NO: 473909 - DNA, 700 bp, Homo sapiens
ccgcccgctgaccctccagccccaccatggcagtgtatccagtgtcaactacctggagacttgccagggctataagtcttgtggccctgacttcctggctcagcagccctgtgaacaccatgagaacacatgccactccccatcttcccaagagccttgacgccttctgcatgggcatgtcttccaccgcaagcaatagaaactgtgtctggttgactggagcaagaattggagaggatgtgggtagctctcagaatcaaagaaaaagtgcaaaatcaacccataagagccagcgtgcagacagtcccctcttaggaactgagggacactcctcagggagccatggcagcagcacagcagatcaaaatcattgtatctgaaaatagtaatgttttatgtcttctctcttaataattatgtattctattttgtttttattttattgcactactaaaaaattttacaataaaaaagtgacagctgatacctctatttatttcctggacttgatgagcgtgtttctcaggttctgctgtaaagcacaatgtgtaaagtatgtaaaatggtaatacttggcatacagtacaccattcccccagttgtacttttcatccaggtgtgcccttcccaccagatgctcctccccctggtgtgcccttcccctgggtgtacttgactcactttccttcagtaggtttcc

SEQ ID NO: 473910 - DNA, 1108 bp, Homo sapiens
aggaggaggttatggaggatggtggagatggtggtggtggtgaaggcgaagttggtgatggagttgatgaaagtgtaggcactggaaatgaagctggtggtggaggagttggtggaaatggaggtggtggtggaggaggaggaggaggaagaagtggaggtggtagtggaggaggaggaggaagaagtggaggtggtggaaaaggaggaggaggaggtagtgatgaagtagaggtagtagaggtagtggtggtggtggtggaggaagaaaaggtgatggtggtagtggtgatgatggaggtggtgatggaggaggagatgatggtggaggaggaggtgatggtggaggagaaggtgatggtggaggaggaggtgatggtggaggaggaggaggagatgatggtggaggaggaagaggagatgatggtggaggaggaagaggagatgatgctggaggaggaggtgacggtggaggaggaggtgatggtggaggaggaggtgatggtggaggaggaaggagatgatggtggaggaggaagaggagatgatggtggaggaggaggaggagatgatggtggaggaggtggaggaggaggaaaaaaggtaatggtggtggaggagaaggaggtggtggaggtggaggagaaggaggtggtggaggtggagaaggaggtggtggagaaggaggaggaggaggaggtggagaaggaggaggaggtggtggaggtggaagaggaggtgatggtggtgatggtgcagctcgccgcgatgcacgaggaggcggtggtgctgccagccatgatggtcacatgcggtcgacgaggatcaggaagacgaggagcaggatcaggtcgtactgctctagcgatggtcgaggtcctgctgacccaggcggagtggcacaatgatcagctcgtgttcaaggagatcatcatactgctgcacgaccaggctctggtcctgtcggggcacgccgacgtcgcgactctcctgctcttgcagcggacgatggctatcgccatgattgttgaccaggtcgtcatgcctatcgctcatgtgatatggctggttgagcagctgtccttcatcgcggacaggctgtgactcta

SEQ ID NO: 473911 - DNA, 1052 bp, Homo sapiens
ggcccggccggcaacgactaatggattcaacactagccaggggtgttctttccttcatccccttttgttttctttatttctggcttttagtatgataaagccctctcttattgcagaaaaaacagaactcaaaatagcagagtctcgagaaggctatagacccatcgccaaacactcgtcagtgttattctttagcattgcagacctggctaatattgatcccatgtatcagtactctctcacgtggtttgtgaacctttatatcaactctattcatgacagcaaacaagacatagggtttattgaggactctttttttaaacttttacattcaggggtacatgtgcaggtttgttatacagacacagagacaaagtatagagaaacaacagtgggtccaggggaccggtactcagcacaccaaggacctgcaccggcatcgacctctgagttccctcagtttttattgattattactttcattattttagcaaaaaggagtgtagaaggagaacagggtgataataaggagaagatcagcaaaaaacatgtgtcgggctgggggacggtcaggtctttctcatcccacaaggccatatttcagactatcacatggggagaaaccttggacaatacccagctttcaagggcagaggcccctgcggctttccgcagtgcattgtgcccctggtttgctgagactagagaatgccgatgacttttaccaagtatactgcttgtaaacattttgttaacaaggcaagtcctgcacagccttggatcccttaaaccttgattttatacaacacatgtttttgtgagctccagttgaacacagttataataactgttttaaaattagtgactactaattccatcatttctggatctgtttctattgactgattttacttttagttatacatgataatttcctgctttttggcatgtctaataatgtctgattggatactggacattgtgaatatcacattgttgatgagttagatttcattttcctataaagattgttgagttctgtcctgctagtt

SEQ ID NO: 473912 - DNA, 572 bp, Homo sapiens
aatgtggttggagagcagtcaggtgtggcggaatggtgcaagcatccactcctgcagcactggtggcttttctagcacctgcattgcaggcagcttctccagtgttcagctcctacaaacacagcttccccagtgccatgttcctacagcagctggctcctgcagtgcatggcagccagaagtgcccgtggccagcagcttcccctggcactccttttgaacagtttcatagcagagtgcctccagagaaacaccttcccatgaaagctttccctggcactatactgggtggatttgtgacaagttctgacacggaagcctcacagcaacttctctgccattcagtgagccttttgcgagacaaggtgggtcccctggaccacgatgctcctcaagaaggacctgggtatgggaaaaaggacttaaatctagtgattgttgttacatcttaataaggtttaaaatacaaaaaaaaaaaatcttaatgaggcttaatatttatacagactttttagaggtatgccagtttttataattaaaaaaaaacttaagtgcattcttagttgtcaatc

SEQ ID NO: 473913 - DNA, 1477 bp, Homo sapiens
tccagtgcaattctatgaaagtctgtgtgaggcttactgtatgtacactccttttgatccagatagccctgaaaatcagcgcatgattaacatggccttagttaatcaaagcgcagaagatatcaggagaaaactgcagaaacaggctgggtttgtgggtatgaatacctcacagttactggaaatagccgatcaagggtttatgaatagagatgcaacgagccgcagagaaagccataaggaaggcgaacgccaggctaggcaaaatgccaacttactggccatggccattaggggaattcccccagaaggagagggaaaggggggttccgggaagaatacccaggaggccctggctcgagacctgcaaaagtttcctgctaaacacctaggctgcgtcttgctcctgtacgtggatgaccttctgctgggacactccacagcagtctggtgtgcaaaagggatggatgccctgcttcggcacctggaggactatgggtataaggtgtccaagaagaaagctcacgtctgcagacagcagccatgggcatcagtagactgggagttatatgtggactggagcagcttcatcaacccacaaggagaaagatgtgcaggatatgcggtggtaactttggatgctgtcattgaagccaaacctttgccacagggcacttcagcccagaagactgagctcattgctttaacaagggctcaagaactcagtgaagcatacaagtttatggagctgcttcttttgaggatcttcacagaaaatgcttttgaggatttcacagaaatgctgaaatgtggaggtaacacatatttgctggttcttgtgtgtacttactctgggtgggtggaggcttatctaacacgaactgaaaaggcctacgaggtgatcacgtgtggatcaaggactggaacagagcccctttgcggccatggtggaaaggacctcagaccgttatctggaccacccccacggctgtaaaggtagaaggaatcccagcctggatccaccacagccatgtgaaacctgcagccgctgaaacctgggaggcaaaaccaagcctggacaatccctgcaaagtgactctgaggaggacgacaagccctgctccagtcacacccggaaactggtctacacatggctgaagcatgaggagaatcatcatgggactcatttttcttataatttggacttgtatagtaaaaacttccactgatattccccgcagggaggactgctctcagtgtatacatcaggttactcgaggtaaggcaacaagttaaaacaatctttctgttctatagttactatgaatgcttaggatctttaaaaggaacatgtttatataatgacactcagtacaaagtatgtagcccgggaaacgacagaccagatatagtgttatgagcccctctgactctcccatgttcacagtttttgaaaaaaactaaaggctgaagggga

SEQ ID NO: 473914 - DNA, 1537 bp, Homo sapiens
agtcaactctttttcttctgcacatcccatgaattgctgtcactcactgtttgccctgaggataactgacttatgccctctgggtagaaagggcactgaaaagcagccacgtggattgcagcaatatcagttactgtgtgcctgctctgtgccagggttaacatggctgtatgaatggcatcttcaagttccagatcttcattttatcttttctcaagggaagtttccccattcacatagttctttcccactgctgtggctttccaggccaagtaagctccagatggatctgactgaaataaatatggttgtccctcattccaaccacaaacaagtaaagaaactccaaatggacaaacaccacctgactgagtatattcttgcattacagaagctactctccgcactagctgagctgtgggaatgggcacttggtacacaagatagtattgttgagctagtttcgagctgtgtgcacaagcactttgttatctgggcccacgccactgtacaccaaacctatgtgcttggtaattggttccactttgtctacacttcgctcatcatacagaatgaatttctgttttttctcggttgctaataccacaccatttgccgctttaattcccactgacagggctcctccagctacagcagccaaagcatattcaatccggacaagtttatcagacgggctgaatgtagtcagcgaaaagccgtaccgcgctccgccatctttacccgaagagccaaagcacaagttcagggaggtgtccactgtctctcaaatcaaccaccagactttagaggggcacaagattgttaacgcgcaaaggtggttgaggaattggaaaggttgactggggctgcaccttggaatttattttgtcttggataatatgtaacattaacagagagcagaagctgattaaagtatcttggtgccaaagggtagttctgtcatatcaaccaattgtaaacagttggtttgcaaattccaaaacaattataataattatgggacaatttgaactttgaaaactgactgaatattcaattatattaaagaattatttaaattttgggtgtaataatggtatcatgattatgttaaaagtcatttctcggtgcagcgcaccagcatggcacatgtatacatatgtaactaacctgcacattgtgcacatgtaccctaaaacttaaagtataataataataaaaaaagtcatttctcatctttgagagatatgttctcaagtatatatgaataaaatgatatgagcctaaaatttgtttcaaaataacatgggagagagaaaggatgttaggaggaacttttccagcactggctactcctcacttctttgcacaggtcaggcaatcattacacttgctccttctggagctgtttattcctgaagctggaaactgcccaaggaaaagtcttcaaaacgaaactgacctgaacggaactgaactgaactagataaccactaacactgggcagactccagttaccctggttttaataattagt

SEQ ID NO: 473915 - DNA, 852 bp, Homo sapiens
cccaccatctcagttcagctctgagaggagtgcagacacacctatgcaagctggccactctctgtccttgggaaaatctcaaattgccactgataatgttgtcctgggtcatgaaggcagaggacctccccaacagtttggcagtttggcagattgtcaacaaagtaaaaggagcagagcagcagtccaatccaccctttctgtagggctccaagttctttggggtcaatctcttccagactcactgcttttcttttctgcatcccaacttcttactgtgggcactccaacagatcctggttctgttccctcagttttccatacagagcttgtccattcacttacaaggcagcagtctagttttgaccatggagatgaggacaacatcctggcatatgtcaatgcaatgagatgggctagggccctgatacctccaaatgacagaatctaccagaaatcagttggcaatgaagtctgagaaacatcattttcaagttactactcccagtagttctagggagaatatagagataagtgatcatttgatatttgaaatggattttatcatattatagtttaatcaatatttgaatttagatttctatttgtatgtaattaatatacaaatagaaactattgaaatgacatttatattaattatacactatttagcaatattaacacatagaattttaattatcttccccattaaagttagtcactgctttataactaagttactaaactgatggagggtggagaggagggatcacttaaaaaatttttatatatgttattgcacttaaggatttctaggtactttacaactgttttgcaattcagtttgaaaat

SEQ ID NO: 473916 - DNA, 622 bp, Homo sapiens
cttccgtggagcctgtagctcctttcttttggctgatttctcccttttagaatgggaatgtttactcagtgcttatacctccgattgtatcttgaaaaaatcagtaaaaaaatgaatgttagaaagtatgaaaacacatggaaattaaacaatatgctcctaaatgaccaaatggtcaatgaagaaattaaggaaattaaaaaatttcttgaaataaatgaaaatggaaacataacataccaaaatctatgggatacggcaaaagtagtactaagagggaagtttataacaataagatcctatatcaaaaatgtagaaagacttcaaatcaacaaaccaacaatgcacctcatggaactagaaaagcaagaacaaactaaactcagaactagtagaaagaaagaaataatagagatcagagcagaaataaatgtaactgagaccaaaacaaaacaaaacagttcagaagcagccttatggagaggtctatgtggctagaaactaaaggccaatagccagcagagaattggtgccttctgccaagagccaggtctcaacagtgggcttaaaatattcagtaacccatgctctaaacagatgtactgttatcaaggctttgttg

SEQ ID NO: 473917 - DNA, 1314 bp, Homo sapiens
ggcactttggggggccaaggcaggcggctgggaggtggaggttctcagagcccccactgccaccaagccagccccaggcacgtcccctctgttgatttctggagtctgcctgaccagagagaccacagctcatggaggccctagtttgtgtggttggaaaccccagcctgtttttccctcccatctgaactgcagttttaggctctctctttttcccgcccccttgactgactggggtttttctaccaggtcaggaaatagagaacacgccatcctgggatgctcccgaggcatgttcacatcagatacgcagaaggactgcaaggcccgaagggataatgggcaggcatattcactcctttaactatttcctcaaattgacgtggtcactgcggaaagctttccattgctggtggtgggtttgccggacacagaagctcataacatatgtaaaggaaagatcaaatgaaactaatgcaaaaagtgccttgtggcttaatggtttgcaaaagtccctctttacttccttaatcatgggccatggattctgctttggaaattgcaaggaaaataggctgtctgttgagatacagagcgtggggagagccccctgtgagggtgaaggtactgagttccatgttgggcagattgggtatgaaatatccaagagccgatgtcccatggattttggtactcaagagagggagctgggtttggtgtgtggaattgggctgagcagcattccagaacttagaatagaggaggtatcctagagagggtatgtgagaaaagcaaggacagacttgggacactcacagtccttctccagagtgatctttgaatccgagtaagaatcaagtcatcatctgcaatgcactccaggcctcggataatattactcagaggaggttaacacagaacaggcttgtgtttgacctgattgttaaagagtgtctcaagaaacctgacctgagcctccattatggcaaataaacctcttctcctggctgaatatgggggaagccacatgcaaattgctaacctgggggctggttcactcctgtggcttggccatgtacttccagtgttttccatcttggctgtttttgaactgaatgtgttcctcatgctggagaaaacatgtgtttgatgttattagaaacctgaacaattaaaatatgttggaaattactagaaattggagcagctggttttgaaatattctagccctaggtttcaatgagtaagttggcttccttgataagcagtagtattaaattccagcccccaaatttggcaaaggacttggctgct

SEQ ID NO: 473918 - DNA, 907 bp, Homo sapiens
ggcagcagtattttaatgagggaggaaatgagaaatatattcctccaaaggaccatgaataaagaacagcaggactttcttttaaaaaatgcttccgaaaatgaacttggagtttacctgaacacccaggaggctgaacttgcatatcagtgccctcggattggtggatgcagaaggcatcactatggcctgaatattggtgtctccaaagctcatgtgttggaaactaatactcaatgtgatagtattaagagatggggcctttgggaggtgaatgagattggtgcccctgaaaagaggcttgagggagtgccccttccctttctgccatgcgaggacacagcaacaaggcgtcacctaagaagcagagcaggaaccctcaccagacactgaatctacctaaacctttatcctggacttcccagcatccagaactggaagaaataagtttctgttgtttataaattacccaatctaacacattttgttacagcagtctgaacaaactgatataggagtattgggtattggatcctgggcttaatatgtatggtcttggtgcaaattttggcaagaacttaggcttatacaccgaaagagcaataatactttatttaaaatatatacaaaattattactttgaaacatatatattactgtccaacatacatcatataacactgattgatgtaaattttggtaccttcatttattcagttgtgatttcccttttgttcaaggctcctgaagaaaattatctgaaatgcccaccagaggggaggtgcccatgggcttggtccccttggtgacttggctgtgctgttgggcactactgaggccctagagccctgctccatggagctgaaggcaaatccccaccttgctgggggacctggggacacagaat

SEQ ID NO: 473919 - DNA, 655 bp, Homo sapiens
accacagactcggcacagacccatgccagtgtccacttccctacatcatctcttacctcgcccctctctgctccttccctcactttatttaggcttggggcgggaagtctcagaagtttctaatggagcatcccctgactcccaccatactgctacccatggagagaatttacggtttgggattgctggtgcaacgtacagcggctgcacaacaaggtggttcaaaaaccaacagtctgctgtacagccaagaagacccaatgattcatggctgatgaagaccaccagggagaaggattctctcctacttgggaagctctccatcagcactgggccagcccggtgccaggggttgggttaccagttaggtgccaggagtaacttcgacatgatcacagaagatacacatcagttaacacagcagcagctgtgtggctgtgcttccaagacacctgggtccacatgtcttcaacggtgcccacgtactgagcgcaagctaatgccagtgactgcagtctgcaaagttaacccctcgggatcaagaatgaatcattaaacatggattttatttggacatctcttcttaatatggcagatgcattgggtttttaaggtaataagaagccattacattaaggtagtgtgaaatgaatac

SEQ ID NO: 473920 - DNA, 726 bp, Homo sapiens
attagggtagaatgaataccacggatctaacatttaactggaatgaaattgagcagaaaagcacaacctgggtgacagaggaagactccatttcaaaaaaaaaaaaaacaaaactggacaagataatagaaaatctatctgaagttatcagagagctgccaaggcaatgcagactcagaggatcaagatttggggaggcggggccgtatagagggattagagggaagagcaatcagagggtgcaggctaacattttgtgccagtttgcctttgaagtctatgctgactccaaaggggaacagagaaggctcagcaattggtcattaatgatcatcattggaataaataaacaaaattttaatgaccagaccctggacccaagctcatgccttaaacactgtcatcagaaatccagagcccaagggattcatagatttattctccgtgtgttcttaattaacttggaaaatatttgtgggtagaagagggtggcctgcctgtgcttcacccattaagagtagcccaatcaaagaggaatgaaaagtctgaggactaggtttctattaagctcaacatggagatgtgaaaactgcctctcatgtttctctccttgtcaaacttttcatctccatgtggctggcagtattggagacagatcctagacccaagtctccctaacatctgagctgccgcacataggaaatgtggcatcacactgcctacggg

SEQ ID NO: 473921 - DNA, 589 bp, Homo sapiens
ccgagggactcattgtaaaaagccttcatgaatggcaccatggccaaacctgggaaactactgcaatttggaccacataattccttttcgctggctgtcctgtccgttgtaagacgtttatttagcggtgtccccggcttctatctactcaattccggtagcaatccccactcccaactgtttacagagcagcggacacgggaagcccatgaatacggaggcagcatcgcagtgaaagacggtggggtgcggtgtgcaaggagagcctttgaggcagtcaggaaaacaccagggtgtgaggggtgtcgttacggtttgcagatgacaaaggtggcaagggaatctaaaaacctccaagcaagggcgaaacaaccatttgcagagaagtctttgagctctaaatgcctcgctgccacctcatactctcacggaattgatttccgccccttggagaaactatttgctgtgacctactttttcacatgaaagacctcactaaagtgttcttttctcttcactgaaggtttgaaaaaaaaaattctttttctaactcttacacatccatgctatgggtgaggacgccttagct

SEQ ID NO: 473922 - DNA, 1478 bp, Homo sapiens
tttgttggcagtggtgctgctgtctcccacgggatgcatttcctccatggagcaggtgcagcgtgtgagggaaacccactcaccatttgcgcccttgccaatcactgctgttgcttctcaggaaaaattccgtcctgctcttcaaacacagcaacttctggatgctggggaaccactggtgaccactgagcaaaaccgtttccctgtgaagcaccaaggggatttgtcctttcccaggggagaagacttcagcaggcagaacaggctacgaggcagggatggagaaagaaaacgcctccaggacactgagtccttgcatctgttaccacctccgaccttgttagaaatagataatcgatgccgcaaagagaagtcagtacagagacaaaagacctcagtaaggccatctttactttctgcagaaagggtgcttaatcgcagatggaacaatggtgggagcacacttgaacaaaggaaaagcagacttatttatcccttatgcatttgggttgtccttactgctgtgtcctgcatccattggctggagcaggacctcacaatcttaaactgatacccgatttgctaatagcctaaaactttcctaaatagttgttttgattaactcttggatgtatggtgcaacataatacctaagaagaaggagtacacttattatagttgttaaagaggtaagaagtgaggctacttttgtttttctctttctggttgctgaatgccagagtaaaagggatagccaattgaactagagccaccatttgttgaaaaaagacaatcttttccctcattgaattattttacatctttgcgaaaaaatctattgacttatctgtctctctttttttatatgtgtgtgtatatatgtatgtatgtatgtatgtatgtgtatatatatttatctttaggtatctttctttatatctacctgtttatccattcatccatccctccatccatccatatataaactcttttgttgcattgatctatacgtttatccacatgcacatttcacacagtcgtgattactgtttttgctttcctgggtctttcccagttccatataattttagagttagcttgtcaatttctatcaaaacaactcaaaaaaaaaaaacaaaaaacatttaaaaaaagccctgctgagatgttgattaggatcatgttgaatatatatagatcgatttcacaattggggaagatcaatctggggagacttatatcttaataatattgggtctttccatctacaacttaatatatttttctttttatgtaggtgttttttagtttgccacatcaatattttacagtgttttgtgtaaaggttttgcatatttttaattgaattcatctctaagtatttaagattttctgatgctcttgtaaatcgtacttcaaaattttttcttcttccagttgttgttggtatatggagataaaattagttttatgcattc

SEQ ID NO: 473923 - DNA, 726 bp, Homo sapiens
gcgaggctcctggagaacctgggccaggatatttaggaaccggatgttttcccagaactctgggggcaaagaccacaagtatgggcttccctgcaatggctgcagtaatgccagggtccccagctttccaatgtattcagagtaccatcttaatagtaagaggcttcccatcctgcaggtggacacaacctaaattacctgttccctggggctgtccatcttcctgtctcagtgcattccaaggatgggattttggatacaaagacactttcgttggatatcaaagagatgtctgcactcccctgttcattgcagcactattcacaatagcccagatatggaaacagcctaagcatcagttgatgaatgaattgataaagccaaatgtgatgtgtatggaatatacattctattcagacttaataaggaaagaaattctgccatttgtaacaacacagataaacatggaggatattatgctaagtaaaataaggcagacacagaaagaccaatacttcatgatctcacttctacgtgaaatctttaaaaagtcgaactcatgattgtataatatcatttgatctatcttcaagttcatcaattctttcttctccagctcaatctgttgttgaggccctcgagtgattattttatttcagttattgtactttcaaatttcagaatttgtattcagtatttggttgtaatatcactcttggttaataa

SEQ ID NO: 473924 - DNA, 1065 bp, Homo sapiens
aggcattggtcttttctctctctctctctctttttttttttccttaaaagacagaaactggctctggactgaagattcctgaagaaagaaacccttaatagagacttacaagcagaagccatgtctcaggcagctgcaagatggtggatctccgctcctgccctccagaaagtatcctttatacagcaagcttttaggataaaacacaggcagctgctgatgtcttcagacttccttgataaattcacaaccacagggaaggcatcaaaactcttcaatggaggaaaagaacagttttatcaaaactggcgctgggaaaactggatatacacatgcaaaatattgatgctggactcttacattctaacatatgcaaaaattaactcaaaatggattagagacctaaacataagagctaaacttataaaacccttagaagaaaacataggggaaaaacttcatgacattggactcggcaataatttcttggatatgacaccaaacgctcaggcaacagaagaaaacaatatataagtcgtatttcatcaaaattaaaatttgttgtgcatcagagaacactatcaagagggtgaaaaggcaattcacagaatgggaaaatatttgtaaattatatatctaataagatattaatatctagcatatataaagaattcaacaataaaaaacccaaacaacccaattcaaaataggcaaataacttgaataaatatttctccaaagaagaaatacaaatggctaataagcacatgaaaacatgctcagtatcactagtcattagcatatttcatgttggccaactcttataggcaagtttctcagcagggcttcctggaatgtgcttgtacattgccccctcctgcattgctcccttctcagaccccattaggtgaggtagcattctaaagagctgctctaattccacttgaacatccctaaaatcagctaagccgaggcaagtagcagcccatgcagcctcattggtatgcattccactcgagagtgtgggcacggtaaatgacacatgaattatgtatgccagcgttc

SEQ ID NO: 473925 - DNA, 620 bp, Homo sapiens
caggtcccagccctgatacgggctccctggaaccatctgcacgtcacactcaaatgcaagctgcctggtttgagtccctctgactgcttgtctccccagtgtcacctggttggctggatagctggaaggggcagtgagaccctgatgtctctgggagaaagaggccctgagaggcagtgctcactcaccagctttgaggctttcttcaaggaagtccccctatgccccgctcctggatcccacaagctgaggctccatgcctcagggactgaagagcacgggccccacacagctcactgcaggggaattgctgatgaatcattaggtaaagccggggccaccggcagagtggccttctggcagatggctggggcttgggaaatgcacatcttctctcggctcagctatgtggttcttctttcttcaagaagccaaagtactgggtgtaccccacaaagtcacaactgggcacagacgggaaaggctggctgtcagcaccttgctggccatggtcgtggaccccagagtgagctgacaaagcagtcagtccaagcatggctgcaggagcgccagaaggcgctgggtgctaacacttaggaggcagcatggacagtggaggg

SEQ ID NO: 473926 - DNA, 515 bp, Homo sapiens
gactgatcacattcatggactcctggcatctgtatgtgtggccatgagactctatagtcccctccctctcactgtgggcctgatcagtggcaagaatgacaaaagcaaagtcttgacaaagtgcatatgcatttcactctctcacttccctgtcattgctattaaaaacaaaaaccaacaacaaaaagaaaacccaccgaggccctcccctagagaatgtgcctgggctggcccactaaagggaagtgggagacatgcatgtctgagcagctcgtggggaggggccacgctggcccagctgaggtccatctggactggcctgcagccaactgaccctcagatatgtgagcgagcccagccaaaagcagtagaggtgtctatcccacctgcaagagtacagacccctgcaccagccaacatctacagaatatcttcccttaattcctaaaggttgttttcatcaatataggattttcaattgacggttcatttttttaaagcacttgaaaaatgtt

SEQ ID NO: 473927 - DNA, 544 bp, Homo sapiens
gtcaatttagatttggagatgctgcttgtcatttgcttcctcggccactctgacttcaacccagaagacggtggtggcatgaacaccttccaggccaggcctgtgggatacaagactctggctgaagtgctcactgtcctccagaagctggatggctgtgtggaaaaatcccaattggaaggaaattctacaaaacacctgactggtgttcctcaaaactgttcaggaacatggatgaagctggaaaccatcatcctcagcaaactaacacaggaacagaaaaccaaacaccgcatgttctcacttccaattcctagaggtgattgtcagaggcttggagacccaagaccagacttcattaaacattgcttccgtgtccagtctgcttgcatcttcagccaaagggagttcctccaggtagacttttcactcctgaaacttctggtctttgtttgatggcctctgtgctctgccctctctccctctcagctcatggtgtctgtcttaaggccatctgaaacactaggcatgggtgggaattagc

SEQ ID NO: 473928 - DNA, 542 bp, Homo sapiens
aaccaccattctattctgcctctatgaattggactattttagattccacatataagtcagatcatacggtgtttatctttctgtatgagaaactcaagaatcagaaaaatgatgagattgtcccacactctttgctagtcacatcttatactctttctgtgcacaagataaattactgtagacttgaaagcacagaagctcgaaacatattaagtgcaaagacagggctgagagaaagaaggcagacagagggggctgtctggccatgggcagctgcaatcagcctctcttcacaaaagggccgccatctctactttgtgtgtgcatttgcattccaggtcactactcaggctgcactgcatggtttgagtgcatataaattaaataaacagataggcagccaagctcctgactagtagcacgctgttaagtttatgtgttgactagtaataaaccatcattacagagtagttcatctagaaaacttatggtttttaggatagaatagattttcaataagaaaattaaagctcaaggaggga

SEQ ID NO: 473929 - DNA, 846 bp, Homo sapiens
gaaactgcaaattagtgcttctgatatgatattgcctcatgaataatcaggacattctcctaacctcggtggagaatctcacatgcattaatggatacagcaattaatacccaactgcctgatctgaggtttgcaggctatgtgacccgaacatccttggttgcatactctgtcctgagaaatggatgtcatttggaaattcacaaaagtatgaagcagcatatcagtgatgatgacagtgacagtgatagtagtggcagtggtggtggcagtgataatggtagaggacatatggttggttctggcagtggtggtgacaatgttgatagtagtggtggtgatggtggttgtagcaatgttgttgctggttctggtgccggtggtagtagtggcaatgttgatgttgttgctggtggtggtggcaatgttgatgttgtggtggtgttgtcagtggcaatgttgttagtaatggtggtagtgggcagcaatattggtcgtggtggtggcaatgttgatgttgtggtagtggtggtagcaatgttgacgtggttgttgttggtggtggcaatcttgatgttaacggtggtgatgatggtggcaatgttgttgctgttggtagttggtggtggcagtgttgttagtgatggtgaaaatggtggtggtggtagtggtggtaggaatggagatatacataaactgggaaataacttaggaccagactgacattctctaatatggttacagaatggaggttgtggacagccaggggctaacaggtatgttcctaggaaatgtctttaaaaggacagaattgaaagtgtgtgtggtgggggtgagtggaatagc

SEQ ID NO: 473930 - DNA, 712 bp, Homo sapiens
gtcccggcaggaggcctccctggcgcagggatctcaagtagaactaaccagttgagcagtaaaaccacagttgcttcactagggaaaagattaacaagctggagcgcaggaatctttgacagaatgtgaagcagaggagagtgacatcctactttaccagtactcatgaggctctcggggcctgtgtcaaccaaggcgggaagcctgcaggaggcgaccacagatcacgggagacacagcctagagtctgacagcctgcaggaggctggactggagaagcatagatccgccagccttcaggaatcttgccctccaccttccccagcacatgaaatcatcgaatcagatagctttggagaacgaaaagcataccacagacatactgtgtccggagttggctcctgccagtgggttcgtggtctggctaacttcaagaataaagccacaggccttgaagaccttcctgtgaagtgtagtacagccacactctattccctctcggcagccactgtgctggggcaaggtacgcagtctcccgttgctgctgtccatggctgaatccacttggaaccagtgggcaagaagcccagatgacacagtttctgtgtatcagcttgtggagatgcagagcaggaagagggggctggagaatgtgtttgcgggtgaggagaggcaaagggtagaaccagcatcatcacaacaaagaggcact

SEQ ID NO: 473931 - DNA, 962 bp, Homo sapiens
gggtgggaacacagccaaaccatataagatggagaccttcaagaaatggctgacagaagagaaagatcccctaaaatggaactatcctggttttagcattgaaagtctcatatcctgtcctcaaacgacaatggttggtcactcagtgtcgtgtgctggatactctacaagtatagttaaacgtaggaacatgtttagtgacccaaggaattatggtgatctcctttctttcttctcccaacacttactaagtatatcatgggtccgtgacttcaaagagccacaaagactgtcttattacttcatccggggatttattgcccaaaatgatgctcaagacccctcacatcagcagaagaacaaaacggtgagtgaaattacccaatttctgcagaacgcataaacatcctgaatgtgttacttgtgttgttaattgtttctgatctatggaaacaagcaaagacatatttttcctaaagtctaagtaacatttcaaaaggtcatttccatgcctatgtaaatcttttctgaagtttctgtgagttttctcttgccttccaacttattggcttatcacttgcatataacagaatttcttttgctgataggcaaaggactcctttttcgatggagtttatttaaaggtaataatggaaaatatcaaatctggaaatatcttaaaactggtttatatttttcaaaattgtgttctatttctgtctccttattttttcatgcacagtttttctctgattgtgaaaaatatacaataaacaggtaaactaatgcaaaaataagtttacttcactgaaataaagcaagctaagataacagagtgtgataaggcatttgtggatagtcatgtaagctagtggtcagggaagactcctctagggaaatgaacattaacacatttatgccggaggttgaaattttttgtttgtgaaaaatcagaccttggc

SEQ ID NO: 473932 - DNA, 1201 bp, Homo sapiens
ggcatctcagacaggctccagctctgtccaaatgctccaagatgcctcatgagagcactgtccaacactggtcaaccaggctgtgccattcacacctcctatgccagttggaaatgccattgagatgagcatcagccaggaggagagaggccatcgtccagccgtcagaagtgtgtgaaccagaggaactccatcttgaataggagctgggcccctggaagtgggagagctcaggaaggcgagcgcagaggggagcagcctgggtccatcccacatgtcccagaggcacaggaggacaccaactgtgcagggatcagaggccagggagcccatcaggggaagatgacactcacagccccctatgcaggtcgaatacaggtggcattgggcctccagacctggccccaaggaaggcagagagaaaagtcatcacccagcgtccctgggggtgctgaaacaaggagacttcaccctggccctctgggtccagcccaatggcctgatttaacttcagttccctctttgaacgccttgtctacaaatacagtcgcgtgggaggtattgagcttaggccttcaacacgtgaattttgagggggacactcttcagcccatggcagcgtcttccactcctgcagttattggtccccttgttctcccacttgacagcactgtgtgtctgcggcctctgagatctcactttcccgctgcgattggagctgcacacacgaccctgatggttctttggacatcccgacttcaccaagaccttctcccccaggctcgactccagctgtccttggtggagcttccatgggtggggacctgtctactgtggatagattacccaacagtggccaacaccctgttgcacttccaaattggactagtgcctggaaacttctgctccactgcctcagcctaccaggcctgcctgatcccacccgctgtctgaatcactctagaattggcctctgggcctttggttcccgggtcttggacccctggccgtctttcccaggctctgcccacacacaggccactcacctccacagtgtctgatgcccccaccttctcctccttctccgcaggcctgtttttcctggaaccagcaggactcccatccaggtccactcaagttgtgacactgcttggcttactgtaagcttttctgctttttagtttttaaaatagtttgattt

SEQ ID NO: 473933 - DNA, 2309 bp, Homo sapiens
cttcgcttggtacttctccttcctgccaccttgtgaagaagatggctggccttccctttgctgtctgccgtgtttgtaagtttcccgaggcctccccagtcatgctgagctccttagaaaaggactgtgtgcaggtagtttatttcaggaagtcaaccagggatgccagtgaggtgctagtgagggtcaacagggaaggaggaaaagccaatgccatcaatgccacacacactatacactgctcctacacccctccccctcctcctacaccccctgcccttcctcctacacttctccccttcctcctacacccctccccctcctcctacacctctccccttcctcctacacccctctcccttctactgcacccctccccctcctcctacacctcttctcttccttctacacccctccccttccttctacacccctcccccttctactacacccctccccctcctcctacacttcttctcttccttctacaaccctccccctcctcctacacccctacccctccttctatacccctacccctgcaaaagccagaaggacagaagcccacagttgcagcccggtagcgaattcctagaaatggcaagcaacttgcctgctcacagagcattcctttcaaatgcaaatcaaccaattcagagtccctatccccagccccttctttatctaactcacacacaccaagccaatattccacctgccctaaatcattaaggtgggccctgatccaatatgcctggtgtcctgttaagaagaagagattaggactcagacatgtacagagtccactgggagacttgcaagccaatagtgtggaaagagttgggagatctactcagagtatggaccagggatgagacaactagggaccacccctatatctcagacccatccgctgccccagattattcaagctgccctatcccaagcctgcccagcatgtccaccccacctggcccattccttcccgagaaaaccgcaataaaggctccggtccctgcctccctctggctccctctgcctcctgaatgaccctggtcctttccctcgtggccctgtgcagcctggcttgggggtatctgctcctgctgcctggcctctcttcctctgaggtccatgaaagccctggacttaaccagagcagggcagtggacagccagaggatgaagaggaatatcctctctgttgagagctgcagagagacgacctgctggcagagaggagccaccctctccagggcctcctttccactgagagctgcagagatgaccagcttgcagagagcagccaccgtcaccctccagagcctcctctccactgagagctatcaacatcaggatgaccagttgcagaggagctaccctctccagggcctcctccctgctgagaactgaacactcaacagaagacctgcctacagagaggagctacctactgtgggtctcctctgagctgttgtaatactcaatacagctcatccttgttttgttcacacttcacttgtctacatacctcatttttcctggatgcaggacaagaactctggcaagggcaccatggccacagaggtttccggccggaaaatcaacaccccaaagatcctgtaacattatgataccctggctgactaatacaggctctgaatgcttgtaataaaaacagggtggcttcaaaatggtttccacatcagttttctaaagtggagaaggactctctcctgagtctggctgaaaacgtagaaggggacaatgatgctctgatgcagctgagggacctccctgggacccagcccagatagtgcagctgtgtaggagggaagggtgtctacccaagcctgtctcctttggagctttgggttcctattgtagaccacagtggagttggcactagggaagccttgctcctctctactgctatgggtgtgtttggcattttaatgggctcttgtttcatttccatactcctccgagcactcccaagccccaggtgcggtagtgtgatatgcatccagcactgcagaaggtaggtgcttccacatgaaactctataggccgggcactttaatttggaagtggaggcaccctggtgtaccccatgggcctgagtcactcactccccaaccaaccatcaaacagagtcctacctctcaccacaaaagtgctttctggctttagtttttcctgtaaaaaactaaatatttattcacgggatatttatcagatgaataaagactttgcgtatctgtaattggtaagaccttgcctcctccctttccccattcttaaacaaaa

SEQ ID NO: 473934 - DNA, 601 bp, Homo sapiens
gcaccctctctacccgcagaatgcaagatccagaagcactcctgtgggaaagacccagccaaagccccagactccaatacaacggaatgggaacctggtggcaggtgtatggagactccacgctccgatgctgaggaatccagagctagaagagaagactgtgctagaggcaggggcctgcatctggacagggcactgcagtcatcggagaaacaccagcaaggaccagtgggctcgggcacacccacagggacagcagcacgccccagaggaggctgatgtcatgaggtgccagccagacctgctggagagccctgggagccgtcctgggaaaggccctaaatgtgacggggatgaggactctcctgcactggctaatagaggcagagaagaaaagaaacatattctatgggaccagcacaacgtctttcttccagaacgggtggtccctccttacactggcccactcatgaccattttgcactgggcagcttccccggaggtacctggtcccatggccatgtccagccacaacagcaacccacatagcatggcttaggaagactttgctcttcttgccccagaaggaaaagtgaagagt

SEQ ID NO: 473935 - DNA, 838 bp, Homo sapiens
caccaacatgatggtattaggagtggagcctttgagaggcaatgaggtcaagaaggtggagccctcgtgaatgggattagtgcccttattaaagggaccccagagagttcccacaccccatccaccataactgtggaaaataaagttctattgtttctaagcctcagttgatggtactttgttatgagagcccaaatgactaagacgctcctgcttggcatcttccttcttgacttccacctccagtctctttggactgtgggtcaggtacatcccacggtcatggacaccagccagaaccagcctgaaaagagtaaaacttgcgaatggatagctggccctgccctgtgtgatagcagcaacatcaaccacaagtatggccttagtgccaattgcaccaggatccaggaaacatcctttttcagtgaaacaggtttggaatcacagttctcacggaaaacaagaaaacatggctgctgtgatcagatcaagaagctgccggaaatacaatacggagctggagaatgctccactgtttcatacaacactgacctctttcacagagtcctgcctgctgcctgctatcacagctttcatgagtacctgaacccagacttttctgggacatgatcaggaatggagctgacaagtcaccctgctcttgaaatcttttgttcaaagccagttgctgagatgccaccttctgattcctgcagcccatcaaactgaattcttcccttttctctggcaaggtgctctgccacttgtctataagtgacacacctgcctgcccttgccaagtcctccagggtggatggtaagtgcatccttttcttgt

SEQ ID NO: 473936 - DNA, 481 bp, Homo sapiens
gctcccacagttccaggtgacagaagcaatgcaacagagcttctatttcctggcagatggaccatgagcctgggccagagaatctgggtcaaatgcaaacaaaaatgctgtgagacgcaggacatcaggggcatcccagggcctgaatattcttactctgaccagagccggctccgggcagctgtcagccatgccttaaaaatcagaagaagcctcagcgcagatttagcaggaccaataatgggaaggaagaattgtcaaggtgggagagtggctgggcatacagctcctgtgacttcacgggacagtgcccggggatgtgagccaggccaccgagctgagctggcagccccaggtgacccagagaactccagccggcctgctgtgaccccagccttccctgccgcagagagaagccaggtccgtcttccagactcacagtccaccagcagtttctgaggtcaaagattgtaatctcatc

SEQ ID NO: 473937 - DNA, 521 bp, Homo sapiens
ggggagttatgggatattctacctgggtaaaagtattcttcacactcagaaagcaattgtgtagccctttagagctcactcgtgtcaggtgcaatgcaactagctatacaagacaaggtgttgctcttgctctgttctacagatccccaaaatacagttgctggaatgtctcaggacctcaacagttactcttcacagaagaacagaacccaggggtcatgatggcaaactggctactcggggatggcccagtgctgggcttgggaacactacaggagtgtcaaagacaagatattcctcatgtcctggaatttgggggctcaccactgaatcctggggaagcagttgacagagagcctgtctgagcatgaggacctccagttcccagccggtttttgttttctttcttctttgttttctttcctttcctctcccacccaccccatttgttgtggtgcctactttgaacttgtcatcagcaatggtgaattcaggaataaaaggcgacagaagcacaggaa

SEQ ID NO: 473938 - DNA, 2923 bp, Homo sapiens
gtgggaaagaccagctggagccaagacctgtcctcagccccaagtgtgaccaccgccccaggcttccccacatcccccgcacactcagcatgggctcattcagcagctgtcagaggtcaggtttggtgcaaagacaatcaaaccggaggaggggtcgctgcagcagctggcccctgggagagtgctctgatgatgcacatctgctcacaactctggactcatcgcgtggccccaccgaccagatggacattagaggtacaatcccagcaggccccagaaggcagcaggggacaccactagctgcccctccagaggccttctgcactccagcgagaagctgccctgtggcctggtatttgcagtcgcagctgctccctgcctggccttctcctcgtagatggaatatcggagaagttatcaccaaatctccaacctcccctccagctgccagctccagcagaatgacaggggcagtttccccaggtgggcagagtttgggttctgccaagaacacagtgaatttaaacaccaccaacttgtgtggctggctgaaccacaatagaaaagcccagtgcctgcatcccggggtgtgcaaatttactcaagtgtgtgcctttgccgtgatcttcactcgcatgattgcaccgatcttcactcacacgattgcaccgggaggctgttgccttagtgccttttccaattcagaccaaggacaggcttcttccaagcccagttgacagccctaggtctactctgtcccctatcaatatcctgtttctgtgtgtggccaaacaaaacaaaaaaatcccatgattcacccagaaactgtgcctaatgatagacaaattaaatgtctataacttgttgtaattacttaataaagtttgtcgagcgcttaagaatccatctggatgaaagaaacattgttaatgtaaaacatgattacagcaacaactacaatcatgccaaaattccagagtcccaccccctcagtaaagagcatgagctgtgccattggtattccaccgcgggatgctgccatgcaaaccagcatccccgccggctcctgtgacatctgcccacccagggtatttgctaacaagaaggatggagtgggaggtgtaaaggaaagaagtgcagtcctccaaagtgaaattattcccttgtctccattctgtgaaagctccgagtccaagtgagcttgctaaaatgtcagccacgtgcctcagtgattagggctgcggtttgggcagcctgtcaaagattttcccaggcgacgctcaagccccttctcagcccagcgcaggaggtttggtgtttttactgcagggcagtccagagtttctgggagagcaagtgatatcctataagccatccacacaccttcattccccacatgcatcctaaactttaagttaatgttctgccttttctttttcccattcagggagattcacatgtttggccaagatagcctgtcccactgacaggaccgtaaagccaatccaactgggaggagagccagggaggctgcgttcgtggacttgaagagtctaacaggcctgctcctggaatttcatccctcactctccccacttctccctccagcccagcgtgaacttcactcgtgccaaaaaatcaactgcataagaacaggattaagcaggaggctggagacggaattaaataaagtgcatgaatgaaacctcaagattttcttaactgtgaactcaccaagagccaacacagcggagcttatgaaatttcactaggtgagactgtatgagtgcttccgcaccaagccaaattcaacctccccatagcttccccccaacatttctaaacctgccctctggaatcataccgatcaaacctaatgtctgaatgaatatgtttatgcccagtgaagcatagaagatgactgctgggcatccaagtcttccctttccccaaatgaattttcgtgggtctcctgtcccttgccgccctgacggttcgccacccactcatcacgttgtgggttgaccccagtttagggctgctgctcccatgagtagtttcttgagctgctctttccctggagctgtccactctgatgctggaagggcttcaattttggggtagatcagagtttctcaaacttagctctatggatcttttcacccagagaattatttgttctgcgaggtggtcctgtgcactgtaggatgtttagcagccaccctggcctctacccaccagataccagtagcaaccccctccccgcagtgacaaaaatgtttccagacattgccaagtgtcccttggggaacagagtccctcctgactgagaaccactggggtagaatgtttgattagggtccccttcaactgaaaggttctaaccattcatgattccatgaactgcccacattttctcaaatcatcagctcagttcagattgtgaaaccactaagaacacaaaactacttttaaaaaaggagctggtgttttgaaagttccccatgagtaataaaaagatgatgatggtcaagacaaaattgcaaaaatgcccagtccccttaaaatgaaagcagcaggaagagcggcagcccggggtggagggaagggttggtgaaactgaattcctggaggatttccctctttggccaagtgggttcatagcagaagcttagcaaatgaacttcacaaaatgttctttccacccgaaaatggtggtctcctgtaattttagctggtgagaagagggaggaaataaaggagccaatgtttaaatgaaatgaaatagaatcgcttagaacccttcagatcaatggctggctggctgaagcaaaatcttttttaaaaaaaattgagagccagccttctgactcctcattgctggctgaaatatggccagaactgtgaattggtttaaaagtct

SEQ ID NO: 473939 - DNA, 954 bp, Homo sapiens
ctgtggaatgatctgcattaaatgaggatttatgatcaatcctcataaattaaggctgcctcagaagcccaagtttgtggttatttattatggcagccaaaagaaactaatacagcacatgtgtgagcacgcacacacacacacacacacacagacagacacacatgaggcagccatgagcacagaggactcttggaggagagcagaggacatcttgagagaagctgacaccgcagcggcagcactgataccacgacccacatcctcccttgatgccctcatcatttccatccaggccctgcttctcgcccagaagccatccaccattcagcttggtctccaggtcactgccccaggaggccatctttacttcacacagtcgtgtgggactgtaaaaatgaccacagaagctgaaaccatacaaagtgacttaatgatcaatgggaaagttatgacggcttcataacctataaatttctttgtcaaaagattaaaaattctccttctgttggttacaaatgtataggaaaatgaaaaaaatagtaaaactaatatttatccaaaatattaattttaaaacattagaaatattgataattaaaatgtcttattctttacaaaaattatcaagagtagtgtgaacaatgtctgccttctttttattctataactcacagtatatagtggacatcttttctatgccttgacacactgtcatactcctttctaagctgtagtcagcttcctacatttcatcctttgcgcattctgtgtcatcaactatctctcagagtttccataatgtgaagttttatcctgatcctaaactctagaaatctcagtccttttggtcacaatcactttctgcatgtatgtcaggaagttgacattcaccaggttcctctggctggatatatagcatctcttaaatgacagtagtgtcagcattcccac

SEQ ID NO: 473940 - DNA, 868 bp, Homo sapiens
gccagttgttgtaaatctccagctgccaggagaccaggtggcctgccatgtgtttctcaataaaattaacaggattcataaaaacctaccttgtacaatattcttcttggattaaccaaaaaatatgtgttaactccttgtttaggctggctgtgggctcagccagtgtcagcttggggctgccagccacaggagccacggagtctgggccctactggttccacgccctcgtggttccctgttctcatggttccacgccctggtggttccctgccctcatggttccacgccctggtggttccctgccctcatggttcccacgccctggtggttccctgccctcatggttccacgccctggtggttccctgccctcatggttccatgccctggtggttccctgctctcatggttctatgtcctcaccattccagctcagcagctatgtcataggggaaacccatccaactaccgatctataaatttttcatgtataatcccttagtgctctatttttttccatttactcaaacctaattgacaaagtcattcagagaaactttattaaatattgccatttcggaagtaagagcttttattttaaaggagtggttatgatgtcacttggggattttgaaaaacaactttgtttcaaaatctacgaagttagccttatctcttgaagtctgagtgttatcttatctcagtagatgggaaaataccattcaaaataatatttcatgtttatctcttctcctgaaagttacatgccaggtactggaggtggaggtgagagttgggagaaccaggcagaggctggattggaagctttcccatcgcccattggaagcaatgtcctcatgacgctt

SEQ ID NO: 473941 - DNA, 621 bp, Homo sapiens
ggaggtgtctgagaggtgttcagaagttgacaaacactgatgttgtcatcattgtgcgcgcctactttcagtcacttgatctagctaatgcctatctatttgcatactcagcagtgttttgttaggttctctatggaaacatacagacagaggggacccatttgggttttaattcagttccaagaaactgcccagcctgagaagataaggaccactggggtccgttctggctttgagctaccgatgaagtgtgtgtcattccattttgggaactgtttctcggatgtccctggctgcggggtgaacccctggacccatcctcagtggatcccaccatcttggatctgcactgccaggatcttgctaagcccagactctcattctggacttccctggaatggacttcccagggtacagactggttttggaagcaaggactgccggccccaggaagctggctcctctgcctgccaactgcagcctgcttctctctctggcacattctgggtgctctgcaaattcatggagatggtcctataaaccccttctacactgctgtgcatggtgtacttgtcccattagctctggttaccctgggctccttgctggtctgcctttttc

SEQ ID NO: 473942 - DNA, 1349 bp, Homo sapiens
gtagttggtgagggtcctggacagaggttcatgaggacacagtacaccaggagtgactcacgagcctcagggctgtgtcctgggtggatacagagctcaatctcatggaggaagatgtcactggaaaaagtcctaggtggctctgatatctgcccctctcccttcctcccttctgggaaaataagaatggctaagggtgatgggcagcgagaacaaccagaggcgctttttgtgtctttttctagttttggcctgttctcaatctggtctgggagacgaatcctgctgacctcctacctctgctggcaaaactcgagtggggtctgggaacttgaaggaaggaaagtgttgatgctaacttccggattttgtggttacattgggataaagcgggagaatatccctatttgtgggaaatacacacaagtattttgagggtgacaggatatgagttcagcaaccttctctcaaatggttcagggaataaagattctttgttctttaccttgaaatttttctctaagtttatggttatttcaaaataaaaaggaaggaagggtctctcttattaattaattttgtctcacgttgttttaagctctttagagtgttttcaaatgagttttacagcttcagatctgggtatttatccaaaagacttgaaactggggtcctgaggagatacaaacacttctcagttcattaaagcactattcacagtatccaaggtgaatggataaaggaaatgtggtatatacatacaacaaaatattactccgtcttaataaagaaggaaattctgatatacgtgacaacatgaatgaaacttgacattttgctaagtgagagaagcctgtcacagaaagacaaatactccatgattccatgtatatgaggtagctaaaatagtgaatctcatagaatcaaagagtggaatgatggttactagaggcgagagtttgggggatgggaattactaatcagtaagcataaagttttgatgtataaatgtataacattatatctagtcaacaataatatattgtacacttaaaaatttgttgagagggtagatctccttttaagtgttcttaccacattaaaataaaatctaaaaaaagaagagtatggaaagaaaataacaacacaatttttttttttttttttttgaaagcacttccttaataaatcagttgtccctgaactcttaccttagggtctacttttaagacttaaaaaagtctgcagtcttaggacttaacaccctctgctataggtttctacaattgtttttcttttaagaatatattttttctgtggtactaggtaaaagcatgtgccatgaaatc

SEQ ID NO: 473943 - DNA, 555 bp, Homo sapiens
atatctagaattgtaagaatgagatatttgcatacatttaaagaatcttccttcaaaatacttattaatgacatagagaaaagggagtggaacagcctgacagccagttccaatcacagcaaacatcatcagtcatgggacaaattggtgttggtgaccactggatgggttgccatgagaacacaccctcacttctatgatatgcatgccagaaacatgtgtccaggttatgaaagtcaagggaagactgagaaactgggccagactgaaggaaactgcagagaccagcaactaaaggcaccacgtgattctgaggagtctttctctagaacagacacgctcgggatagttgtgatgcagggcaggttcttggctttgctcaggaaagaactcaacagtcagctggtggtggaaaaaagcagctttattgaaagtgaagtgttcaaccactgagtatgatgttggctctaagtattcatatgaggcctacgtcaaattcatacatgtcgaatatcaaattggggaagtataaatcccacttagtcacagtatatc

SEQ ID NO: 473944 - DNA, 1295 bp, Homo sapiens
ggctcaccttgggagaagtaggcttgcggcaggcctgcaggcatctggggtctgctgggacacagagagggtccagaatacgaagacaaggatggctcaaccacaggaccagctacaggggcggcagtaggagcagtgctgagggataccagggaggacaataaagtaggagtgaggtagatttaggaaatccggaaataatgtgaaaatgtctctatgcatgcacacggtgacccaacccccagcacgtgcacccttggccaaggagtgtggatggaatctggacatgatgactggggtgtcctactggtgtgagacacagcttggagtgggaagagaaggagcagcccacaagcagggccagctttccccaggcagccgtgttcctgggagccaggactccaaggagccctattccaaattcaaacctggcctttcagtgccctctcagcactgcctcatccaggaaacctgcctcgataaggcaaacctacccccttctctggatttccctggaatgctgaggagcaggacatctgaaagacgagaaaacagaaaagaaaggctgccctcgttacaccaagccagtctttcccatggtggagcctgcactctgatcaagaagtgggggtttcagggcacagccacacatactctcctcaaggagctctgcagccacctgaaccttgctagggaccctgcccagcgctcccctggaacagagcgctaggtaaagggaagggcaggctggtcacatttcattcagtcaagtgcttgcagatgcctcctgaccttcctacaacagctccttttgtttctgtgaatgtttttcagctttattaagttataactgacaagtaaaaattgtgtatatttgtggtatatgtgatgttttgatataggtatacattgtgaaatgattaaatcaagctaattgatattagattggtgcaaaagtaattgtagttttgccactactttttaaaatttgttaaaatagtatatagtatttaatttttattttaagttccaggcccagaagcacagaggcagggggaatgtgcaaatatggtcatttgcagcttttgtgcatcttccaaggagaaaggaaagctgaaaccacgtttaggtttggaaatttttgaatctctaacatataaatggcaaaaagcttcattagtgccactttgccactcacaacggagatgaaaaattcttattggcactgaaaataagacttaacgtcattgtatttattaggttctgaaacaatacacattcacatccttttgaat

SEQ ID NO: 473945 - DNA, 1384 bp, Homo sapiens
agttcccctatacaagccctcttgcctgcagccacgtaagatatgccttttgccttcggccatggttatgaggtctccccatccatgtggaactgtgagcctattaaacctctttcctttatacattacccagtctcagggatggcctcatcaccctgcttgggctttgattcttcatgcttcctcctccaactcctcactcccaccttgtgtggattcctcttcacccccaccttgggctacgattctgccagctgcactgtcctcctgggcagacatctccatgcccaatttggctcccatcattccactccgggccacagtgattccctcacctagcagagatatctgctctgctctgatcttactctgtcactctggctggagtgcaagtggcaccatcatagctcactgcagccttgaactcctgggctcaagcatttctcctgccttggcctcccaatgtgcttgaattacagtgcgcatgcttgagcccacttacctaacacctgagatcttattgggacgctgctgataaccagtttcagagatgctcaagcactgaattgtcttaagaaaacaagtaaggttttgtcacctatcctatttctcactgcaagttgaaaaaaatcaaatccaaacaccaccaccccttctatgacaacaaacggctgtggaggtaatcttattttcctaagggtagtttcatgatgacagtgtcaaaaaattactgtggataaagaaaaaattgtctcaatgaaatagaatttttcactgaacacagaaaccatctcaatagttgctgctccctggtttccaggccacgcaacagacatcaaaccaggaagccaaactttcatggacctgtgttaagaaaaacacacatacatgggcatactactttttccagaaaaacggaattaggcagagaaggaagtgtgggtgtacaactgatccacaagctattgggaaatcaatagctaaaaaatgtccacaccctggcttccttttatcaggaactccaggaggctgaaggaatgtgagtgcatgagataagcaagacagatcttaacggtcccctcacatccctttctgggcaatctccagaatgcctagttttgtggagacaccatgtactatctggctgcagagactttcttaggtcccgtgttagaccccatggggtctcagcatgtggtcatgtggtaatgcattcctttcaaaggctttgggttgaactcaagttggaaatacctggaaaagaccaagcttctcctttgggtgtctgcggatcctattaaaaatattcgtgatgttttaagttctccaatacaattttctccacgaaaacaagcatcagatacactacctctaagtatttatt

SEQ ID NO: 473946 - DNA, 933 bp, Homo sapiens
ctctccgttgtgtctttcggtgcctgcaagagccttgcgggtctgcagctcataaaccctcttcactcaccatctattttgctattttttaattgcctgaggtcaaatccagaaagcagcttctgagattcctgcggcttcctgcccgcctggtgtcctacgctaccattttcctgtgcaaacacttgaggggcgttgggagccgagggaattggagcagcaggtcctgttccttcccctggctgtgtattcgagtttcatgcctgcccatggctgactagcatctactgtgtgactgggcctcactgcactgatgcgtccctctgcggagggacaagtgggtcgcttccaccttctggtgactgtgaataacactgctgtgaacatgggtggaacattccagaaacccccactgtgggctgggcttctcagtcttttctccatgtcctgttgcaagcccgagagccctgagcccatgggcctgtgtggtggtggtccacagcctccaggccaggggaggaagggtagaccttgctgggcttgggtgctcacccgccaggctcccatcctcagtgcccctgggaaccctgtcggcatcgccttgagtgcccctgctgtctgtctccggcccccctgggtcagccccttcctgaatgccccttgcacccatccgtgcccgtcttctccaggagcaggaattcggcctgtaatggatgcagttttattattgagggaggcagtgagtgtgggtatcaaaaaggagaaagaaacccacccggcgttcttccacagtgcatgacgcggctgaaggatacagtggacttacccacttcagtgactcccaaattattcatcagattcctcgaattgtacacacatcccaattcctcatctagagggcgttttccacctggcatcagctcccagggattt

SEQ ID NO: 473947 - DNA, 1407 bp, Homo sapiens
atcccagtgccactccccacacctcgttctggcactgaaagaggaaaagctgatgggcatcctcacccagaggcctggcctgggcctgcaaataacaaggaaatgtttcttggcactgaggagagcgggagaaaagctcatctctgtgaagctgtatccaaacactgacccttgtgcagactggtacccaaattcacaccccctgaatggcccagaaattttccaggaacaaattcagatgaaggtgatcttggagtggaagtgtgtggagaggcaaaactgtcatagcctgaagctggtgggtgagagtggtacaatcattttgggcaaccattcggcagtatgtactgaagctaaatccatgctgcaccccgagcccagcaatttcgtccctaggtgcatgcccaacaagggtggatgtgtgtgcacacaaatgtgggggaatattcacaggagtcaaaactcctgtgaatacaaagatctaccagcagtgaataaaggaagaaattgaagtttaatcaccaaaagatcatatacagtaatgagagtggacaagccactgtttcttgtgacagcatgtgtacatcccacaaacataatattgagcaaaagaaatggacgcaaagaacatactgcaggcttttgattaacacacttgttcatatatatatatgaacatacttcatatatatatatgaacatacttcatatatatatgaacatacttcatatatatatatgaacatacttcatatatatatatgaacatacttcatatatatatgaacatacttcatatatatatatgaacatacttcatatatatatgaacatacttcatatatatatgaacatacttcatatatatatatgaacatacttcatatatatatgaacatacttcatatatatatatgaacatacttcatatatatatatgaacatacttcatatatatatatgaacatacttcatatatatatatgaacatacttcatatatatatgaaatttaaaaacagtaaaaagggatcaacggtgggcataaaaagtcagaagagaagttactcttgggagagtcagtgactgggcgggggcacaaggtagcttctggaatgttctgtgccttgatcttggtgttagtttaaccgagttcatttatgatttgtgcacttttctgatgtatattattgtcaatcaaattttttcttaaaaatgtgaaagggaaggagtcaaggtctccatcccttttcctccaagaggcttctcccactgtgtgctcacccacactcttgctgtgaatcgtgaattctgcattccaagggatatttccagggacagccttcatcaacacaagatgcctgttcccaggtgcatagctatggaggccagctctggggttctgccc

SEQ ID NO: 473948 - DNA, 696 bp, Homo sapiens
cggccgtcttggctccaccgcggcaacagcaattcttaatgaatagtgtgtatgatgtatgctctcagtggatctacatttctggggtctggaggatggtggccctcttctcacaattccactggacagtgccccaggcaacaaaacaactactgagaggcccgtggaaatgaagggctcgctggaccagtggaattcccacatcacacgcttgaggcacttaactactgaattctttcttctgaggaggcaagaattcaggttgctgcagacccgaccggatttaccgctggtagctcagataacttctgctgctggtaacaaatttattgatgcaagtaattccagcaaacttcaagaagttaaatgtcaggaagtagattttacccaaaagtaccagtctgaatacattttatccccttccagccccaggattcacactctctacaggttgaaggtggctgcaaattgataaatggcctgaagtctggtgtatacaaagaaaatatgacatatattaactgacattagtataagaatgtttttaaactgagttcccagatattaaaacaaaagtaatccagatgcccatcttcagtatcattccttttaatagtaatagttaatatttaaaatgtcctcattatgtctcagagatgttcttacctctttatatttattaaataatttatttat

SEQ ID NO: 473949 - DNA, 642 bp, Homo sapiens
acgggaggaacatgaaagtggatgaggagcgtgaccattgaagcacagcaccacagggaggggtttatgcctccggatgactgcgggcaggcctggataatatccagccttccacaagaagctggtggaacagagtgttccctgactcctccaaggaaaggagactccctttcgcggtctgctaaaaacatgtcagcagaagagtccacatatgatatctccttaacacctttccaaagttgggagaagatttccacttcctcctccatacctcttgggtcaatgctgccatcccccatgctgaccatggaattcattcaagagggtactgaaaatgcactattccggtccacccaatttccaacttgtatagaatcaaattcaaacagacatccacagtaagacagatgtaatgggcaaaatgcaatgtgtgtgtgaggacaaaaccagtcctacaatggtggagatgatggaaatagaagcctgcagaccaagcagacagggagaatcacaagctgattttatttctcataagttgagcaagcttctgccctggaaatatgggctttcttcccatatgacaccccaaagagtggggtccatctcaatatgttctaaatttttatattttgataatcaata

SEQ ID NO: 473950 - DNA, 1291 bp, Homo sapiens
tgctgattggtgcatttttacagaatgctgattggtgctcaagaagtcactctcaatgctgtgtttctgaagaaaagagaaatatctgaaagggtgaaggtacgctcaagcgtggtcattgaggacaagtcgacgagagatcccgagtacatctacagtcagccttacgaacaaggaactttagatctaaaagattggaaaagaattggtaaggaactaaaacaagcaggtaggaagggtaatatcattccacttacagtatggaatgattgggccattattaaagcagctttagaaccatttcaaacagaagaagatagcatttcagtttctgatgcccctggaagctgtttaatagattgtaatgaaaagacaaggaaaaaatcccagaaagaaacggaaagtttacattgcgaatatgtagcagagccggtaatggctcagtcaacgcaaaatgttgactataatcaattacaggaggtgatatatcctgaaacgttaaaattagaaggaaaaggtccagaattagtggggccatcagagtctaaaccacgagggccaagtcctcttccagcaggtcaggtgcccgtaacattacaacctcaaaagcagattaaagaaaataagacccaaccgccagtagcttatcaatactggccgccggctgaacttcagtatcggccacccccagaaagtcagtatggatatccaggaatgcccccagcaccacagggcagggcgccataccctcagccgcccactaggagacttaatcctacggcaccacctagtagacagggtagtgaattacatgaaattattgataaatcaagaaaggaaggagatactgaggcatggcaattcccagtaacgttagaaccgatgccacctggagaaggagcccaagagggagagcctcccacagttgaggccagatacaagtctttttcgataaaaatactaaaagatatgaaagagggagtaaaacagtatggacccaactccccttatatgaggacattattagattccattgctcatggacatagactcattccttatgattgggagattctggcaaaatcgtctctctcaccctctcaatttttacaatttaagacttggtggattgatggggtacaagaacaggtctgaagaaatagggctgccaatcctccagttaacatagatgcagatcaactattaggaataggtcaaaattggagtactattagtcaacaagcattaatgcaaaatgaggccattgagcaagttagagctatctgcctta

SEQ ID NO: 473951 - DNA, 646 bp, Homo sapiens
cagcgtctggagtggacctccagcaaactccaacagacctgcagctgagggtcctgactgttagaaggaaaactaacaaacagaaaggacatccacatcaaaaacccctctgtacgtcacaatcatcaaagaccaaaggtagataaaaccacaaagatggggagaaaccagagcagaaaagctgaaaattctaaaaatcagagtgcctcttctcctccaaaggaaagcagctccttgccagcaacggaacaaagctggacagagaatgactttgacgagttgagagaagaaggcttcagacgattgaagaccttaaatgacctgatggagctgaaaaccatggcacaagaactacgtgacacatgcacaagcttcagtagccaattcaatcaagtggaagaaagggtattagtgattgaagatcaaatgaatgaaatgaagcgagaagagaaatttggagaaaaaagagtaaaaagaaacgaacaaagcctccaagaaatatggaactatgtgaaaagaccaaatctacgtctgattggcgtaactgaaagtgacggggagaatgaaaccaagttgcaaaacactcttcaagggtattatctaggagaacttccccaacttagcaaggcaggccaacattgaaatt

SEQ ID NO: 473952 - DNA, 1054 bp, Homo sapiens
ctcttcagtcaccaagagcagaaagcctagtgtaggtgtaggcttgggagcagagagtggtgccctaagtatgcgtgcatgcatgtgtacatgtgtatgtgatatggtttggatctgtccccaccaaatctcatgtggaattataatctctgatgttggagaactacgaggaggaaaggctaagtctgctggtccacagagactgcagctgcccctcccactaggggctcaggcccagggagataagggttctgtccctgagcctctggctggagttgttagatttcttgcagggaggtccattccagtgtggaaggatgggtcagggtcagtcctaaagaggcattctggccacagtctgccacagctggtgggctgccacaccacactgctcttttttcctctctgtggatcacagcagctgcctaatcattcctgttgggagaacctggataccttggttgacagtgcgggattcacacagtattatggttcttttcaatgggagcctctgatggtcagaggctgcttctagtcagccatcttggccctgccctcctagggtacccttggtatatagcattgattctcgtttggagggctaaccagttagttataacaataatctttacatgccttagagctatcaaatcattttcagatcctatattaattactttgcttatttaattattcattaaacaacactttattgactgcttgtgatattactgtgtgagatgcctggaatataatgatgagaaaaaaacataatagactctaccctcatggaaattgtggtctggtaggttacaaagatattaattaaataatcaaacagtattgttgagtatcatgaagggaaagtatggaatgctttgaaaatgtaacaggggcatttcttggtgagtttatgtgataaaggtagtgtccttgaggaagagatatttagtcttattagtctaaaagactagtaagagggaaaatgaagaggggagatgggtgaaatagagtgtttttgtttctattgctgctgtaacaaattatcacaaac

SEQ ID NO: 473953 - DNA, 537 bp, Homo sapiens
gcacatctagcatgttttctagtgatgtcgacctgccggtgtacagaccacactttgttactcatcaacggtttactgtataaggaagatgtggtacatatacacaaataccgcacagccataaaaatgaatggaaccatgtcctttgtaacaacatggatacagctggagattgtagaaatctctttctccccagtgttgaaagcctgctcagatgtcacccttagaaacaacagcaactgtgacagtaaaaggcagacaatggaaggactttggctgctgctgggagaggagaaaggcaatgagattccagaagctgactgggaaatcaactgtttatgccttttaaatctactggaaaatccaaatgttccggaaatgagatggccctggatctgcatatctcctctaagggtgttaacaattgaactggagaattataagccttaaagtgttgaccttttttttctaaaatgtgtgaacaaatttcatggagttgaactggataacaaatggcaaatattggactatatgttg

SEQ ID NO: 473954 - DNA, 487 bp, Homo sapiens
cattgcctctttcagtgatatgaagttaaaaccaggccaagatgacaagaggccaccccaagcagttctccatgagtgacccctttgaaaattcagccactttgtctggccgcattccagcttatggcagcatcctctgcccatgccgttgtggtcttagacatggccgtaacacagaatcatcttctggccctggccatctcttcttcacttggacgtgtgttcctcatcccttttctcgaagttctgaggtgtcactgcagcgtgtggccagcagggggctgtggcatttagtggccttccaggttcaggatgtggtgggcggggtgcttgaaatgagattaagttatagcaaagctaattttgttgcatccgttggaattgatgagggatgggtcagctgttggggagaaagtcaaagcctggccttcctggcccttgggaaactgctttggaaaagggaacaaaatgactccctgccttagaa

SEQ ID NO: 473955 - DNA, 1394 bp, Homo sapiens
aataacaaaatagaagaattataacaatattctagcatcactactttgatgctttggggctattactaagtaaaataagggttacttgaagagaagcactgagataccatgacagttgacctgatcactgagatagctaagtgactactgtgtagatagagcatgcagtgtggatacactggaaaaagagcagattcacatcccaggtgagaaggagcaggacagtgcaagatttcaccacactgcgcagaatgaaattgacaagatgatcctaaaatttatctagaaacacacgggacacagaacagccaagataattttgaaaaataagaacgaaggactcatacttcttgatttcaaaactgactacaaagctacagtaattaacactgtgtgagactggcataaggatatgcatatagattgataaaataaaactgagaagcccttgagaaataaaccttatatatatggtcaactgatttttgacaataatgacaagaaaattcaataggaaaagaagttatttcaacaaatggtactgggacaactggatacacacatgcaaaaggatgaagttggaaccttacctcataccatatgcaaaaattaatgctaaatgagtcatagacctatatataagaattagaactataaaacttatggaagaaaatataggtgtaagtctttgtgattttggattacacaatggtttcctagaatgactcttaagcacaagcaaccaaatcaataagttggatttcatcaaaattgaaaacttttgtgcctcaaaggacattatcaagacaatgagaagagaacacatagaagaacacacttacaaatcatatatctgatacatatctgctttccaaaataagtaaaaacttttataactcaataataaaaacacaagtaacccaaaatggaaaatggtgcagtcactttggaagacaatttggcagtttctcaaaaagttaaacatagaattaccatattgaggagtatggctgcaggccaaaatcctatgtattatctttcaggcaggaccctagacagttacaaggctttgcccggcagacctcattgggggaaactgccatctccacatcagacttggtacacagctagtatgttacagcttctggagggatttgcagccaagaactcactgcctggtccctccacccccactagccctgctcataggcttctctgctttcctagctcaggcacttccattcagaggcttcagttcaggcccttttcaggagtcccagttgagacctccttagggagggcttggctgaggcagtgctttcagctactagtgatacttctccatgttgaatgaatagttacatacatcgtaaaagtataaaaacatacttttt

SEQ ID NO: 473956 - DNA, 524 bp, Homo sapiens
tgggaaagtggaatggtattccatatatccgggcttttgtactgtggttctaagcagggggcctggttaacgtgtgatgccctcctttggtatgctgagtcagatgtcaaagtaagggcaataaatgtgattcaaagtacccttcgaaaatgttacctggactgggatggatacatctctattacagataattttatgggattgcttcctcagtgcttctcaggaatgggtcaatttgcctccatattcttgctactggggaccctgtcccctgaggagaccctattggaaaaagtcttactactctatgctttgtctctcttctactacctgatcctattcttgatcacaggaagaattcatgcatccgttgccccactgaactctgagagccctaagaatcccaagcacacagccttctcttcacaccactaaggcagctaactgtgttctcactggctaaatttctcttggtggagaggggaaggaatatctaattctgcagctggaaaatattgcattag

SEQ ID NO: 473957 - DNA, 706 bp, Homo sapiens
cttgtttgcccaagattgcacagcaaggaggagtgagctgagatgagattcgaccccaccctgccaggtgttccaggtgtctctgctgagctgtgtagcatggcccctcaggacctgggtatgagcaagagcagcctatggggggcaacagcacttctcagtgggcccaagagaggcccttgtgaggactttactacattgactccctggttcccaacagcaatgtttttaagtgaaattgcaaaattttcaaaaccaaattacatccactttaattttgaaagcaaaagcaaacagatgtcctgcagcctcttcccctgggagagggtattgagatccaataaaccacgcatcttctcttcctcgagagaagctgggaatcaccacagaaccaaatgcagctctgcctctgtgagagcaaacagttttggctgtacttctagaagtccagaagcaaaagtgaccagagaaaagcaggagttataaaatgcttatgtgagttgaagccattattttctgagcaatcaaacagatcatttatcagcaaaacctactctttccttttatactcatagctcattagtttatataatatttaataaagttatttgactatattagcaaatacagccagcactgacacttttggaaacaaacagctgactgctaagtgtagtagccacgtgttggggtcaggaggatgccc

SEQ ID NO: 473958 - DNA, 737 bp, Homo sapiens
aacgtgcttgtgaggcctctccagccatgtgaaactgcctttgcctaggctgcctgctctgttagagctgccattgcacagtctcatcctcctggtccacacctgctcatcctttgagacctagcatgagcatcatagcctcatcgtcgtccaaggtggctgcaaagactcagtacgatgaggacaagagcacatcccattatgccaatcctaaccaggaagccagaggcaaggaagcccaggctcagaacaagacaaagaagtgtggagaagggatggggatgcaggagctgattatgctgtcaagcatttccctggggcccatgcgaagccaggtcctggtggatactgtacacactaagcctaaagataggcctggcccatatgctgctggctttgctggcacctggacacatcttctggagacttggagattcatctgtgacacctgccaccaccagtgcctgcatgcaccatccaggagcctgaggacaggtctgccctgcctcccagtgcctctgtacatcttccaaggagctgccatgcccgccattgcaggcactcatgcacactgtctggggccagagggtggtctatcccacctactgccactgcccatgcatactgtgcaggggtcctacaaactgaccagctctgcctgccactgctggtatacatgcaagccatccggggcctaaagatgggcctaccccaactgtcactcatgcttgcacata

SEQ ID NO: 473959 - DNA, 635 bp, Homo sapiens
gtttcaggatgccagttaatatgaacttaataccagaactaccaggaggagaggctacgtctgctggtccacagagactgcggccacccctcccgctaggggctgagacccagggagatctgaattctgtccctgaacctctggagctattggagatcctgcagcaggaagccctacccactgaggaaggatgggtcaaggttagacctgaagaggcactctggctgcagactgccacagtgggtgtgcagttgaaattcccagtgctggctgctgccacgcccacaaggagctcaaatggcttagacagcaggcagctgcagcagttgctcgttgcccctccccctaggagtttggtaggcttaagcaggttccagctaaaaggctgtaagaatctgcatgttctgggacactctttgaagtgttaggtttgtttatgaatgtttgaattttaaaaatttagctcattttaagaagaagaaatgaaattatattttggatagctttttctatctccctaagatttcatgcttaaacactgcactatttcaatcttagcagttagacaaaatagaatttttaaactcaattcttaaagtaattcactcactattcttattcaacaaaacactgaa

SEQ ID NO: 473960 - DNA, 1002 bp, Homo sapiens
aactcagcttccaaaagtactaggattatagagctgtgatggcttggagaaacggtgtaaaccggcagtgtaaacaagagcagggcatatatgagtagtcgagaacggtgaataggagtatgactagacagaagatagtagggatgacaagtttttggggcacagtccaagttggtctgatgtctggaatgagactggggcttaataaaatggagcgtccatacaggagctcaaatgggctgcctggtggaactgccatcaataaaccaggtgtgatcagggtgagaaacagggaagaaggaaatgtggggaaatggggtgaacgtcaggtggatcagagagatgcagtcatgagggtcaagtgtggtatcaggaataatgtgagaggccacattgaagtccgagccaggaacaatggtaattgtgggagactcaacaaagaggcctctaaaagtattagggcggcagcagccgctgcatggagacatgatggccagcctaaaacagtaaggtcaagttatttggacaaaaaggctacaggacgtgatcccggtccttgtgtaagaattccgacttcacagccctgcccttcggctgtgtgtaatgaaaagggttgggatgagtcagggagagctaggatgggggcagcctctaaagctgtcttcaaggaatggaaagaggagtggggaaaggatttaggatctatggggtcagctaggtttccttttgtgagtttatataatggttttgttaggatggcaaaaccagggcttccgaggcaatcgggcagtgtcagtcttcagccgctaagccaagaagatctgggaaggagtcagcagagagccttgggccagagttccaggggctctgggagtggctgccagggtctagggctgtaaagcatctcagggttgctgccaaacgagtcatgaactgggctggatttttatatttgatgaaaaagagcctaaatgctatctgatttgggataaagaaaaagga

SEQ ID NO: 473961 - DNA, 2598 bp, Homo sapiens
tctctctctctctctctctctctctctctctttctctctctcagccccatgagaatacagattgtttggttatttgagttgtttgagattcgatgtgaatttttggatgagtttttctatttctgcaaaaagctgttggattttgaatccaacatcaacctagacaagcccttgctggccactctacaggttgctgtccaactgctcagtgacacaggccaggccatactacatttgcaagaaaaaaatgagattggaaacacaggtatatgtcacttggggatgagcaggcacccgcagcttcaaaacttcatggaaggggtagtccttgtgggaggaacagctcaccaaggcacagaccctccagttcctgttgtagctgagttgctgagcgtcttctggcaggctcctttcaccaggaccttcttatggtatgtgcaccaccccttgctgatgagcctcatgcttcaccacctgctccctaagctgcttctgaatggccacccctacctcgttcttattctggtgcatgtaggcacagtcaatatggcagtacctgacatcgatcgccaccttcacagccttggttacctagccaggaggggacttccaggtgccaagccccaggatgggcatcttggtgctgtcggtgaggacaaggtggctcgccatggctgccgcactccccagacccccgcccggaaccatacattgaaatgtttaatatctaagttatcaggaaaacccaagagagttcctactggggcactgcctggtggagccgtgagaagagggccactgtcctccagaccccagaatggtagatccactgacagcttgcaccctgcgctggaaaaagctgcacgcactcaaggccagcccatgaaggcagccgggagggaggctgtaccctgcaaagccacaggggcagagctgcccaagactatgggaacctacctcttgcatcagcacgacctagatgccaactccctaggtagccctcaagggaaagtatttaatgaaccctctttagccggagaaggctttaaaagagaagactatgccaaattttagaagagcctatcccttaatcaaaaatgtcacacagggctgctagatttagccaaaatatttgaaaagaaacagaaagaaaacaaagaaaaggaaaaaaatgtatggaatgatccaatgatctttgggatatgtttatcctaaaaaattatttgttgtttacttgaaatttaactatgaatcctgtaaatgtttttgcatgtggcaaccctacaaaaaggggatctagcaacattttccatggagatagtagcattttgttatcttttctacccacttccctcacacgtgctacgaagtttccctgtccacaaaattttcagatctttttccatccctatagcatccagtcctttctaggacttctccatccattgctgtatcctataaatcggtgtagcttctttaaaaaataatggggtggaatatccactcgttaggaagaggaaggaagagagaagactgttgtgccatttgagaaactctctgtggagtgggtaaaaacactctaaacattcccaaattaatttgggttctattatatatacagaaattctactatctcatcagagtgactaatctttcatttctaaagtactgatcacagtttttgcctatatatcagtgaaatttaaaagtaagttttgccaaaattagaaattagttctatgattattggttaactaaattagctctttggacttaaattgttttctagtctgttttacactttatcacattgtttttattttccttcactatcgctatgttgttctaaaacttagtgtagctcatttctttagaaatcaaagccaaaccttgaatttatagttaatcatgtttctaatcatcaaataaatttctaattgtcaaattcacctatatgttaaaacacgagaagaatgtgattgcacagtaatattcagagttgggaattatagacaagattcattaaaacattgaaacaaggaaaagagctattaaaatgccatttttttgtgttcttgagaaaaatccaagaattcttttttctaagtctttgtaaactaaaaagggctttgacagctgattgtgtttatatttcatggaaaatttcaggtttattgttagaaaattgtaatgctattagcaataatggcaaagccaaatgtttacaatataattaccattctcctagaaaatttgtggttttggagaaagaaaattagacaaataacctctcaaaagattacatgtggctaggacccttgtccaaatggggagataatagtagcatttcatagtaatcattataattgaaaagtgacttaaggatctttggctcctcataattacattgaaggtggtttttaatttgggggggaacattttggaagagatagtttaataaatatacaaaatatcgaagtaaggaagtcactgttctaagattgaaaacatttgccttgaaatatacattgatttttgtataggttcttccttcaaatgtttccagttattctttctgtctgtttcaaccaccaataa

SEQ ID NO: 473962 - DNA, 481 bp, Homo sapiens
tttggatagatatttcacagaatgcgcaagtctacatccattcaaaatattcatttctttgttgttttggcaaaacagcttatgaagcttgcttttgataactactgccgactgatgagacatcagaaagatgtggtcacttctaaaggtggctggcctgcccagaaagccagaacaggagccaaatttgagggtagtgccacgggttatattatattctccaatctgctggaactggtcttggcagcagagtttgagagatacggaaagtacaggaagaagaaactgatactacttgtgacaacagacacacatcagtggttgtcagcagagacagaagtactcagtggagacctggtgagaaagcggcagtgccctgcaggagagctcatatgggacatactccagggacaactgaaaagtcgtgggagagggaattttgagagggcgctgatagcttctacgatatgatgaacctcgg

SEQ ID NO: 473963 - DNA, 1289 bp, Homo sapiens
aaaccaaaggacaaattccctactggtcagcaagctgtccccagtatggatccccactgggacctcgactcaaatcatgcagactggagtcataaacatctgctcacctgtgttctagaaggactaaggataattaggaaaaagcccatgaattattcagtgatggcaagtgccagctcatgtatcaccctcactgagccccgggtacatttaaccattgagggccaggaaattgacttcctcctggacactggcgtggtcttctcagtgttaatctcctgtcctggacgactgtcctcaaggtccattaccatccgaggaatcctgggacagcctgtaaccagacttatcaatgaggcactaattcctccatatccagttgtaacccacccctataccctgctctctcaaataccagaggaagcagaatggttcactgttctggacctcaaggatgccttcttctgtattcccctgcactcttacctccagtttctctttgcctttgaggatcccacagaccacacgtcccaacttacatggatggtcttgcccaatgggtttagggatagccctcatctgtttggtcaggcactggcccaagatctaggccacttctcaagtccaggcactctggtccttcagtcgaaggcccagttttgcctacagcaggtcaaatatctaggcctaatcttagccagaggaacgagggccctcagcaaggaacgaatacagcctatgctggcttatcctcaccctaagacattaaaacagttgtgggggttccttgtaatcactgccttttgccaactatgggtccccagatacagcgagatagccaggcccctctatactctaatcacggagacccagagggcaaatactcatctagcagaatgggaaccaggggcagaaacagccttcaaaaccttaaagcaggccctagtacaagcgccagctttaagccttcccacaggacaaaacttctctttatacgtcacagagagagcagggatagctcttggagtccttactcagattcatgggacaaccccacaacaagtggcatacctaagtaaggaaattgatgtagtagcaaaaggctagcctcactgtttaagggtatttgtggtggtggccatcttagtgtcagaggctatcaaaataatacaaagaaaggatctcactgtccagactactcatgatgtaaatggcatactatcagacaactgcctacttagataccaggcactactccttgagggaccagtgcttcaaatacgtacgtg

SEQ ID NO: 473964 - DNA, 1169 bp, Homo sapiens
agatgggatggcggccgggcagagacgctcctcactttccagactgggcagccaggcagaggggctcctcacgtgcttggggtggcactgacatgccagcctcctgctacctcggccccttctggactttgggtgttgacgatcatggaagggaggctgaagtggggctaagggcagcctggcatgagcctgcaggtgcccctcagcatgaacggcctgggtgctctgaatggtggccagaagcagaaaggctcctgggtggaaaggggcaggtccccagtgaaaccccaccttcaagccagggatgacctgaagtctgggggccaggctgccagttccgtggactggaatgagaacttaacggtgttttttctgggcctgcccatggccacccatggaccaatcagcacatacttcctcacctctgaagcctgtgtgggctctgggctggtagtgcaagctgagcacagcccaccaggccaagtgggtagaatgagcccagtaggcccaaggaaaactcagataaaggcgccactggccacagaggtttcctgctggcaaagtgacaccccaaggattcggtgtattatacatgagactgtgatagagctgcctggtctattctagtccatgggcaatttttttgtttctgcactaatgtcatattttcttaattatgagagctttataccaagtcttgatatctaaaaattaaggtctcctactttttttcttttgagggtctcttggcttttcttggcccttcatgttatatatccgctaactttcatagtcaatggtatgttgatctaaataggcaagtttttcattagtggaagcagaacattcgtagtaaaaaacttttaaagattttgattgtcataacaaatggccctctggcataggtgataccaatgtgtactccataaggagattgtaataatatttgaaatggaaaatgactatatcagactatatgtgtgttttgtgatttaatttggggaaaaatatctatttcatgcctctagtatttctcaaaaaacatgttgaatatgagtcttattaggttttgcttgtttggtgagtaaaaatgccaagcctcatgagaagcagaatgtattttctcttttattgtaactgcatgtacaatacctgctatggactgaatc

SEQ ID NO: 473965 - DNA, 679 bp, Homo sapiens
agctagcacaccaaatcttgcatgctttgctgcttagaaattcttccaccagataccctaagtcatcactcaagttcagtcttctgcaaagtcatagggcattggcaaatgcagcgatgttcattgctagggcattacaagagcaatcttcgctccagttcccagcctttgaatctgacaccaggaccagagggagagctgcatctgccgtgggagtctgggctgtcaggtgatgacaggggcttgcccttccaaggggagatcgcctttggcaggaagctggacttcaacctgcaggctcttctggagcagctcagccaggatgagttgagcaagttcaagtctctgatcagaacaatctccctgggaaaggagctacagaccgtcccccagacagaggaatcacaagaggccatcactggacctggttttgagctctggcaaatagcatggaaaagccaaaggtaaaattatatctctacactgacttcggcttcgtaaattatgtctgctcatgagcaaaggatgaaaggaaatgctacccacaaaaaaatttataaacagatggcattagactagagaaatttccatttttaaattttttatattgttattacacattaaatagttggaaatgcatgaaagtgtttctgcattttatgaatgtgaggctttcaga

SEQ ID NO: 473966 - DNA, 636 bp, Homo sapiens
atctgtaggtttctatggcccggaaatctgggcacagcttagctggagcctcttgcttcagggtattgccaatggtaaattggcatggagagtggggaaaaagtgtgggaaaaaaatgtggaagtggctttcgaacaggtcaatggatggagattggaaaagttttgagacagatgctagaaaaatactatattgctggaaatagaatgttaagggcaattctggtgatggctcagaaaaggagagctataaggaaaacttattttcttagagattttggtggtgagtttccccaggcccctggaagtccagagatgcagttcttttcactcttcccttcgctttccaaaggcaaaggagtctcacccatggccaccaccaccacagcccttggggagcattgccagactattactgatgttcccttaaggctcgagggctcttctatcggcttgtggaaaacaacaaatgtagccacaattatctgagatttgttattaatgcatgattttattccttattcttaaaatattggttcatatttgaaagtgaattactgctcagttttctcccctatttaaaaattaattttcattgaattattttatttaactataaactttgtgttgtgtcttt

SEQ ID NO: 473967 - DNA, 776 bp, Homo sapiens
tcatcagttaaggcaggaacaggccattttctcttcttttgtggtggaatgtcatcagttaaggcaggaaccggccatttggatgtcttggggctcctgggcctgtcagaaagttacatctttacttgccacaagaacaaaccctgtaaagggactatgcagacaaggtatgaggctagttttcccaaggggcttttattagatctggccacagacagaagtacagaggtaggccctatgcaggcagataaactgcttgaaaagccactggaaaactcagccctgaggtatagcaggaacaaaaagtgtatggtaagtcttaaggagctggcacggccagagttccaattagtgcctttcctagaagtgtgccagcagacaggggaaggattggaggtcagccaagctgatgtagatgcatatcaagaaaaatggtttgaagcaaatattttggatatgctcttacaataaaaatcatactaatatttcatttctgtattacttcatcaacttcttcattggaaaatcagaaatatttattactgataaaatttattttttgttttatgtgaatacaaactgagttatagtgttactcattataattttagtttagaatatctaactttgagttaaaatgttacttgaattccattttaaactacattttcatataattcgtttctcagcataagttgacaatatggcctaagtagtgaaaacattgaagagaaccaaataattacatcaaataatatttattgtattttcagcat

SEQ ID NO: 473968 - DNA, 633 bp, Homo sapiens
ctctggagggggtggagggtgggccatgtttgcacgatcccgtgttatggtgtggacagtggaaacggttatgttcagtgtgcctggactattggagcctcagagtgaaggtcgattaaagtacactttaggaatggttctgctgcctctccttatgacacagcagtctaagactactgggggtaaccctctgccttccattgggtttcctggaaacacaattaaagatgagaagtttggcgctgaaggtttattggggagcactcttggagatgaggatgagtgtgttggtcctggagagcagcccatgacagagcaccacagtgtctactcccctcccctcaaggggcttaccttagcactctccagcttgcctctggttccttttgagggcagtagtgaaaaagaaatgcaccctttacttaaattctacaccatccctattttgtgctttggtttaaataactggctaagccattgaaataaatgccattttattgaatggggaaaatgtagattgattccatttatataaataataaattctctgaacacataaaatatttcttgagctgcattagtgcacatttgcatttctctttaatatgaaacagctgttgtatttttcatttt

SEQ ID NO: 473969 - DNA, 775 bp, Homo sapiens
aggaaactgggtccctgcttagagtctgatgcttgagatggcagtgacttctgccaaccacctttgccaaagatattctattagtcttggttgtttattggctaagggagagctcccttcatgggcatctggcaagctccctggtgagaagagtttgtcttttcctttgcaccccgaagcccctgcctgggctaaaaacgtgcaggaatgcggcatttggagaaattacacctctgagctgccaggatatattcaaacagccaagaacagaagttggcccaactgggacgcatccgtggagcagcaaatatgcacactcctggcagtcatgcaagcaagatggtcaacgtcagatacacaaggctggcttgagcagtgttcactggggaaaattcatggacaggggagcagaaacagaagaaaaaccacccaccccaatgtcttgcacactgcaacaactctgtgaacactggtcattattctactgttgttattggtgctctttactggccaaagctcagtgggaggactactatctaacacaagtgccctgcaggacagaaagaacaagagtgctagagcttttgtgcatctgggccattttttcatttgacatatgaagaatctaagaacctgcaaggtggaagtgacctgttcaaatagcagcaaagtcaaaagcagatgtagctctctatctctgagcctctaataaaattaatctaaatagttgtcaattagcagttcacagctgtattttgtttaatatacctagttt

SEQ ID NO: 473970 - DNA, 1199 bp, Homo sapiens
tcttaaaatcttcagctgatattgctcttctctacaacacagttgaaatgaaaaaggattactttatatttacttgcatttttccttcttggaaacaagatgtggagcttcagcagaagaaaattggcagagacagacaaaaaggcaacactgaaaggagcacactatggagagtggagagaagcaagtacaaaaagaaaagaaatgtcttaggagaagaaagatttagaaagtttttgctatataagagtatgcagattaatatgcagttatccattgctggagatgaggataaaaatgatgagggtgacaatgacaagctttattttattgtattacaatttgatggtattaccattttgcaagatgtaaggagcaaatgcataaattcacctatgcagagagcagacgctgaattcctggaacgaaaggattgccagcctcatcaaggatctgtcacatgggcatctctggatataggtgttcacattcttctttgcaacctgttggttttcaagacagactgtcggcaagcaaaatgtcagaggcaagcactgagatttgacccatcagccctagggaagctgactctttggttttcccccatgcaccttgtcttcttgatatgcctgcaggggttggggggaggtgggtgggtggaaaggagtactggtttagggttgaagcaagtctaaagccagcttgctctgggtttaagatctggcctccactgctgtttctccaaagttgggagtcagtcatattcctgtttaagataatcttaagtgatctacattgaatctctcagtaggttattctctttaatccttctgaatatgccaaatggagagtttcggtttggtgctagaattaaatgcccctctaatggtggctagcctcactttttaacacagagactgaatctcactcctagttgctaaggcaagcaactatgcagagctggaaatcatcagcattgtttttctcttatgtttatttttatgcttaacttctaattacaggtagtacttgtttttctttgaggctgaaatataaagtttaagatatatatactaaaattcaaaaagtgaatcaagtaaataatgctctaggtggtccacaaagataagaaaaatcatgacaaaatgggaatgaatgcaatttggggaacactgtattcgcccaagtgatgtttattt

SEQ ID NO: 473971 - DNA, 724 bp, Homo sapiens
tcagggtgaatgggagggtcaaattatggcgttagcttgttctagaaagtttatctccgaggtattcttttggccacattttcatccgattagttttgtgagccagacctggaaatcaggactaaattatattctgtgcctttgtcacctctttacgtccctgcggaaactgtcatctgccagcatttggagaagacgcgctctcctacaacacctcttctgtattcaagtcatctttactacaaaaacaaaagacatggagccccttggtaacgggccatgtcaacttggagctaagatagttgttcggaagagaagtacaggtgtagaaacacagcatgtgctaaaagtagtttctgtggaaaacctgatccttctattccctgtggttactgatgatttaattactctgtataaaccagagggacgtcaagataggacaaggagtgggtcagtcttgggtgagaggaaggattagaaagctggagaactagatgagctagatttcctggcaaagttcaactaatggcagaataaggtgttccatggaccatttcccagaaaacatccataactgatgaaaaatataaagaaactcatttaaagtctctggaaattattgtaatggaatatgacaaatcaaaagcacttatgtgagcaaatctgaagaatctccctaagaacatgagagtctgtagcatgtcagacacagcctgctatctat

SEQ ID NO: 473972 - DNA, 674 bp, Homo sapiens
accagaaggaagaaactccgaacacatgcgaacatcagaaggaacaaactccggacacgccgcctttgagaactgtaacactgcgagggtccgcggcttccttcttgaagtcagtgagaccaagaacccgaccaattccagacacaattccaaactctttaaactttcttctataattttccattgttttctacattgctgtgcaattaaatatttcattccaaaatctactcaatattttatattcctcgacattattttcttcatgccagaggaagtaaagttacttaaggaaaaggtgcagaagatcacagaggaagtggaacatgagctgagccctgaaaagagaatggaactccaaccagttgtggaaggatggctggcagaagccttcagcaatggctgtcttgcaaaaacaatgggcttctccatttctgatgaaataggaaagctgtgggaacttctgtgtcatggcataggaattgtgttacccatggtgcaccgcaaagtatacttcataatggtggacattaaaattaaaacaagaaaattatcatacatcaacctattgttagtttcatattaaaatatgtgttgcctaaagttagatttaagacttaatttgaaatatagatgcatatacctttaatactgacaacagtcataacgtcatt

SEQ ID NO: 473973 - DNA, 683 bp, Homo sapiens
ttatattacaaatatgtcattttctgaacttattttaaatgaaattaatttgaacataaaaaaattgaattatgttgcaaaaaaaaatcaggacctaaatgaaaacttctttcattttgtcaattgtacctcaaaatccacatcgccaaaacagccacatgtcacacaaggaccaacaattttcaaaatatcttctttgtttgcattttggattgtgaatttaggcagaaaggggtcccacttctgcacaactgcttttgcaattcgtgcaatagccaccttcctggtcctcttttcttcagttcacacagacctaggcaaaattacaccatgtcagttttctgcttggaactcttcaatggcttatggatgcccttggaccatcattctcagcaaactatcgcaaggacaaaaaaccaaacaccacatgttcccactcataggtgggaattgagcaatgagaacacatggacacaggacagggaacatcacacaacggggcttgttgtggggtggggggggtggggtgaggggggagggatagcattaggagatatacctaatgctaaaagacaagttaatgggtgcagcacaccaacatgcacatgtatacatatgtaacaaacctgcacattgtgcacatgtaacctaaaacttaaagtataataaattaaaaaaaagac

SEQ ID NO: 473974 - DNA, 588 bp, Homo sapiens
tgcagggaagtgagaagggtgaatgtgtggaaatggactgtgagagctgggacaggcactggagtgggatatggctttttctcagatgagaggttcttggacatgtttaaacactggttgggggcagggtaggagagacagaaagcctgtggctttcatcctcaagggctccatgcgaccgctgcacatccagcacattgtcattgacaccatgaaccagtgcagtgttctgcaagacgttcagatggcccagtctccttcagactgtgatgacaaaggatgggaaaggcccagttccaaggtgcaaggctacttgtgccagcaagatagcagaagcaggacaagagctggctggaagacacctaccgtggtgggaagacatgtacccgtgaagatcgagaaagagtccatccgggtacaacgtagcagttacgtcagactaggacacttcctgtttacaggagactataaaacctttgccgcgtcctcacttggggctgatgccattttaggcctcagcccacctgcacccaggcgctcattaaaacagcatgttgcggccgggcgcggtggctcacgcctgtaatc

SEQ ID NO: 473975 - DNA, 840 bp, Homo sapiens
agaagatgttaatattagagccctgtttgtattacagttctttctgccccaccatttggtgggtcccaagtccttgtcctgcatccaggaacaatgaggtactcagacaagtggaggctgctgcagctcgagtcatggttcaaagggctccaagtacagcttgggccactgcttcagagggtgcaagccatagccttggtgacttccacatggtgtgttaagtctgcaggctttcagaatgcaacagtgaagaaggcttggcagcttccacctagatttcagaggatgtatcagaaagcctgggtgcccaaacagaagcctactgcagggagcccctgtatgggagtgcccctatatgggagcccctgcagagagcccctacatggcaagtaccaagggggtaatgtggggttggagcccctgcgcagagtccccactggggactatctagtggagctgtgggaaggaggctaccaccctccagacctgaaaatgctagaaccactggcagcttgcaccctgagcatggaaaagccacagatactcaactccaactcaagagagaagccatgggagctgtattgtacaaagccacagggatggagcagtccaaggccttgagagcctatcccttgcaccactgtgcccaggatgcaggatatggagtcaggattattttggagctttaaggttgaatgtctccttttctgggtttcaggtttgcatgggacctgttgctgctttcttttggctgatttctcccttttggaatggaaatatttacccaatgcctgtaccaccattgtatcttggaagtaaataacttggttttgattttat

SEQ ID NO: 473976 - DNA, 4589 bp, Homo sapiens
agagggtcagccatttgccccagatcacgcagctgctgtgattgaagacaataggacaacaaagcctgggggtggagagggtggcagagagggtcagagggcgatcgggccgcaggcctcaaacctgtgggcactggcaggtgttctccctccgggccactcacatgaaccacctcaggagacagccctcgaccaggtccagcctcgagtctgggtcctgtcagggtcttggtgttggctaagggggtatggtgggagtttctcctggggttcagggttttccaaagcaactcctgcaacaacacaagcagcgaatgagcttggtctctgaacatccctgcgtcctgtggttggtcactccctccttggggttccttattttggtgtgtgctagatgctgtggcgccccccagtacacctgcctctgtctgactccccagcctgagtctagctgtggctgtgcactcgggcctgtggcttgcctgaagtggggaatccgtgtccctgagcaggccctgatcaaggggctaggtgttgatgctcagctccctggcccctggggataactcagctctgtgctgcgtcaggcaccagctgtccactggggtgactggcagtgatctctgtgctggccctcgccttcccagactcacaccctctccctgctggtgtgcctggtccatccccagtgacaccctccactggggcccttgtctagggctggctttgggagagatcaacccaaaactttgccttctcctggttcttaagataataaatccatattcagggcagaaagatgaaaagttggaaagggaacaaggtaacccaaatcaccccaatcccagtgacttgtgtgcgctccctccgggcctttcctcctggcagcactgtaactggcatttgcacagtgccggctacggtcacgcatgcttatctcctttctcctaccagcaacttctcgaaggagttactgttttattatccccatttcacagataaaggaactgggacatagaaggttcagggaaccttcccaaggccacagagctaacacgtaacaaacagaaattctaacccggcaaatgtgtgactggccttaaaataggtgtattttacaaaattggcatcacactgaccttccaattagcttgccatgagcgttttcctgtcttaaaaggctgtgaaagcatgatgtttacagttgtttgataattcattttctaagggaactccagaatttattttttgctcttctctgttttctctctctctcttctttttctttctttttaaaattgctgttataaacaacaactaatgaatgtctatctttgggacattttaaagggtagcacatcttttggacaatgtttccccagctcctccctttccccccaacaatagcacttgggggttaagagatagtgtggccccatttgcccggtcccctctcccacactgtgtactccagcccagtgactgctcctccattcttttatatgaaagaggtggtgtccttgtcgattttctgctgcttataaatagaatacctgaagctgggcaatttaaaaagatgaatttgtttccatagttctggaggctgaaaaatccgaggtggaggggccgcatctgtactgccgcattggggattaaatttcaacacaagttttagaggggatattgaaaccgtagcagctggtatatatgtgctattctgtacctttcttattttacttgataacaggtcctggagcccttttcttatcagtactcagagagcttcctctttccaccctaacagctgcatagtattctactgtgtggagcaaggtacttaaaatcatttccttgagcgtcactttccaggttcaactccaacagttgtgaagtgcagccatgaagaggtgggacacagtgaaaaaggtccttccagtcaactagccatctcaggggcagcttccatcctgaagtggcctgcccactccctctgatagctgcactacctctgataggcatctcagctggcccacctctcactgccagctctggcacacacccctggcctcctgtttgtgtggcactttcgctcctgttctgggcccctcagtagcttgtcttcttagccaattttgggcctaggctccccacccatgagctcggaagtcaccacttcttggagttgttggagagctagggtttaatttggtgttgagtccaggtcaaataagggaaatatccaaggctgagatataatcagttcttatagtttttgccaatcgaatgggcaaaatctggaattagattttttattttaatttgcagttgcataattagtgagattgagcttcttttcatatgtttatgggctgtttatttttctctgcaagtaaatttcctgtttatgtcctttgccattgtttctgctgggttgcctgtcttttgcttattagggacttctaaaaacatctctttagagtattaatgtttttcccgtaataaatgttgtattttctcccagcctgtctttcgtgttgaatttgtttatggtgtcttttcccttatagaactttccattttatatcgtcaaaaggatttcctttatggcgtctcagtctttggtattgcttagaaaggccgtttctgctccaagttctacggagcttgtgccacattttaagcctgtgcttttatggaatctttatgttcagaatattgatctatctgaaatttatcacctcatatgctgtgaagtagaatgccaattttattgtgtccaagattcccgtatagtcaccaagtggttcctgaactttctatgtcctgttgctgttattatttttaattctgggctgttcctgtgccttccacatgacctgaaggaatcagcttgtcaagttcctcagaaaaattctgttgggttttgattgctatcatacagaattaacttattaatgactgtatgtatttactagaaaccaggggccaatattgagttaattatttatttattggacaccagaggcaaaaattaagttacttattactcttcatttcacggcccgctattatcatccatgcaatgctcttttcttactttgtagtaattatttccccttttccctcctaattcccactcctaagtaggtacttacttaggagtttgtttgatagttgtctttggatagttatcagtccttatgaaatatttagtgttgttttgtgtcaagtgcaatacatttttcaatgatcgtgttttaaaacatgtctagagttttttctggcttcctaatttttaccactgtggtggggtaattgttttaatgtgcattttctgattacgaatgaagttaagcatctctccatgtacttaagaactatttgggtttcccttgctatgagttgcctaatcatatcgcttatccttttgctgttgggttgattattttgttgttaatctgcagacatttcttgtatattcgtggatgttagataatgcaaatatcttctgcagtctatcacttgactctatctttgtgtgcctttatccaacaaaatgcttcatttttatataatcaaatccatcttttttctactttgtgatttgtgcttttatgtcttaagaggtcttcctccgcccttagttacaaatatattctcttacattgtttttttctattaggttgaccttttatatttaggttcaccttagtaaatgattaatacataccttggatatgaagttcccttagtatatgatcaaaagtagggatttaactttattttgccacttataatgagtcaatttccctactactgtttccaggacacactgtgctgaacagaagtgcctggtcaggcattcttaattgatttctaattttaaagagaatgtatttaacatgtctatatataaaggcttttgggtttgggtatacaccctttatcaggttgaggaagtttccttctattacttttcttggtgttcttatcatgcatagataggaattggacatgaataaagtcatttctgtgtctattgatataatcctgtgacttttcccttaggttattaattggtggatttcactgataaatattctaatattaaactttcttttaatttcttgcataaatcctattaggtaaactactttttcaaaaagggaattgttcatcaaggtgtaacttgcacacaaaagggagatgaaatggtaaatgaatgcaacagtggaagcagcgtctccatcaagaagcaacatgaccatctgtctggaaacttctcagccccttcccaggtcttgccctccaagggcaaccaccgccttgacttctaacaccattggttagctttgtctgcttctaactcttatgttagtggaatcatgagatgcattatgttttaaaatattctgttgggtttgattcacaaatattagtttaagaatctttgcatttatattcataagtgacatggcttgatgatgttcttgtcttgtcctgttcttctccaatttgggattgagatttttctagcttcataaaataactagggcagctttctctcttttctttgtttctgaacaact

SEQ ID NO: 473977 - DNA, 1811 bp, Homo sapiens
tctctcagctcacctcgccctctccattctggaagccctggcacacagcacccttttctgtctgctccttggagtaacagtagtagtaggtcccatttgtcatgctcctggcatgtgccatgggcatcccgttcatcatctctgattttcgcagctacctggtgatgccctttgtgcagatgataaaactgaagctcagagagaccaagacttcacagactccagagccttgccccggccctgctcctcagtccctggcactgccctccccacccccacctgggccccccacagagatcagcctcttgacaaccatcagctctgctggagtagagggaatttatccgcttggctggatcctcctccctgccacggaggaccatggcaccttcaattacaccaggaggcccccagaggcagcctgcttcatacccatctccctctccacctttctttctaacaagactctcgatgggttcaagtacccctcctgcatgctcccagcaagtcctgatgagtctaaaccagccaagacaatcccattcctcatgctagaaattgtggaagacgcaaatccagccactgagatgggaggttgcttctgagaaatgtttgttttttctttcttttattaaggtatcacacaaaataaaactcaccttttatactgcacagtctgatgagttttgacaaatgcatacaaccacataaacaccactataatcaagatatagaacaagttcatcacccccaaaactacctgtgtagacactatctcccctgccccggctcctgcaaacaccaagttgatttctgtctccacagtcttctgcttttctgaatgcctaggtagctttgtgaatttgacttttttcatttggaatttgtgactcagccatgttgctgcatatatgggtagtttattccttttgattgctgaatagtatgccattggatgaggtaccagagtttgtttattcatctgccagttgagggacatttgagttgtcctagtttttggtgattatgaataaaacgtccataaacatttagatagagtttgtgtggacatatgttttcagttaacttaggtaaatacctgggaatggagttgctgggtcatatggtagacgtatgcttagcttgataggagactgccaaattgttttccaaagtggtagcctattctgcatttcccctagcagtataaatatatggaaggttagctgctcaacaccctcacaggcactccgtactgtgaggtttttgtttttttttaaattttagcctttccagtatgtatgtagacacatatgtctcatcgtggtggctttaatttacatttctttaatgatcctgagtgtcttttcatgtgttatttgccatccgtatatcttttctgatgaagtgtctgtttagatcttgtgcctatttttaaacagagttctttgttttcttatcattgagttttgggagttctttgtatattctggacataggctttttatcagacacgtgatttgtacctactttctttcagtcttttcatgctgaactgtgactttcaaagaatagaaactcttaattttgatcaaatcgaatccatcagttttgtcttttatggaatgaattgattttggcatttgcttaacctaaggtcatagagactctcacttaggctttcttccagaagttttattgtttgaggcttgcacttagttttaagttctgttttgagttagttttttcatatggttcaagacatgaattgaagttgttctcccctcctcctcccccttctcattgcatcc

SEQ ID NO: 473978 - DNA, 489 bp, Homo sapiens
caggaggtggccaccagcccactctgggacctggcctcctctcatatgaaagacaatagccgtactcttggtgctttctttgagggctcttgtcagggtaaaatggggcaaagagctggttggtgctcaggccagcacaaggcactctcagatgcccaggcctgcacactctcatccccactgttctcagcccggcctgcctgggcacagaggtggactactgcagggcccgcacgtctctccagccttatcttgggctgttccacccacccagagcagatccacacagattccgaggaagttcagcaaggctctgactgtcctcgggaaaagggggtagctggcacacaggatgcaccaaaggaagggagactgtcaaaagaaccagaggatctgagattgcaaagggacatcatggggcccttgaggaacagcttcctgctggtgcacaaagcccagccagagccaaccagagccggctgagcatct

SEQ ID NO: 473979 - DNA, 550 bp, Homo sapiens
ccccaaattagttcatcatagtgtagtaatgttgttgttggtggtattggtggtagtggtagtgatgatggtggtggtgatattgatgatgatggtggtgttgatggaggtgctggtggtggtgctggtggtgttgatggtggtgctggtggtggtgatggtggtgctggtggtggtgatggtggtgctggtggtggtgatggtggtgctggtggtggtgctggtggtggtggtgctgtggtcacagcaatccctggagcttttgaaacaaggacgtgacatagaccaggagttctcaaacttgggtcctggctgctacggatttctgaaactctttgatggggtttatgagaataagtcagcaatctgtccaagatggggaagacttgcaggatggggaagacttggcgatagagcatattatgtgaagaaagagggtccaaagtggtcactggctgacttgttctatggaaaggcccaagctggcacatcaccttcccagagcaacacagctgaacaaccacactagaaagcagccccttttgttgtt

SEQ ID NO: 473980 - DNA, 615 bp, Homo sapiens
aaagaaactacccaaggtaaagacgaaaacccagcccggttcatggcccacttagcagcaacccttagatgctttactgccctagacccagaggggccagaaggccgccttattcttaatatgtgttttatcacccagtcagctcctgacattagaaaaaagcttcaaaaattggaatccagccctcaaaccccacaacaggaattaatcaacctcgccttcaaggtgtacaataatagagaggagtttgccagacagcaatgcatttctgagttacagctacttgcctctgctgagacaaccgacaaccacgtctccaacgtacaaaaaattcagaacatccaagccacagctcccaggggctccttcaaaacatcctcccgtgccctgtttgtgtgggcccccactggaggtcggactgtccaactcacattgccgccgctcctaaggaccctggagcccaaacccaatgttccttggctgactccttcccagatcccctcagcttagcagctgaagactgacactgtctgattgcttcagaagcctcctggaccatcacagatgcttcaggtaactcttacagtggagggatacatgtgcacaatgtgcagg

SEQ ID NO: 473981 - DNA, 882 bp, Homo sapiens
acatcccagtttcaaagaaattaaaatgtggtaccaaattattcttaaaattgaagaaatacagtatgtcaaactatttgtaatgatattttccgctggtatattccaatggtatattgaactattagaatattcaatggtacaacgcaagatatatatggctacatttactaaacaaattcacattggtcacaaattttgtgtcccaagcacaataatttggctaatttttaaatgcaaattgttagctagtcttattacaatatatgtccaattttccagtatttcccatcccgtgtaccttttgtttatttatacattcaacaactatttattgggtgcattcaagtgccaagcattaagacaaacattcctgaaccttacagtttggctcatgaaacatgactgaaacattaaaataaaagacacccaaactgtgtaagatgcatagtaagctctctgttctatggaaacctttgtgaaggagtctggataaaactggcccagaagggtagataaagtattgcaaggtggagaagcggacaatgatgtcacagaaagatttcccaggataagcaaaaacatggagggatggctggagaactgatattcattaagtgccaactgtattttaagctttgttgtttgttacacataacttaatctcacattagttctgagcccacttaaatatgaagctgaagcccaaaaagctcttctcatactgttgataattggttgagtcagaatcctaaactttttctttacaatactccagagcccatgcatcaaaacatacaagaaactaagctcaccaaaacacagtttgcttttagaagttgtgggatgttaatttggctgaatatgaaacatttttgcaga

SEQ ID NO: 473982 - DNA, 651 bp, Homo sapiens
atagaagagaaaggggcagtggatgcattggctgcaactttagcccacatttctggtgcatcaagttttgaaccacagtctttgatcgcctctgatgaccatgactctggaaagcctagaggaaatacaggatgtcacctgtgcctggaaagaacttaatagaaagctaagtagtaatacagcgtctcagattaccagtgtgtgcctcctgaaaggaaatatgggtgtttgctttgatgttcctacaactgaatcagaaaggttacaggcagtgtggcacgattccaactggatactctcagtgccagccaaattacctgaaattgaagaatattatgatggaaacaagtcttctaatccccaacggaggaatggctggtcaagtggctggtcaggcgggtcaggccagtcaggtggtccatctggtggcctatcaggtagacagagtcgacaagggagtcactcaggaagtcgacaagatggtagaagatgaagtgggaatagaactcgatcaagaagtgggggccacaaatggagttttgactgaatatttgatacttaatctaccagtgtgaacttgcctatttgtgcctaattatgtatattatccaccaaaaattagctcatgatagttgagatgagcaatgtgcc

SEQ ID NO: 473983 - DNA, 542 bp, Homo sapiens
ggttatctcccgtgttccctgaaaatcgctcctccccatagagcagctcccaacatggcggctggtttccctcagagtaaacaagtgaaggagcaagagagaacactcaaggcagaaaccacaatctttttgaaacctaatctcaaaagcagtatcccattccttttactctattctgttatacacaagtctaaactaaaagagaggatttacacaggacataaatacgaggaggaactctatttcactcctactcatcggagtaagtggtatctgcaatccctggagagacctggagtgttctgttatttccagagttcctgtggctacctccatgaaagatataatcattggagcaacgcaagagatcattactgctctagaattttgaccgtcaaaaagcccttcttcacgggactactgaaatctattattttcaggtttcttcagaattctcaggggagatcctgaattttggggatcctgaatttcatagactctaaatgagatgagaattctctaagtggaaatttagaacccac

SEQ ID NO: 473984 - DNA, 690 bp, Homo sapiens
ggtaaacattttctttatccatttaccatgcgcctgcccttttgacccccacattctcaccacctgtttctttgttgaattaccaataaatagcatgggctcccagagatcggggccttcgcagcctccgcagcctccgcagcctccgcagcctccacagcctccacaatcccgatggccccctggtcccactttccttctcaaaccgtctttttctcaatcctttgactctgccagacttcgtcgcccctatggcctggtgttgctaccagggccagtagagaaagtccatcaggtcggggtagggataggcgtgtctgagctcagactctccttgggcagggcttgcttcggctgctgtggtggatggaggtctggttctcaggccaatggagttatgttcccagggggattatggctgcgtctgctgtgtcatgcaggtcaccaggaagaacagcagctctggagtaaaacaggctggatcagcttcctggatcttctacctatcagtcgtgtgactttgggcacattactcaacctcttggggccctacttttctcatctgtaaaatggggttaataatcctcacttcctcctgttgtgaattttaagtgaaataatacatgtaaagtgcctagaacagtgcctgacatatgtcttcattcagtgaattatagttatttttgttat

SEQ ID NO: 473985 - DNA, 602 bp, Homo sapiens
cctcctcctcctcctcctcactcacttccttttttttgtttttgttttttttttgagacagaatgtgtgttagcggctatggcagccatcttgtgaccaggaggaagcttctgagaatcacagagatgcaacctctgaagctgccaaaccactgccagcagctgcctaaccactgccagcagctgcctatctccagacatcttggtagaggccccactctcaactctgcacgtcaggcccactttggtggtgccaaggctaacatgagctggtttggagataaaaccatcccatgtgcccatacgatggagaccttccagagcattgtcaccacacttgaatctactctgcaccactccctgagatccaggagaagatggatgatgtcaaaagcagtcctgtttgctagtggctgtgagaaaccctgtgtctggtcctgctgtgtgacttaccaatgtcctcctcatctgaaaaactggcatcccagagtttttggaaggagcagacatgcaatgtggtttaaaatgcgtgtaagcgactaaaatttatggatcactgtaaaagtgtcagccatcctagtgattatttatcttatctctgtc

SEQ ID NO: 473986 - DNA, 987 bp, Homo sapiens
tggatgaggaaaacaaagattatttagcagcttttgacacaatgcatgctgtgatagtgcaagtctgtgtattagtccgttttcatgctgctgataaagacatacctgagactaggcaatttacaaaagaaagaggtttaattgtacttacagttccacatggcttgggaagcctcacagtcatggcagaaggcaagcaagttccatcttatatggatggcagtaggcaaagagagaatgaggaagatgcaaaagtggaaacccctgataaaactatcagatctcatcgcttcagcctggatcttattgtccatatcactatcagcattttggggaagccattcaacaagtctctaggaagttccaaactttcccacattttcctgtcttctgagccattcaaactgttccaacctctgcctattacccagttccaaagtcacttccacattttcaggtatcttctcagcagtgccccactctactcataccaatttactgtattagttcattttcatgctgctgataaagacatacatgagacttggcaatttacaaaagaaagaagcttaattggagttacagttccatgtggttggggaagcctcacaatcatggcagaaggcaaggaggagcaagtcacatcttacatggatggcagcaggcaaagagagaatgaggaagatgcaaaaccagaaacccctgataaaaccatcaaatctcgtgagacttattcactaccatgagaacagtatggtggaagccatccccatgattcaattatctcccactggatccctcccacaacatgtgggaattatgggaatacaattcaagatcagatttgggtggggacacagagccaaaccatatcaacaaataagaaagccagcatcttgtggagacacggtatcacaactgcagggtttctgctatgcaaatacaaatactgatgaaaataatactgctgcccttctgcaaaacaat

SEQ ID NO: 473987 - DNA, 568 bp, Homo sapiens
cagggttatagtgagctatattaccagccattatgcttctacatgtttaattcctatctgactgactgtgatgaaaagaaagtaaaggaaacttccacagatggtgaggacagtctggaagctagatttgtggacagtgatcaaggaactaaagatgctgaagtggactcagctgacctgcaggtgaagtcatttttggtagatgagtcctgcaacttgtcagtgatcaaggaactaaagatgcttcagtggattcagctgacctgcaggtgcagtcattttttggtggataaaggagtgtctctcagagcaatgagctgtggccctttgactgtgtttaaccctggaggaaatccacttggccttaatgtataccccaatctgtgcatccaagttataagtcagaagcctggacaacttgcaggatgtcctgtaactcaacagaaacagtgaacgtggttctatggcattccgtatttggtgttctcaatactacaaggccaatcttcaggaagtttggaaccacctagaattttcctagaccagggaaaatgctttcatctaacat

SEQ ID NO: 473988 - DNA, 515 bp, Homo sapiens
ttctaaagcatctggatggttcctgtacctgctcagccatttgcttactcttgcaaggggtggaacgcagcaggtctgagtgagtggagtttgattccatgggcactgaaggggctggtcaattccagcgcttgttcacgccagttcctgcactcattcactcatgcactgcctcctgagggaattgagtgtggctgtccttcttatcaatcgacaccagatgtgctccgctgtgggaactggaatgcacaggtgctaggactagctggccgctttggtgtcagcaggggcagactccactcactctgtcccactgcgttccactcctcacaggacggggagcggcggtgcctgcaatccctgaaggcgcagaaagagtgttacagtcagtgctcttttagctttgctgtccatggacagcttgagtgttaacagctcagtagagagtcagtgtgacagccttttgcacctgcatgtgagttcttgtccagtgtccaggaggaatgagattgctc

SEQ ID NO: 473989 - DNA, 671 bp, Homo sapiens
tgtccctttctccttctctgatttaaagcagatcaaggcagacctgaggaagttttcagatgatcctgatagtcaagtaaatgatagctgaagaaagggacaaattccctaccagtcagcaagccgtccccagtatgtatccccactgggacctcaactcagatcatggggactggagtcccatagagatcagaagaaagttccaaaagcaagccctgggccctgaacaaaatctagaggcattattaaacctggcaacttcagtgttctataatagggaccaagaggaacagacccaaaaggaaaagcaagatcagagaaaggccgcagccttagtcatggccctaagacaaacaaaccttggtggttcagagaggacagaaaatggagcaggccaatcccctggtagggcttgttatcagtgtggtttaaaagggcactttaaaaaagactgtcctatgagaaacaagctgccccctcacccatgtcactatgccgaggaatcactggaaagcacactgcccccaaggacaagggtctctggggcagaagcccccaaccagatgatccatcaacaggactgagggtgcccggggaaagtgccagctcacgtcatcactctcactgagccccaggtatgtataaccattgagggccaggaaattgacttc

SEQ ID NO: 473990 - DNA, 617 bp, Homo sapiens
tcccctgaccccttgtgctcaccctgcttcagcttgccctccatgggctgcacccactgtccaactagtcccaactgcaagattggcccacctatcctcaacagtggctcggccaatttagggaacaggtgcctccagataatcgactctgtggtcgattatctgtacctggatgctactgagaacccaaggactttgattaaagacatttgggagaatgggatgaatgttggccttgccattaaactgggaactacagttgagtatttggcactgtgcactaataaaatagatatggccttggtaatgacagtggaacctggatttgaagaacagaaatttatgaaagatatgatgccaaaagttcactggttgcagacccagctcctatctttggatatagaggtgatggtggagcaaccggtgatgagggctgagaacttgtcccagaccaccagcctctccattgagaaagcaaactgactcgcagtttttcggcatctcagggagcctgcagtggtgatccagttccttcatggattctcttggctttcctggaatgttcctgtggtagttcttggagcaaaagttcatgatggagaaagtgagagctacac

SEQ ID NO: 473991 - DNA, 531 bp, Homo sapiens
ctgctgttcagttgtttgagcgccttgtacactttggatattaatcccttttcaaatgaatagtttgcaaatattttcttcccatgggttatggccactgggcccaatcagacatgccgactgctgcagaggggtgtgcagctcctgttgctggcaggaatgctggttctttgtgaggctgtggccagactaggcgcaccacaaggagcttcaacagtgacctggggaatacagaggaacgcagaaacttggacatgccaggaaccgcagggccctaaagaggggccacagccctggttcggagagtgcccagatgtggttccccgaagggctgcagttcttctttcttactcttcacccacaacgtggcaagcaatggtcatggttcagccctttttgtgttacagctcttttagcctcaccattcagttggtccagagtttttgtcctgccaccagaaagaatgaggtatgcagacaagtggcaggtgagcaggatgaagaggagctttattgagtgatagaacagctc

SEQ ID NO: 473992 - DNA, 1950 bp, Homo sapiens
gctccgtggagcatgcagccccagccacgtctccctgctgcagctgagtcagactctggggatacattaactcagtggcctgttttatatgagattggggaaacacagcctttgggacaaagtgaaagtgtgctccaagaagaggttggagagtcggagattataaaggcaaaaaactgcaaggccatgaagggggatctggggacttgtggggctgggctgggactcagcagacagtacttctgccttgacaccttcttcctgctacagtctggcaatggggacaccagaagaactcacaagctggagggtgaagatggggctttctcctttctgcaggcttgtatctgcttcctgttcctaactgacttcaagggactccttcggggacaccagaaccagccagctgacacctcctcttcagaagtctgagtcccaggcccactgatcgctcttccaagcttccaggccacaataatgccaactgtttccctttgtttcctgactcggggtggtcattgttccccacagtttctacttccatgataactttgatgcttttgtggttcacagctttagatctggttaacaattcttaaacacataataaattaattttgctgaaaaacttaagttaattattaagtgtttcttgtaataaacagaatattaatggtattagggactcagctccactgattataatagatactgcaaacctaacattatagaaaaaaaagagaacctttcaacaaatcattttacttttttgttttaaaaaaagctttacattgaaaggacagaacaaataatgaataaaataattcagcctaactgaatgaggaaataaaagaaactcaagatattttaggtaacacagatacacttctatttttaaaggcatgattgccattttagacactatagaagattaggaaattgattggggataattcttgccagctttagcaaagataaatattaagacactagattaaatttgaatttcagataaataacaattttgtattggtataagtatgtccaaacagttcatgaaatacaattatgctataaaaccattgtttatctgaaattcaaatgtaattgaacatcaagtattttacctgacaaatctatttgttgaatctcattgtacttgaacaaatacttgttcaatgaattaagttgtttcagaatctttcttttgagaaaaataatgtccttcactcaatgcagccagtaacttctctcagggatggactgggcaggcctccatcttggcctaaattacaaggtagcttcttaatgactcacattgaatggccgtctgatatgtgacatatgtgattctctaccagcaacatagatgcacttattaacgagctcaattatgtgaataagataatctttaaaaacacctttaaggcccatgttccattcatcttgtatattctgatatgtcctcccatagcaaggatagaaactggagggggtgcaagtggagactcttcacttgcacatatttttatgcactcaattttaatagtaggttatatactcttattaatacttatctttaatatttcactcattcttttactttttgctatattcacataactttgtatgatgcctaaaatcatacctgacacaatgtaccttttgatatgctttgaagtatacagtatcattcggatatattcttggccaaaaggttaaatataattaagcctctagagtttacttttatttaagaatcttgatactagaggaacacattaaaaaacacagtgtagttgctaaagactcattgctctacaatgcatacatcctgcatttacttttctcacaataatcctcttgccttgcatctaggtggtcttgtgacttgcttttaggaccatagaatgctgcagaagtgacactatttgatatcaaagggtagac

SEQ ID NO: 473993 - DNA, 634 bp, Homo sapiens
gcctgaagacatgctggctgcagctggcagacttccgcaaggtgggtgatgccctgaaggagaagtacgacagcgcggcggccatgcggctcaacagccggggcaagttggtacaggtcaacagccgcttcaactcgcccaccacacaagacctggtctacatcgaccccagccctgactactgcgtgcgcaatgagagcaccggctcgctgggcacgcagggccgcctgtgcaacaagacgtcggagggcatggatggctgcgagctcatgtgctgcggccgtggctacgaccagttcaagaccgtgcagacggagcgctgccactgcaagttccactggtgctgctacgtcaagtgcaagaagtgcacggagatcgtggaccagtttgtgtgcaaggatttattttatgtggtattcagcagcatccctggcctctacccactagatgccaataacatccttccatttgtgacaatcaaaaacatctacaaacatgccaaatgtgccctggggagcaaaatcacccccagtttaaaaccatgactttagttggagggactgaggtttgaacacttggggaatactggctgaccaccttggtgaactattgagcttgcctaggttgactcatg

SEQ ID NO: 473994 - DNA, 1082 bp, Homo sapiens
gatagtgtgtgtcccgctccatggctttcctttttgttttggctttgaagagcagccaggcagacagccactgcaaagaagcgtctcagggggacgcgagggagctgggaacgtccagttcctgttgctctgcccactgtcaatgcctaacaggactcttgtcttctggagagcggagtgggccgcgaaagtggatgtttcagtcccttgtagctgctcacctgtgtgaaactcctgggaagagtgggaggagccctccacagcctctccccaagcatggcatttacagttaccctagtgaggtgggatttgtccgaggcacacagataggctggccctcggggaactttcaggggtcaaggtaccacactttgggaactgcttctttaaaggaaagtggaagcagtaaggataaatcatcaagagccacaagatctacctgggtcagcagacctacatttctgtgcaacagaaagcagagggcagcaacagggcctgcgaacaagaacccaaaaatatccaacaagtgttcactgggctacaccgtgggccagttgagaatagcagctgaaacaggcgcagggcttgctctctctcattacagcgagtgccagccaagttcaaggtccacaccagaagaagctgggggcagtaaacatgatgtcaagggtcctggctgtgccctgtcctgtggccccatggaatgggaacaagacggcccttcttcagaggaggcatgagtacagtgttttccttttcttccaccaaaaaggcatagtttgcaaaaattttctccccttctgtgggttgtctgttcattttattgatagtttcttttgctgtacagaaactcttaagtttaattagatctcatttgtaaatttttgcttttgttgcaattgcttttggtgtctttgtcatgaaatttttacccttatgttcagaatggtattgcctaggttgtcttctagggttttttttttcagtagttttgggttttacatttaagtattttacatttgggagaaggataaatcaacttacatcttaagttgatttttgtatatgttgtaaggaacggg

SEQ ID NO: 473995 - DNA, 923 bp, Homo sapiens
tctgagagcagccctgctggcttatagcttcttatcatgtctcttcttattcctggtttgtcattttcaaagattccatgttcagatgatctatgtgtagcagcatcagaaaagggacaggttgtcgttcccttcaccactcctgccttggactacaaaaccctggaccaaaccatcaccagctgtctcctggacatagaacagttttcaactactgtccccaaatctattcttgccctcctggaccctctactgtgctgcagctagtatgatcagaaaagacagggaagagttaccagtccccaggaaaagctgtggctgtaggaaagggctctctgccaggagcccctgagtggaatcaatgaaggagtaggcctgcagtagaatgaatgaatgaatgaatgaataaagaataaataccgcagcctctacagtaagaagctgatggctaatgagatgctgccaaaccttttagaagagtctcagaggaaagcggaaagcggtcccaatccagaccccaagagagggttcctggatctcacacacgaaagaattcagggcaagtccatagtgcaaagcaaaagcaagtttactaagaaatggactgggtcagccaagccaaaatttactcaggcccaaagccactgggcagggtcttttacaacatccacagcagcagccaatgaggaggcttgtgtagttcaagttcattgccttttgggattgatgcccaaggcctttgggacgggtccattgcattcctttgtaaggtacagtgaccacctcttgggcagcttgggagtcccatggattccaataaggccagctggtgtcatttcattggcacttaaggttggaagccacccctgggcttttcacaggatttggaaccttcaccctgcagctcagagtcctcattaagc

SEQ ID NO: 473996 - DNA, 947 bp, Homo sapiens
cgcgagtaagcgggttctttggcataacaagcttctgctgaatatggattcccaggtctgagggatgagcttgcaacctgtggcatacctgagtaaggaaatcaatgtagtggcaaaaggttggcctcattgtttatgggtagtggtggcagtagcagtcttagtatctgaagcagttaaaataatacagggaagagatgttactgtgtggacatctcatgatgtgaacggcatactcactgctaaaggagacttgtggctgtcagacaaccatttacttaaatatcaggctctattacttgaaaggccagtgctgcaactgtgcacttgtgcaactcttaacccagccacatttctttcagacaatgaagaaaagatagaacatacctgtcaacaagtaagtgctcaaacctacaccactcgaggggaccttctagagattcccttgactgatccagacctcaacttgtatactgatggaagttcctgtgtagaaaaagaacttcgaaaagcggggtatacagtggtcagtgataatggaatacttgaaagtaattctctcactccaggaactagtgctcagctggcagaactaatagccctcacttgggcactagaattaggagaaggaaaaagggtaaatatatatacagactctacgtatgcttgcctacatgcccatacaacaatatggaaagaaagggaattcctaacttctgagggaacatctatcaaatatcaggaagccattaggagattattattggtggtacagaaatctaaagaggtgacagtcttacactgccagggtcatcagaaagaaaaggaaagggaaatagaagggaaccgccaagtggatattgaagcaacaagagccacaagacaggaccctccattaaaaatgcttatagaaggacccctagtatgaggtaatcccctctggaaaa

SEQ ID NO: 473997 - DNA, 726 bp, Homo sapiens
ccccatcgtcttgctgtattccaccaccaccccccgctgggttacaaatgggcactaccctattgcggggcatgcagctgcctgccagcagccaccaaggactcccccaagtagcccacttctgctccacccgccaacgcacactctccacagggcgaggcggctgcagcaggaccacagccagctgcgctttcagcttgctgggtcatgggctccttggatggaaaacatgatgataacagaggactctctccccagaaaatgcacaagcataaacctatactttctctccctcctgtaggctccccaggcttctctgtggctcatgtcctggtccccagtctcctgattgtgaatacattgtcttcgctggcctcagatattcctcccctgcagttcagcacctggatttccaagacgcatcaccacacccttgagatagttctctctctgtccatttggggttgggacatgctagcactactttccctgtggatgaaggaggaactgggtgcaacaggctgttatactggatgggccagtccccaggagagggacaggaagacaggagtgaacgggcacacctgtgagaccacaacaggtcctggcaatggtcgggaagtgtgtgacagggcacagtgaatgattggagagaagctaggagggactgacttctcatggcctcctagcttcccttggagtgatttggtctaacactaggcttat

SEQ ID NO: 473998 - DNA, 597 bp, Homo sapiens
cttttctaattatgcctgaaagccccactcccttgttagggagaggcattctagcaaaagcaggggccataatacacctgaacataggagaaggaacacccatttgttgtcccctgcttgaggaaggaattaatcctgaagtctgggcaacaggaggacaatatggacgagcaaagaatgcccatcttgttcaagttgaactaaaggattctgcctcctttccctaccaaaggcagtacccccttagacccgaggcccaacaaggactccaaaagattaaggacctaaaagcccaaggcctagtaaaaccatgcaatagcccctgcaatactccaattttaggagtacagaaacccaatggacagtggaggtatggtaaaataaccagaccattatatacactgattaagaaaactcagaaagccaatacccatttagtaagatggacacctgaagcagaagaagcagctttccaggccctaaagaaggccctaacccaagccccagtgttaaacttgccaacaaggcaagacttctttatatgtcacagaaaaaagcaggaatacctctaggagtccttacacaggtccaaaggac

SEQ ID NO: 473999 - DNA, 852 bp, Homo sapiens
attagaagccgtgggtcacggaagagaaccgtggaacccagtgactagtgttcagctcgattaggatgaacccaggcacttagccatgcaggaacaatggcaagcctttagcccaatcgggagcggcaatgggcgcatcgctggatcaggagcacagcggacaccctgccggatccagaggggtggaagtcagcggcggctggacgagaagcatgggctggtatctgctcagcttctgatgagggcttttgtgctacctcaaaacacagcagagaaagtcaaaggggaagcaggcatctatgaggaggaaccaaacttgaggcacaccctacctttagccccagagcaccaggttcatacttggtgggagttcattaataattcagaaattaatactaaggagtcaaatgcatctttctttcatttatctccaggaactttctccaatccaagccagctttccttgcattccttgcagcaggactcaggaacccaaactagtgtctttttcctctaacaccctcacaagccccttgaggctctttttccctaaattggctgccgggtgctttaactcaattatcacaggtctccactgacttccacttaaggatttggattaactataaaactgctatataattgtccttgaatattagaatataaaactataatatattcctcacccttaatctgaattatttccttctgggtatacatgacgccaaagtaaatcactcctacagctctgatgtcatttatttacccataagcataccaataaaaataagcaacatggagtaattagtaataaaattctaaaatactatttgatatttagagttaatcaac

SEQ ID NO: 474000 - DNA, 961 bp, Homo sapiens
tatgttgtactcagtgaaggacaaaaggtgtttctgggttaaatgttattgaaggtatgcaaagtatgtgtttttgtgaggcatacaaccaaaaatctttggagatccctggcctgtgagaaagcatggagcacccatgcttggtggatatgtggatacacagtgaaaaaacacttgaacaaaatatggaaggaaatccaggaaggaaaattatgtgaggttaaggggtgggaatgggaagcaaatgatattgcttggactttgcaaatggacttaagcacaccagtgtaccctgagctggggacagaggccagtcccagaattggcactaatggtcaatgtcactcccactacattctggtgaaaggaagttacaaagctagtgcagattcaaggagagggaaaatagactccatcccacctattattatgcagaataatgtgagaaagaaagtacatgtttgctatctggaggaacttgggcaaatgtaggaaaaaaaaaagaagaagaaagaaacccacatacttctccattcttaagaaaaggaagtagtggtgacatcattctcggctaaaatgtagtctgtttatatctcaaatattcggtaacaatgttttctccagagttatgaagcaactagaacaatcaaatacaattttcttctaaatctttattgcctgattcattcattcatccaacaaatatttattaaacatcgattatgtgtttgatgcttagggacacaatagtaagtggagggaaagatacataatacctgccctcaagaaatttggagttgagtggaggatagaaatataaattaaagaatgacacaaataattataaagttacagctgttaaaagaaaagcatatggtgccaagagaacgtgtaatacaagatctactcatggaggtgagggaaagcttgcccatcaaagaagttatgattcaatccacga

SEQ ID NO: 474001 - DNA, 1418 bp, Homo sapiens
gcctaccctgcagggcccccctcctctcgtctccgcccctgacaccctgtccactggtcttcctgcagtcatcctgccagcctccagcatggaggaggccaccgactgtgcaggtaaaagaaaccggacctacctcatgctgcggtcctcccagccctccggcaccccactccaaaggttcaatctcatccacttggtggccacgggcatctcctgcttcttgggctctgggctcctgaccctagcagtgtacctgtcttgccagcactgccagcgtcagtcccaggagtccacactggtccatcctgccacccccaaccatttgcactacaagggcggaggcaccccgaagaatgaaaagtacacacccatggaattcaagaccctgaacaagaataacttgatccctgatgacagagccaacttctacccattgcagcagaccaatgtgtacacgactacttactacccaagccccctgaacaaacacagcttccggcccgaggcctcacctggacaacggtgcttccccaacagctgataccgccgtcctggggacttgggcttcttgccttcataaggcacagagcagatggagatgggacagtggagccagtttggttttctccctctgcactaggccaagaacttgctgccttgcctgtggggggtcccatccggcttcagagagctctggctggcattgaccatgggggaaagggctggtttcaggctgacatatgcccgcaggtccagttcagcccaggtctatcatggttatcttccaacccactgtcacgctgacactatgctgccatgcctgggctgtggacctactgggcatttgaggaattggagaatggagatggcaagagggcaggcttttaagtttgggttggagacaacttcctgtggcccccacaagctgagtctggccttctccagctggccccaaaaaaggcctttgctacatcctgattatctctgaaagtaatcaatcaagtggctccagtagctctggattttctgccagggctgggccattgtggtgctgccccagtatgacatgggaccaaggccagcgcaggttatccacctctgcctggaagtctatactctacccagggcatccctctggtcagaggcagcagaagactagaagatgatcttttgaagaaatgaactaaccctacaaattctgaaataagctagctggtcatcatgctatatagtcctagagcaaagtacactcgtttacaaacagtaccctgtacacagagcttgcagttagtttttagtgcatccacactgcttgcagatgaggtggcatagtaagcaaaggctgtttggtaaccagccctggcccagaggtgaggaatctcagaatgtgctccctcacaaggagggtggtacgaatc

SEQ ID NO: 474002 - DNA, 840 bp, Homo sapiens
ttgtcttctgaattgaatataaaatgcccctgactctcaaggtcctgctcctaattgacctagagccttggtactcaaagggtggggctgttggacctgcagcagaagcattactcaggagcttattggaaatgcaaaattggggctctacaccagacctcctgcatcagaatctgcattttaaggaaacccccaatttaatcacgggcacattgaagtttaagaagcatgataacatcattgagcaaagctattacacaatattcaaccaggaaattaacattgatatagtgaagaataattatttggagatgtatccaggtttttggatgtatcagtggttcattcctttgtattgctgggtagtattctatggtatagatgtctgactgtctgtttaaccattcaccattgggcatctggactgtttctaagctttggctactatgactacagctactgtgcatatttatatacagagttttgtgtaaactaaccaccattctaatttctattagtttgactactctagggacctgtgcaagtggaatcatgcagtttttgtccttctgtgactggcttatttgtctcagcataacacccttatgttgtagcatgtgtcacaatttcctttttttcaaggctgtcaagtcaagccttctcaatgtatggatgagaagatggggacccagagatgagtactcccatcagcaggactctttatcacaaatgatagaaactctttgtggatggttgagaaatcttttggtactttgtaactttaatgcaaattcaggccactgaggagcttgttaaaatgcagattctgattcagtaggt

SEQ ID NO: 474003 - DNA, 598 bp, Homo sapiens
tgcctttccctgtcaaccctcttgttttgcctcctcttcctcccctcacctgaataggcatgcccgtacttcaagacactcttgggcagcctagacctagcaaggggcccacgtgcccatcttggtcacctaatggggccagactgtggtgtgccctgatccctgaggtggtagcactgaagaagctggacccaggaggacagagggcagccagcccaccaaggcatcacttgactttcaagttctgcctggacagactgctcagctccctacccgccccagttcacgttcaggttcttgaaatcaactttagtttcctccatgcctacatctatgctgatcccctgcaaaggcacctggtgacacacaagagccagaacccaaaggagctcctccacaggatcctcccagggcttagccaccagggaattttgttgatgatccccaagcttcactgccccatgcaagtctccattatctcaaggttatccctgttcaggatcactactctcctgattcttggcctcctagtccaaactcatggctccagggtcatgatgagtaagagttctggaaaagtctacaacctcccttgaac

SEQ ID NO: 474004 - DNA, 2765 bp, Homo sapiens
ttgtcagaccatggcgcctctccatccccatttccctaggataggccttggttcagggcgctgccacaccttcagccccgccccgccccgccgcaagcccaacccagaggttgcttatggtttccctaaggttcctgggctctggacatcagtccggtctgcaagccccgccctgattggctgcctccggcaccggtcgctgcgccctgacctaaggcgcccaggttcctcccccttatccctgcagggctggtgccttgcggcaccgcccacgctcggattggtccgaggtgagattcgcccttgtgccctcgtaggccttcggaacagcggaagagcagtgtcgggccatggccagggcccgcaggctggagctggccgaggccctggcgctggggccaggctagaggcatgcctgctatgcgctcctgcacgcgccggaccctggaattctctctggccgcctccctctgcgctacgccatactgatgcagatgcgctttgatgggcgcctgggcttccctggcggattcgtggactcgcaagacagcagcctggaggacgggctgaaccgtggtctgctggaactgctgggcgaggcggcggccgccttccgcgtggagcgccctgactaccgcagctctcacgccggatcaaggccacgtgttgtggcccacttctatgccaaatctctgacgctcgagcagctgttggctgtggaggccagcgcaacaggggccaaggaccacgggctggaggtgctgggcctggtgtgagtgcccctgtaccctgcatgatggtgtgggaggcctgcccatctttctggagaattgctttattggtgctgcctgggagcagttactggataccctccaggacttgggagtggtggaagctggtgctttctcaggacttcagatcccagttcgtctgaggcaaccctctgtggactcagggaacctgagctgaggactttggtacaaggaagggaatgttttctcttccggacctaaagacgataccaaattaaaagaagacatgtatatcatatgttttgagcagaggaccctccaattcatgggatcaggggcaaaaatccacagctcatcccaggggccctggcaggttctcagagcctacctcttccttgtatatttgcatacagcctggtaacccccaggcatgcatatgtacaatgtgaccacacacagcctgacatctttcacctgtcaagtccaatttaaccaggaattggcatttgttaccataccctgcctcttgctttgcagagagcttctacagcaaggctgagtccttcccacagtcctccatgcctgctctttagggtctaccccagcccatgttttttgggaaggatagagaagcagaggaccctctttgctttcctgaaagtagccatgcccttgctggagggttcaccacagcaattggtgggaaagggtcttaaccaatctccaacacttttcttctcctgaaactgagaaggggtaaggaagtagctaggtccccttggacggagcatggacatgagacctgtgagtactggtgtctctccttcagagctttcatctttggttcgctgtagactctgggactatcagaagagaactgacccatacctgtctagccctgcccttccaaaaaaagagcctcccattaaagaggagttagagctgggccttgaggctcttcacttctttcaacagatatttaatatgtacctactaaatgccaggtactataaaaggtatagagagccatccttgctctccaagactccagggaagggatgggcaaacattttcttaaaagccagatagcaaatactttaagctttgtaaactacatagttttttaaaaaatattttctaacattgactaataaaaattgcctatgtttactgtgtacaaaatgatgctttcaaatatgtatacattgtggcgtggctaaattgagctaattaacatatgcattacctcacatatttatcatctttcatggtaagaacacaaaatttactcttagcaattttcacaaattaatgcagtttattaactatagtcaccatttgtgcaacagatcttttgaacttatttctcctaactgaagttttatattcttcgatcaatatcttctcaattactgttccctacccccaacccctagtaaccattattttactctctgtttctatgtgtttaacttttttagatgccatatataagtgaaatcatgtggtattttcacctggcttatttcatttaacatgtcatctaggttaatccatgttgtcacaaatgacagaattttcttctattttaaggccaaatagtattccattgtgtatatataccacattttctttatctgtttatctgttgatggacacttaggttgattccacatcttggctattgtgaatagtgttgcagtgaacatgggagtgcagctatctctccagatcctaatttcaattactttgaataaataccctgtaatgggattcctggaccatatagtagttctttatttttaaatatctccatgctgttttccatgatgaccatactaatgtacatttccaccaatattgtgtaagcattcccttttcatattttctctaatacttacctttcatctttttaatcatagccattctaacagatatggggtgatattccatagtggttttgattttcatttccctaataattagtgatgttgagcattttttcatacacct

SEQ ID NO: 474005 - DNA, 4206 bp, Homo sapiens
aggtatggttatcagaacctagatgaagctggttctaggaatttgtaaagaaattgggggctggaacccaatgctgctgcacagggcaaggcccatttctaagacagaaagcaaaaaggaaggaacaagcaacttttggcatctgcctattgggagtgaaatgagcatccagtatcctggtctgggtaaccctgaggtaaaacactaccacttcctggaagccttcctgaaacatgctggcaccgttggtgacccagagcagctctttcatctgggaacagcaggccccagaataggctccttggagacagcagatccactggggatgaaaggagtccattcgggacaaaaggagaaaatgcgtctctccatgttatataagcctttcatccactgttacattaaagattctgaaaagtcctgcagaaaagtgcctgtttgtgtagcgtgtgacaccgattaacgttgcccaaagctttggcattggacagccttgaacccccttctccgctggtgtgccccatgacttcagtcaagttccttggctgctctgaatctcagatgcctatttgcaaaataagttattatgtggtcagtgaaagcaaagcactggtttggctggggtcctgggaggacaggatagctcacataggacactcttgtggttctaactatgtatcttttcatttatacaaatattggtatatgatttttcaaagcaaaaaatgggatcatactgttgatcccactgtgctgttttgtatcctaggttttttacttaataatatgcaaaggacatttttctgtgtcaataactatgaatctgtttattcagcgcatattaattgaatacccactatgtgtaaagcactttccataataccaggattcaatcatgaataaagatagtgcattcacagtccctgtccacatcctcatgaagtttataggctcccaggaggggacacaggcatctagcaaataattacacacatacctttttgacttttttcaattttgagatgatttcagacttacagaagagttgcagaaatgatgcagagagcttccacatacccttcacaaggcttccccggagattaatatctcacataactatacagtatgacaattatgaaaactaagaaattaatattggcataatgccattcagcacagactttcttttctactttttttttcctgttctgggatctgatcctgtgtctcactttgaatttgattgtcgtgtttccttaatctcctccaatctgtgacagttcctcagtctttccttgtctttcatgaccttaaggcttttctgagtactgggcagttgttttgtagaatgcccctcagtttgggtttgtctgatgttttctcatgattagattgaggttatgccttattgggatggataccacagaagtgacatgcctttctcagtgcatcctatcaaggggtacaggatgtcaacgcaacttattactggtgacgttaaccttggtcacttggttaaagtgaaatctgctaggtttcttcactctcaagttactattttcccctttgtaattaataaaaatttgttttggggaaaatattttgagactatgtaaatatcatatttcttaaactttcacccactgagtttaatatccatgggtggatcttgccttcaggggcatctggtattctaatggtgactttgtatttccttctgtattcactgagtggacttcttctgtaacagagagctgtcacagacacttctttagtgacagtagtgaagagttttacaaggatgcaaggagaacctgaaacaggatgacccaactcactatgtagtagttggggaaatcttccctgaagaggtgacattaatgctaatttttgaaaaatcaaaaggactcatcagggcactgggttgggggtgaagaggagaatgttccaggctcagggaagaacatgcacaagatctctacccatagctgacagatactgacatgaaactgcatgagagacagggtgggtagaaaccttggccacctggagggacttcctcatctgaaggacgcagctgcttcttgctccagccagagtcatgtcaagtggaaatgagggtctagtgttgccagagtttttgatgttcaagagaagctggacatctggatttttttcccataaaacttctcaatcttcttaatgttcgcaaacaatccccttctccttcatagccaaacaaaacctgtgaactaatgttttttttacctgtgcatggctgaaccacaatttatttatttgtctcctggggctggaccttgaagttattttcgatggttccctgttataaacaattctgaatgaacatccttggacagacaacctgaacaccttctctagctatgaaaatttgcaccagacagccacttgtggcctcacaactgccagaccctgtggcctcttcaggcccatcctctttccctcttccttccctacaggtcttcacatcctgttggtgccccagttctccttctacttttctaactgttcttttcaatttccttcaatgtcttagtcaactccacctatggctgcaatggaatccatatcacttgtaaggagtctatgaggtgatctgggctgtggtcccacagaagctcacctgggctgagagcacagctggttggtcatgggggcatttcaagccaaagccctggcctggctgactctgctgctctgtttcctggaagggaagggcctgaggctggctcagcaagcacactggttgctaaaagaccagcaaatacgttcttgctgtattctgccttgctctgataaggcaggtatggaggagatgaagagctagaagtctggtgccagaatccagagaggagttcccaccacacaggacagaagaaccagggatcctcttagagctggcaggcagggcacccagctctctggctgtgcccagctttcttcctatggtgccctcttgtgccatggcctttgtgttgtgactggactgtccttattgtgggcataaacagccagcctgaaatggggtagggggacagagggtgagagggagggcaacttcccttgcccccagggcttttattcagggagaaagaaaagctttctttcctgtttgtcttgaagcacccctcatctgtgtccagatagcaggtgagggtggtgcccagccagctgctcctggggagcaccttgtgctctttgggtcttggattgactcaaatggtgcctactggaagagactgccacatttttgaagttatgaataaaaagaagctataacagagtctggctgtcagtggacatccttctaaaataattgtaaaaataataaaagcataaaacaataataaaagttagcataaaacaataatgtccccatttactgaacacttagtctatgccaggcatcatgctaaggggtcgtcatttattatctcatttaatcctcatgtcagcccccagagtttagattaataactgtggtctcaggatgagcttaagaaacctgcttagaagttgcattaagatcatacctgtcaacaaggacaagcttgactgccacagggtccacagatccctacccagaccacagcagataagaccctgctttccacaaaatatccactcatctgtcttatgtttgctcatggcagtcctagatcatatgtcaccacctgagaccttggcatgtttccttagtctggggggacctgtatgtggagagagggccccacgtccccataagcttctgcctcttggtctggaacctaaagtgagacacccttgactgtagtggagcaagccacccaatgccccctcattcagcaagggcttcattctaagtttgggttttttataacctcccttgactctccagtttatgtggattatgcatacttagacatttgtgataatatgatggtcactattcctagtgtgaactctttggaggcccatgagatcctgtgttttatagattgactttttcattcacttgttgaggttcactgagcactctctgtgcctggcattgctagagggaatggggacaatgtggcgagtggggcatatgcagcccttccttcctggatcacattcttgtgggaaaaatactcagtgaaatactagcaaaatgaagttagtaacatatatgaaggagtatactgt

SEQ ID NO: 474006 - DNA, 805 bp, Homo sapiens
ttccagtgctccagttccaagaacagaagaagacccaagttttctcccccaagtctcctccttccactgctgccccctctccctttcactctcatgcttcaggtctggaatctccgttatgcacaaagggcctcatgggggtgtgtaactgcccagcgccttcacaatttccagtcctgcatggaagacgtgtctggatattgccccaacaagcaccaagaagaagggctggcagggttgtttccatggttccgtgaccccataaagtatctttcatttttctcacaaaatgagcctctttttctctcttatattttcatatggtacccagaagcccctggatttcctggcatttgtgtaaagaattccagctattccatccacagttttcacacacagcccctgccaacagacaggccatctgagaggcagcccgcgaccgtggccagagcttgtgctcctgagctctggagatctggcaaggactctggcttccccactgaccccttgtcatgattcccttgatgagtcatccatgtcgtgtgtatcaatagttcatcgctttctattgctagaatcattactattacgaataaagctcctaggaacattcaagttcaaatatttgtatggatatatagttccttttttcttgaatagtcacccaggaaagaaatggctggttaatatgtctctattttgcatatgcttttccaattattccagcactgtttgttgaaaaggctattctttctctacggcattactttcgagcctttgtcaaaaaaatcagttgttcatgccc

SEQ ID NO: 474007 - DNA, 657 bp, Homo sapiens
ttattttctgtgtctagtagagataatgtacgctccatgttgggtgaccaccctagtttgcccacggctgatttctggtcacagagtcttcctccagtggctacagctgctcacccagtgtatttcctgcatagcctcatcactaattatattcacccctgtttatctgcatgcttgcgtatttattacctgttgcccacaagggcaggagccttgtctgccctgttctctaccacagcaccacccccttgaacacaatgaattatctcccacatctgctggagcaacaccttgtggtcagggatggaggagagtgttggaaagatttcatgcacagagtgaggagctaatttcactgaggatcaaatgggttctttggacagtgaaggaattccttgtgtattttcaaggaagatatctgtaataaaaattatattttccatttattcagtacttaacatgggccaggcatagtgctaagcaccttctatacatcacctcatttaatccccacaataatctcattattatctctactttcagctatgaaaactaaatgtaaaatacactgtccactaactacctatccattcttcacatcttctttgttaatagagtcctggctttgtgtagggtgagaatgtgtccagccctgag

SEQ ID NO: 474008 - DNA, 1120 bp, Homo sapiens
tcccctctgagggcctcacggttctacccggcaatccacccttctatgctgcatgccttctcacgctgtctcttgaagatcctgggcctggcactgagcactcagggacaggatgtgagggatggagcagcctctctgacccgagacctgtggttgcatccctgcctacactgagctgctccagctgcatcaggcctgactttgcaggctggtggttaagtgggtagacgggtctggacgcacagccacttctggtcatccacagcgatgagcaagcgggagtttcactgcggctgcctctgacaccgtgcttcatcccaacctttctcacagcctccctcagtgtttccaagattccctgggactagtgaacaatgcagtcaggatggctaaaggtgaccccaagaaaccaaagggcaagatgtctgcttatgccttctttgtgcagatgtgcagagaagaacataagaagaaaaccccagaggtccctgtcaattttgcagaattttccaggaagtgccctgagaagcggaagataatgtctgggaaagagaagtctaaatttgatgaaatggcaaaggtggataaattggtccctaatccttcgtttggatcccactgtctggattcttcctgctctgttccaaattctgccctaatatcaaatccacaaaccctggtatctctattggaaatgtcgcaaaaaggctgggtgagatgtagattaacatgtaacagtgaaaagccaccttacatcaccaaggcgacaaagctgaagaagacatgcagcaatgctctggtggggctcggccacagccggcagcagagatgccctcacaaggacattgggcagaaggggcagcagtgctggggccagcgctggcactgctggagcctcaacaatgtttctggtgtctcttccaaccccaggggccctgcctgtgctctgttgtgcctatgcctttatctcacccctactgtaccccctggagccaaaggctgtgcttatagagacactcaccttggttatcaatcatggaatggaacactgggagtgagcacacccgcataagcctgccatgttggcagccagtggaaggtgccactcagttctccctcc

SEQ ID NO: 474009 - DNA, 2588 bp, Homo sapiens
tcccggaagcaaggtcatgtaggaaacagcaggtcaggtggcctccatgctatgcctggtggaggcaggccccctgccgcaccccaccgaaggctgggtgtctccacaggtccacgaccgcttggatcgctactgctgtggcttcgagcctgagccctcagacccctgtgtggaagagaggctccgagagaaatgccagaacccagccgagctgcggctggtccacatcctggtccggagcagcgatccatctcacctggtctacatcgataacgctggcaaccttcagcaccctgaggacaagctgaactttcggctgctggagggcatagatgggtttcctgagtctgccgtgaaggttctcgcatcagggtgtctacagaacatgctgctgaagtcgctgcagatggacccagtgttctgggaaagccaaggcggagcccaggggctgaagcaggtcctccagaccctggagcagcgaggacaggtgctgctgggacacatccaaaagcacaacctcacactcttcagggacgaggacccataagccgcacacagccctgagtcaatgagcatccatcctgatggccacattttcttgggctcactcatcttgaggacaaatgggaaaagccagaagccagaggggcacaaggatgtcacgggatatttcacctgcctgggatggtggaggtagtatggggttttcaatctcaaagcgtccctttctgccttctcggctctggctatttattcccttgcaccaacaaatacattcgaaaatgttctgtgagctgctcaagaaactgtaaaaatgtgtgatgcacgtgcatatgcagagtgggagaactttgtgtgtgtgtagaggtgtgtaggtgtgggtggcatgtgtgcccgcctgcatgcaatacctgagaccaacctaataaaggtacaatcttcatagaactgcacttgcagcctggagttgctctggctgaaagtagactcaggcttaagaaatgaaacataatgcgtttgtctttatagactttaaattttcaattattactcagttatgtttttggtttaaaaaattataaaagtctaaaagtaatacatgctcagtaaaaacaagtccataaaaaatagaagcatatgacaaaaagcataagtcccacaaactccctagcggtgtgtatgtgtgtgtgtgttattcatggtcacactacatgcaaattaaaaaatgaaagtgtggtcatgctttgtcaactcactatatttttactttattaactatattctgtatcagccatctgaattgacccaatctttattggtgactgcatgaaattccaaggcagggatgtgtcatattttctttagctggtcccataatcatgaacatttaagtagctccaatttttcatcaattacagacattgccgccatgaacatgattgcatggcgtgcaagtatttctgcgaggtagatttccgtacgggatttctggggcaaagggtatgggcattcagtattctgagagaaactgccaaattgctctctgaaatggtggtgtcaatttacatttctcccaagagggtaggagactgattatttttctacaccttcaccaacacttggcattctcagacttttgggttttttttggcctatttaggaggaaaaccgattttaaaagctgcatttccttaatcatgaatgaagtcatctttccacttatttgccagacatttgtattttcttttctgcattgtctttttgttttaagatgtttgccctttgcttgttaatttgttggaaatctttgactctaataagtgtgatcaatcttttctctgctgacttggtataaatgttttcttccagcctctaatttgtctcttaactttgtttatagtcttttgccaagtgtaaaatgttaatttccacgtagtcaaatttgtttatccttccctttaagtcttttgagtttcatgccttcttagaaaggctgtcaccacttcaagattattgaaataatctgtgttttattctagtattatacagtatttcttatatattatatagtatttcttatatattttcatatatttcatatatattccctctaaattaatatataaaacctatattttatatggatttaagcagagaatggtgtgagttagggatctaacaagtttcatttcccttcaaatggatagttagttgctgtaacattatttcatagtccattctttctttactgctgtgaaagtatacttttatcagatattaggttcccacatgcacagaggtccatttgtgaactctgttctgatattatttttcagttcctgcattagtatgacagtgttttaattaaagttactttattcttttttgctgtctggtaggctgagttcccatatttttattctactttagttttttcctttgctatttttgtgcatttgtctttcatgtgataatgtcagtctatgaagcatgccacccctctccttttatcctcaaaatcccattggtgttttgattgtgattatatagaatttataattagtgggaatctgacttatttgaatatt

SEQ ID NO: 474010 - DNA, 632 bp, Homo sapiens
cgccgcgatcagggctccgttgggccattttggaatatcaggcagggcggataggtaccgggttcccggagagctggacgccggccgcgcatgcgccccacggcccgccctggttccgcctccctggaagaggggtggcgttgtctcggtaaccggagtaaacggaggcctccggcagacgctgtgaagagaggagccgcggcggtcagtaccttcggctggaccagtgttatagccttcgtcctccctgcggtagctcagcaaacttttgaagccacgagtattctcaggctcggagctagacactgtgtgcacggttcctgcctgcaagaccctgtcagtctgaccgggcggaagccagccaggcagcaggagcacagcttagacccggccaagtcagagcagcagcgagtcagctgggaaggtgctggggctccccgctccagtgagacacctgccctgcgctcagctgggtgcgacgcttggcacgctgggccctctgcacttcggcttcctcatctccagaaagaaaggtgataatgtgacctcatggagttattattaaacaggataatacaagtaaagtgcttagcacatgcatgacacatagtaggtgcacataaatatttgtc

SEQ ID NO: 474011 - DNA, 1281 bp, Homo sapiens
gattatatgctaaacaaggagtcgattattcatgagcatataatgagtagtgaggacgaccagaggcttccatttatccttccagatgggactgagaagggatatgcttatgtggactttaactacagcggtaacttgctggcctctgttggtagtaaccctgactacacactgactatctggaactggaaagaagaacaacccatactaaggacaaaagctttttctcaggaagtttttaaggttactttcaatcctgataaggaagagcagcttactacatcgggatcaggccacatcaagttctgggaaatggcttttacgttcaccggtctcaagctgcagggatcactaggtcgatttggcaaaacaatcactactgatatagaaggctacatggagctcccagatgggaaggtgctctcagggtcagaatggggcaacatgctgctttgggaaggtggtctgatcaaagtggagctctgtcgagggacaagcaagtcatgtcacaatggtcccattaaccagataatgctgtatgagggtgaagttatcactgttgggtcagatggatatgttaggacccaggacccagaatgcctcttctccttccattctggagctattgaagccgtggctgtttctcctctcacttatctcatggccacaactgccttggactgcttatattcgagtaatgatcatatggattttaagctacaattaaaatgtcccttctccatacccccttgcctttctggaaggctacacatcagtttttatgactcagctcaggtaaacttcactggagcacaaattattgtaggatttgaagatggagttgttcgaattcttgaactttatgatccaaaagggctcacgatttttgcgggacggaagaaaattttggatgctgatattcagttgaaacaggttttcaaaccccatactgcttgtgtcactgctttagcttatgaacgtgatggggaaattctagccacagggagtaaagatcaaactgttttcttctttgaagtggaaagggattataagccgattggttatattaatactcctggacctgtgtgtcagttaatgtggtctcccatgtctcattgacggtgattttctctggtggtatgttttaaatttcttgtatatccattgtatgtttttttcattgaagttactatcaggattgcaaataatatcttataacctgttattttaactgatgacaacttaacactgattttataaacaaactaataagcaagttcc

SEQ ID NO: 474012 - DNA, 1100 bp, Homo sapiens
ccgccattgctgaggcttgagtaggtaaacaaagcaaccaggaagctcgaactggatggagccaaccacagctcaaggaggcctgcctgcctctgtagacttcacctctgggggcagggcattgctgaacaaaaggcagcagaaacttctgcagacttaaacgtccctgtctgacagctttgaagagagtagtggctctcccagcacagagtttgagatctgagaacagacagacggcctcctcaagtgggtccctgaccccccagtagcctaactgggaggcacctctcagtagggaccgactgacacctcatacggcctggtacccctctgagacaaagcttccagaggaacaaacagacagcaacatttgctgttcagcaatatttgctgttctgcagcctctgctgctgatacccaggcaaacagggtctgtagtggacctccagcaaacttcaacagacctgcagctgagggtcctgactgttagaaggaaaaccaacaaacagaaaggacatccacaccaaaatcccacctgtacgtcaccatcatcaaagaccaaaggtagataaaaccacaaagatggggagaaaccagagcagaaaagctgaaaattctaaaaatcagagcgcctcttctcctctcaagaaatacagctcctcactagcaacagaacgaagctggatggagaatgactttgacgagttgagagaagaaggcttcagacgatcggtaataacaaacttctccgagctaaaggaggatgttcgaacccatcgcaaagaagctaaaaaccttgaaaaaagattagacaaatggctaactagaataaacagtgtagagaccttaaatgaccagatggagctgaaaaccatggcacaagaactacgtgacacatgcacaagcttcagtagccgatttgatcaactggaagaaagggtatcagtgattgaagatcaaataaatgaaatgaagcgagaagttcagagaaaaacgagtaaaaagaaatgaacaaagcctctaagaaatataggactatgtgaaaagaccaaatctatgtctgattggtgtacctgaaagtgacagggagaatggaacca

SEQ ID NO: 474013 - DNA, 518 bp, Homo sapiens
aaaagtccagaagccagaggattatggctgcctctgctgagtcatccaggttttcagggaagtgggggaaagccggcagtcacaggcctcacccagctgtcatgcaaaccaaagggccggtctcactctcaccgagccccgccaaaagccccaagtctgtttccaggtggagggcgagcgggcttgagaacttgcctaggctacccgccttccagctgcgaaagaaaaggacttggtttgtcccctgcctgtggagtctgcacaccggattcgtgccctcctccgattatcccagttcccaaaaagtaggaggcacagttcctgaaaagagggttctgatgtgggatgtgcgagagagcagaagagaatataagggcccgatcatcacaggccttccaatccatgctaaggaaactggactttattttaatgttgaagagaagccactggagggtttttgaatgagggagggacttaagctttgcattttaggaaaaggcagtctagctgtcctgggt

SEQ ID NO: 474014 - DNA, 772 bp, Homo sapiens
cctgccttctgcattggtcttgctgggagctgcagaccggagctagtcaaggaagcaagagcatcatgagttatgtctgtgaaatgtgggagtttggtgaagtggtctctaatattctatcgttccacaaacatatggacactgttaccaacttcttcagtatgttcttctctcaggacagtcacctccctttgtccattccagaaacacttgccacaaagtcaagctataaaacagtagaatatgatgatgacttagataacaatccttttaaagcatcactgttccctgagacagaacaatattctaggaccctgaagaattatgctaaatccattcttcctgtgctctataaatggaataacaaagcctggatgacagcacatctgtttacagcacagtttactgaatattttaagcctactgttaagacctactgctcagaaaaaaagatttctttcaaaatgtttctgctaaccgacaatgcacctggtcacctcaaagctctgacagatacatacaatgaaattgaggctttcatgcctgctaacacaacacacattctacagcccatggatcaaggaatcattttgactttcaagtcttcttatttaagaaatacatttcataaaactgtagttgccatagatagtgattcctctcatggatctgagtgaagtaaactgaaaactttctggaaaggattcaccatactagaagccattaagaacgttaatgattcatggaaggaggtcaaaatattaacaataat

SEQ ID NO: 474015 - DNA, 905 bp, Homo sapiens
ggcggcggcggctggggcgggacgggctacagcaaaaggcatttttgccattacccaaatcaagcacaaaatggatctagtcacctctctcctcctctcgctcctctatcctgtcaccccccaactcctatctcctctctccctggcccctctcttctcttcccctgtcctgctgctctctctccaacccccactcttttctcccctctcttcccccttccccctcctctctccccctcctctctccccctcctctctccccctcctctgtactccccctcctctgtactccccctttcccttcgccctccccctttcccctcgccctccccctttcccctcgcccttcccctttcccctcgccctccccctttcccctcgccctccccctttcccctccccctttcccctcgccctccgcctttcccctcgccctccccttttcccctccccctttcccctcctcactttccccgccccactttcccctccccctcccccactttacccctccccctcccccactctctcttgtaattgttaaactagaatatttgatttttgagccctactggtaaacaatggaggctctcattcagggatttagggctgttgaaagaagcctggttgtattcattctttcagaagctaacagtgtgggtaaaatatgaaatgtttgctatcaagttaaagaaaaaaaaggttctcaaaacaaactgtgaagggccaatgcaattcactggtcatatttttcaaattattactcttatattcaaataacaggaagattaaaaaaacatagaaatatttagctagaagggaataccaaatctaaatccctttcattttatagagacccagataaattatactttgaaataattttttaacaaagtctgtaaaaa

SEQ ID NO: 474016 - DNA, 549 bp, Homo sapiens
ctgcagttgtgcctgatgagctccctcaccaccatcttagaaggagcaaggctcccacttgtccatggctcccactggctccatggagtgcacagccctggccacattttccccacagcaacagcaggtgaggtgcaggtgatgccacaccctggccaaccgcacacaaacaaattcgatgctctcagcgctggctccgtaagtcccggctgcgccttcagccgggtgcttgagggctcccaagacacagcaaggagcgaggttgaggctgcagcagaggctccaggcctggagtgggtcctgcccagccatgtcagagttgcagaggttcatgggcaggcagctttgctatcatcttcatctttaataaatatacatgtgtatcaagctcctgttccacacaatagcacaccattagttcctcatactccaattgctggtcaaacgaggcaagcaacagagggagagtgaaacaaaagccaaattaacacagctgttaatatcgattacttgctatgcaccaggtatttaaggtcttttgtgtctgtt

SEQ ID NO: 474017 - DNA, 526 bp, Homo sapiens
aaattctcgacatgtggtattcaagttatggcatttatgaatgtagctgccataaccatctctgtgtgggtttttgtgtggacgtaaattttcagctcaattgggtaaataccaaggagtataattgctggatcatatggaatctgtggattcacaaggtgctctgctgttatcagggtggtgacattacacctattagcaagtctcctcaacttgcagagaactgctctggcctggatcattctgtagaaaaactagttactaatgctattgaagaaaaatatgagacaaagtcacagactcttcctttcaaccaatatctgctgtatacccagtttgtttccttaataaatgttgctggtgtgccagccatggacaggccctgcactaggcactgggtggacaaaggtggacaagagaggcctggccctccccacttggactggatattctgtttcggaagatcggcagttgatgtgtgcagctgacacgtgcactgaaaaaaataatgaggaaggggagaaga

SEQ ID NO: 474018 - DNA, 2657 bp, Homo sapiens
agctgcctccccgcggggcagggcttaggacctgcagccttccatgcctgagcctcccccttccccaccccccgccatgggctcctgcgcagcccaagcctccccgacaagcgccgctccctgctccacggcacccagtcccatcgaccgcccaagggctgaggagtgcgggcgcacggcgcgggactggcacgcagctccacctgcggccccggtgcgggatccactgggtgaagccaactgggctcctgacttcactcctgaagccagcgagactacgaacccaccgggaggaatgaacaactccagacgcgctgccttaagagctgtaacgctcaccgcgaaggtctgcagcttcacgcctgagccagcgagaccacgaacccaccagaaggaagaaactccaaacacatccgaacatcagaaagaagaaactccggacatgccgccttgaagaactgtaacactcacagcgagggaattagaagatctctcttaatacagccaccctgctaaaagttcagaaaaatcactttcacgtaaaaatgagcaatataaaaattttgaggtaaaattctatacaaagtgataaaaaaaaaggaacagaataacatcttacacaaaatgaaagcatttatcagacatgtcattacttgtctgtaacctattacttcaaaatgagctaaaagacattaagaataagatatacggcctgaaagaattacataaatcaagccacgtacagtgctcacacctgtaatcccagcactttgggaggccgaggtgggaggatcacttgcactcacgagtttgaagccagccagggcaagatggcgagacgctgtccccacaaaaaaatacaaagaaatagctgggtgtggtggtgcgtgcctgtgatcccagctatttaggaggctgagaaatgggggaagaaagaataaacttgaaaaaaagaaaaatcattctagaaataagaaaatacactagagggacagatagcaaatagatacaacaaataacgctttaaaaaaaactagaaggttaaaatgaaaaacaaaatcaaacagaaattaagagagagagaaggatttaagggaaagtatcgaatactgaagacaggtaaaggagatccaacatatagaaaataggaatccctgggtcaggtgtggtggctcacgcctgttatcccaccactttgtgaggccaaggtgggaggactgcttgagcccaggagttcaagaccagcctggtcaacatggcgaaattctgtctctactaaaaagacaaaaattagccaggcgtggtggcacatgcctgtagtcccagctactcaggaggctgaggcatgagaatcgtttgaacctgggaggcacaggttgcagcgagccaagatcatgctactgtactccagcctgggtgacaaagctcaaaactaaaagaagaaagaaaaaaaagtaggaatccctggagaggaaagcaaaggaagaaaattgtccaaatacctaaaactataattcaaagaaacattcctgaaattaaaaaaatattctgaaactacatattgcaaaaggaccctggacactgaagcatatttgctccaaatgaccgacactaagatataatctaataaaattactggacttaagacttattatgccagaagaaaaaggagtaacatatttaagatatgcaaagaaaaaatgtgaggcaacatttttaattcagtaaagattgtggtttaagtataaagaacacagcaaactgttacgaaaattcaagaattcagggaatacagtacccatgagccttttccaaaaaatctaacagaaatgaagtttagacaaaatgactacagacattgacataaggactgaagaactggtactgagcactgaacatacctgtattactaaaaagtacaatagggttagagttaaaagggggagagtatcatataaatggctaaatgtcctgaaaatgcaaatctaatacaactatcaaaaaataatgcaaagagtgagtggctcacacttgtaatcctagcactttgggcagccaaggtgggaggatcacttggggccaggagttcaagatcagcctgggaaacctagtgagaccccacctctacaaaaaaattaaattaaattaaattaaaaattaaaaatcattagccaggcatggtggcacatacctgtagtcccagctacaacagaggctgaggtgggaggatcacttgagcccaggagttcgaaattacagtgagctataatcgtgccacggcgctccagcctgggcaacacagcaatatcctgtcttcaaaaaaaaaaacataataatggagttagactagggatagcatatgtaataaaatgtttactcttcttgctaatcataactggtagtggaagtatttagtattgttattctaagactgttgtgtgtaaggtagagaaataagcagatgggcaattatgggatattctaatgctaccatcccctttgttctcgagaaccaaaactgtcagcatggaagaaaggagataaagatgtaataaataggaggttaaataaaagccctgtaatcctgattatgaaatggaaatatcaggatgaactcatgaggcctggacacactcacaacaaggagcactgttagc

SEQ ID NO: 474019 - DNA, 763 bp, Homo sapiens
ttggatagaatttagctttcctggctccccacaacccccataagtaggctccctgggtgcccttttgtcaactcttggatctggaggtgaggtggatggacctggggaaaagggctgtgtgggccctggatgtggacttggagtcagcaagcaggagactccaagacccagggtactcagaatgtgatctccaggtggtcatgggctccaagtgggcaccgttccttgtgatgcagaagcctcaccccacagtaaggggccagagaagagaagaccagggctccctccagcagtgctccccagtgcagcccaaaaaccagtgccagtccaagagcaggtccgagaaagctcagcacttcagcttctgtgctgaaaaaacagggtactactgcctggttttaaacaaagagctgctttatgaaaaggattactctggtgcgataatgagagagacagaagggagcaaaggtggaataaggagacctatcaaaaggcattgcaatcatccaaacaagtcatgacagtaacatggaccagggttgcagcagtggagctgagcggggttaagattttgatccagatgagagtcagcaagatctccttatgggttggatgtgtgacgtgagagacaggtgtctgtgcatattttattgtgttctgggcattttggatgatgcattgttcagtgtctggattttgtcgtcttcctttaaatatcagattttgtctggcagacagttaatttccttatggatcagcttga

SEQ ID NO: 474020 - DNA, 502 bp, Homo sapiens
ctgcaagcagagcccacaggtatctccaacgttgacctgagaatgttttcagagcagaaatgcagaagatctttctttcaaagcacacatgcctttgttccctgctttggatcacttaaggcaggcttgagcagcctcttaataggtttgttttgcggttggtttattcctccgttgggtgcaagggtggttttctttctcccccctcagccggacctttgggatctgttttactcacctggaaagttgcataatcttgacaagcacaaagcaattaagagattcctagctcctgctgctgctgctgctgctgctgctgctgctgctgctgcttctactatacactgggcagccaccgaggagggcaccagaacaaatcagagtgatgaccgcctcctctgctgtttcgacactccccactcatctttgggtgacatcttgtatgactgaagtacaatatctaaactgacactgacattggtacaacactaagacaggtctt

SEQ ID NO: 474021 - DNA, 593 bp, Homo sapiens
acagtgggtatttaacacccgattgtgaatgaatgcatttgcccttcaaagcaggaaggcctttcttcttgctgtgggttgtggaggggcctcggtgctgtcggtccctggaggtccagaatctcgtccaggctctcttagaggggaggaagccccacttcaccacccagcatatttccttcaggctcttgcctacctgctggccgcacttttggctgttgtgaataacgccatcacccagctccagcgattatcaactcagagccaatcctgctgcagcggacgtgagcttctgctctccctcggtgccacctctttccccctcaaacctagtcctcgggttcttgaagcagggaagactccaaagattccagaccactgcaaccatcctagttttagggtccctagttttagggccctgcccagagacatcgccaacatctcactggccagaactatgtcacatggccatccctagctgccagggaggctgggaagttaagtacttcagctttctagactctgtggtcatgatggcaagggcaaggggctgaagtgggtgttgagagagccaaccaaggtatctgccacgc

SEQ ID NO: 474022 - DNA, 525 bp, Homo sapiens
cagcttctgagatcagacaagattgggcaccttcagggtggtatggccctatggtatgtggcagaagaaatttctaagcagcaaagcattcaagatgtgactcgggtgctgttaaaggcattcagttttataagggaagtagagcataaaagttcagaaaatttgcagcctgacaatgtgatagaaaagaaaaacccattttctgaggagaaattcaagctggctgcagaaagtaatgaggagctgaatattaatccccaagacaatggggaaaatgtctccagggcatttcgtattaagcacatagagcctcagttatacaaaaagaggtacatgaaaatggagtctttgcaaattagttcatattttaatgaaaataattttgctgagaaagtcactttgtttcctcacctaagaattgaggaggttgaaatagatctgctcttccaatatgacagctactagctgtacatggctatttacatttacacctaaattcattaaatgtaaataaaatgaaatatt

SEQ ID NO: 474023 - DNA, 610 bp, Homo sapiens
agttatctgcagaagatggtaggaccttgctccaaaatcctagaggcctcctctgtgactcacctatcggggcctgccaaaggctccaaacagcaaccccatctgccactgacacctcaagcaccattggatctgctgggtcatatggctcaagtggcagagcagcttgcacagcagcctggacctgttgcagagccttctgttctagaacccactaaaaactggcagcctttcgggtcactcgctgaaggaaaattgcttctggtgggccttatggacaggaatggagtaaaaggcatttgccaagtcaatggctgcatactaggtaccaggaaatgtggagccaatatggaggttctgccagctgccaagtatgtctatgccaactatgcattctgacactggggaaatgaccacaggatgagtccagggacccactggacacattttttcatatcaatagcactacacttctaaacatgcaggtcaacgaataatcacttaataatttgtagctgtttttttcaaatgattaaaatgtaaggtaactcttcaagcttatggtcaactaaaatctcatgaataaaatgttaatttggttatcaccttt

SEQ ID NO: 474024 - DNA, 1223 bp, Homo sapiens
gtgaagcagctggattgatagaatggtggaaaggccttttgaagtcacgactacaatgccaactaggattcacgggtccaggaatcaaggggtggaagtggaagtgtcaccactcaccaatatccctagtgatccactagcaaaatttttgtttcctgctccctcaacattatgttctgctggcctagagttattagttccagagggaggaaccctgctaccaggaaacacaacaatgattccattaaattggaagttaagattggtacctggatactttgggctcctcctagctttaagtccacaggctaagaatggagtcacagtgttggctgaggtgattgacccagactatcaagatgaaatcactctactattccacaacggaggtggggaagagtatgcacggaatacaggagatccattaaggcatctcttagtattaccaagccctatgattaaggtcaatgggaaaactacaacaccccaatccaggcaggactacaaatgactcagccccttcaggaatgaaggatccattgtatctgaaaaagtatgagagaaaaacttattcaattctactctattttataataggtactgcaaaataaggatgataatttacaccatgagaatagaaatgaatcagaaatgtttaattgtgaacttgagcatactaagttttaaaatgtttaaggtacgcacaatgaattactaaatcgtctttatttcttatgcaaaaaagctttcagttatagagcatggatagtttcagattttcatgtaatctagaatctggaatctccatagtaacctgaattgatcatttgtcattgaatatgatccattgagaaatgcaggaagagtttaaatttgtaatgaaatgatacttgatattcttggtaagtcagtgtcacaaagccatatattaactttcattactatccagagtgatacattgtgctcacttcccccattcatgtactattttcagtgttgcacaagttaatgaacactttcaattctgtctcatcaataaaaagcactccacaaattctcaggggataaagatcatctaaatcttcaggccaaaattcatagttctacactatttctgaaatacaattcatgcttctttattatgcatcctttctgctcttatgtagaaacctgtgattaatactttactaaaatttctcctgacactctttccacagggtaga

SEQ ID NO: 474025 - DNA, 966 bp, Homo sapiens
ccgcgagggtccgcggcttcattcttgaagtcacgtgctggcagtcctcacagccctcgctcgctctcggcgcctcctctgcctgggctcccactttggcggaacttgaggagtccttcagcccaccactgcactgtgggagccactttctgggctagccaaggccggagccggctccctcagcttgcaaagaggtgtggaggcaggcgctggcgggaacctgggctgcccgtggcgcttgcgggctagcgcgagttccgggtgggcgtggcctcggcagacccggcattcggagcagctggccggccctgcccgcaggggcaatgaggggcttagcacaccggccagtggctgcggagggtgtactgggttccccagcagtgccagcccaccggcgttgcgctcgatttctcgcccggccttagctgccttcccgcggggcagggctcgggacctgcagcccgccatgcctgagcctcccaccccctccgtgggctcctgtgcggcaagcggagcctcccagacgagcgccgccccctgctccctggcgcccagtcccatcgaccacccaagggctgaggagtgcgggcacacggcacgggactgccaggcagctccacctgcagcaccggtgcaggatccactgggtgaagccacctgggctcctgagtctgctgtaacactcaccgcgaaggtctgcagcttcactcctgagccagcgagaccacgaacccaccagaaggaagaaactccgaacacatctgaatatcagaaggaagaaactctggacacacagccttttaagaactgtaacactcaccgcaaggactatgatgcagatttgatacctgtgaaaggaaatgaagaaagagggaagattgggtagaaaaactcctggttgtgttgtagctctaagaaagtgttggctaatccaaaggcaagatctggtagaaatcctgattaacc

SEQ ID NO: 474026 - DNA, 3034 bp, Homo sapiens
ggtggggggtggtggggactcaggacagcagagcagcaagctgcgtctaccttggaaaggtggagagaggactgcagggagctgagggtggaggaagggggagatggcaggacagaggaagcaggggacagacaggaggaagagatggtgctccgggccaggtgtggaggggcaacccaccccttcatctggtgcccaacgtgggtgcttttctctagggtgaaggtacgctcgagtgtggtcattgaggacaagtccacaagagatcccgagtacgtctacagtcagccttgcgatctaaaagattggaaaaaaattggcaaagaattaaaacaagcaagtagggagggtaaaatcatcccacttacagtatggaatgattgggccattattaaagcagctttagaaccatttcaaacagaagaagatagcgtttcagtttctgatgcccctgaaggctgtgtaatagattgtaaagaagaggcggggaggaaatcccggaaagaaatggaaagtttacattgtgaatatgcagtagagctggtaatggctcagtcaatgcaaaatgttgactataatcaattacagcaggtgatataccctgaaacgttaaaattagaagaaaaaggtccagaattagtggggccatcagagtctaaaccacgagggacaagtcctcttccagcaggtcagatgcccgtaacattacaacctcaaacacaggttagagaaaataagacccaaccaccagtagcttatcaatactggctgccggctgaatttcagtatcggccacccccagaaagtcagtatggacatccaggaatgctcccagcaccacagggcagggcgccataccctcagccgcccactatgagacttaatcctacagcaccacctaatagacagggtagtgcattacataaaattattgataagtcaagaaagcaaggagatattgaggcgtggccattcccactaatgttagaactgataccacctggagaaggagcccaagagggagagcctcccacagttgaggccagatacaagtctttttctataaaaatgctaaaagacatgaaagagggaataaaacagtatggacccaactccccttatatgaggacattattagattccattgcacacggacatagactcattccttatgattgggagattctggcaaaatcgtctctctcaccctctcaatttttacaatttaagatttggtggattaatggggcacaagaacaggtccgaaaaaatagggctgctaatcctccagttaacatagatgcagatcaactactgggaactggtcaaaattggagcactattagtcaacaagcattaatgcaaaatgaggccattgagcaagttagagctatctgccttagagcctgggaaaaaatccaagacccaggaaccgcctgcccctcatttaatacaagacaaggctctaaagagccctaccctgattttgtggcaaggctccaagatgttgctcaaaagtcaattgccgatgaaaatgcccgtaaggtcatagtggagttgatggcatacgaaaatgccaatcctgagtgtcaatcagccattaagccattaaaaggaaagtttcccgcaggatcagatgtaatctcagagtatgtaaaagcctgtgatggaatcggaggagctatgcataaagctatgcttatggctcaagcactaatgggagctgctttaggaggacaagttagaacatttggagggaaatgttataattgtggtcaaagtggtcatttaaaaaagaattgcccagcctcaaataaacagaatataactattcaagtgactacaacaacaggtaaagagccacctgacttatgtccaagatgtcaaaaaggaaaacactgggctagtcaatgtcgttctaaatttgatagaaatgggcaaccattgtcgggaaacgagcaaaggggccagcctcagtccggccccacaacaaactggggcattcccagttcagccctttgttcctcagggttttcagggaagacaacccccactgtcccaagtgcctcagggaatgagccagttaccacaatacaacaattgtcccccgccacaagcggcagtgcagcagtagatttatgtactatacaagcagtttctctgcttccaggggagcccccacaaaaaatccccacaggggtatatggcccactgcctgaggggactgtaggactaatcttaggaagatcaagtctaaatcgaaagggagttcaaattcacactggtgtggttgattcagactataaaggtgaaattcaattggttattagctcttcaattccttggagtgccagtccaggagacaggattgctcaattattactcctgccttatattaaggttggaaatagtgagataaaaagaacaggagggtttggaagcactgatccaacaggaaaggctgcatattgggcaagtcaggtctcagagaacagacctgtgtgtaagtccattattcaaggaaaacagtttgaagggttagtagacactggagcagatgtctctcattgctttaaatcagtggccaaaaaattggcctaaacaaaaggctgttacaggacttgtcggcgtaggcacagcctcagaagtgtatcaaagtactaggattttacattgtttagggccagataatcaagaaagtacttcccatgttaaaaaacatttattatcgtattttgctgtaatgggagttcgagaaaaaattaaaactgacaatggaccaggatattgtagtaaagctttccaaagattcttaaatcagtgaaaaatttcacatacaacaggaattccctataattcccaaggacaggccatagttgaaagtactaatagaacactcaaaactcaattagttaaacaaaaagaagggggagacaataaggagtgtaccactcctcagatgcaacttaatctagcactctatactttaaattttttaaacatttatagaaatcagactactacttctgcagaa

SEQ ID NO: 474027 - DNA, 811 bp, Homo sapiens
gccaatttggcaaggtaaaaatacaccctccctccccaagatggctgctgaagatgagttactgttgccgcggctccccatgctgctcgaaacaggcaaacagcttctggacgaagtagaattagcagctgaaaccaccggttaccagatagtccaggagaaggtgttcaagggcctgggcctccttgagaaggagaggcctccagtgaaatccttcattctcacgcggaacacagcccaagccaaattatttggagctagttatccaagtctggcaactatgacagtgagtgactggtatgaacaacatcggaaatatggagcattgccagatcagggaatagccactgcaacaccagagaaattcagaaaagcagctcagcaacagaagtatcaagaagtgaaggagggagaggatgatgaacactctacagagttcgggagtgggataactggaaggacacccatcctgggggctatggcaaccgacagaacatgggctgatcttcccccaacacgacaggactgcagggtgcacacctcccccaccaaggaaaaccatgcagtgttcccctccctgggctcccgcttcagctgtgtacaacgaaggcaaagatgctaaatattgctttgcattcaatgaagtgtcaagtgattaaataaaacttctcaggtgcttgctgtagaaagtggttgatgtttttggaaatataagtacggctgtgacaatgtctgcaaaatacatcctatatctaagagtccaaatccccatttaataaataaggaaagaactagccaatctcatgaaagc

SEQ ID NO: 474028 - DNA, 809 bp, Homo sapiens
tgggaagaggcattacttgttgatggtaacagggacctggaatcatagagttaatttgggaagagatcttcaaactcatctgtttgtggagctgcctgccagtcctgcgcctgcgccttcactcctcagcccttgggtggtcgatgggactgggcgtcggggagcagggggcagcgctcgtcggggaggctcaggcatggcagctaaggaccggcgagaaatcaagcacagcgccggtgggccggcactgctgggggacccagcacaccctccgcagccgctggcccaggtgctaagcccctcattgcccggccagcagggccggccggctgctccgagtgcggggcccgccaagcccacgcccacccggaactccagctggcctgcaagcgctgcgcgcagccccggttcccgctcgcgcctctccctccatacctccctgcaagctgagggagccagctccggccttggccagcccagaagggggctcctacagtgcagcggtgggctgaagggctcctcaagtgccaccaaagtgggagtccaggcagaggaggtgccgagagcgagcgagagctgccagcacgctgtcacctctcactaagatatgatgttctgtgagggtccacttgataaaaatccctaggtgagaagcaagaggaaggataggtctgtaattagaggggctggtgactgcaaaatgaattagatacccatcatttcattcattctaaggaggtacttagaatgagaaaaacatgactcaaaggaaagcaaatataagcaaccgtgggtgtttgctcgtcttt

SEQ ID NO: 474029 - DNA, 2670 bp, Homo sapiens
ggctcagcatgtgtccagcgcgcagcctcctccttgtggctaccctggtcctcctggaccacctcagtttggccagaaacctccccgtggccactccagacccaggaatgttcccatgccttcaccactcccaaaacctgctgagggccgtcagcaacatgctccagaaggccagacaaactctagaattttacccttgcacttctgaagagattgatcatgaagatatcacaaaagataaaaccagcacagtggaggcctgtttaccattggaattaaccaaggccctgtgccttagtagtatttatgaagacttgaagatgtaccaggtggagttcaagaccatgaatgcaaagcttctgatggatcctaagaggcagatctttctagatcaaaacatgctggcagttattgatgagctgatgcaggctccaggacgtgctccaggatttgcctgcaaggggccagtttgcatatctgcaaatattgctgggaaacaagcaagattggtgcctgattatgacccattaattcgggcagtgactattgatagagtgatgagctatctgaatgcttcctaaaaagcgaggtccctccaaaccgttgtcatttttataaaactttgaaatgaggaaactttgataggatgtggattaagaactagggagggggaaagaaggatgggactattacatccacataatacctctgatcaagtatttttgacatttactgtggataaattgtttttaagttttcatgaatgaattgctaagaagggaaaatatccatcctgaaggtgtttttcattcactttaatagaagggcaaatatttataagctatttctgtaccaaagtgtttgtggaaacaaacatgtaagcataacttattttaaaatatttatttatataacttggtaatcatgaaagcatctgagctaacttatatttatttatgttatatttattaaattatttatcaagtgtattctgaaaaatatttttaagtgttctaaaaataaaagtattgaattaaagagattctgcaatttttctaatgtacttttaagtgttaaaatacacattgtgggaaaattgaaaactctgatgagacttaacaaaattactctggaaagaatgccacaatattcttattcctttcctagtccctttcatctcattttaaagggaccctagtaagacaagatatgctttactactaaggcagccaagtgagtcatggtttttgagggtttattatttttgttcaacataagactaaaagtatgctgtgcattagaaaaatacttcatagtattcttcaaccagaaaaaaaatgtcactaagaggccttctagcctaattattctaatttttgtgaccctttgggctctgagagaaaagttgtctctaatttgcaaccagaaaatctctccatttgtttaaaactgtatagaacttttgcctgaaccacatggataattgccttactttggcttaagagatgtgctcttaatgagctaaatgttaaattccatctttttaattctctaaaccaggagtccccgatccccaggccatggagtggtactggtctgtggcctgttgggcagtgggccccacagcagtaggtcctcctgcatgacaaacattctcgtttttcaaattcttgccctattagacattcaataaaatagaaaccatcagaagctagatcccatcacctatctccttctcttgagtgattcttccacaatcttgaatggtccacaagtgcttcacagacatgggtttctttcaagtgtcgagtctggggtctcagcagctttgacagtgaggagagacgaacggggctgtagagttgcagccacccctcacttggaatggtgactactggttgtctgggcccagagatcaggagggacaagcagacggtctcttccatggactgggtttacacacaagaacacgtgtgtttcttctgttctagaaattagcatgggatatgcttcaaaaacatgactggccacagaaacagcttcatggttcattccattctttattgcatggttagtttttcactttttttaagcctgtgtctgcagtttacaagtagtgtagtatgcttgcaaccaaatcattccaatgctccccattggtctcctcttctgaaaaaggaaggtaatactagaatctacctaaaaggatcagagaaagggtaaaatggaacaactcgtgcaaagggctagcgttgcacctggcacatagtaagtgcacaataaatgtaagcacattttgaaatgtattattagtctttgggctaagcacctgcaccgaatttgttacctcctctttgctgctatttcctcattgatgaaattcagaaaacggtgggacctaattaactgtgttattgtgaagattaaatgacacaatacagtgccagcacctagttattactcaacataaatttgtcacagttctcacaagacatcagaacacccgctgatgtgctgtcccccatggcactcagcatattaagtgtggtcggcacaagcggctgcctggtgtgaattataattcccttgacttttaacaacagttggttttgaccccagctccctggtgcctggacctccagatccaccctggagcccacaggtggattt

SEQ ID NO: 474030 - DNA, 823 bp, Homo sapiens
aagtttgaccattctggtagtctgtcacggcttcccttggctaggaaaaggatatcccccaaccccttgtgcttccagggtgaggtgatgccccgccctgctttggctcgccctccatgggctgcacccactgtccaaccagtcccaatgagatgaaccaggtacctcagttggaaatgcagaaatcacccgtcttcttcgtcaatcacgctgcgatctgcagaccggagctgaagattgcttggaaaaagcggactttgacctgcatttttgagaatggaaataaattcaatctggataccttaagaattgagttcaacaattctgacccacagaatgacagtgttgagtttcctggattttctgtttgtctcatacatttcagacttggagctgaagaagctggcaaccaaaaaccaccaatggctggaaaaggtgcactgtctccaaacccagagcataagaaaacacagaaaactgaaaagaaacatgtgtctgaaaatgacatggtaattgcttcaaaatatgagccactgcttcataatttaagtccctctaaggcctgatatgccttagtcatctttggaaatcagtatctttgagtcaatgaatcttttggctgcttaaccttctccatggtaggaacagtttgaagctggaaggatgaaccagctttgcctcagtgactggacccttattttcatatgcagtcaggacccaacaataaaagcaaatttttaaaaacgctatgcttagaattgaaagaatgcagaaagaatgcaaattgcctttacagctgcctgaccatcctagtgaatccttt

SEQ ID NO: 474031 - DNA, 1657 bp, Homo sapiens
ttccctgaccccttgtgcttcccggaagcacaactccccacatccgtgcactaggtacagcttagtgaccaacaccttcgagatagatatgagtacatggactcccagtagacaccagatgtgtaggccaaaacccaacattgtggcctgtagaatccaactgactgtgaacaagcttacctacatcctcaagctcctcttggattattcttcccctcacattgacttgacaacaggaccctcagctgcaagtctgttggagtttgctagaggtccactccagaccctgtttgcctgggtatcagcagcagtggctgcagaacagcagatattggtgaaccacaaatgctgctgcctgatcgttcctctggaagttttgtctcagaggagtacctggccgtgtgaggtatctcaagctgtgttctgggagaaccactactctcttcaaagctgtcagatagggacacttaagtctgcagaggttactgctgtctttttgtttgtctgtgccctgcccccagaagtggagcctacaaaggcaggcagaccttcttgagctgtgcttccttgagcagggagcttgctcttgagagaagtgacttcagctgaggcatttcccgcagtgtggactgaaagctgagggttatttgctggcagtactcccagaacttgactggactcaaacatctggcctcaagtgatcctcctgctttggcctcctaaagtgttgagattacagacatgaatcaccgcactcagcctgagacatacttctttaattcctgtaacattattttatgctttgatacctgatggataatgcagggccaagctgcaccatgttcctaagagaaagccaagaacataagtcacacaagccctcaggaagagaaggaaagaatgagtgacagtagaccgcagatgtgagcaaattcatggaggatggaaactgaatgagggaatggtggctggcttaacttaacagaggaaagtgcattctaaatacctatcataaaagcaacaaagagaataagcctatccactccacactttggaactgcctgtttaaaagttgatccccggaccccaccaagtctacaagctccacctcaaggacagaatggaaactgtattcatcgaggggcttttaattgacaaataaaaattgtatatatttatccatgtataatatgaaggtttgaaatatgtatacactggggaatggctaaatcaagctaactaacatctgcattacctcacatacttattttttgtggtgagaacacttaaaatctactctcttaataattttcaagagtacaatatattgttattaactatagtcacaatgttgtctagcagacccttctcaaaatctaacaaaatgtttggctagtaataggggctcaaaaagtatttgtgagtgaaaagagtgaatatattaattaatttgttaatgtattcactggcaggtgtatttacctaattcagtctttaaaataatgttctatattccaagttttccttaaggagttaacccaatattatagcttgattgtttacacaagacccataaaacaaactataatagcaatagtcaacaaagagatgatattggcataatataatgctatattggttgtattgtgctgccata

SEQ ID NO: 474032 - DNA, 1444 bp, Homo sapiens
aaggtttctattttaggtgcattagtttctatttcggcatactttacttttacttaactaaaatttcaaataaaatgtatccacttttatgatctcaacaagatcggtcattcctatagcggagttgaaaactttcaacttattcacaattatcaaaagaatggagcagcccccacagagacttccagcaatgagttgtaaaatgcagtctgcattaagtagcttccttacaatcatcccgatggtaaaagtgtcaaatttcgcaaacgcctggacaaggaagtgaaatgatcatctaataacgcagttgactcatctgtcaaataagcgagtgggccagggtccctgagctcactaccctcagattctaactccagcttcacatcattaggcgtaagcagccaattgggccgtctgggagccgtgcatcctgggagttatagtttccggctccctccttcagattacaagctccacagagccgcgggaggacggttgcctggtattattagcaagcagcaaatatggcggtggcgcgcgtggacgcggctttgcctcccggagaaggatcagtggtcaattggtcaggacagggactacagaaattaggtccaaatttaccctgtgaagctgatattcacactttgattctggataaaaatcagattattaaattggaaaatctggagaaatgcaaacgattaatacagttatcagtagctaataatcggctggttcggatgatgggtgtggccaagctgacgttgcttcgtgtattaaatttgcctcataatagcattggctgtgtggaagggctaaaggaactagtacatctggaatggctgaatttggcaggaaataatcttaaggccatggaacagatcaatagctgcacagctctacagcatctcgatttatcagacaataatatatcccagataggtgatctatctaaattggtatccctgaaaaccctgcttttacatggaaacatcatcacctctcttagaatggcacctgcttacctacccagaagtcttgctatactttctttggcagaaaatgaaatccgagacttaaatgagatctcttttttggcatccttaactgaattggaacagttgtcgattatgaacaatccttgtgtgatggcaacaccatccatcccaggatttgactatcggccgtacatcgtcagctggtgcctaaacctcagagtcctagatggatatgtgatttctcagaaggaaagaggcagcatggtgatgtgggcagagataaaggtttggtgtaaagagagacccacaaagagagatgagacctgcttacgatagacaggggaaggcttcacttttttctctgctatctattagctgtgtggccttgtcaagttccttagggcttttctgaggctaagtttcctcatctgtaaaatgtgaatagc

SEQ ID NO: 474033 - DNA, 905 bp, Homo sapiens
ctcccacagtgcagcagtgggctgaagggctcctcaagtgccaccaaagtgggagcccaggcagaggaggcgcccagagcgagcgagggctaagaagacaggaaaatgtgggaaagtttggaacttcctggaaacattttcaatggctttgaccaaaatgctgataatgatatggacgatgaaattcaggctgaggtcatctcagatggagatgaggaatttgttgggaactggaataagaactttgaaattgagggagatgatttagggtatctggcagaagaaatttctaagcagcaaagccttcaagatgtgacttatgttctgttaaaagcgttcaattttaaaagggaaacagagcatgaaagtttggataatttgcagcctgatgatgtgatagaaaagaaaaacccattttctgaggagaaattcaagccagctgcagaaatttgcataaagggtgcaaggccaaagcattggcagcttccaggaggtgttgggcccgtgggtgctcagaaatcaagaattgaggtttgggaacctttgcctatatttcgcaggatgtatggaaaagcctcggacggagaaaaggggagcagtcagaccacaagagcattctcaaacaaatcaattgtaaggagaagtaaatttgaaagttgaagatctggaaactaattccttgacaaattttcattcccatataatccttgaaagtctaggagcagctctggatactcagttattttatcatgtgctctattacagttctctgtgcctgtatttgtctccctcactagatagcatgctccttaaaggaatgtatcttttccaactttgcaatccccatacttcacacaatgcctggggtacagttggattacaatgaatttttgatggaattaatg

SEQ ID NO: 474034 - DNA, 565 bp, Homo sapiens
tgtttcagttgaaggtgttgtgtttattcgccctttctgttcctctccatcactatgagtggaagtggtcagggacatattgtagagtacggaagaagaaagaactttcataattatgatacaataagatgttccagactcatctctcacactgatactgtcctagccctgaaatcagccatgtctcttagtgaaacaaagaaagaatggtgtgggagaaggccagttatgaagaagcatctaggaaaagtaagaaaagcagcaggaggagacaggactaacgtgcagcttccacttggatggaaaggacagcatatggaggttcacatcgtgaacttttgctccaacaactgccacaggaacataccaggaaaacctaaagaattcacagagcctttgaaagaagaggcctgctggaaagccattcctggccttatcttgcaggcatccttggagaagggaaggcagcccgtgaaactagggaggggccacagggtgaaggaagtgcctagctaaactttgtaataattttgactgagcacaaactttcctgagcagaatccag

SEQ ID NO: 474035 - DNA, 553 bp, Homo sapiens
cggcttgcactgtgtacctggaaaagctgcagacactcaatgtcatgccagcccatgaaagcagctggaggaaaagctctaccctgcaaagccacaagggcagagctgcccaagaccatgggaacccacctcttgcatcagcatgacctggtcgtgagacctggagtcaaaggaaatcattttggagctttaagatttgactgccctgctggatttccgacttgcatggggcctgaaggaactgaagctgcttgtaaggttattacacaactttttccttggaatcacaagccatactgtggtatgaagaggaaagtaccaagggctccatggttaagaaggctctcaatcctgaacaaattgggagagctggtcatcctaacgcaggatgataggatgtgcaaagtaaaacgaagtttagcaaggtgggcagaaggcatatgtcatgcagaacttcgcaaattagggtaagaagatggattctattctaagtataatcagaagtcatatgattatcttgagaaaggggcgacatgatttttactgtcagcat

SEQ ID NO: 474036 - DNA, 787 bp, Homo sapiens
tctcaggcccctgtgaggtggtagctgcagctgtgtcagcccaaactcaatctgacggtggggcacagcccaatgttaaattctcaaaacgtcatagtgaccctgggaccagagagggtagggtccctcccaggaaaacggcatgggcaagaagctatggggagtgaagtgggctcatgtctcaggctcaacaacattcgacaacagggtggtagagcccctcccgggggtgcatgtgagctcctggtctccctcctccctccatggagtggcacaatgacagcagccatttgtggataccccatatctaggctttcaaggtggtgcctagctgaggcttttctaggcttggatgcctgtgggaatccatgtgggctcctcttctggaagcaacgtttctgtgcaatctttcagcagctctgtgataccaaaaatgaaattcctcgaattgataggaccactggctctgatgaaagggacccgatgcaagggtatgctatttgcattcggtgttataagtgcacttttgtctgtgccagaaagaataaccagcagcatgaagtagagtccctgggcagctataagtagcattcttcatatgaacacaattatagttccagaaagctacattcttattcatgtgtgtgagtgtgtgtgtgtgtgtgtgtgtgtaggtttataaaatcaatcttatacattcttaatttaaaccaaatttatgtaagttaaatttattcatattacattaacagtaattttagctaaatgatttattaattttttcagt

SEQ ID NO: 474037 - DNA, 1435 bp, Homo sapiens
gcttccttcagagggtctgtgggtcctcttgagattgctggtttgttcttgcagtcgatctggagctgcagagtaggtgggatgacagacgcctgtcgccgcgcgcaaggggctttgggtgtgtggtgggggcgggccgcggggctacgctcgtcgtccgggccgctgggccccctgcggggcgccgggctcccgtccggcccccgccccccgcgccgcgcggccctgccgcccggcgcccccgggtcgcgtcccgccgcggcctcccgccgccctcggcggctccgcgcgccgcctccgcgtcgcggcgtcgcccctgttcgccccgggctctcgcggtctgtcgcgtccgccgcgtggcgcgcgggtgcgccggccgacggccgcgcggcctcctgccgtccgcgcccgcggcaacagggacagctcagcatctgagtctgaggcctttgtgcatggcagtttcagaatctgctggggttttccccaacccttcgcctccacttgaaagcagatctaagggcaagctggtctctcaaaaagaaatcacattctctcctgccaccagagggccccatcaccagcaagaaggaagcaaagaattgggagcaataaggaaagaggaagtagaggagcctagcgacatcctaaaatggctgtggctcaggggttccctgattctgtttcctttcaccaaatctagagctgtgatgttatccaggctaaagtgcaaaggcaccctggttcaagatgcaggtgctctcagcctaaaatggaaacagtcagggaaagaccagaagactgtggaggggcgaccagggctgaacaggcttgaggagcctcttgggaaggacatggatgaaattggaaatcatcattctcagtaaactatcgcaaggacaaaaaaccaaacaccgcatgttctcactcataggtgggaattgaacaatgagaacacatggacacaggaagggcaacatcacactctggggactgttgtggggtggggggaggggggagggatagcattaggagatacacctaatgctaaatgacgagttaacgggtgcagcacaccagcatggcccatgtatacatatgtaactaacctgcacattgtgcacatgtaccctaaaacttaagtataataataataaaaaaaaagaaaaaaaaaggagagattaataacacataaatagccaactggtggagcaaaactctcacaaccagcccaggaccacctgccacttgattctaataagtaatagggcacagacactgaagacagatagtctgggttaaggtgctggctttgtcttttactggctgtgtgatcttggacaaatgacaactcatttctgtgtcccagtttcctcatctgtaaaatgggatagtgacaataatgaaagctaattcatagaattgaagggtaggt

SEQ ID NO: 474038 - DNA, 755 bp, Homo sapiens
gttgctcctcagcttgcagatggcctattgtgggacttcatcttgcgatggtggtatgcgtgagaatgggaggttgcggaactcttattcacatgtaccgtgagatactggggcgcgcattccttccgtttcctctcccacaactctcaccactaatcactcatcgaagagacaaacaaattgaaaataattatatcaccatctcatgtacgcacttccattacccgtgtgacactgatcgagcgattcaagggataagacgtaccatgcattctctaaataatgtactgaatactacattccaactcttctcgcccaaatttagtggaaaacttgatgaactagacgtaatacggtactccagcgtacgtgctatccctacggatgaaaacataatgacgatgttctatgggcacctgctctctcctatgtttcactatcattcattcttattatcttgttaccgctctccgcgtacctacatatcgcacaaacacatcttaataagttttacatatgcgcactattccgacacctctcagtacgcgcacttactcaatttcttatctgatccaccaacacctcactccgctcgccatcaaattactccacctacagctatctatcagtcacagtaacactacaaacaactgacacgctcatttaaattaatctaataagatcctccgtattttattatagactacaacgtcattaacgctagatctctatccgtaaaaaaaaaataaaaaacg

SEQ ID NO: 474039 - DNA, 651 bp, Homo sapiens
aaggatcctgtgtcataggtatatctcctaatgctatccctccccccaccccatgacaggccccggtgcgcgatggttcccatcctgtatgcaagcgcccttttgcatttctctgatggctaatggagatgagaaacttgttgggaactggagcaaaggtgattcttgctatgttttagcaaagagactggcagcattttgcccctgccctagagatatgtggaaatgtgtacttgagagagatgatttaaggtatctggcagaagaaatttctaagcagcccctgaatggtagatctaccagcagcttgcactgtgtgccaggaaaagccacagacactgaacaccagcccttgaaagcagctaggagagagactgtatcctgcaaagccacaggggtggagctgcccaagaccctgggaaccacctcttgcatcagtgtgacctggatatccaactgtgaatggctgttgaatgcagaagacaataaaagtggataaaagaaaaatgaaaatagtaatagatcagattgtggaaaagaattgaaaaccaaatagaaatttttaagttaattataaatgaaatgtgcatgagtattttacatcggctatctcaaaggaagtttgagaagaaaaacaatgtaatactcatt

SEQ ID NO: 474040 - DNA, 546 bp, Homo sapiens
gctggcatgcactcgcccacagctaacccccacattacttgattggggggaatgcatactttgcctcctcttccccgctggcgcatgtgtgcatgtgcactccagcatgccactgctgctgccatgaatggaccctaccctcctaccgtgacaccattgtcaatggggaatgcacaaaaggagaccagcagccctatttcctgtcctgagctgccattgctgctggtgcaattgcatgcacagagaacatcagccctgtgcctgccaaagccccacctccacactgacactgctgctggccacatagatgctggtagctcctgtaccccttgccatgccaccaccactaccaccactgtgaatgcccacacagaggccagcacctctgtggcaatcagtgccctgcctcagtctatgagcatgtacaccaggggtcacagaacaaagccaggggcctgataccagcccctaaaagttagagtatgcatctcaggagttccgagctgaggctttgctccctaaaatcttccagaaatgaagccagtt

SEQ ID NO: 474041 - DNA, 827 bp, Homo sapiens
tcctcaaggtccgttaccatccgaggaatcctgggacaacctaggaagcagaatggttcatgattctgcacctcaaggatgccttcttctgtattcccctgcactctgactcccagttcctctttgcttttgaggatcccacagaccacacgtcccaacttacatggacggtcttgccccaagggtttagggatagccctcatctgtttggtcaggcactggcccaagatctaggccacttctcaagtccaggcactctggtccttcaatatgtggatgatttacttttggctaccagttctgaagcctcatgccagcaggctactgtagatctcttgaactttctagctaatcaagggtataaggtgtctagtgagatagccaggcccctctatactctaatcaaggaaacccagagggcaaatactcatctagtagaatgggaaccagtggcagaaacagccttcaaaaccttaaagcaggccctagtacaagctccagctacaacactcaccgggaaggtccacagcttcactcctgaggccagcgagaccagtcttttagaaaaagtataatttggaataatttgttcttatttaatttatggtggcttcatcgagtgtcatttcctttgctaaattaaataatttgctctaaaattttacctagagttgttcttagactcaccagcctaaaatttctctggcttatcttacatgtctggtgcctatattaacctaagtttcatgtttgattagtggccgagctcattatataactacttgtgcactcatttcagattcaatatggaccctttccttttctct

SEQ ID NO: 474042 - DNA, 574 bp, Homo sapiens
gcatacatctaaaacttgcagcctctggcttcattatgagtcagatggcaaattggaaagactgcgggtgggtcctgaaacaaggctttgaatgttttctgcgtctttgtgagcagctaggctttctactgcttgtaacattaaagttgaatataaaactgtcatttaaagaaaaagtgctagagcatctctttccttcccggctgtatttgggatccatcgacccttccacagagaagtctcctttgaagccaatatccctgatgaacatcgatgtgagaatcctcaataaaatactggcaaaccgaatccagcagcacatcaaaacgcttatccaccacgaccaagtcgtcttcatacctgggatgcaaggctggttcaacttatgcaaatcaataaatgtgatccatcacatacacagaaccaatgacataaacacattattatctcaatagatgcagaaaaggcctttgacaaaattcaacaccccttcatgctaaaatctctcaataaactaggtatcagttgtacctatctcaaaataataagagctattgatgacaaacccacagcc

SEQ ID NO: 474043 - DNA, 630 bp, Homo sapiens
gaaacttagggtagtaaagtgggaatggaaaggttaataaggcctggatcaaaccatcagggtttagaatgcaacagtgagaagtgtgagcttggtcccacaggagccatcaaaatttcctgtctgcaaaaggaaatatataatcacattaacatgagctcatactggattggggtggtccctaatccactgattggtgttcttaaaagtagtgcagagatatacagagacacaagcagggaagagggcaatgcgatgatggaggcagagattggagtgatgcaacttgaagccaaggaatgccgaggatgcagcaaccaccagcagcggggagagatatctgtaacaatttcctccagaccctccagaagaaaccaagcctgcaaaactcttgactttgcacttctggcctcctgaactgtgagagaatacatttctgttgttttatttcattcagtttggggtaatttgttactgaacacaacagaattttatgtagaacagaaaaatattcttgtaatcatcaagtccaatgggctgtaattattaaaaccacaattttaagtgtacttttctgcatagtattaaaaagttgctgaaaacatatagacagctgttttcttatgtgta

SEQ ID NO: 474044 - DNA, 1250 bp, Homo sapiens
gagaagccgtcgccgcccgtagttttcgactttcccgccaggcccgacgccgctctgacgccaccgaggcgcgccatgacgtgacgccaacttccgcgccggaagtggaaggccgggcagcccagctgaaggcaataagctgggctcaccgctgcagcagagttctgtgctagccgggcataggggcgagagaaggcccagaggcgacgtcagagagaagcaactgcgccccggtgaagagaagctcgcccatcaccggctgggagccagctttcagtgaagatggcagggccagaactgttgcttgactccaacatctgcctctgggtggtcctacccatcgttatcactcttcgtagacatgatccgccactacgtgtccatcctgctggagagcgacaagaagctcacccaggaacaagtatctgacaggggtgctaaccatctggttgtctcgatgcaggggacgaggcacccacagtccctctcccataagcctgccaagaagattgatgtggcccgtgtaacctttgacctgtacaagctgaacccacaggacttcattggctgcctgaacatgaaggcgactttttatgatacgtactccctttcctatgatctgcactgctgtggggccaaacgcatcatgaaggaagctctccactgggcccttttcagcatgcaagccacgggccacgtgctgcttcacctcctgttacctgcagcagctcctcgatgccacagaggacgggcatccccccaagggcaaggcctcatccctcatcccgacctgtctgaagatactgcagtgaaagcccaagccctagctttccccagtgaaggactagactaggggccccacgctcaactggtagtggccacaagcctggcagctgtagagccgctaacctcccgacacctccctcaccacacaggaccctgagtgaggaggaggggctggaaacctgggatgggttggccaaaggagaacctcaggctcctggcctggcccagctccttcctgcccaagttagcttagcccatccagactggtcctgaagtctgtccctccattggcatgaagtctgcccctcagcagtccggcctcacaggctgtactttcatggtgctctctaccttctggcccccatcccagaacattcgtgagtgaattcgcaagcatactagcatgtgatattagggagtttgcaataaattatgatgctgatgtatcttgcctgttaaaggac

SEQ ID NO: 474045 - DNA, 3072 bp, Homo sapiens
ggacaggtaactttggagcaacaacctgagggagtggggactcaggacagcagagcagcaagctgcgtctaccttggaaaggtggagagaggactgcagggagctgagggtggaggaagggggagatggcaggacagaggaagcaggggacagacaggaggaagagatggtgctccgggccaggtgtggaggggcaacccaccccttcatctggtgcccaacgtgggtgcttttctctagggtgaaggtacgctcgagtgtggtcattgaggacaagtccacaagagatcccgagtacgtctacagtcagccttgcgatctaaaagattggaaaaaaattggcaaagaattaaaacaagcaagtagggagggtaaaatcatcccacttacagtatggaatgattgggccattattaaagcagctttagaaccatttcaaacagaagaagatagcgtttcagtttctgatgcccctgaaggctgtgtaatagattgtaaagaagaggcggggaggaaatcccggaaagaaatggaaagtttacattgtgaatatgcagtagagctggtaatggctcagtcaatgcaaaatgttgactataatcaattacagcaggtgatataccctgaaacgttaaaattagaagaaaaaggtccagaattagtggggccatcagagtctaaaccacgagggacaagtcctcttccagcaggtcagatgcccgtaacattacaacctcaaacacaggttagagaaaataagacccaaccaccagtagcttatcaatactggctgccggctgaatttcagtatcggccacccccagaaagtcagtatggacatccaggaatgctcccagcaccacagggcagggcgccataccctcagccgcccactatgagacttaatcctacagcaccacctaatagacagggtagtgcattacataaaattattgataagtcaagaaagcaaggagatattgaggcgtggccattcccactaatgttagaactgataccacctggagaaggagcccaagagggagagcctcccacagttgaggccagatacaagtctttttctataaaaatgctaaaagacatgaaagagggaataaaacagtatggacccaactccccttatatgaggacattattagattccattgcacacggacatagactcattccttatgattgggagattctggcaaaatcgtctctctcaccctctcaatttttacaatttaagatttggtggattaatggggcacaagaacaggtccgaaaaaatagggctgctaatcctccagttaacatagatgcagatcaactactgggaactggtcaaaattggagcactattagtcaacaagcattaatgcaaaatgaggccattgagcaagttagagctatctgccttagagcctgggaaaaaatccaagacccaggaaccgcctgcccctcatttaatacaagacaaggctctaaagagccctaccctgattttgtggcaaggctccaagatgttgctcaaaagtcaattgccgatgaaaatgcccgtaaggtcatagtggagttgatggcatacgaaaatgccaatcctgagtgtcaatcagccattaagccattaaaaggaaagtttcccgcaggatcagatgtaatctcagagtatgtaaaagcctgtgatggaatcggaggagctatgcataaagctatgcttatggctcaagcactaatgggagctgctttaggaggacaagttagaacatttggagggaaatgttataattgtggtcaaagtggtcatttaaaaaagaattgcccagcctcaaataaacagaatataactattcaagtgactacaacaacaggtaaagagccacctgacttatgtccaagatgtcaaaaaggaaaacactgggctagtcaatgtcgttctaaatttgatagaaatgggcaaccattgtcgggaaacgagcaaaggggccagcctcagtccggccccacaacaaactggggcattcccagttcagccctttgttcctcagggttttcagggaagacaacccccactgtcccaagtgcctcagggaatgagccagttaccacaatacaacaattgtcccccgccacaagcggcagtgcagcagtagatatatgtactatacaagcagtttctctggttccaggggagcccccacaaaaaatccccacaggggtatatggcccactgcctgaggggactgtaggactaatcttaggaagatcaagtctaaatcgaaagggagttcaaattcacactggtgtggttgattcagcactataaaagtgaaattcaattggatattatctcttcaattccttggagtgccagtccaggagacaggattgctcaattattactcctgccttatattaaggttggaaatagtgagataaaaagaacaggagggtttggaagcactgatccaacaggaaaggctgcatattgggcaagtcaggtctcagagaacagacctgtgtgtaagtccattattcaaggaaaacagtttgaagggttagtagacactggagcagatgtctctcattgctttaaatcagtggccaaaaaattggcctaaacaaaaggctgttacaggacttgtcggcgtaggcacagcctcagaagtgtatcaaagtactaggattttacattgtttagggccagataatcaagaaagtacttcccatgttaaaaaacatttattatcgtattttgctgtaatgggagttcgagaaaaaattaaaactgacaatggaccaggatattgtagtaaagctttccaaagattcttaaatcagtgaaaaatttcacatacaacaggaattccctataattcccaaggacaggccatagttgaaagtactaatagaacactcaaaactcaattagttaaacaaaaagaagggggagacaataaggagtgtaccactcctcagatgcaacttaatctagcactctatactttaaattttttaaacatttatagaaatcagactactacttctgcagaacaacatcttactggt

SEQ ID NO: 474046 - DNA, 596 bp, Homo sapiens
tatttccatggggagtctttgctctgacagactagtctccctcacccacccggggccagcctgtctgtcttctctgtccctgtacatgggagatgatcaatgttcatttgttggcatcagtaaaacaggaaggcccctgaggtgcaaggattggaagcccttccccccagcggagagggctcgggtgaggcatctggaggcgctgaatggggccgggagccgcgggacccgcagagggcgcctgtccgtgtgggcgcagcagcgcctagagggaggcggccccggcagcccgcagggggagcggcccccactaaaccagctgacgtgggacccctgggtcaatgctggccaggagatgcggctgacatcaaagaccctgggcccctgggccccctacaaccctggtcacgacagcccaccccatggagccagcctggcaccgggccagcctccagccataactgcaaaagagcaggagagcccggaatagcaggccctcttcagcgagcttcagccgctttgcccataggctgcagggtttgggtccgctgccataaatagctcccagaccatctttggtaatataggcctttgcc

SEQ ID NO: 474047 - DNA, 743 bp, Homo sapiens
gacctgtccccagtcagatgttttgtaagaggcagtcagaaccacactagctttctgaggggagaaaggatggcaagctgttttaaatgatcattaaacataatgatgaaatcacatcgatagaacagagctggaaggaacaaaggggagaagagggaagcgactccacccccaacaccctcacccctaccaggccacacccttacccacaactccgcccagaagagaagaccatcatgacagaaaggtctgcagctgttttcatccagggcctggtggcggggcatgctggtgcgacgcacactgctgcatgcagccctcagggcttggatcattcagtgctggtggaggcaggtgctgtagaagctgctggcaaagaggcggaggatggtgttggagtctattggcgctggcacagctgccattcccgtgtctttattgagggccactatgaactcaaagaaaaccaacttaatattcaacttgaaatctctttgggcttacaggcttgtaaggtgcaacaatgcataccccttccattaaaagaatgaccaggtctgctatatctgtgtccccagctctcttcatcagatgtattttcaggaggtcattgtttgagataatgatgggaaatactaggcatgtcacaagtcagctgtgaggaatcagcaggggttgtcttggtttccatgtggagaaggattctgagagccgtctgagatgagtaggacctgtgattgatt

SEQ ID NO: 474048 - DNA, 571 bp, Homo sapiens
cccaacagctcattgagaatgggccatgatgacaatggcggttttgtggaatagaaaagggggaaagaccaaaggcaatttaattttggttataattgaggatgttgaagaaagcattgaatggaagacattgcagaagaagaaacagcagaaaatcaaggaaaaacttagaataagaacaaaagcagctgtaaagatccaggcctggtggcggggcaccctggtgcgcaggacactgctgcatgcagccctcagggcctggataattcagtgctggtggcggatgacgctgtcgagggtgctggagaagaaacggcaggcagctctgatcgcctacgcaaccagagagagggcagtgatcaagctccagtctttggtccgtatgtggcgtgtccgctggcgatactgccaggtgctcaatgccatctacatcatccagggccactggcaatgccacaactgccagacctgcgctctcctccagggccactgtgtggtcacagccactcacctgcagttccacattgagatcatcaactcctaagggctggcaagaagggcactgtgtctc

SEQ ID NO: 474049 - DNA, 514 bp, Homo sapiens
cagccatgttgctcacacaaagcctaatgctccttattttctctccgagtcgtggactctatgcctgctcatgtgtcaagacgtagctcaacttccaacttcactaaaattatcaacctcacgatgcccaagccacatcccaagccaattaacttagaagctctggaggtggggccctggtatcactgctatggcagatatggcatctttactgatcggttcagcacatcccctggcacttggtatgcagttattgatttagcgaatacattcttttcaattcccaacagccacactggccttctgcttgctcctcagtcacacaaggtcatcctttgtggggctcatggcctttgcatctgctgttctgtcttacacattctcacccacatttttacatggtggccccttctcaacattcagacctgtccgaaatgcctcttcctcagagagaccctcctccatcaccctgactgacataacatcctgtcttccaggacttgcaaacctatta

SEQ ID NO: 474050 - DNA, 811 bp, Homo sapiens
cccgcaaagggcgaggcatgcaggaggtggaggaattaagtgaaacagggaaggttgttaaacagcaccgtgtgggcgaggccttaagggtcgtggtccttgtctgggcggggtctttgggcgtcgacgaggcctggttctgggtaggcggggctactacggggcggtgcctgctgtggaaatgcctgcccgcgcgcttctgcccaggcgcatggggcatcgtactctagcctccactcctgccctgtgggcctccatcccgtgccctcgctctgagctgcgcctggacctggttctgccttctggacaatctttccggtggagggagcaaagtcctgcacactggagtggtgtactagcggatcaagtatggacactgactcagactgaggagcagctccactgcactgtgtaccgaggagacaagagccaggctagcaggcccacaccagacgagctggaggccgtgcgcaagtacttccagctagatgttaccctggctcaactgtatcaccactggggttccgtggactcccacttccaagaggtggctcagaaattccaaggtgtgcgactgctgcgacaagaccccatcgaatgccttttctcttttatctgttcctccaacaacaacatcgcccgcatcactggcatggtggagcggctgtgccaggcttttggacctcggctcatccagcttgatgatgtcacctaccatggcttccccagcctgcaggccctggctgtagccctgtaaggcaaatgttttacagaggcaagtgtatcgattggcagatgtgagaaccaagct

SEQ ID NO: 474051 - DNA, 1010 bp, Homo sapiens
tttcctggatgaagctgagaactcttcagggctaagccccaattgtggggctcgccgtccagcagcagaatcacgttctccagtcctgtctcccaattccctacttccctcttcagttttatagtttttgtcattaaacctatctgctgaacttagcatggctttaaaaagtcagatatcggagcagtatgaagaagaggtgagaacgacccccggaccgaccaaagcccgtgcgccgctgtgtcccgcgtccagcacctacgtcccgccgccgtcgccatcgccgcggccaccatgcccaagagaaaggctgaaggagatgctaaaggagataaagccaaggtgaaggacgaaccgcagagaagatccgctaggttgtctgctaaacctgctcctccaaagccagagcccaagcctaaaaaggcctctgcaaagaagggagagaaggtacccaaagggaaaaagggaaaggctgatgctggcaaggaggggaataaccctgcagaaaatggagatgccaaaacagaccagtcacagaaagctgaaggtgctggagatgccaacatagacttaactcccttaagcccagacatctgttgggacctgacccctagtcgttggttaccagtgtgtcaggcaatctggactttccagtgatgccactgagatggcacctgtcaaaagagcagtggttccatttctagattgtggatcttcagataaattctgccattttcacttactgaaagtcagggtcggcttgtgaaaagttgttaaacaacatgctaaatgtgaaatgtcaaccctcactctaaactttccctgttcagagcaccagatgaagacttcattgggtttatagtggctttctgatttttggtagtccattgcagaagggagtttgaaagttgttgtatactgttaacgattgtctgcccacgtcctgcctgaaataccatgattgtttatggaaagtatctttaataaagctggatacagcttggcttggt

SEQ ID NO: 474052 - DNA, 570 bp, Homo sapiens
ctccttctcttcattcagatgacggcttaggtgttgaagtctacaactatgattgtggatttgtctgttattgccaggtttatgggagtagaagcccaggctccccacaatgtttccactgatatcatcggaggggagccttatccgaatgaggatgaaagttctggctcccttgttggacaccaccctggcagagatattggggtgtctttgctacagcctcatgagggtggaaatagtgtcaaagttccatataagcccacatgtatgactttagatctttctgctatatatcactatctttgttactgtctggaagccagttataaagattatccttcatgtgatccacaccacagtgaatgtttggctctctatgcatttatatactgttgttatctgaattacaaaacaattaataactggattcttgatcattataggtggaaatagacaattgtttaaactacaaaatcatgaacatgttttccaccagatcttcctcttttcccagtctcacccacaatccaaacagaaatttacctgtttgattcaaattagagtaaaaaa

SEQ ID NO: 474053 - DNA, 721 bp, Homo sapiens
gccattgatattttgataccgatggcatcaaatttaagactgcttgggaacctgcaggtctgctgcagtttgctgggggtctactccagaccctgttacacctggtatcaccagtggaggctgcagaacagcaaagattgctgcctgctccttcctctggaatcttcatcccaggggggcactggcctgatgccagccagagctgtcctgtatgaggagagctggtgcactgtgctgggagaatcctccttgtcaggatcagctgctctcttcagtgccggcaggcaggaaagattaaatttgctgaagctgtgcccacagcagtcctttcctccaggtgctgtgtcccaaggagatggacattttttctgtaagctccttactggggctgctgcctttccttcagagatgccctcccccgttaagaggaatctagagaaacagtctggccacagcctctttgctgccctgtggtgaattctgctcagtgggaattgaacaatgagaacacatagacacaggaaggggaacatcacactctggggactgttgtggggtgggaggagggggagggatagcattgggagatatacctaatgctagatgacaagttagtgggtgcagcgcaccagcatggcacatgtatacatatgtaactaacctgcacattgtgcacatgtaccctaaaactcaaagtataataataataaataaataaatt

SEQ ID NO: 474054 - DNA, 932 bp, Homo sapiens
tggcttaggaatggcagggaaactccaggccactaccggtgggtttgctcagctgtgggtgacgtgactgttctgtggtcatgaaccaggggccctgcctggtgaagagtagcgggtgggcgctctgtgctgggggtctggaccagcccctggtactcacagaggacttttcagagcctggagacagtaagggcaagggctgcaagacagcaaacatcacaccccccaccctctcaccccccaacccccaaacactgggagcgctgtcccagagagttatggagctgctactggctcaatatccctggcagggggtgggtggagacccaggccaggaggactcatccagtgaggagaaacagagctccctctcagggatgtgtaatgctgctaccagcagctggctagagttccaagccagtgggtcttatcctgtgacctctgaagtgctatggaagaagccaggatatctaaggctcctggggctccgtgtgtacctgagcggctgctctgccaagactccccatagctctgtgtatctgactgaaggccctagtggagtgggttcatgaggggatctcctgacccaagagtagcaacgatccatgggagaagcattgtttttacctaatctgttgacatgtgactatacttgatgttggagcagttctccaacattattttcatcaatttcatgaaattctgcatcttttgcaagaatcacaactccactttgccatctatttgacttgtgttgtcagatgtttacagtattctacaagcaataagagttaggctgaaaaagttttgacttgtgatcagggatagtcattcaagctaagcagagaagattgtttgaaaggggaacaattttatgggtgttcggttcatgagtgaatactttcatgtaatggcaaatattcctatataat

SEQ ID NO: 474055 - DNA, 783 bp, Homo sapiens
tgtttctggccagaaaagcaacatgcgcatagctgcaaaccagagcagagctttcaatggaaattttttaaaatggctggacttgacctgggaagaatcttctgctgactctcaacttttcttggaaaaaatggatcattcccatcatacggggatgagctgtatggactccaacagtaccatgcaacgtcctcaccatcacccaaccacttcagcctcacactcccgtggtggaggagacagcaacatgatgatgatgatgcctatgaccttctactttggctttaagaatgtggaactactgttttccagtttggtgatcaatacagctggagaaatggctggagcttttgtggcagtgattatactagcagtgttctatgaaggactcgatagcccaagagagcctgctgtgaccaaatggaaccatccttatgtagacacacaaaactgttgggcagcagatgctgagctttcctcacctcctgcaaacagtgctgcacatcatccaggtggtcataagctacctcctcatgctcatcttcatgacctacaatgggtacctctgcattgcagtaacagcaggggccggtacaagatacttcctcttcagctggaagaaggcagtgactggctgccaaaggatgaagccagtgaaggagaaaaagcttaaattccatcttgagctcttggattgtgataatacaatgatttcattaacttttcatttctgtatacctgttcatttggaatgtaatgcttgacttctttgttcattttgga

SEQ ID NO: 474056 - DNA, 885 bp, Homo sapiens
ttgttagggtgattcgaattcggtgaattgccacctccggctccacgggtgcttttccggtatccttaaaagccatggctgctgcgcggcttcatgaccgacttgttcctcggcggcgagagcgaacagcggagagggagaaggagaagaggaagaggaagaggaggaacaagaagaagaaggaagagaaggagaaggagaggaagaggaagaggaggaagaagaagaagaaggaggagaaggaaaaggagaaggagaagaggaagaagaaggagagggagagggagaggaagaggaagaggaagaagaggaagaagaagaagaagaggaagaagaagaagaagaagaagaagaagaagattattcctcacatcttcctcaacctcaagcctcccagatttgtcctatgcagagtgggcagcatctccctcttggcactggcgcagtcctgtgggggagagagcatggtggtgcatattcacgttgatggcaccatacttcatattaaaaacaaagagtactcttagaaacaaagccctcaagaaggagcatttaggacaaaacaataaattaccaaaggggatggaattctgattctcatgaattcttctatatatgtatatatacataaatatgtatatatgcaaagaaatatatatatgtgcaaagaaatatatatgtatatatattcctaaataactcacagggtattatgctatgtatgatctataatctttcaggatttgctcttttcatttaatattatattgctaagattcatttatgttactgcatgtcactacagttcattcattttgactcctgtataatatttaattgcatgaatttcactaagtttatgttgttccttatcccactgaggga

SEQ ID NO: 474057 - DNA, 532 bp, Homo sapiens
cctcagacacctttgatggcagatgagtggagcagcctctggggacactatcacccaaagaagcgagctgctaatggcagatttttctgcagttttaaccaggcaactcccctcattggcatcatcacagagacaatgtgtcatgggtatcagcaaggattttgttactttgcagatcctaaagaaagtattccagaagaagtcattgttatcataggagatgacagctccatgtgtgttactgatcctgaagaccactcagtgggaaaacatgtggaggtggaagacagtgatattgatgatagtgacccagcaggagcctcagctgcaggtctgttggagtttgctggaagtccactccagaccctgtttgcctgggtatcaccagcaggggctgcagaacagcaaatactgcagaacagtaaatgttgctgcctgatccttcctctggaacctttgtctcagaggggcacctggctgtatgaggtgtcagttggcccctactgggaggtgtctcccaattaggctattc

SEQ ID NO: 474058 - DNA, 823 bp, Homo sapiens
ccaaaaagtaaaataggggtcaaggaccagcaaggaggtcagtatgggtcagagggctataaacaatgagagagaggaaggagagcagtcacatcaaaagggaccatgtagtattgctaaggccatatctgttgctctgaataatttgggacatattggagggaatcagcagaggagggatgtgatctgggaaatgattccactgatgccaatgcctctccatgttctcaatgacagtcaccttgaagctccaagagaagaatggaaagctgttcctgatattctaaacatcactgctacttgcttttctacactcactgaaaacaactctctaactttttcaacttataactcagtcattagcaaacataaaaaaccaatccaagtgatgcctgaaaaaggcatagtatgcttccaggcatcacgcactcaagatttgggaattacttatgttgatacaagtaattgctggtataatgtaaccagattaaatccagtagagtctctttttactagatatggttatacatccttacaacatgccataaaggggccacaaaaagctcttaacatcgaagtttagatttttgactgagactttatttttttagtttctttttttaaattttaactttttagatacagtgggtgcatgtacaagttttttacatgggtaaactgcatgatgctgagcaatagtcccatatgtacgtttaaagtctctgcttgtgtaaggtagctattgtctcactagtcatacctagttacaagaccaaccctaagtggtggagaaacagacgacatgcttgatgggagaatcttc

SEQ ID NO: 474059 - DNA, 736 bp, Homo sapiens
tcttaaggcaggaactacaaatctacctggtgctccgtactaccatggctaaggccactctttcctgcccttcccacaaaccaaggagtctctccctgtggctaccactaccacaggcccacagaaagtgtgctcccctgtggcccagggcaggtccagaaaggccatccaagaatcaaggcctggaactgggcacaccaagagcttggtgctctaccccgctgtggctgagctggtacctaagctgccccaactggtgtctcattaggatatgtgaccccaacatccactgtcttcatgcccaggacagtgctaggacttaccttagaactgtagtccgtgtaacctacactgccttccaagtttgtttagaaacccagagcactttagcccatggtggtgaggcttgctggagctcaattgctgactgctgggattggcagttctactctggctggggctggtctaaatgctctctccatgagtgggcatccactgagttcaggctgggtttgctttccgctgtgacagggcagcaaggagttcaatgcactgtctcacaggcactgagacttcccttcctcaaatacacagattctccatgccacacagtcatagtagtgcggatggaagaggggtggcattagtgattcaaaattgttttttctatcctcttcagtgcttctttcagtgatatgaataagtcaataccaggtactgtgattgctcacctgag

SEQ ID NO: 474060 - DNA, 755 bp, Homo sapiens
atcctgtctcagaagaacccccagaatgaccataaacttcacttttaggctgcaagcacattggacgaaaattttcctggtgcttggtgcttggcagaatagggggagggacatcacagatatgcaggttacattcttttactgtctacctggagttttctcacttctccgtggccctgggaagtgtctcatcttcatatttgaattgtctaatattgctagtgatgattttggtgctgaatttggcctgcaatcttcaagactgctgctgagcttgggagagaatgaaatggaggagccagaagggagatggaatgggaaggtagttttcctttctgaagtcggaccacttagtggcctgggctctccttcgactgccctggccaaactccgcatcaatccgccggttgatggcctgccggcctgccgctgtctgttggtctgctcctgcaccgggctgcttcaagcgggattggggcggcgtgggaacctagagtgggagagattaagctgaagggaggtcttgtgatagatttcacttatgagggctggaaaaaaacagggcagtaaggttcaagacgaatatttgctgaacttcattttccgtaactacacagttatcattaaactcagattgactcataaagttaccattaatcatcaaagaccaatgaaattcagagtgtaatcctgatcaaggcaagaaagttggataatttagaattacttgcagcagtcaatattatgtaatgctc

SEQ ID NO: 474061 - DNA, 661 bp, Homo sapiens
cagacttaagcgtccctgcctagaagctgtgaagagagagcagatcacccagcatggcgttcgagctctgataaggaacagactgcctcctcaagtaggtccctgacccccatgtatcctgactggaagacatctcccagtagggggctacagacacctcatacaggagagctctggctggcatctggcaggtgtccctctgggacaaagcttccagagaaaggaacaggcagcaatctttgctgttctgcatcctctgctggtgatacccaggcaatcaggctgtggagtggaactccagcaaactccagcagacctgcaggagaggagcctgacccaagggaacaaaactggacagagaatgattttgacgaattgacagaagaaggcttcagaaggtgggtaataacaagctcctctgagctaaaggaacatgatctaacccaatgcaaggaagctaagaaacttgaaaaaaggttagacaaattgttaactagaataaccagtttagagaagaacataaatgacctgatggagctgaaaaacagcatgagaacgtcgtgaagcatacacaagtgtcaatagctgaattgatcaagcagaagaaagtatatcacacattgaagatgaactcaatgaaataaagcaagaagacaagatt

SEQ ID NO: 474062 - DNA, 697 bp, Homo sapiens
ctcctcaagcgccgccagagtgggcgcccaggcagaggaggcgctgagatgagagccagcgagggctgccagcatgctgtcacctctcaatatcattgctggggagaaagaagcagagtcagaagatgaagaggaggaggacatgaaactcttaggtacccctgaagggggtagcaagtttacacagaaaaaagtaaaacttgctgctgatgaagatgatgatatgatgatgcagatgatgatgatgatgatgatgatgatgatgattttgatgatgaggaaactgaagaaaaagctccagtccctcctacaacacatgagaattctaggagatacaattcaagttgagatttgggtgggaacacagccaaaccatatcattccacccctggcccctccaaatctcatgtcctcacatttcaaaaccaatcatgccttctcaatagtcccttctacctatgagcctgtaaaatcaaaagcaagctagttatttctcagataaaatggaggttggaaattttattgtccatatttttagttaaaaatctgaggcctagaaaggttaactgacttgctttaagcttgagaaattgaaaccagtttgacatcacaattaccgtgctctactccctctctcttaaaagttcttgcttatgtccaaaatattagtagaaataaatgagagagatttcaccaa

SEQ ID NO: 474063 - DNA, 872 bp, Homo sapiens
ggacaagccccagtgagattaacctggtacctcagctggaaatgcagaaatcacccatcttctgcatcactcacgctgggagcttgcagccctaccttctgctgatgaacaagaccagtgacctctgccagtatggtagtgcctttctttgcttgcttggcttttggaacaaggagctcaaagtaacttacttaaagtataatgggactcatgcatcctctgatagaactgctactcctgcctatgcattctacctactaggggcacaatacaacataatggttattgatttaggtgtaaaccgtgtgtatatcctcatcttctggagagatgcagaatatgaaatgaccaatggatctcatggccgtgtgccaccctgcttctcctcctttgctgtaaatgggtccctttctctagtacagtgttgtgcaggatcctgtgctggtggactgaacgctccgtggataacatcttggataatggtactggcaaaggccttgtaggcatgaaagacaaaggagtttaacataaactccccatagcattttccccccaacaaatataccttgagaatcatacattctgctaggtcagataatacaagttacagagttgaatacatcattgctcggacttggtatagagccctttcctactctggacccacttaaaacttgcatcctttaatgccacttaataaatgagtttgaacagtattctcagatatagaatattctgcatccagagctcaaagatctccactagctcttatgcttccttctctaaatggaactatcaagtgggcagttgacatacattgttagagtcagaagggaggtctggactatagatgtaaattttcttgctagcgg

SEQ ID NO: 474064 - DNA, 677 bp, Homo sapiens
tatcatcagttaaggcaggaacaggccattttcacttcttttgtggtggaatgtcatcagttaaggcaggaaccggccatctggatgtgtttcctcactatgcgaggatcctccatcattaatgcctctttaataaaaactcttctcaaggccgctttacttccaaaggaagctggagtcattcactgcaagggccatcaaaaggcatcagatcccatcactcagcgcaatggttatgctgataagaccctgtgtcttgcatttagtttctcaattcatacaaaactgtatccaggccatcaccaaccattctatacaacaaatgtttcttctaacaaccccacaatatcaccccttatcacaaaatattccttcagcttaatctctcccactctaggttcccatgctgaccctaatccctctcgaagcagccctgagaaacatcacccattatctctccataccaccccccgaaaatttttgctgccccaacacttcaacactattttacgttatttttcttattaatacaagaagataggaatgtcaggcctctgagcccaagctaatccatcatatcccctgtgacctgcatgtatacatccagatggcctgaagcaagtgaagaatcacaaaagaagtagaaatggctggttcccacctttactgatgacatt

SEQ ID NO: 474065 - DNA, 652 bp, Homo sapiens
ttccactcccatcaatggtttggcatgcaggcacataggcagccacagcaacactgggtttcagggcagaggtgctcagaatggctgcggagacagggtctctggggtacactgcagcttcttgggctccagggtatgtgacacagtggcaactcaggtctcaaggaggtaccagggctgctcgggccctggggaaacggcacagcagcagcatgactctgggggtggtggagcatactggcaagtctggcactggcactagggtttggcatgcagcacagcagcagctccagcctcatgggtggtgtagtatcacagtagctcagatcttgggcttgaaacatgtctgggatggctacaactccattttggaccaggaagacaagggacctaacttagaaatggtggaggagaaagcttcagtcagcttggggtccagaggatggtatggcctctataccagctccggaatgcttccatatggacttttacaagaaagaaaaataactgtcactaatttttgtgtctttgtcattcctgggacaacctaatgctaaataatatatctaccctaagccttctctactcccctagtactggtcaaagtattaccagagaagtatatcctgctttatgtttcataacttaaggc

SEQ ID NO: 474066 - DNA, 956 bp, Homo sapiens
tattttccttgcgtatgtgggtttgctggccaacatgtgcactcattttagcgtgtttctcagaggtgttagcaaggctgtgtgctgcagtagcagagattccaacaaaacgatttttctcccctggagctgtgcagcaggttccagaaggccccaggaggaatcagcacaaacactgtgaccgttatttaccctatctgggacttcagcagctgggctgtttgcatgatatgcaaatgggcacatcattcaaggaagaaaggatgaatgctctggcacttgcagggcaaacattaactgctatgggaagagggccagcaaaagaggaaccagacagaagcgagtgggtggtgaggggcaggacaagaaacatcttccaaagaagcaaaatgcagaaggcagacactgcttactgggaaccattcagccttctcagcctcggtaaacaacagatgggtgtgtgctgcagccctttttcctgcagaaacagtgaatttcctctctacccaatttcttcctttgggtcaaatttgtaaaatactttatatgtggaaaattactgagagatacagagggaacaaattagctggaacagcagaagctctgggagctaagaggagactgactgacaggaaagaaaaacgtctggagtcaggcggacctaggcacgaatcttagttctaaaatttatcagctatggatattgagcaagattctcaatttctctgtctcagttttcttatctgtaaaatggacataataatactatctcatagtaggatcactgtaaaatttagtaaatctcctttgtataaagtgtctcttgccaacatgacagcaactgactatattttctagtttatgctcacgctttcaaaacgagcacctggctttttaattttttctgcaaagatgctgtgagaatcaaagagaatattaattatgcaagcacatat

SEQ ID NO: 474067 - DNA, 608 bp, Homo sapiens
agccacagggcgctgcagctgaggagctgatcatgtgcgtcttggactttcctcatccagtagacagctcatgcaaaaagaagcaagcctgttcaaacagaattctccagggacagtttgtctcccagatgtcagcggaggcccttggagatcctattaaacttgacccgaaccccaatgccaagccttatgagagccttgaatccacagagcagttgctctccgtacccacaccatatatcatcatgcctcattcagctttcatgccctcttatctaagagtgctgtctggttctgtcctgcaccacccattccaggaacaaagcccatttccttcacttggtcttcacaaaaacccacttgcattcagacgttttggaattattggccttacaaaagaggccccagagagctctctcaccccttcccaccacatgaggacacaaggagcagttggtagtctacaacttggaagatcaccctcaccagaagctgcccatgctggcacctggtcctggacttccagcctccatatctgtgagaaatgaatgtatgttgtcaataagccacccagtctgtgatagtgtattataggaacctgaacagac

SEQ ID NO: 474068 - DNA, 641 bp, Homo sapiens
gagcacagataagcccctccttaatgctgtgtagctctgtatcagttggccgtggggtgaaagtgccacctgtgtcagtctggtcacgggggcatgcagcccgagttgacctgggaggaagcactgatgaagcctttgtctctctccttcaattcaggcctcaggcaaacgtccatgttatgtggtattctccccatactgcaggtggggtgctcctttgtgtcttcgatgagcaggaggatgtacttcacttcaaatctgaactgagtcgtggaaagaatatacaccccagtgaagataagaaacatggtagtggggtaacaaaagatttgctgatcattccttggagcacagtaaaaactctggacagcatatatgaaacaaacataagaagactccgaaagatggagaatagcaggaagatcagctagagatctctggacccaacgaatgatttgtcggtgagttctctggatttttctttttgtctcatatgtaccaaactctgagctgaagaaactggcaacccaaaaacaccaatgggtacaaattttaaaaagccccaacaaaagcccgatctcttcaggtaaagaaccaggaagaaggcagactatcaacacaacaaatttttagataataac

SEQ ID NO: 474069 - DNA, 2602 bp, Homo sapiens
ttttaaaacaaggctgagcaccatgcctggcccaggccagcttgctttgttccagaggcaatttgtgcagaaagcagcaagttccctggtgctagagggcacagaaaaggacctgccaccctgcccctgtgactggggggcaggcaggggctgtgtgtggccctgccagcacctgccatgggccaaatccaaccggagaccagtgggctacgagcccagtgaagtccacagtgtccacctccccaagagtacagatctgggcagagactggatccaggttggggcagggtggaagcagagagtagccagcaggaagtgggctgtgggcatggcgggaatggtggagatggggaatatcccagggacttgctgccagcccacagcccatcaagcaggggcagggagagccagcacccagcgggggggtgagggagtcaactctcctgtgtttctgggccacatcgcctatcctatcttctgggaagccagaccccgtgtctggcggcatggctcatcatatgggaattacagctatatctaactcaccaagttgttgtgaaaagtaaatgggataagccagtgtttctcacattttgggtatttgcataccaccttcacactttcctccttacctgtgtaccatctcttattatttagttgatattttttttaaattggccctattttaaaccttagcctcattctaagcgataatatctatgaattctccagattgttagtcttaaactgagaaaatgaccatctcactcatgaaaagtaatgcagtgctacactttggtgaacactgagctgatctttacattcaggcagaatctggtgttcggcaaatatttgctatgctggcaccttcgatgctggccgatgctttgtcacttacttcctgagtgtgggctgctcatttatctccagctcttctgtcttgcttaggagcatcttgccagtggagcgatggccgtctcccaccgactctgcagttgctcatggacctggctcttccatgcccatgcaaaggccttcttcttgaagctcttgtcatccatctctacttccttctcccctcccagtggccatctttcatagcctcctggtcatttcctttcttccctgaaagctttcgcacctgcctcttggctttgctctccactctaggcttatccataaaccttgatgacttcaatgacatccaacatcttgtctcaaaggtccttgacctcttcacctccaataactatcttccccacgacctcttcagcaaacctggcacagccacatcctatggagcatgccacctgctagaactacacaatctcagaaatctttccatctcagacttcaccctctttccctccaactccttgtggccttattcccatgtttggttctttaaactcattagaactcaaattccttgatgctcgcttttctcacaggtctgcatcgaccttcactgcccagtctaggccccatgaggcattgcttagcaacttggaagttcctggccattttcagattccaccacacccacctgcaaagccccaatcttggagcaattaacctacctgcaggccagtcctattcctgggactgcagtggggcgtgtgtgggctgagcactgttgaagaaaatctactcatctttttctcagaagtttgttttgttcttatttccctatttgtggtactgtttctgttagataagtgttctgaaaatgataaaatgctaaaaaaaaaaaaagtaaagtatttgtatctttatcataaagacctgacctctcccatggaggggtttacagtcaattgattaattgtgagaaccatgcccctgtaatcatttggattttacacttctgtttggaaggcccttccccttctaactcaactttcaagactgtccaaaatcagttcttacaggaaatcttgtctgtgacccagacttggttaggtggttcctctccagctatgctttcatagcacttatcacaggactttgcaatgagctacttatgtagctgtctcccctatttgactgtgatgtgggtttttgaaaggaaggactttgtcctactcttcttggttcctccacctctcaccccagagcagattcacaatagttgcttgttaaacaaaactaaaatgacctaaagccagaaggagaacttcagcatcttttggagaagaaaaaaaaatttcttgcattaaaattatgctaagctgcaatagacaattaatattttgtctatttagatctccaactatgtgttatggaagttaatcacaggatcacttcctcttggccactgttgattggcttcagttgggccaatcagagtgttccctgggatcttttgaactggaattagagtacaagacatagttcctccttgttggtgaagctgtgaaatgtgaggcaggggggctgctgagagccatgttcacctccatttagaagaagccagtgtgcaatgagagtgatgtacacaggaccagaagtggattcctgcttcccgctgttccaggtgcctaggctgccagtctgtgagagatacagacagtcctctcatcaaattactcttggtcctaag

SEQ ID NO: 474070 - DNA, 760 bp, Homo sapiens
tgcagatggggggactgcagaccctgacctggttatgggggaacatggtgacctcacctcccatcctccccagcaacaagcttcagagggaaaggaggactcgagggccgagtgactccagctcactctatcaactcactctgcgcatctgtcagctgctgcagtgccctgtgcggttgcttgtggggacttgctgtgtgttggtcactccctggtggcaggccctgtatgggttccaaggatggcacttagagagggatgaagggcagccacggcttcaagaagcttcaggaaagctggacaagtggactgtgactggccagtgtactgtggaggtggcagagactcagtctgtaaatgaggaaagcaccgtgtccaagggcacaatcagcattggagtcccatcccttccaactccaaaatcccagctctttcctctaggctgcatcatctccctgatcagcctgatgctctggcagaatctggtagagtatgctgacttcaggcccaagcatctgcaattacaaggagctgagccccctgctgactggcagatcaggccagcttagttgtctcctgggggatccagagcaagaggtccacaggaggagcctggatgtgaaggcagatggtgaaggcttcccaagtttagcccagatcccctttgtttgcaggcccctgcaccctagctgcagtcattgggaaaggaaatgaaaggccactagcatggtattgaggggcatatgcttttgtccctccc

SEQ ID NO: 474071 - DNA, 1395 bp, Homo sapiens
tgagacccagagctctgaggaggggatgctgggcagcttgtacgatgtctctggccagggagtggttgatacatctcattctgcaaaatggaaagtggaaaaactgcaatgtggattcaccagctgcttttggaaggagctgctgctgccagggagaagaagccttgctgggtgctgctcacagaagcaaaaagcaggcagggaagtccttcaacaaagggacaaagagaagaggtgatgttatcagagtgcaggtcccggtaccatctgaggagaaccggaaccaagacaggagctgcccaagggagactgagaccatagaaaagggggtgcctggtgtgagtggaagacacaaggggatcttcagcctttgggcagaacagacaaagatattccctcacagaatctgtgaagaaatacttaatacagtagattgattcttctggagcagtttttgtttttgttttccagatccgctaagtgaccatctatggaaatgagtaacaattcttgactccatttcgcgtctgccagtgacatggctggcttctattccctaccctcacctcctatgagaccccatcaggctgatttaaatggctgtgaaagtgtgacttgttttaagtgcatctaaaaccacacttgtatgcacagttaatcttattttatgctacttgtgaatacattttaatctctcttacattttaatcagatgaaatttttaggaagagattgttccataaaatgcaaacttccatggtgcttagtacaatgtcgtgaaaacacaaatgcatgaatattttatgagtaataattcagcaaagaaatgtttaatattttattcaaaaatatttgaactgtataagtagaattatgctaagtgatatggatattaaaagattattaggtgattttatttctagccatgatggagtaactgggactagacttatcttctcactgttaactaaaaaaacaaaccaaatatataaggcaagagttttcagacactgggcaacaccgaaaaagatagaacaaaatgagcttgttaccaccctgactttctgtctggaggcactttctgcgggaaaggtgatctcaagtagagcatagctctttcggagttgaagaaatgaaattgcagttcagaaatgctgaaggggctagaatttgcaaggcagagtactggagaggaagaagctgcttaaagaaatagctccagaaaattgcacaagatcccctgaatctgttactgaacactaaatcatataagcatagagtgaagatccacagagctgagaaaagagcaaccagggagctgtaagctgaacagtttgcagagctcacatgtggctgacagacgaccaaattctgactagctagagtaaaagagct

SEQ ID NO: 474072 - DNA, 519 bp, Homo sapiens
acagactgagacaatgaaagaaaaagctgttttatcagaaattgaaggaactcgttcctctctgaaacatctcaaccatcagttacaaaaactggattttgaaaccttgaagcagcaagaaattatgtacagccaggattttcacattcaacaagtggaacggagaatgtcacggttaaagggagaaattaattcagaagaaaaacaagcgcttgaagcaaaaattgttgaacttaggaagtctttggaagagaaaaaatctacatgtggccttttggaaacacagatcaagaagcttcatgccaaaaccttcgaaaagtgcgggccttataaacaaggaaaggaggaccgtttaaggggggaaaagaggaaagaactctggcacgggaagttttatttgggacaaaagggagatagacccacccttttcgggttggggggagaggtgtctaaacgtttaacggaaaacggtttcccagtgggatctttttcctgtggggatttctaaaaacatctcct

SEQ ID NO: 474073 - DNA, 897 bp, Homo sapiens
caccacttctgccatatgaagatgcagcaaaaaggtgttgtttatgaaccaggaagcaagctctcaccagacaccaaatctgccagcagctggtactctgatgaggtgatgtcaaatggagctacaggccctgtccctggtgaatctcagaatttgtttgggttctctagatgcctggactgctgcctttgctctgagttcatatggagaagctacctaggctctgctatccagcgagacaactggctgaattctgcaatcagtctgagcttctgggtaggcactgcaattacctcagattggaccaaaccacaggaagatcattccttggccagaacatccagcaacagtacagagagcactagttctgagaaacacaactgggaaatgctgactgtcttaattaggatatatactattacaaatggaaatatattcaagctaactaatgcaagaaagaagtttaagggaaaaatacacgaatatctcccatgaatcaagaacagaaatcacagccagactttagcaggcctgacagtcaggccacctccatgtatgataatctctagtctgccttctttgacatccagcaattaactcattttgtatctcccttaacatgttacctcccaggacagtccctgctgtgcatcatgactagcacatagtaggccctttctcattgtctgtcattgagaccgtgaatgcatctgtctaaagacctgaagttgaatgtgtcaagctgcctaaggtttcagaactgcaatctatttcataagtgagacaagcaagtggactccaagactctaagtgaaatgaagtctgatgcattggcctaataaatgggaacagcatttggaagattattaaaacccataagagtcagataattaaagc

SEQ ID NO: 474074 - DNA, 589 bp, Homo sapiens
aaccatcccaccattttgggtcagcctgtgttagaatgagtctttggtacatgttcaatttcacagcaactgtgaccttcattgtgaaggttgctcctgccagtgacttcagccctgtatttaaagctgcacactattcattctctgttccggaaacgttgggaggaaaagagaaccatcattttggatttgacccaactcgaggttcaaatactccaaaattaattgtgaagaatcctttcaactttgaatgtagagctgaagtacagcagcagtaccatcttgttgtgcatataattgatgataacttgaaatatggcaaatccaccaagcccaggacaggcaccgctgttatagatatttatgtgagaagagccaatatgccacctcctccaaccactagttgtgaagtaaagagttatagaatttaatttgggtctctgtatgggaaatgttctactccctatagagaatgaccacctgaaaactttacttattagtgaattgccaaggaaatgtcaaaatcaagtcttacaagagctatgtacttagacaataagttttaaaatacatatggactctctgatta

SEQ ID NO: 474075 - DNA, 700 bp, Homo sapiens
ttctttgcctctggtgggggacaattttgaatgtgcattctacactcgcttccaggaagatgtgctattttgttacagagcgtggaactgtgtttactgctacacgtcttgacgtggagagagctgggtttgcaagtgtccagtccttctccattaaggctcgtgactgtgactggcagtgtgcagcaattctagtaactgcctatacccatggcattaatgacaattcacctttctgtgatcagtacctcattaggcacacactcaaggaggaaattgcgaaagatacagtagttgcaaaactcttgtgtcgggaccttgatgagcctcctgatacaatccattatgctcctagctcaggcccagttggttctggacaactctttgagcaagtgccaaatgctgaaaatgtcatccagccagaagatatggctgagaccactggtaacatttctctttctctggccctaaccccagatttttgtgacaaactccataagctacaagctggccttttgcatatattgtgaattttggaagcttaggcactgagccaagagatttcctgggttgatgttcattttgaaatgcaatgccaaactatcaccttttaaaatgaaatttggatgaagatggaggttttataaacatgatgctaagatttgggtcttcgtatgttcactttatatttgggtaacta

SEQ ID NO: 474076 - DNA, 574 bp, Homo sapiens
agggctaaagtctcttatgggaacaagttgagtctaggggaatggccacccctgcccgtgctgcactgcagacacccccacagcaaaccctctgggctacacatcagctggcttgttgccccaacacttccctaagcagccctccctgccacctcaagtgtccatggtggtcaaggggtccccctccttctagggttcccaaggcctgtgacaagagcaggttgctccttgccagttcaactcacccattccccctgagctgttgttgttcaaaagtgagtcctgctgcagggttgtatgattattcccatttcacagatgagggaactgagcacaaaagagtccaggcctgcctgagaaggcacagcttcaagggacagaactggaaggtgaactccaaagccaatgctttcaccagtctccccatagtcatcaccaacacagagttcttttccagcactcaaagtaggtccagtctttattctctgccatagcatcccctttatttccttcctagtgattattatctgtaacggtcaccttgctatgctgacttggttatctgttctccctg

SEQ ID NO: 474077 - DNA, 1072 bp, Homo sapiens
gacttagttggagaaaggatcccaagggacctgatcaagctaccgccacacatgcttcaaacaaacaaatatgtaccttgggacactttttgcacggtctgagaggcttcaactgtgcctctctgctgatggtggtgccaagcgccaggagcacctatcccgattttccatgcctgacctcagcaaagactctggaatgaatgtgtctgagaagctgagcaacatgggcactcttaactcgtccatgcagttccggagcgcagagtcagttcgcagcctgctctctgcccagcagtaccaggagatggagggaaacctccaccagctcagcaaccccattggctacagagacctgcagtcccacggaaggatgcatcagagctttgattttgatggagggatggcgggcagcaagctgccagggcaggagggcgtgaggatccagcccatgagtgaacgcacccggagaagagctacttcacgcgacgacaaccgccgtttccgacctcacaggtccaggcgttcccgacgctctcgctccgacaacgccctccacctggccagcgaacgcgaggccatctcccggttaaaagataggccccctctgagagccagggaggactatgaccaatttatgcgccagcggagcttccaggagagcatggggcatgggtcccggagggacctgtacggccagtgccctaggactgtgtcggacctggctttgcagaatgcctttggggaccgctggggaccctacttcgccgagtatgattggtgttccacctgctcctcctcttcagagtctgacaacgagggctatttcctaggagaacccatcccccagccagcgcgcctgcgatacgtcacaagcgatgagctgctgcacaaatacagctcctacggcctccccaaatcttccacattaggtggcagaggacagttgcacagcaggaaaagacagaagagcaaaaactgtatcatttcttaatatgattgggatcagggaatgggagaagatgggagctaagaatgtaaagtcagaaacttgcactgttttaaatgttaaagc

SEQ ID NO: 474078 - DNA, 603 bp, Homo sapiens
atgactctccatagttgatagaatgtgcaccggatccatcctttccacagcaggcacttgggaaggctctgcttggtctggccctcccctggcacgtgttcacccgggtgacagttgtgctatggtgcagcccgacctggtctccatgcacagctctcatgagttcctccttcatgagacagtctcagaactcagcctagctctagcccctcctgtgccttcagccatcactctgcacttgctcataacagttctgaatgacttttaccatctaagtggatcaaaaatcgaggaatcctttacgttcttcttcaatgtcttcaaaatgccccctacaaaggcaatggccacacatgaaggggacatagctttaaccacttgctcatcaacagactgggcttgtgaggcccagggcaaaaatcctgtgatggataatgcaggcaatgcagaatctcatccctgaaactccagctgcgagaatgctttccttccttgatggcagggataggggttggtactcatggacttgcaaatggtcacctcattctttctgaattcacttgccttttgtgagcactatgtggcccctccatggctgttctg

SEQ ID NO: 474079 - DNA, 1014 bp, Homo sapiens
agtgtttgcattacttatgacccagcaacaccactcctaagtatataccaaacagaaatgagtacccgtgttcaccaaaagacacgtactataatgtttacagcagcactatttgaactggcattaatagaaagccttggcaagtccttagagctcaactcactgggtcttggccctagacaagaccaggggaaaaaagacaaaatcttggctccttggcaagtgacccagttagcagaactgggaattttgctctgggagagggtggggaagtttattttagcaagaaaaagccttgggacacagaaaccaaaccaaatgcttgacaatccctttgtgcaaacccatggtgaatcctgccagggacataggttacaaatccgacttcggcacttcaagaaagataccaagaacctacagctaaagcaattaaggtgggggcaaggaaaaggtaagagctggtgctccaattcacataaattaaaaagataattcttttacaacaaatgctgatttacaactttagatgaaatgcatggtttcataagaaggaaaacagatgataattttagtatttaaatgaagaagcaaaacaaccttgaataaaagatgaatattgatttttaaaaatttgtttaccaagaattacagaattgtgcctcatttgacttaatttcagacttgttaattatgtgtctaagttagccacaaagagaacacacttattttaaattttaaaatttaaaggaaatgaacttattcaattttgtgcttaaacactagtcatacaactcttgtagttttgttgatttcctaaaatttttatagaaattcaaatttatgacagtatggttgttcatacctgcattgaaaattcaggtgaggtcaatagattttctaaagccatcgtgattccccatcttctttgtaattccttctttatagacagaatatattgcaataaatttagtttatgttttcttggtcatgatcatactcaggtgtatattgctg

SEQ ID NO: 474080 - DNA, 752 bp, Homo sapiens
cgcctatatttatgtattttctagggaagccattggagtgtgtctgaggaggtacatcaactgccatggagatacttttctgccttttgcttgcagggcattatttcatgccatttctcactatcagcactcctgatcctgcttcttactctaaggttctgggtttcagtttgatggaaacggaacgtgaacaccagaagagaagtgatgcgatttacaaagaaagaggtttaattggacttacagttccatgtggctggggaagcctcgcaatcatggctgaaggcaaggaggagcaagtcctgtcttacatggatgacagcaggcaaaaagataatgaggaagatgcaaaagtggaaacctctgataaacccatcagatctcttacactagccacatttcaagtgctcagtaaacacatgtggcttgcggatatacaagtctcttctcccagaaaattcttttggatagcagtgggagctgaattccaaatgtcattttcaatcttgatatggggagtaggaattacctaagtactttatagagaggtgaagagtaaataaatagatcatgtacaacctttagcattgtggcgcacatacaaataagtactgtataaatagtaggtatattatcattattataaatattatattctggaaaatggttaccaatttcataaggtcttaagagtagaacaagcttctctaagagggttgtgtaaaagtttagctctccaaggtagttatctt

SEQ ID NO: 474081 - DNA, 552 bp, Homo sapiens
ctagagctgctcacagggcgacttcagtatctgtggttacgtctgccacgagtggccctgtaacagtctgttgttaggaccatgtttggcaagcctgataccagggttacgtgtccccattctcaaatcagctcttctcagtttggggcttcatcagggtttcacaacctttaccctagatccaaaagctcccacaaaggcactcttgcttgtgaatggctgccagattgttgtctgtgtgggagatgtgagcaagagaccaactattctatcatgctgacatccaaagaaaatgggaaaaatgccacatttcaaactacctcacaagaaacaccagctgcctttgtcatttattctcaaacattgatcgcagttaacctagacaggggagccaagagtggtttagatggctttggaatgagaaataaaggccttcggtcaacaaccaagagagtatgccatcttgaaagaggatcctttagttctaggcaaaccttcacagctgcagccccagacaacatctgcttataaccccttgagagacctggagtc

SEQ ID NO: 474082 - DNA, 2959 bp, Homo sapiens
gtggttgccaggggttaggggtggtggggagaagggagttcatgtgacagtgaacagctatgtgttggatgcggccgcatgaaatggagatccgattgcctgacttagctttgaagcgaatcttctctttcctggacctgttcggcttgctgcaggtttcccaggtgaacaaggtggcagctcatctgaagtgccctatctggatgggagccagtgatggatatatgattgtctttaccagtggaccatacttgttactcttcagcatcactggcttcctgctgcaacgatttgaggaccatcaggcagccatcaacaacttctgggtggatccttgctatgtgctcaccacatccgagaactctgtgcacgtgtacatgtgggaagaaggaggccgccatccatacctcaggagctgctgtcacctggaaaacacgtggcatgatcacacaacagacaggttctctgaggatagatatcaataaactcatgcctgaaaagagaatcgctagttcttgaagtcatgggacttgcaatagatgttaagtcttcccaaagtggctctcaatttatattcccatgagcagtggatagattatgtcccaataccctgtgttttcttgctgagttgtaccttttgtgagttcattagccacttgcttgctgcttcagtgagctgcctttccctccattttgctgatttttgcccctggtttgcttgcctttaaattgtttttcttgagattttacgtagtacacgtagaagtcttgtctcttaaggctttgcacacattttcttccagattattgctagtcattatactgcttatagtgcttttttggcaacatctaagaaaatacatatatcctttgcactgccaacaccactaaaaagaatttactgtgaagctatacctccaatcattcaagtacattggctgttcattacagcatttgtgatagtcaagagctggaagctccctaagtgtccaaacataagagattgtttaaattaccatcgtatatccacacaaggaagtatcaggcagctgttattaacttttttacaagaataggaaaatgtctatgttcagataatgatttccagtgttttgaggcaaaaatactttaaatatctataagcatgcttagcagactttcatggtttttgctctgtatatcatatctaataaattttagcctacaccaatcataaatacttatttcctttcaataatttcaaatacttcccctggattttttttctttcttacatttgaatggatgtatagtgatacctcattgtgatatttattgtgccttttcccaataacattgagcaatttatttgccatccacattatcttctttaacacattttttcaaatcttttgaccattttttaattgggttgttaatattgagtttcttaatatcgagttttgatagtcctttatatatttggaatacacgtcttttatcagataagggtttgcaaatattttctcccactctggtttgtctttctattctcttcacagtgtctttcaaagagcaagggttaactttgaagtacaatttttcttctaaaatgactgggcttgggggattgtatctatgaaatctttgcctaacccaagatcacagagatgttctaagatttcctctaaaagttttacagtttagggttttacatttaggtctctgatgtattttgagttaaattttgtaagggaaagataaagatcaagatgtatttttttgtatatgaatattcagtgattcagcaccatttgttgaaaaaactccttactccgttgaattgcctgtgtacctttgtccaaaatcaaccatatttacatgggttagttttgagactttctcttttgttccaatcatctatatatgtatctcttatcaaataacacactacattgaaaatgtaactttatagagactttgaaatcagataatgtgagtcctctaacttgttcttttacaaaattattcagactattctggttcccttgttttccaagtgaattttagaattggtttgtaaatttttacaaaaattctgagatttatattggaatttgtttagatgtagagattaattaggggaattggcatctttactattttggctctttcagtacatgaacctgaatgtctcttactgttttaggccatctttattttatcagtgtttttgtagtttttaggataaatattttgcacatatttgtaaaatttatacctaaatatttcgtggttttggtgctattataaagagtactgtcttatttcaatttccatttttcattactagtatatagaaatacgactgacttttgtatattgaccttgtatcccgcaaccttgctaaactcattcattctaatagcttttattcatagattggtagatactttgtgctttctctatgtagacaatcatgtcgtctgtcaaacagttttctttcttttcaaatgtatgccttgttgttcttccctttttgcattggctataacctcctgtgtggcactggagtggagagccgacatccttccattggatgaaaagtgtttggtctttcaccattattattatattcactgtatgtttttgtagatgccccttactgggttgaaaatgttctcttctagtcctagatggctgagaggtttttgttgtcatgaatagatgttgaattttctcaaagacattttctgtataaattgatataagcatatagtttttcttttttaggttcttagtaaggtgaattatattgattttcttttttgttagtggtcaggacagagtatcttattagtttttaattaacaaataattatatatttatggggtacaatgtgatttcatagatgtatatattgtagaatgattaaatcaagctaatatatcaatcacttcatacacttacttttgtggt

SEQ ID NO: 474083 - DNA, 681 bp, Homo sapiens
tcagtggcgcccgtgggaagccaggagctgcatgctggctgacgctgcaggtgcctgggaacctgctaacctggcccctccacccatgctgcatcctgtgcaagctgtcacgggagggggaagggccctggtgaccctcagggcctctagagcctgtgggcaagagctggccctccatgccaaggtgccaggcctaaccctggtgaagagtgacccaactgggcgactgcctgaggcctcagaggaggacaaggagaagggttctcccagactgcagagcaagatccaggctccacacaatgccagaggccctgcctctatcttctctctggccagcggccctatcgctaaccccacacatgaaggatactgctttggcatcatcgtttatggaaccccaggctcccactgctccatgctgtgcaggttacacctcccaccctgccgctctctccgggggcctcagtccacctcctgagcccatgtcctcagtccatgattggaccgggtccctgggtcccttggaggaccagccaagcccaggtccttctttgcttcttactccccaccccagtctccttgttcttcagtcttttgctttcccactggctcccttctcacacctcccatggctgtgcccatttctccttttaactctgtcaacttttggatcctatattt

SEQ ID NO: 474084 - DNA, 959 bp, Homo sapiens
tggcttcatgggccaggtccagggccctgctgctctgtgtagcctcgggatactgctctccacatccaggccgctccagctccagcctcagctaaaatggccccaggtacagatccacctgctgctttggagggcacaagctataagccttggcagcttccacacagtattatgatgtctgtggacacatggaatgcaagagtgaaggagacttggcagctttcacttagatttcagaggatgtattcaaaagcctggattcccatgcggaagcctgccacagtggcagggcccccacagagagcctctcctatggcaatgcttggaagaaatgtggagttggagcccccacacagagctgccactggtgcactgcctactggagctgtggaaatggcattgctgccctccaggccccaggacagtagaactaccagcggcttgcaccctgagcttggaaaagctgcaggcactcaactccaacccatgagagcagccttggggctataccctggaaagccacaggggtcgagctgtccaaggcctcaggggttcaccccatacctcagcgtgccctgggtgcagggctatgacacaagaaaagaagatgaaacttatttaaaataaacccaaggcagacaaacaaaatgctttgttattgtaaatagagggtggtaacaatttttagaaaattaaccaactttatttttaaattacaaaggtttcttgggggatccccttggccaagagagagatgcattcaataagttggggagattcgaattttatttttggttttcagggtgccttgctgctatgtcctccataggagatgaatgctgtgtcctcaaatagtggaagggtggagggaaaaaagtcctagctagttccctccaacccagttataaagcactaattccatttatgaggacaaagccctcaaggcctaatcatctcct

SEQ ID NO: 474085 - DNA, 723 bp, Homo sapiens
agcacgttggaccagcgttgtaccatgaaacagagccaaattccagatgattatctatggcaatctgagaaacgtggaagaggaagatcagcaaaatgtgataaacaattaaaagacggagcagaaatgagagaagtccaaggtgaaagagaacacatagattattacgtggcttctaaagtttcttttagttctgattcaacccctaaaggttttgtgactccccatctgctgcaacttctgtgctgtgtctacacccctggttcaccctctcccctagattccgtccaggaaacttcgcataaagttgaaattgttacagagttcagctggagttttccctctccctgtggtctttccccagctccaccggcagccctccctaaggactcctgcgagacaaagacagaaatggcttccctgaggactgagagtggttacagggctcttcctgctgcttcctctactcctgtatttcacttggctctctaaatttgtttcagctccaggtcagtaactcttaaatttgtccttctgaggctaatttctagatcttgtaggtgtgcttcattcttttttattttttttcttttgtctcctgtgactgtgtattttcaaggagcctttcttcaagctcactagcactttcttctgctttattaatttcactgttaagagactctgatgtattcttgcatatgaccattgcatttttttagctct

SEQ ID NO: 474086 - DNA, 665 bp, Homo sapiens
tttccttctaaaccttccttctaaaaactgcctcctcttgaatgtctctatatctgtttattcatttttttcactcaacgaatatctgtggagtaccagggctgaggtggtttgctgggggtccatccagaccctattcactagggtccctcctgtacctggaggtgtcaccagtggaggatgcagaatagcaaaaatggctgcctgctccttcctctgggatctctataccagaggtgcaccaacttgatgccagtgggaatgctcctgtataaggtgtccagtgacccctgttgggggttctcacccagtcaagaggcacaagatccagaactgcttaacaaaacactctggctgccccttgtcagaaggggtgtgctgtgctgggggaaatcccactcatccagattgcctggattcttcggagccagcaggggaatgacaaagtgtgctgatttgtggaaactgcagccgcacctccctgtaggggctcatccccagggagatcagagttctgtgcctaaacccctggctggagttgctgaaattcctgaagggaggccctgtctggtgaggacagatgggtcagggtccagcctaaataggcagtctggccataatcggccatggccactgtgctgcaccatgggtaattccccctaggt

SEQ ID NO: 474087 - DNA, 3639 bp, Homo sapiens
cagaaaatctcaagttgctttaaatatccctgccaagggaatccacatttgagagtgccaaacctgacttcttatggatggaaatattctacaatgcattcacttacgcaaatgaagcagatgctgtgaccattgatggaggtttagtgtttgaggcaggcctggccccctacagccttaagcccatcgtggtagaaatctatgggtcaaaagatgctgtcccaacttttccagaaggcatatcccatgaactaccacagcctctggatacacaaggggaggttgaggggaaggtgtttcctgaggtaaagaaggactatttgggtttggctgatgtgcaagtgttcctgctcagctgcgtcccctgtgaggacatgaagaatttccctcgcctgtgtcaactgtgtgcagggaaagggacagacaagtgtgcctgctcctcccaagaatcgtactttggctacgcgggagccttaatcattgaaatttcaaatttaatcacattctcctgaacatttcattataaatgtctctcaactgcttcaggcaccttaagcaaaacatacaaattattgtaaatatttcagaacttattagcacatctgcatttaaatctgtttcaaaagcattattgccatggacaaaagtgtacttcttcttcttttttttttttacatttatgaaaaaaacccaaactttttcagaattttggacagtttaccacaaacaaacaaaatatttcagactaattgagtttccagattctgggtcttataacaaattaaatttctatcagatacagaacattcaaaacatttgaaatacatgtatatattcactgtgctaagctcatttttataatgtctgctacttgaggagaattttagatcatcgctttttacatgggtcccagttccttacaacttaatgtctttcctaacatgaaattgacttcagtgtcctttgttcccttgttcagttattcacaattcactgtctcctcattattacacattgactataattattactcattattgcactggtttgttagcattttggcaattgatgcatgtcttattatccacaattttaattagtggggtcatctatgggtctcatcaagttgtttcaaataattattatgtcctttggatgctcaggttaccacacttaatgatagtggcagcatcttctatctccccctgaagtatttgaaaacatcctcactttatggaaacgacagattgtcccagaccatcttgatttacctttgcccaaagtcacttgtgtgctattttgtaagatctcttcttgcctggtaggagaatgtcatgagactatgacaatgagtgggggtggagagccctgggctgctgctgcccccctgggcctttgagtggccaaggtggaaaagtgatttatttctgaggccattaggtcatattgattctctaaatttaattctaacattactaaatcattttgaaatttttcttttaatgtaaagatttaaaacgtattttctagagaaaatactaaattaaaattgtaaccactcacagcagccctgataacactctttctctttcagtttgagattttatcaaccccaaagaccatctgatgcaggagaatagggatatagggtaatcaagagttaaggcataagcaatagggcagcaggtgtagtcagttagttctaggcaagattaggcagcatataggccacatcctcactcctgtgataacaagactgtctccacttcagcctctaattggccatgggccagtccttcatatgggtataaccagctggaggcctctaaacagcacctggggtgttaccaaattctttttgcttaataaaaaccctaaagaacactgtgatcaaggctcttgagctgctcgctggagcctgctcccactctgtagagtgtactttcacttcaatcaatctgcactttcattgcttctttcattgcttcattctgttgttgctttatttgtgcattttcttcaattctttgttcaatgtgccaagaacctggacaactcacagtcaagactttccatccagtaacacatctgtattcgttttctaggactgctgtagcaaagtaccatgaactgggtggtttaagcaacataaatatcttgtctggtacctctggaggctagaattccaagatcatgatgttggcagggttgggtcctcctgagagctgtgaggagaatctgttccaggccactgtcctcgcttctggtggtttgctgctgatctttggtgttgcttgactcacagacacatcactccaatctctgcctttatgttcacatggcctgtgtgcatgtcttctgtgtccaaactcccccttttcatgaggacaccagtctttttggattaggggtccaccctatcccagtgtgaccgcatcttaactaattacattttcaaggtccctatttccaaataaggtcacattctgaggtaatgtggattaggacttcaatatatgaatttattgaacccacaacacttttcaatacctagacaatggaatcaaagaggctgttttactcatagggtctttctggttcatctttgtacctgcaggttaccctgactgggcccctagacctccttccatctctcaaccctctcaccttttcccagcaggctctgcatcaaagggaatgtggcccctttagtgggggacctgggccatcttggcatggtaatgcgtcagccccagactagttaccttaagtctctgagtctcagtttcttcatctgtagaatgagataatcatattactggcctctccaagttgttgtgaggattaaatgcaacagagcctggagagccttcagcaagtctttgatgagctatgagtgcacattacacatttgctgtcaccattcctattagcagagccaggcagttggagggccctgggccaggcacactgcccagccctgtgtctacctgcagtgagattgtgaaccagctgtttcactcctgaggcctctagtccttatctgtataaaatgtttttggaaaaaaattctccctcagtcctcttcaggccacatatttgatggttcggtgaggggcatgggtcatcctaactatggctcatggctctcctgcgttaggctcacctgggctttccctccccagagaacctggcaaacaaggctgacaaggaccagtatgagctgctttgcctgaacaacacccagaagctggtagttggatacaaggactgccatttggcctgggtcctttctcatactgtcatggcctgaagtgtgggtggcaaggaggacttgatctagaagcttctcaaccaggtccaggtatccccacctgccatcttcccctctggcttagtgctccctgcttggatttggagggaggttaacttccttgccttcttgtcattctggaagtcctggtatgttcagggtacagtgggagccatgccacatgtgatcctcttcactgacaagccgctcagtctatatgtgttatatacagcagaggaataaaacctcatctggaaccacgaacctggtggactgaagactctctgcagaagttcttcttgtcccatttaattatttttcattct

SEQ ID NO: 474088 - DNA, 1156 bp, Homo sapiens
ccctgaggagtacaaccactgttgagtgtcataagtgggtgcaggacagtgggtgcagcgaccaagtgtgagctgaagcagggcgaggcattgtctcacccaggaagtacaaggggtcagggaattccctttcctagtcgaagaaaggggtgacagacggcacctggaaaatcgggtcactcccaccctaatactgcgcttttccaatggtcttagcaaacggcacgccaggagattatatcccgcgcctggctcagagggtcctatgcccatggagcctcgctcattgctagcacagcagtctgagatcaaactgcaaggtgacagcgaggctgggggaggggcgcccaccattgccaaggcttgagtaggtaaacaaagtggcccagaaacttgaactgggtggagcccaccacagctcaaggatgcctgcctgcctctgtagactccacctctgggggcagggcattgccaaacaaaaggcagcagaatcctctgcagacttaaatgtccctgtctgacagctttgaagagagtagtggttctcccagcatgcagctggagatctgagaacggacagactgcctcctcaagtgggtccctgacccccgaatagcctaactgggaggcaccccccagtaggggcagactgacacctcacatggctgggtactcctctgagacaaaacttccagaggaacgatcaggcagcaacatttgctgtttaccaatatccgctgttctgcagcctccgctgctgatacccaggcaaacagggtctggagtggacctccagcaaactccaacagacctgcagctgagggtcctgactgttagaaggaaaactaacaaacagaaaggacatccacaccaaaaacccatctgtatgtcaccatcatcaaagaccaaagcaatggaacaaagctggacggagaatgactttgacgagttgagagaagaaggcttcagacgatcaaactaccctgagctaaaggagaaagttcgaacccatggcaaaaaagttaaaaaccttgaaaaaaaattagacaaatggctaactagaataagcaatgcagagaagtgcttaaaggacctgatggagctgaaaaccaaggcacgagaactacatgacaaatgaacaagcctcagtagccaa

SEQ ID NO: 474089 - DNA, 1472 bp, Homo sapiens
ggaaagccaagttaaagggagatgactgatcagaccttggtgaatttaacagtctgtctgctggagtttgctggagtccactccagaccctatttacctggatatcaccagcagaggctgcagaacagcaaagattgctgcttcttcttcctctggaagcttcaacctagaggggcaccccgcagatgccagctggagctctgctgtggcttcgtttatactgtaaggggaaaaccacctactcaaccctcagtaatggctgatgcccctcccctgaccaggctccagtgtccctggtcgacttcagactgccgtgctggcagcgagaatttcaagccagtggagcttagcttgctaggctctgtggggttgggatctgctgagctagaccacttggctccctggcttcagcccctttccaggggagtgaacggttctgtcttgctgccgtttcaggtgccactggggtatgaaagaaaactcctgcagctagcacagagcctgttcaaagggctgcccaactttgtggttgaaacccagggccctggtggtataggcacccaagggaatctccttgtctgtgaattgcagagaccatgggaaaagcccagtatctgggctggaatgcatggtacctcatggcacagtccctcagggcttccattggctaggagagggagttccctgaccccttgcgcttcccaggcatctctcagtccagacaatgtggaaagtcaacatactgctggaaattctgcctcccagaaggaattccctttactaatatcctgcggagctaccctgagtgggactgtcatgctacagctgcccaattctggttggtgtcaattatatctcacagaatcattcataaatcagaccacagatactgatccaggcaggccttttccagtcagcgcaagagcagttgccctgcagcactaggtccattacaaagaactttcccctaccaaaaaaaaaaaaaaaaaaaattcatgcttccagtagtcacctgaaactgaatgaacaggatttccctgaatcccagtctttctctgagtctttctctatgtttatgagtaaacctgggcatgattagggctgcagcaatcacacagctctctgaagaactgctctgactgatactcatcgtaagcaccttcctgccctccaaaattgcaaatgcacaaaacttggaattttcaattaagatgacctcttccctaaacgtgttgctaaatttttatgccacgagagagggaaacattgtgagttttaataatttatatctctgtggctctaaagttctcttttcttgttctagtctattgttgacatttttcagtgcattttgtatttttccaagtctttcatttccagaagttgtgattgttttttctttatgacatctatttccctggagcatttttcatccatatcctgtactgttttttaaaatttttttaagttgg

SEQ ID NO: 474090 - DNA, 638 bp, Homo sapiens
aagttgaagctgcagtgagctatgattgcaccactgcactccagcctgagaccctgtatcaaaaagcaaagaagaagaagaggaggagaaggaggaggaggaggaggagaaagaggaggaggaggtgaaagaggtggaggagaaagaggaggaggaggagaaataggaggaggaggaggaggaggagaaataggaggaggagaaggaggaggaggaggaataaaaacaaaagcaggaaagcagaaagaagtcaagaaaggcgaaacaatgagaaaacagacacaggtcaccaggccctgccaaggctctgggaagtctggcagctccacacttcccatccactccacacggccctgcatccacttcgatgtctactacttgcagaacagaagtagtgagggaacagtacctgatctcaaaggaaatgctttcaacatcttaacatgaagtataatctttgctgttttaagtgtaatcaattttatatagatgccctttattaggttaaggaaattctttcccatcttgagtttttgccaagacatgaaaaaattaatgtatgttgaattttaagtgataaatttaaagctttaatgtgtttgtaaacatgatgcatacatattttttaaaattccaac

SEQ ID NO: 474091 - DNA, 1053 bp, Homo sapiens
gctgagccagcgcctgggcctggaaccgggctgcagcccctgagcttcgcccaccacctccctgccatggacccccgcaaagtgaacaagcttcgggcctttgtgaaaatgtgtaaggaggatccgagcgttctgcacaccgaggaaatgcgcttcctgagggagtgggtggagagcatgggaggtaaagtaccacctgctactcagaaagctaaatcagaagaaaataccaaggaagaaaaacctgacagtaagaaggtggaggaagacttaaaggcagaagaaccgtcaagtgaagaaagtgatctagaaattgataaagaagaagcagcccatgatcttgcccttgcctgtaaattggattatgatgaagatgctagtgcaatgctgaaagaagttcaacctagggcacagaaaattgcagaacatcggagaaagtatgagcgaaaacgtgaagagcgagagatcaaagaaagaacagaacgagttaagaaggctcaagaggagcatgagagagcccagagggaggaagaagccagacgacagtcaggagcacagtatggctcttttccaggtggctttcctgggagaatgcctggtaattttcctggaggaatgcctggaatgggagggggcatgcctggaatggccggaatgcctggactcaatgaaattcttagtgatccagaggttcttgccgccatgcaggatccagaagttatggtggccttccaggatgtggctcagaacccagcaagtatgtcaaaataccagagcaactcaaaggttatgaatctcatcagtaaattgtcagccaaatttggaggtcaagcgtaatgcccttctgataaataaagcccttgctgaaggaaaaaaaaaaaagttaaagaaattgacatgctatttattaaacaagaatttcaattactcaataaacagaaattgctcaaactcactattaatcagggactacaaattaaaatgattataagataatattcataggactgaaaaaaatttcaagttgctcagattaggaattggtaaggtttt

SEQ ID NO: 474092 - DNA, 916 bp, Homo sapiens
acatcagtcacagacctgacctgccatctggagagacttgtgccaaatatgatgacatcatgaaggtggcgaagcaggctttggagggtcccctcaagggcatcctgggcatcgtgagcaccaggttgtctcctctgactttaacagtgacactcattcttccacttttgatgctgggactggcattgctctcaatgaccactttgttaagctcatttcctgatatgaccatgaatttggctacagcaacaggattaaaattggatggtggaggtgagggggacaaagaggctaagcacacggccaaaggggtggccttccagataaaggagacccagtcagttgtcaaatacagttaccagaaacctggtccatacggtaaaaggggcagctcccaagctgagagtgagtcattgattcaaatacagacaaatggagatacaaaattaaatttgccctactgaaggcctctgacagtacttccttacatttccagacatgttagggtaagagagagagagtcataaggaaggtttttggaaaagtttgtgaagggttggtattagtttctctttaaatgtttggcagaaatcacctgtgaaaccatgaagtccggagcttttctttgtgaggagatttttgattactgattgaatcttcttattagttgtaggtctaattcagatttttcatttcttcatgctttaatcttgggatagtttctgttattttttttactttgaatggccatactatcctgtttctctgtataccttgtgattttttgttaaaaacttgacatttgagtctaatattatggtaactctggaaagcaaatttcccctttcccagggttttctggatttgggtttttgtttgtttgtttgtttattcttgttaattttgttgttgtaga

SEQ ID NO: 474093 - DNA, 886 bp, Homo sapiens
ccttaaacagaattaccattcaacccagctatcccattattaggtcttgcagccacggataccagcattgctctggtggtagtagcagggagtgaagtgaagtctgtgaggtagcagggagtgaagcggagtctgtggagttgtgtttttgtttagcgtcttggttttgtgttcattggcctccagccagggggtggcactttcaagagcacatcagctgtggtcctacagggaggatgcaaacttgccctaaggacacctggttaactgttcaattttctcaggcagtgggcagggccacagagctccaaagagattatgacctttctcttccactaccatggctggtagagaaagaccaccagacgtgtgccagagacctcagaacgcaagctgtggaccaaagcagctgtgggcactggcagctaatgcagtgggaagattatggaaattctgatccaacagggttcttgctctgcccagcatgcacctggggtatcctaaacccagaggaaatagcagtgccaagacccattaagatcatgcagcagctggggaatcaggccatcaggccagtgacttccactggggaccccaggctgaccaggtttagatggttatataggccagagtctgtgcaagagcactctactaaggggaaaagatgagaatgaattctagcctgaatcccacttgccaaatcttaagttctggcatatggctttgaaatttttaattaatctttgtatttaaaaactattaataatcactttatgcaattatttttaacagtattttcaaattaggcaattaaaataatttaatgaaccaatttaaattatgtttagcataagtggtctaaagtaatgtctaaaacaatgttatt

SEQ ID NO: 474094 - DNA, 937 bp, Homo sapiens
ccgtttcttttctttccttcttgcactggacagcggagtctctcctcatgtccactactaccacaggcccatgggaagtattgccagggtatcaccagtgttcacttacatcccaaaggctctttagtcagcttgtggtggattttgcaggcctgggactcacccttcagggtagtagtctcccctctggcccagggcccacagtgtgtactactgggcctggaatgggggcctcacgactctgcctggtgccctatcctactgtggctaaactggtattcaagttggaaaacaaagtcctctttactcctttttcttctttcctcaagcagatagaagaggcctctttaggagttacaagctgcacagcctggggttgggggagggatgacacaaggactcctttagttaccccagctggtgtttcactaggtcacgtgcccccaaaggctactggctccaagcccattatagcacttggacttgccttggagttgcagtccttgtggcctagactgccactgaagtttattgaggaccccagagccctttaccccatagtggttaggcttgctgaaactcaagttccaaccactggcatgggtaattcccctctatctagggctcatctaaatgctccctctgtgggcatgggctgagttctgcctggtgttgttttctgctgtaacagggcagcactgagttccaatgcaaagtctcacaaatactgtgctctacttccccaaacacacagattctctttctgtgccacatggccactgccaggagatgagggaggggttttgttggtaattcaagattgtctttcctatcctcttcaatgcttcttttagcaatatgaagttaaaaccaggtactgtgattgtttacctgatttttggttcttatgagggtttcttttgtgtaaatagttgtc

SEQ ID NO: 474095 - DNA, 458 bp, Homo sapiens
tctggacatctgaaacttggaaaatgagtcccacaatgagttttctcatgcttcggctgtgcgtggaccagtcagcttccgggtgtgactggagcagggcttgtcgtcttcttcagagtcactttgcagggaaatccaagccaggtcacaaccaaaaccaaagcatcaagcaatccaagtcaagtcaaaaacaaaaaccaaagtgtcggtacgggcacaccatgggtgatcaggccatgcttccactcaaatggagtaggcaaattccaaagaccaatcctgtcaagcaattcaaaccaagtcaaaaccaaaaccaaagtgccgataaaggcatgccatgcgtgatcaggccacacttccacttaaatggagtgggcaagttcccaagaccggtcctgtcaagcaattcaaaccaagtcaaaaccaaaaccaaaatcaaaccgaagtgccgataaagg

SEQ ID NO: 474096 - DNA, 496 bp, Homo sapiens
atcaatgcagtggctgaacaccgggatggaacgggcacttggaatctggacatctgaaatttgggtggaaagaagaaaaactcgagccagcctaggaaggacgctaccttgtgctgctaaccaccaagactgctgctcgtacagcaaaaaaggatggactcatcacacccgagtcaagaaagcaccacctcctccagagtcgtgggccatagtcccaggggaaaaccctactaaactaaagctaaaaaaatttaactcttttcgtctattctgttactctttcttcattcctcgtcctattgctgaccatctggttattaatataaccaagtcaattttgcctccaactattgcatttaatgcttgccttgttataccctgtggagacttgccaagtcaaagacagttttctacttcacaaaagtacttctttccatcccgactctcctcagactcgacattagtaaactaggaccatttattccagggagatttc

SEQ ID NO: 474097 - DNA, 2267 bp, Homo sapiens
gcagtgggaaagcaggggacatggatgaagctggaaaccatcattctcagcaaactatcgcaaggacaaaaaaccaaacaccgcatgttctcactcacaggtgggaactgaacaatgagaacacatggacacaggaaggggaacatcgcacactggggcctgttgtgggtctgttctcacactgctatgaagaaatacctgaggttgaatgtggccgtgcatggtcagcatgctgcggtgcagagtgggccgggaaaagcgacactgacgctctggaacttctgcccagcgcgctttgtaaaatgaatgaaaataaacctggtgactcacagaaccttgaacaagctggatttaaacccactccttcaattgagtgtttgcatgtggattttcctgttggaaacaagtgtgataactgtttagcaattccaatcaccaatacatataaagagtttcaagaaaatatggactttaccataagaaacactctaagactagaaaaggaagaaagttctcattacattggacattaaaatgtttccttgaacaaagagaagcttctttaaaagctgctattgataactgtcttttgtttccctaaccttttcatcattactttgaacaaactagttagcttcttggcctaataaaatttatgatatgaacataaaggaattttacggccatttagggtaagaaaaatttttttttgttaaagcatactagtcaaaataggtgatagtttctcattttcttgatatacatacttcataaaccacaatataaatactctcaaaatggttgtatggattttatttaggtatggtagcatggtatataaaagtaaaacctgttttacccacaatttttgtaaattaggattacatatggaatgctacaatttttctaggtttattcaattttcaaattattcctcattttattttaaagcattaaatagaaaagctaattggttaaattttgtaatgtaaatcagaggcatatattctggggtttgtgttactatgcatgcttttctaggatggcaccaaattagttgtttaaaatgtttttagattactgatttatattaagatgacccacactgcagttagattatgcctagtgggaagtattatatgaaaagcagaattaagctgggcacagtggtatgtgcctgtaatcccagttataagggaggctgaggtgggagaatcgagatgttcagccagcctgggcaatatagcaagacctcatctcagaaaaaaaaagcagaattgcacaaattttctggaatctatggacattccatgggcttaaacacttttgaggtggataacatttagttgaaaatacctaagaaagtgtgtcttctttaaagccttggcttcagtcatgggaaatttttgttgttgttgttgttgttgttttttctgtatcctatatttggtattttgtatgtctgatccataatcattttaggtatttaagtgatctctgtggattcgtaggtttggccatttgaccattatttattatcaagatggttgtatgctaagattttaaaaaagaattatgctgtaaatctttataaattgtatatatatttcttaaatattgcaattgtctaaacgttgtatattttaaggctgttttctcttgctctcaatgttgaggaaaactataaattgacctataatgcatctactgctaatggttttggttagtttgatattcattgtttttaaacagtttccaatatggaaattttaacaccttttatacagttctctactattcaagataaagattctttaaaatatctcaccagaaacttataattttatactttgtaatatttagtttctataatttgaggaagggactttttcatttggattaagtaaaaagcctttatttgattgccagcatgagaattcaccttggtttctattttatgcatttgtaaattttttccctaattacatggaagctattggaacttttgtattcaatgctaaatactaagtcaaagggagtataataggtaagttttttcagttactgtgtctttagcattcagtcattataagaaaatgatcataagaaaatcattatattataaacatgtaattatttcatataatgattatcatgtactgcaatgttacttttaaaataagctattaaactagtttttatgtttcaactaatgcaaaaaaaaataaagaaatatctgagactggctaatttataaagaaaagagg

SEQ ID NO: 474098 - DNA, 744 bp, Homo sapiens
cttaaagaactaagacccaacagctgacatcatcagagaggtcagcagatgacacagtgaaggcatttctagcaaggaagacttgtttggagcagagtagaagatctggtgttccaacccagcaggaaaatgcggcctttgactgaagaggagacccatgtcatgtttgagaagattgtgaagtacatcagggagaatcttcagctgctgctggaccggcctgaccgcacctactgtttctggctgcacaacgaccgggtggactatgtgagtgagaagattgtgaagctggatgccaatatctccggggacaagctggtgtcactggggacctgcttcggaaaagtcactaagacccacaagtttcgcagagccagtgtgctgctattgtttgctggcctaacaaaaatgaaatcaaggctttcactgaacagtctgccaaatgttgaatcaacagcccagcttctgcaacagcttgctttaatgaccctagacagcttctatttgaatcatatactgggtcacaaggaggaaatagataagcaagtgtttgacattcttgtgggctctctaaagtcttagatcactccagccttgtatgctaactttggagactgataaaggctattggtgcctaaaaggctgtgaaatgtattttttaaaaagctgtgaaatattttaagtgtacatcacataatttagattgtaaatttgatacatctgcactatgaaagtgtcagaaac

SEQ ID NO: 474099 - DNA, 722 bp, Homo sapiens
cgcccgctcgacgcctctccacgagcccacgcttaccatgcattgccacccagcggaactatggggctccaggctagtactgagaagtgtctgcaaagagtcctgttatgtgatccatcttcaggtcttgcagccgtggataccaggacctgctctggtggaggtagtgggggagggaagtggactctcccccacaacagcaccaagtctatttgcaggcagccagtgaccagggctgagaacttgccccagaccatgagcctccccattgagaaagcaagccgactaagaggttttcggcatctcagggaacccatagaagtgatccagttcttcaaagggtctgtggattctctcggctttcctgtgggagagaagggttggcatgtgtttacaccatcttacctggaaccagaactctggacatctgtttttgtcacccagaattttcttcctccttgcaatggcccttcaactttccctcgacaaaatctctttttacctttcatccagggtacttccagaagagttggtcccacttatgactcagaatggaggaagtatttcaggctgaaaacaatccactcaatgcattttcttgaacaaattgatttaatagtgaacataagactcacttagagccaatgagagagaacaagattctgctgaaaatttagagcactatcactggttcttcacatctagatttagacctagaaacc

SEQ ID NO: 474100 - DNA, 996 bp, Homo sapiens
ctcggaagcatcagggtatcaatgggacaagtgtgggctctggttcattccaccttggaaccttttcaccctaatgatgaggaggaaggaaagtataatgaactaacagaagacatgacagagcaggtttgtttgccagctaaagctaaagcggcaaaggaggaagaggttcctccctacccttctgcaccccctcattattttgaagaaaaagaaggacactgggtgaaaagtagttgccccagtgaccgagcagtgcctcgagtgaccgctctcagttctattcaagcaggaatccagcaagctagaagagaggatgggtctagtaatggtaaagcttcttattctggatcgaaaggtaaagttttccagacgccctatacttcggctcaaaaagcagagcttgtagctataattgaggtattgactgcttttgatatacctattaatgtgatttctgattcttcatatgtggttcattccacacaattaattgaaaatgctcagttacgatttcatacagatgaacaactgatgactttatttacccaactgcaaacagcaattaggagtagaatgcaccctttctacattactcatattcgggctcatacacctcttccaggacctttgactccagggaatcaaatggctgatcgcctagttgctactgcaatatctaatgccagacactttcacaatttaacccatgttaatgcctctggtctcaaacgcagatacagcattacctggacagaagctaaagctattatccaccatgttgagactgacgctgagggggaccccaactgtcacgagcaacacccatcgaacgcagccacctacctggggacagatcaagaagctgtcacagatggcagaagaaaacctaaggaaagtgggacaaccagtcacaatgaatcagctttctccccataatgggggatgtggctgccattagttcctgagcctcatgctagaaaacctgtatcctgc

SEQ ID NO: 474101 - DNA, 1332 bp, Homo sapiens
cgccgggacactttattgcgtgaagtccctctcactccctctacctccctcttttacgtggactctgccaaagaccaggataccagaatgcagtggagtgaccaagtgtagtgggaccttgggaacgcgagtctggagccaggcggctggggtttgcatcctggttctgcccctccttagctggctgacatggcacaagccacttaccctctctcagccttactgtcttcagtggcaaatggatcggtcaacaggccccattgcctgggatttttctatgggaatactctctttgaagaacccaagaagcagtgtcaggctggtgtgaggaccagcagtgatttctttgaggaggagagcccgtttcttcactcacaggccatgtctgagtggatcaagaagaacagagtgcccttttatgagattttgtctgccaaactcatggagctggctctccctgggcctcttgaatctgcttcatcggaatctgaaggagagggaacccgcatggggcagtccatagagatccaccgcccagacacaggcagggctgagaatgggtctggagggcaaatggaagacatccccaaagccaagccagtcagcagctgagggcaccaagcaataagccaggagtagaatagtgccctgcacacagcagggtcttaataaatgtttgttattgacaagagctatcatggttttggagaaataagtggcagggaaactatactagacagtgactggagccctccccagcatagctctctcacctgggtaggggccagggaggtggtcggcaggcggtatgggtgagagaaaggaagaagcactcctctctcagaaacatgctaaaattagtttgatgtttatagattgtatcggtcagaactcgttttgttatatttgaaaaaaacgcaaatgacttaagtaaaaatgagatttattggctcatgtaactgaaaaggccaagggtattaggcgtggatggacccaggtgctcaaataaaatcagcagatgtcagtctctctccatctcttgactgtcttctcttggttgtcttcattctcaatgaatgggtttcttctttgcactggtaagacagcctctagcggagcaagggtaaatctcatcagtttagtaactgaggggaaatagagggcctctcaccaaatattccagtaaaggcccgggagttgactctcattctgacttggcttcacccacccttgagccaatcactgtggctgtggttgaggaggtgggaggtggggtgattggtcagatctggatctggctcagagctcagaattaaggatccccgcacctgg

SEQ ID NO: 474102 - DNA, 985 bp, Homo sapiens
tttaactagacaagctgcctagagagtgccctctggcccagctgatggacagtgagacggacatggtgcagcagatccgggctctagacagcgacatgcaaaccctggtctatgagaactacgataaacttcctagtgccaagtgtataagtgtgtccggaattggtgggttcttggtctcattgacttcaagaatgaagccacagaccctcctgatgtattcgaagcttattccttctggtggggttcgtggtctcgctggctcaggagtgaagccgcagaccttcacgtgcggggccaccaagcccacgcccactcggaactccagccggcaggcaagcagcacgcatagccccggttccagctcacacctctccctccacacctcccttcaagctgagggagccagctctgaccttggccagcccagaaaggggctcccaccgtgcacccgcgggctgaagggctcctcaagtgccgccaaagtgggagcccagacagaggaggtgccgagagtgagtgagggctgtgagggctgccagcacgctgtcacctctcataaggagtgattaatctgagcttctccagaaagtccattcctggtaggcactgggaataagaaatctcagagtataaaaaaaatcaagtggtagcacttttgtgaatggctcccaaattagatcctttaccttttgtcttttcatgaagcacagttgcacaaaacacgcttagcctgagatgaagcacatattagagaaaggttctctctatagcattatgtattactcgaatgagcattaaaaagaggagatgggacatgctctctctagctattattacctccactgtacagttgacatacacaagctcattattgcattatgttttattcaacaaaataactttaatgttgaagtttaaattgaatttgctaaaacatctttgtctccagcataatgtgcctcaagtgtcttcttggtgcctg

SEQ ID NO: 474103 - DNA, 699 bp, Homo sapiens
aggggcagagctgccagaggccatgggaacctacctcttgcatcagcaaggcctggatatgagacatgcaattaacttgtggtaatatgagtcagaattgttcatggattagttataaaagattaccacatttcaataggacaatacaaatgggaaatagtaccttatctattctgagtaggtccatacacttgagaagattttaccttgtccttagttttgtatttctcatctcacaactatcacagctgtcactccaactgtcttttatatgtggaaggtgtgaggttctattagatatgattagttcactgagttacaaaagggaaaggagatgctggctctccatggaagaacaggtaaattgtgatcaggccgacttagagcaagactttggtaaggtgcagtcactgactcttacgagtggaagcataccagtacccaatgtgcatgggaacgaatttaccctatgacccaatgctttaagtaaaatttatgtcatatacatttccacagtagtcatgtaaatttaaaatctaaatgctaacatgaagttatcccactactttctctttttgctgacagagttcaaagagtgctttaattgtgatgaatacaacaatgacaataagtactaaagctgacaactttctgtaggtcagaccatgtgccaaatgattaatatgtattatctcattt

SEQ ID NO: 474104 - DNA, 1419 bp, Homo sapiens
agataactgcgggtcacgctgtacgggaagcatagcagcttctgcttctgaggaggcctcaggaagcttacaatcatggtggaaggcaaagggggagtgagcctattaatatggctggagaaggaggaagacagcaagagccctttggcaaaagctggttactccttgccagttgaactcattccttcccccagagttgtcaggggccaggaatgtgtcctggtgcacagttgctctgtgcaagattcccagcttcctataccttcagcccagcttctgtttcttccctccatccactttcagtgccttgcctctgaagatctattaggagtgagcccgtcatctcgatccctcagtggcagctgttccacctggagcacaaatcgagttgtgattaaaaagcccaaactgcttagtcagactagctttgtgaactcatccaagttactcacctccctgtacctctacttctccatgcatgaaatggggtttcaatagtttctgaatcatagggctgttgtaaagaggagggagactcctcctattataattcagggtctttaaatcagagcaatgagaaatcatcttaattaaggaaaacccttaagtcttccccaacagctggtttgcttgcaaataggaaagactaaaaatgaatcagagaaaaagggtttgcacaatttctaaaataacttgatatatttagaagtgtgactctgtgtgtgttttcttgtgcaaatctagaaaaccagagagcttgtgtgagttttaactatgttgtaattttcagaatcttcaagtatcacgtaaaatacacagcatagttctgcagctctgtaatgttctgttatgcttggttgtgagattcgtattggcataacagtgcatgagagtaaacatttaatattttaaatttataaaatgcagttgctgtatgtacaaacatattaaaaaggtatatgatagtgtgtttgatattttaggtatatgatactttgtggctattagtgagaaacagtacaccagagaagtgctattttagacaagtgtgtgcatcccttttcctctctgtagcctgtgatgttatttggaggtttgtccatagaaaaacaggtgatgcctaatgttaaaagccaaaaagcagttactatggaaaccagatgcaaatttagatctgtgtccactttttactgcgtacagaaaaaaaaaagctataatagagttaaaaattatgattcacatccatgtcttctgagtcttaaatgtctgccaaatacggagatgttgagtaagctacaacttctcagcctgaacttccaataaaatctcaaaaatgataaaattagagaacacttcaaaatgttctttttatttcttcatttgccaaaattcccttttctaaatatagatctaaaataa

SEQ ID NO: 474105 - DNA, 531 bp, Homo sapiens
gaggagcaagatgcctttatatttactcgtgcctctgcatctactcttgggcgtgaagtctgcagggctgacgatcaagaaggaaagatgcatacgaaatggatacagcaaagaaaaaatgaaactcatagttgtttctcatggcctccatgtaaatgacttgcagcataaactgacgcttttcaccaaggaaacatacacatacctagccagggattcagagaagcagaagcaggggtatctagcaggacttgaaggagcccatgccaacagggtgaaccagcagatcagtgacaacttagggaattatttaattatgtatggctgtcttctcaaccagactgagagtaaggagtttttcttgtttactactgtgtaccaaaagcacatcgcagtggagaaagtacagcaaaaagataagaggagaaaagacttcacataaactcactttggacattaggcactttctcttaactagacaatgaatatgggatccggattggaaaaatggtctagggactgagttgtgat

SEQ ID NO: 474106 - DNA, 560 bp, Homo sapiens
atgctgtctgggaggcttgctcatggtgacatcctcatctccccatgcacgttactgcattcagagcttgggtcacctcgacactgaactcaggtgaattctctctgagatcccgggagaaggaggacagttctcaggaaggttttccagggccgatcacggaaaggatgagaaggcagaggtcccgatcggggacacaattacggtggcatttctatgggaatactctctttgaggaacccatgaagcagtgtcaggctggtgtgaggaccagcagtgatttctttgaggaggagagcccgtttcttcactcacaggccatgtctgagtggatcaagaagaacagagtgcccttttatgagattttgtctgcctatggctaccccagatgtctccagatgctttcaaatgctgtggggcaagggagtggtacgtgagcaaaactaccccagttgagagccattggtctacacttgtggaaatgtttgaggtcatcctggtaaaaggctgtgtattcccttgggggcaggctgggagaaagattgatagtataaattttt

SEQ ID NO: 474107 - DNA, 2033 bp, Homo sapiens
atggcggcggcagctgtcactgggcctagcccggggtgtggacctggggactccccagaagggcccgagggggaggctcacggagcgtcggcggaaggcacacaggatgttaaagctttacaacggcctctcggaaggggaggcggtgagactcctcgcggggaccgaccccctggaccccactgatctgaacggggcacacttcaacccggaagtttacctagacaagctgcctagagagtgccctctggcccagctgatggacagtgagacggacatggtgcagcagatccgggctctagacagcgacatgcaaaccctggtctatgagaactacgataagttcatccccgccacagaaattgacaaacagcataaaactacctcccagtgccaagtgtgtaagtgtgtccagaattggtgggttcttggcctcactgacttcaagaatgaagccgcagaccctcctggagtgaagctgcagaccttctcggtgttacagctcataaaggcagtgtggacccaaagagtgagcagcaacaagatttattgcaaagagcaaaagaacaaagcttccacactagacataaaggttctacaagtccccagcagactcaggagcacagctggcttcacccagtggatcccgcacaggagctgcaggtggagctgccggccagtccctctccgtgtgcccacactcttcatcccttgggtggtcgatgggactgggtgccatggagcagggggcggtgctcgtcggggaggctcgggccgcacaggagcccacggaggggggaggctaaggaatggcgggctgcagtgcggggctgccaagcccacgcccacccggaactccagccggcagacaagtagcgcgcatagccccggttccggctcacgtctctctctccacacctccctgcgagctgagggagccagctccgaccttggccagcccagaaaggggctcccaccgtgcagctgcgggctgaagggctcctcaagtgccgccaaagtgggagcccaggtagaggaggcatcgagagcgaacgagggctgtgagggctgccagcatgctgtcacctctcataaggagtgattaatctgagcttctccagaaagtccattcctggtaggcactgggaataagaaatctcagagtataaaaaaacatcaactggtagtacttttgtgaatggctcccaaattagatcctttacttttttttttcatgaagcacagttgcccaaaacacgcttagcctgagatgaagcgcatattagagaaagtttctctctatagcattatgtattactcgaatgagcattaaaaagaggagacgggacatgctctctctagctattattacctccactatagagttgacatacacaagctcattattgcattatgttttattcaacaaaataatgttgaagcttatattgaattctctaaaacatctttgtctccagcatagtgtgcctcaagtgtctccttggtgcctgaattttctccagaattatagtgctgaagctatggaaatggtgaaattatatgcaatctgcaaaacaatgtggctataacgtggtaattggccttccacataattaaaggaacatttcctcatcagagctgttccatcagagacccaaaggctatcgttatacaaatcacccacttaggaaaacctttattcccagtagcctataaaaatctggttatgcaaacagatttgcttattcagtaacattaatggcttctcatagttaaaaagtcatcaatgtgattgacctataatctgtttcctctgtgaccaagtgtcatttttattttgacagttaggagccttttgactctttcacagctggcatgaagtgattcctgagcacctactatgtgctgcccactgtgagagctgttagggttgaaatagggagcacagcagggtaggggctgcaatcaggagcttagtggggagaccattctgtaacatgtttccagagcttggggtggggaagctcagggag

SEQ ID NO: 474108 - DNA, 1363 bp, Homo sapiens
gatattgggagtaatgtcgtcctccccaaacctggatgttagcaacgagatcacagagggggtgtacacaccctgcgacattggaagtaatatgatcctctccccacctggactccccacctggatactgggaaagatatcacagcgcgggtatacgtttcctaccctgttgggagtaatatcattcttttcctttctggatattaggaagaatatcacaggggtgctgcacgattacttcgatattgggagtaatatcatcctctattttcctggatattgggcacaaaaacacaaaagggtgtacaaccccttcgatattgggagtaatagcatactctccttccaggatccagaactgcagccggtcctcgctttgctgtccctgtccctgtccatgtatctggtcacagtgctgaggaacctgctcagcatcccggctgtcagctctgactcccacctccacacccccacgtacttcttcctctccatcctgtgctgggctgacatcggtttcacctcggccacggttcccaagatgattgtggacatgcagtggtatagcagagtcatctctcatgcgggctgcctgacacagatgtctttcttggtcctttttgcatgtatagaaggcatgctcctgactgtaatggcctatgactgctttgtaggcatctatcgccctctgcactacccagtcatcgtgaatcctcatctctgtgtcttctttgttttggtgtcctttttccttagcctgttggattcccagctgcacagttggattgtgttacaattcaccatcatcaagaatgtggaaatctctaattttgtctgtgacccctctcaacttctcaaacttgcctcttatgacagcgtcatcaatagcatattcatatatttcgatagtacaatgtttggttttcttcctatttcagggatcctttcatcttactataaaattgtcccctccattctaaggatgtcatcgtcagatgggaagtataaaactttctccacctatggctctcacctagcatttgtttgctgattttatggaacaggcattgacatgtacctggcttcagctatgtcaccaacccccaggaatggtgtggtggtgtcagtgatgtaagctgtggtcacccccatgctgaaccttttcatctacagcctgagaaacagggacatacaaagtgccctgcggaggctgcgcagcagaacagtcgaatctcatgatctgttccatcctttttctggtgtggaaataccttcccacctatatgttcaaatgatttttcacatgagtgctaagaaagctcattggtggaaaagcagccttttcaagaaatggtgttggagaaac

SEQ ID NO: 474109 - DNA, 566 bp, Homo sapiens
gttctcaaggctggcaagaagacagggctgtagatgaaaaggttcagcatgggggtgaccacagcttacatcactgacaccaccacaccattcctggggctgggaatccaacaggctaaggaaaaaggacaccaaaacaaagaagacacagagatgaggattcacgatgactgggtagtgcagagggcgatagatgcctacaaagcagtcataggccattacagtcaggagcatgccttctatacatgcaaaaaggaccaagaaagacttctgtgtcaggcagcccgcatgagagatgactctgctataccactgcatgtccacaatcatcttgggaaccgtggccgaggtgaaaccgatgtcagcccagcacaggatggagaggaagaagtacgtgggggtgtggaggtgggagtcagagctgacagccgggatgctgagcaggttcctcagcactgtgaccagatacatggacagggacagggacagcaaagcgaggaccggctgcagttctggatcctctgagagtcccaggaggaggaattctcagacacctgtgagattcc

SEQ ID NO: 474110 - DNA, 2056 bp, Homo sapiens
agcggtgctgaacattcactagtaactgccctggtcacccccttatccaaaaagactattgacgccatcggagccatgagggtttcagcaaagcaagctttctgcttgtctcggacttgtactgtaggaggacataaagtcattcatcagttttggtacatgcctgactgtcccttgacctttttgggaaggaacttgctcagcaagctgagagccactatgtctttgacaaagcatggctctttgctgctaaagttacctggaacgggagtcattatgacccttacagttgatgaccttctgctgggacaccccacggcagtcgggtgtgccacgggaacggatgccccacaccggcacctggaggactgtgggtataaggtgtccaagaagaaagctcagatctgccaacagcaggaagctttggaatgtggatcccaacaacagcaactctttcatgagttaaaggaaaaacttctggcagccccagccctgggtctacccgatctgacaaagccttttccattgtatgcgtcagagagagaaaagatggccttggcagcaactgccctgctagtacaagaagcaaataagctgacttttgggcaaaacctgaacataaaggcctcccgtgctgtggtgactttaatgaatactaaaggacatcattggctaacggatgccagactcatcaagtaccaaactttgctctgtgagaatccccgtataaccattgaagtttgtaacaccctacaccctgccaccttgctcccggtatcagagagcactgtcgagcctgattgtgtagaagtgttggattcagttgactttagcagacctgacctctgggaccagccttgggcatcaggagactgggaactatatgtgtatgggagcaggttcttcaacccccaaggagagagagaggtgcaggaggctcaaaaagcagcatctgcccccttccgggcatcagtgctccctcaagcacctgatcttggacctacttcttctaaagaagaaaaggactttctccaggtagacttcagagagatgccaaagtgtggaggtaacaagtatgtactagttcttgggcgtacctactctgggtgggtggaggcctatccaacacgaactgagaaaactcgtgaagtaacccctgtccttcttcgagatctgattcgtagatttcgaccgcccttatggatcggctcagacaacgggcctgcatttttggctgccttggtacagaagacggcaaagatatcagaaacaatatcacaggggtgtgtcaacaacccctgcgatatttggagtaatatcatcgtctcccctcatgaatattaagaacaatatcataggggtggggggtgtacagcccctttcatatttgatatcatcctcttccaccctggatatgaggaacaatatcaggaagggatgtacagaccctgcgatatttgctgtcatataattgtctctcccgtagatattaggaaaaaagtcactggggatgtgaacagccctgcgatattgagagtagtatcatcctctccccccttgtatattgggaacaacatcacaggtggggtgtactgcctctgcgatattgggagtaaaattttcctctcttcccctggacattaggaagagtatcagaggggggagggtgtacattccctgccatattcaacgtaaccttatcctctccctcccagggtattcagaacaatattacaggaggggtgtacaccctctgcgatattgacagtcatatcatcctctttcgctctggatattaggaacaatatcacagggttgtgtacaccccctgcgatattgggagtgatatcatcctctctccctgggtatattaggaagagtatcacagggctgtgtaaaccccctgcggtactgggagtaataccattctctctccctctggatatgaggaagattttcacagggaagtgtacaccccctgcgatattgggagtaatatcatcctctccacccaggaaatgactaacaaggtcacgggggagtgtactccccctgc

SEQ ID NO: 474111 - DNA, 1469 bp, Homo sapiens
ttattttgattttactattgcagcaactcaggctatgagaagctgtaaatacccaggtccccagttgacaccaggatccaggtggaacacccaggctccaggtgaacatcaggccccaggtagatgctggactccagtagacatcaggccccaagtaaacacccatgattcaggggaacaaaaggccccaggtgaacaccagactctgggtggatatcagaccccaggtggaaaccaggccctaggtggacacctaagttccgggcccaaggtggataccctgtcaccaggggccatcaggctcaaggcaaatgccaggactctggtggacaataggccccaggtgaacatcaggcttcagacacaaggccccatgttcatacctagtctgcagatgtatgtcagaccccaggtggacaccaggcccaaggtgtataccagtcctgaggtggacataaggtcccagccctcaatggatctgagcaagcatgacaagtctcagcgtcatgacagcagcagccctgctgaggacagggctcccatccctactgccagtgctgcctggcctgagcctccctgtgcttcctccacagggcagcccatccagtatgctcgctccacctgcgaggccggcgtgggtgagctccacatccaggatgccctgccggaggaccatggcacctacacctgcctggctgagaatgccttggggcaggtgtcctgtagcgcccgggtcaccgtccgtggtaagcctgatcccaccatcaccctgagcctacgcccccggctcctgtgcatgactgggtcctctggtgctagcactgagtgcagcgtgactggtctcccatcagacaagcaggaggatacatctctccattccctggggctcaggcctgtcaggaacatctccctgtccaggtccagccctctcttgcccttagtgtggcaccaggccatggtggggagcatggatgtggagccagcggcctgggtcttcctcttgtgtgaaatggagatgctgacagtcacggtactgtgaggattaagtgaatgaatgtgcaaagtatccccagagcataggatagcacataccctccataggtatgtgctgtgattatgattgtccagcagagcccacctttaaacaagatacaatccttacaaatgccaagactgaggaggggttttcccaaaggatccactttgctacagtattgtgtgtttgtttggccatcagaaaatcagaggagggagatgtccagccagacacaagcgatgaacacacgcgcctgcttccaagggctctggccacaaagtggcgccatggagcaacgcgtgtccctccagttgtcttctctcaggggtggttgaggggcagctctgctgcaagcaagcttattctgagagctcagcagatactgtgccaaaggccagatgcaggggctctttctcacctctcgccttttgcc

SEQ ID NO: 474112 - DNA, 782 bp, Homo sapiens
gtcaccaacatcaaagatcaaaggtagataaatccacaaagatggggagaaatcagtgcaaaaaggctgaaaataccaaaaaccagaatgcctcttctcctccaaaggatcacaacttctcaccagcaagggaacaaaactggatggagaatgagtttgacaaactgacagaagtaggcttcagaaggtgggtaataacaaattcctctgagctaaaggaccatgttctaacccaatgcaaggaagctaagaaccttgaaaaaaggttagacgaattgctaactagaataaccagtttagagaagaacataagcgacctgatggagctgaaaaacacagcacaagaacttcctgaagcatacacaagtgtcaatagccgaatcaatcaagtggaagaaaggatatcagagattgaagatcaacttaatgaaataaagttacccacaaagggaagcccatcagaccaacagtggatctctctgcaggaaccctacaagccagaagagagtgggggccaatgttcaacattcttaaagaattttcaacctagaatttcatatccagccaaactaagcttcataaatgtagaagaaataaaattctttacagacaagcaaatgctgagagattttgtcaccaccaggcctgccctacaagagctcctgaagggagcactaaacatggtaaggaacaacaggtaccagtcactgtaaaaacataccaaattgtaaagaccatcgacactatgaagaaactgcattaactaataatggacaaaataa

SEQ ID NO: 474113 - DNA, 549 bp, Homo sapiens
ctcggatgatcctgataactatacagatgtcctgcaaggattggggcagtcctttgatctaacatggagagataccatgttgcttcttgtgaaaaagaatcagctttagcagctgtccagcaatttggggatctgtggtaccttagcgaggtaaatgatggaatgaccctggaaggaaagggaaaaattctccacaggcaacaggcagtccccactgtagaccctcactgggattctgactcagatcatggaaactggagccacaggcatttgctaacttgcattttagaagggttgaggaagactaggaaaaagcctatgaattactcaatactatccacaattacacagggaaaagaggaaaacccctccacttttctagaaaggctaaggaaggccctaagaaagcacacatccctaactccagattccgtagaaggccaacttattttaaaggataaatttatcacctaatcagcagctgacattaggagaaaactccaaaagtctgcgttaggcccagaacaaaatttggacacattattaaag

SEQ ID NO: 474114 - DNA, 1324 bp, Homo sapiens
gagggcagtggtgacagtgtgagttatggctttgccggctgccagtggagccatccgctctgcacagccgtgcaagggtgttttgaaaagtggctcagccggccaggagtgactgggtgagcgcagcgcaggccagggcccggcgtgtccgcggtgagcgcgggcggccagcagagggcgccagagagccaggagcggcccgcggaggagtccgcgcccgccctgatgcccagctccgcgccgcgcggacccaccgagcccgcgttcagacgccccagctccgccgacaggccgctcgcgccgggtccttcctcttccccaggtgcaggcagagcccccagagccatggccagcccttccggcagctccgaagccactggcaagccccgaggcagggatggcgggcccaggagggaggaggacgacgtccctcccgaagagaagaggctgcggctgttgctggagaggggaagcgcgcagcccgaggactgcgaggacggggaggacgcgccgcggccaggcaggaagaagaccggcacccagacaggtggcgacggcagaggagtaagtgacgttggcgcgggggtccgggggtgccaggggcgcggggtaggggcggcgggaggctccgtggccggccctgggttaaagttggtaattgagcggcaactccggcgggcgcggagtgacagctctctggcggcccctcgaaaagagggaatctggattttcaaacttaaaatttggcccaaagcccactgctgcccgcaatggccgccagacacattcctcttcccttttagtttctatgggaatactctctttgaagaacccatgaagcagtgtcaggctggtgtgaggaccagcagtgatttctttgaggaggagagcccgtttcttcactcacaggccatgtctgagtggatcaagaagaacagagtgcccttttatgagattttgtctgcgtagaccattagcttggtaaaaatgtcaaaaccatcctcgttctttaatagcagattattttggacttttctctgcaagaagcagcataggcattcagatgcttttaaggataaaatgttctttctcatcaccaggcctggtgctctggatggctgaggttttactgtgacttggtgtcccttggagtggctcccaggctgtgctcttgtggttgggtggcaaggggttgctttattcggtggtggctagaggacgttttagcagataaatcgggaccccaggagcccctgagtgccaagtcctgctgcagggcatgtgtttatgttggggatgtgggggggtggagggtgggggacat

SEQ ID NO: 474115 - DNA, 1957 bp, Homo sapiens
tctgctaagtagtgggtgttgttccttgacaccttttgctaccgctggaccacagtccgcctggtaacgggcgtcttcccagacgctggcttcaccgctagaccaaggagcccttctgctggccctgtccgggcataacagaaggctcgcactcttgtcttctggtcacacctcactatgtcccctcagctcctatctctatatggcctgtgccttgggaaagcattggagggttttgagcaggccagtgcaggatctaagccttccagctcctgtgtggaggagaggctgagaggctggaagcggggagaccagttaagaagctatggcaaaagcagatgggaaatcatggcagcctctaccagcatcttagcagtgggaaggaggaaagtggctgggttccggatgtattttggagacaccagtagcactgccacacacattgatgaccatcaaaaatatctccagacattgccagatgtccctgggtgtggaggggagtggtacacaaaatcacctcaagaaaaccggcccatcatgaagagcctgaccttgccagccctctccctgcccatgaagctggtgagccttgaggaagctcaagcccgcagcctggccactaaccatcctgctcgcaaggaaaggagggagaacagcctgcctgagattgtccctcccatgggcaccctcttccacactgtccttgagttaccagacaacaagtcggatttctcatccaacccttttcagtccgtgaaagtcttcaccagccctctctttgcctgtggatgtcccagcagtgtggctgtagtgcaggagcccaacaggacctaggtgcatatggtctttagtgtttactcctgtataaaaactggccatgtgtggtgggtggcccagtactgtcatcccagcacttgggaggctgaagcgagaggatggtttgagtccaagtgttcaaggccagcctgggcaagatagtgagacccccatctctataaatgaataaaatgaatgaatggtgtctttgaaattccagaacaaaagtgcttatcagaattcccagaattgtgtgtttgcttgtgaccactgagattcctaccgattcttgcatctgtttgcccccacctctgcctttaatagcacacctttacctcttgccctgggaaatacagtttgctgtgactcatgaaagccttgcttggtcacctggggcatctctagacaaggtgagaatcaagcttaccttggattttagaggggaatttcttgaaatatcagagccattcataactgaggacataactggaatatttggtctcaatttaaaagtccccttgaaatgacaagttaacaaactaaccccttatgccttggttcttttaggcgaaagctctccagtaaatcaaagaagtggaaatcaatatttaacctgggacgttctggatcagactccaaatcaaaactgagtagaaatgggagtgtatttgtgagaggacagaggctctcgggtaagaatcaacagcaattgttttatgatacaaatatttgtttcctaactctgcttattaagtctttggtttgatcatatcaaacacactagctctgaaagagaaacttataaattaactaggggaagaggagtcttttttcaaaacattttagacttaccaaaaaaattgcaaaaatagtacacagagaacctgtatacccttcatgcagcttctcccaatgttaacatcttatataagttatcaaagccaaaaattaatattgatacaatactcctaatgaatttgcagatcttattcacatttggccagctgtcccactactgttctttttctggtctaggatccaatccaggatctcacgctacatttggttgtcatgtttccttaacctctgccaatctaggacaattcctccatctttttgaccgtgataacttggaagagta

SEQ ID NO: 474116 - DNA, 701 bp, Homo sapiens
ggaaaagattgagaaatcggatgaatcacccattcccttggggaaaatgtcctcaagatgtgacagaatctgccagtcccagaatagacccatctgttatcttgggtcccccggacaagattttcatggaagacatccttctcatctgtgtcaatgcagctccagtagcccaaaggcggttctcagagaaagattgttggtgtcagcctttaaagctgaagcacaaaaaaggtgggagacaggtgcatagaacaagtaagaagtgtccaagggcatctgggtggagtaactaccatgttgatggcaactcatcatgtatcatacactgtgcagacttcttagttaatttatactacaatctatcatggtcttacctgtttattccaattcacaatggtgctttttctgatgaggttgtctatgagcactgaatatgaggcctgaaataaatgaatgagtaattaagcaagatcagagtcaagttcaaggaccaacgacaagagcaatggtggtataggaagctaactaaacactggcatatagagtcaaaattatacaatttactatatagagttaccttgaggatactgttgtagattacatgactcatattcagagactcctttgtggggaggtatacattcccactgtgctgaacacaggagggttagggaagatctgtcaataaaggtgacactaga

SEQ ID NO: 474117 - DNA, 642 bp, Homo sapiens
ttctctctggaaaggtgatacttaggattacacctaaaggaagagtggggctcgctatgtctggcaaagaacagaaaaatgagcatggacaaagacattgaggatgatggcattgggaatgggagaaggagatgcatgagaggatggatcttggaggctgagccaacaggacttggtaatgggatgtgggcagaaggtggatgcgttgtctggatggagctcaggagtctgagttttcactgggcaaagagtgatgctgatgcagattcaacaacacccaatgttgaacttatttgcagaatgtcaccgtcagggtctgatcttaaatgtgttgtgacgaatggtcaaatgggaggagggtgtgaaggcattttctgggctgctgagttatgcactgtgaaggagctgcaggctccatatcagaagacccaaggcaggggacctagttttcctcctagcagtgttgtcaaggaggattgtgaggttagagagagctggcctggaagccaggagactccagatttagagacttggaaataaaattgcatatatatttaatgactggcattctctgatttattgattactcaaaatgggaatggtaacattttttactcctatcagataggaatgttataaagg

SEQ ID NO: 474118 - DNA, 509 bp, Homo sapiens
cagagttaaaaccaggtaccatgagggctcatctgattttctgttcttatgaagagggtgcaaaccccaagcctcggtggcctccaaaaggtgttgggcctgtgggtgcacaaaagacaagagttgaggcttggaagccatcgcctagatttcagaggatgtatggaaatgcctggacgtccaggcagaagtctgctgcagaggcagagccctcatggagaacctctactaggacagtgcagagaagaaatgtgaggttggagaccccacacagagaccccactggggcactgcctagtggagctgtgagaagagagccaccatcctatagaccccagaatagtagatccagcgttgaagccacaggcactcaatgccagctaatgaaagcaaccaagggggctatacctttcagagccacggaggtagagctgcccaagtccttgggagcccaccccttgcattagtgtgccctggatataagacatgaagtcaaaggagattatttc

SEQ ID NO: 474119 - DNA, 563 bp, Homo sapiens
agtactcccattagaatttcttatagaaccaggtctggtattgatgaagtccttcagcttttgtttgtcggggaaagtctttatttttccttcatgtttgaaagacatttttgccagatatactattctaggatttcagaggatgtatggaaatgcctggaagtccaggaagcagtttgctgcaggaatggggccctcttggagaacctttgctagggcaatgcagaagggaaatgtggggtcagagcctccacacagagtccctactggggcactgccaagtggagctgtgagaagagggccaccatcctccagaccccagaatgctagatccaccaacactttgcactgtgcacctggaaaagccacagacattcaatgccagcccgtgaaagcagctgggaaggaagctataccctggaaagccacaagggcagagctgtccaagaccatgggaacccaccttttgcatcagtgtgacccagatccagtggaactgtaagtccattaaaccccttttcctgtataaattacctagttttggggtatgtctttatcagcac

SEQ ID NO: 474120 - DNA, 530 bp, Homo sapiens
aggaaaaccagagacctttgttcacatgtttatctgctgaccttccctccactatttggggcaccatgggagcaagactggcctcaccaactctgtgggagctggatgaggactttcactatgagctaatccccactccccttgcaaactctactgcacagcagaagcagccatactctcctctagaacataaccccattggcctgagatccacccctcctatcccccagcaggccatggcaggccttgcccagggagaatctgaactcaggcccgcccaaccctgccccgacctgatgaatacttcccctagacaacttaggccaagctcaaatgtcactgctactaccacagctggtgctctcttgcaagtgtcccctcctggctggaagccagccaactcaggccattacagcaactcttggcagaataacgcttcttccaggaaggagaaaacaacagctaataccactcactgcaacaccctggctaactaaaggtcctgagtctgtccacatgacaacttcacc

SEQ ID NO: 474121 - DNA, 828 bp, Homo sapiens
gagctctgagaagtcagcaatgcttgggtatttcaaaaacaggatgccctttttaatactcagagacagaacacccataaactgtttcacctgtcagcacacctgtaataaaatctttcccaagaaaactggctttccaaatccaaaactgctcactatctccttggccatgggctcatcattctccctgaggctgactctgatggattcatgtgcttgccctggatattggcctggaaccagccaagatttctatcagtttgcactcttggaagcatcaaaccctggtgcttctgaacttgagagatggcaagggagtgactataccatttcaaaatccagaatctgtgtggtaaacactctgtggaatggccagatatgctttggctgggctgacagagagccaaccagtgtaaacatgcagagattaaaataaagcaataaaatgaaggcatgtgcatagtgatgacaggacaaccaagttttattaaaattattctgatattattcttggtaaacatacttttgaaaaagctaattaaatttatatgaagaaaaaagaatattagatcaatttattttcaaattgtactttgactattgataattgttttttaatttctgcagataggtgcatttctcttctcataaaaagaaaacaagaattccataaagctgtgtttcctaggtgaaatggtggggcaataccactgtacagtgtttaaagtttgaccatgaaggttgaggattcctcttggtgtgtttagagtttaaaatatttggatttcaaaattagaagataattatatagaagcaaggaatgctgca

SEQ ID NO: 474122 - DNA, 683 bp, Homo sapiens
gatatattgttaccgctgaaaatgaactttatgaaccttttccaagttgatctatccagtgacgtggcctgggacccagattatggggactctggctcaacaaggtggccgccatcatctaggcaggaagtcacgtcctttctgctcattgatgagaattgtcatgtggccccacccatcacaagggagccaaggagttcacatttcccggtggccaaagggagaggaaaactggcatcagtgagcaacattaatgataaccacgactttcagcactgccatacctgtgtgatctgtggccacccagaagaattacaggacttggtttggctccattctgcggggattcttgttcttggtattttctctggttcttaccccaagtacaagtttcctacttgcctccagctctcagacattttcaagacgctcacccctatcaagatcacataaccctcagcccaatcgatccagccagtgcaccatcccctccaagcctaggcatcctccaagcctgtgctgacactggatgctttctgccacaccccgggatgggacaaggcccaaggttattttgaggagggtggggatttcctgtggtcgtctgaggacaggtggcatggctgttcactcaggacaattaaaggcctttctcctcgtctcacccttagtattttcctggc

SEQ ID NO: 474123 - DNA, 572 bp, Homo sapiens
tcgtgttcgaattcctgcctgcttctcagctggataaaatgtattatgcaggcactaggtctttccaccctaggaagtgttcataggagtttgaaatgctacatcttctttggagaaatgcctgtccaggatgttgcaggaggaactgacatcagtgaaaagatgggcgcatcaaaagacatttcagagcccatgagaggcctcgttggtgctgttaagaaggagaaaccaaatgatgcacttgctaccgagatgttgagtcatgcccagatccagggcaaacatcacttctctaatctctctgatgacagcccaggccccactggacctgaaattgttagggtgatgatggggcagaaaaaagttcaaggaaccaagatggtggggaaagacagcatggatgagagagtggtgttggagcagaagggtgaaacagatttaggagctttagggtgcttgagaatagagaacaagaaactttaatgagttgttatggcctaagttggactcccttaaatttttgaaagaaacatgaattaagattaaaattcttgtctgcactatgcttcttt

SEQ ID NO: 474124 - DNA, 464 bp, Homo sapiens
cgcaatttagaattcagcatgatgaagggagtcatcgggtgtgtgattggtcgggagaaacaggccagttcaccaccactatcagctcccaatagtggagaaagagggatggatgccagccagcaagcaaacagcagtcgtgcatcacacccagtcacctcttactacatttgcaaatgtatctttcattcctggtaccctcctccagacactcttgcactcccaacttccttctattttcaatgcaaagtatcattttggtggctattgctatttaagaaaaaaaaaagcaagaaaaagggaagctttatgctccttagtgcttgtgagagggaaacattttacctatgttttataatggggccaagcaaatttggtcaagatggaacccttaatgtaatggcctcttgctgtgtcagcatcagtttgaagaagagggaacctgcctgtgcctgcacctaaca

SEQ ID NO: 474125 - DNA, 672 bp, Homo sapiens
tccaggtctgatcaattcaaagtatttccttggacattgtttagcacaatggtgtttagcacaatacaggatgttcagacactgtctgggctcctggtagagaatgtagatgatgatgatgatgctggctttgcaaagatcgtcgttagtcctttggctcatcaatgccaggcctatcctgcagaaagtaacaggagtagagggctgtcccctggactggggcctaagagaaggtatagggaactcagggagaggctcctcctcagagaagtcttttctgcagattcatccagttcagcaagcatgagccctggggccccaccaattcaaggaggagctaaattggcagatgtaccagcatggccacagagggatagagcaccaagcagactcttggagtccctgattccagaacttaactcttggatggcatatctggatctgctctgggccaaaggggagcccactgctctaaagggtgagtcccagcccaggcagcatttaccacagctgacttaagagcccttgggccttaagagaacattgttggtaatctggcagttctctttgtggcttgtagttatggggaggctcctccaactttgaaaggggagagaagagtgggaaggactacatctcatggtttgagtgccagctcagctgcagtacaat

SEQ ID NO: 474126 - DNA, 604 bp, Homo sapiens
caggtaattacattgggaagaaagtcaattttgcgggtgacaaatacagaatgtgaggtcccgctccagccagtggaaaccagacacagcagtagggtgaatgtgtcaggttataaatgaccctgtttcctttgttcagtgtacttttgtggcaaaactgctagcaagtgtaccctttctgcaggaacagtttgggcactcacagcatttggggtgtctcctaggtcctgcaggagcagtccacttccctcagagggtctgtgggtcctctcgggattccagaaacaaattatcccccaaacatagcagcttaaaactacaaacacaatctcacacagcttctgggaatggcttagctgggtggttctgcctcggggtctccaagaggtctcagtcaaactgtcagctggggctgctgtctttgaagactacatggggttggagggtccattatacatggacctggctgttggcagttggcttcatttcttcagcatatagccttttctataggctaatgatgtggcttacctccagggtaagtgatgcaagacacacacagtgagaatgacctagatagaagatgcaatatctcttataacct

SEQ ID NO: 474127 - DNA, 1319 bp, Homo sapiens
tccccagggtctgcctcatagcggggtgacctctgagcctgatgctccctaggaccaggcccagggcctgcaatccgctcctggaggcactcctgctgggcagggctgtgagccaggcaagggagagccctaggccacccctgagcactgggaccacaggaagaacttgtggtgacgtcactcttgcctcagatgccagcatgggcccagcaaggaacctgaacccctaccccagactgcgaggaggcatggccagagccgcctgcacgtccatggagcaggtgggagactcgccttcccaggcacaggacctgggtatccgcactgtgcaccctcgggagccagatctcagagtggggttggagccgaagctgggcattgtcacagctcagcagggtgagctgaacacttatcggaacaccctggctgcggaaaggaggtactccctgcaggtctcctctgagctgttctatcactcgataaagctcctcttcatcttgctcatcctccacttgtccacatacttcattcttcctggccacaggacaagaactcaggacccgccaaatgccgtggaagctgcttgcatgcatgcctggtccagctgcagccttgcagagagcccgcacccatgccagcacttggagctgcctaccccactgcagcagctggtccagctcattcaagaggaggagataacacgagcacatgaataccaggtggcaatctttgaggagaccgtcttagaagtctgctgaccatagtcagaaaggagagaatacaaagctgggaatccaacccatcagcaagacttggcaactttccctccaaagtataactcaagcttgcctatttttctccatatccattcccacgtccatgctgccatcatcttccatggctttactacagtagattctggagtgattttccagcctccctttatgccccgctcccatccatcctctatggcaacagtgatctttcaaacataaatcagatcttgccagaccccacagtgaaccctcagtggcactctctttctcttcaacgaaaatgaagctccttgctgtggcctgtgaggccttatgtgatctggcccctgctccctcctccaagctcacttcccatcgctcactttcccattccaaccacaggcctcctctctgctctttccctcctcagggcctttgcagttgctgtcacctctcctggacaggccttctaggaattttaatgactcgttccttcttcttcaaatttcagttcacgaagttcctcaaccgcttaaagtactgtcctgttaacgccaccacatc

SEQ ID NO: 474128 - DNA, 910 bp, Homo sapiens
aggacagctccttgttgggctttccctggagttcctgcctgtctggtcccagaggagaaggtgctgtgctgtcatgaagagtgcatcgtatgtgtcccctctggactatggctcgcatcatgccttactcatccttttctccctagtgccagagccccggtgtctcagagctgccaagctccttggagcaatgctcctcaaacatcagcgaatcccctgggggtcttggtccaatgcagatgctggctcagtagatgctgaccagggcatcatctcctggcaggaggccagctgtgctgaaagtggctccatccctacaagctacttcagctgcaagatgggaaactctaataccatcttttggaccccagtccctacctctcctgctgcctttcaccctgtgccacccaaacttgaggatttctgggctccccagactgctgctagggacttctggaaagtctcacaaagctatgactgtatcttccgcaagcatagattgtgaggcctcggcagggccttgctgttgctcacttctttgtgatccacgtctggctgtgaagcatctttaaaaacttctagatctgcttaccatcaatctttagacaactgtgtggtccacattccttaccttggttcctcatcacaccattcattcctttacctcttacaagatgccagctttctccctgaaaaagtatccactatgccgacagtcctttcttggcttttttgtgtggtcttaccacttaagcatgaatccctaaacgctatacttacttttgtctgtgtttgaacttcatattgtgaaaaaatagagtggctattctttgatgtctgacttcttttgccttacattatgttttctttgttgttgtttcatctaagttgatattgcagctatagtttt

SEQ ID NO: 474129 - DNA, 736 bp, Homo sapiens
atcccacaacaattaatggatccaattaagcaccagagaggaggagtaaatcttcagcttataggcacctcatttagccccagcaccagcgaggatttggaggataattgctcaggaaaagagaagattgaggaagctattttgaagatatcaggcccggggcgttggggcccagtgctagcttttggagtttcctctgaatatctggggctgccggagttaggaaatggtcctttagggtcagttgtctttctggtgtgtctgggtctagatgagaagcctgtgtctgtacccgttcagccaactgccagaatggaatggacttctttcccttcaaatatgaccttgaaggtctggatgcatattggcaagggcatggaagtgattcaagaaatggaggaaaacgtgtatgtagacagtgtcagaattcaattggaggacacccagttggtatctgctgcagaagtgattgcttgctttgtggtggaaaggaatcctcaggaaatgcagaagtcttctgtgttgattgttgtgttctatgaaccatgtttaaatgccctgattggtaacatccgcgtctgttgtatgctactacgagccagtcattccaaaattctggaggcctagatttacaactggtgtttaaagtgtgtggggaaaaccccacacacatctggtcaccaaattattctcctgtgttgatgattgctgttgtgtaagagtagaggaaaaatac

SEQ ID NO: 474130 - DNA, 745 bp, Homo sapiens
caaagatcttgtaacaataagactatgtttagctttgttctaaaaaatgtatccattctaatacgtgcatggggtacctcattgacattttaattttcattggttttctgtgccatgagcaacgggacctagacgaaactcctggtatttcagtaacagattttggttccctaaccagcaacgtgttgccacagttgctcattgctcagctgccatgggccaggagtctcaaaagccctcctaagcagctgcccactcagttttggttggagataagtttcagtctgtctctggccccactacagctggtctcaactgtgttcctgattgcctatgaagaactgtctttgaaatttgacatctgcatcccgataggaatttttgtttgcaggttgattaagcccaaccagtggagagaggaaggaccccggctgtttcaatttggacactcttggggctttgttattgctgcagtggagttatctgaatgttaattcaaactatggacttgaaaatgttatttatgaaacaaggtagaaaggaaccagtaaataggggagagagatatgaagaaagttatgaatgtgacaacgtatttttgaatttgtaaactatttgtgaatattcctgattcatggcaatgtgtttatttgcataagttcaataagaagctgttttctcttataatgggacacagttggaggaattggttattttctaagggctttgactgaaatggccttgc

SEQ ID NO: 474131 - DNA, 933 bp, Homo sapiens
tctgccagcagcggatataattatggtcagtgccctaaagagctactgggagcagtgccttaaagtagtactgggaatgggaagttttctgaatcagggtaacatggggcagaattggtctgttgaagaaaaacattatgtgcagttgcttaaagttttgttgaaacaaactggtgctcaggctgaatctaaaaatctgaaagaatctgttgtcccacccacagctccaattgaaaataaaaaacaggagagggaggataaaaattggcctataccgccccctccagttgcagaaacatctgtaccgcctccttcggtggcagaaacagagaccccaatacaaagaattttacgttctgctgccatggctggagagcccttaggacctcgtgcttttcctatttccattcctcataccttggctgcagaaatgctaacctttactctagcttttgagaatgcaaacgcagattatgaacgcgcactggcaccggtgaggtgtacaaagaacttgggaaattttctcagagcttgtcaggatgtaagaactgaacttcattgctcttcaatgctagctgaagtaatagctaatttagtagttgacaaatctaaaaggagccaaggagaagtaaagcgagctcttgtcaaatggaatctcaaaattgctccagagaaagtgcaaacaacttccccataccaatacttaggaagtattgttaatggagaggagtgtacggcttcagaaagtagttctctgtaaagacaggttacagactttaaatgattttcaacaattaggagatattaactggctacgaccgatgttaagtattgctgctacctatcaacttacacatctttaccaaaccctgcaaggagactgttctttaaattcgctgcagcaattaactaaagaggcagaagccgaattac

SEQ ID NO: 474132 - DNA, 589 bp, Homo sapiens
gagagtaggtcttctgaaaccaccccgttcctttttccactgtcataattagctctccatcctcaatggtcaatactgtggcccacacccactttccaaagaggaaaccagggctgagaggaggtgaagtggttgcccaaagtcatgaactgggaaaagtggagctggactttgaattcaaggttaaggaaaggggccccattgttggcaaacaccctccactgccctttctttcatcacaagctctgctgaagcccctcattggagtgtgtggattcaaatgctctctgacttctggccacagctcacgcttaagatgtccccagggtagaaaggaggaagattgtcctggtgtttttttctgcagaggagggacctggagcactgaagtctgtgattcacctgtttcaggtgactccttgggctgctggggctgcctcgtgcagcctaggagaatggagactccttcactcactaaaattctctgaccctcttcctgcccccgccatcagcaaatgaccctgtcacctattttaccaagaaaatagaaggtgtcaggataaaacactcttagcttcttgccagaaat

SEQ ID NO: 474133 - DNA, 497 bp, Homo sapiens
ggtatcgccaagacccaagtgatgttagtggggcctagctggaaaataaacatacacactaatctgctcctcacactacacttcaacagagggactattcgaaggagaaaggaagaagaagaagaagaagaagaagaagaagaagaagaagaagaagaagaagaagaagaagaagaagaagaagaagaagaagaagaagaagaagaagaagaagaagaagaagaagaagaagaggaagaagaggaagaggaggaggaggaggaggaggaggaggaggaggaggaggaggaggaggaggaggagaaaagaaagaaagaaagaagaagaagaagaggagaagaagaagaaaagaaagaaagaaagaaagaaagaaagaagaagaagaagaagaagaagaagaagaagaagaaaaagataattaaataggacttaaaatctactaaaatatatttaaatgtttagatacacagtaaaaatctcatttgccatagcaagaa

SEQ ID NO: 474134 - DNA, 1520 bp, Homo sapiens
gagagattggtcagaccaggagggctctggggcatgtcaggggctgctacaggctcctggcagatttcggcgacttactccagacttgtggaacattcaggattcttagcatggccacaggagagtcaggctgtccacaagcactctctctttcttcacccactcattcctgtcactctaccatttccactgccttcccaaatgcccatcgagaaattacaaggaaaagtgtacgtgacaggaatggaggaatttctgtggaaacggtgtgtgagaaaatgtaggaagaaagaaacttcaggaaatgattcctattttgaacttcggattgcccctggcgatgtggagactgtattggaagaaggcaagaatggaggagagcccctaggtggaggtttggcaatgctctctccagaatatagcagaggcctcttccaagaaaagcacaacttctgcccccaagccctgggctctcctgagaggacaggaccagcctctgaagttgaaggtcctggttctgcccccaagccctgggctctcctgagaggacaggaccagcctctgaagttgaaggtcctggtttaccagatagggaaggggccctttccaagaccctttccagaaggtgtggctgagatgggaaccgtggactctgtgcagatagtaaatgaaatttgcaggaaattcagaaccttccacctgtacagtggatactgtgagactctgcccagatgccctcttcaagccaatgcatctctccatgctcccactcccatagatgggaacagaggtgctggaactcagatctactcccctttctgggaactggagctgcctgcccaggcaatgcccccttcccagggatggctgagccaatgactggctaatgttggattgcagaggcctagcgccctcccctcaattcctaattccttgtaggaataactgaggcctcctctgtgaccacgtgggcagcttctccctctgcctggtcctgtcttgttctctcctttccaattgtgtctcctggaagccctccccacaagtctgctgcatacaactctccttctcagagagcctgagccctggattcccaggaatccagcctaaaatagtctggcatttggtttcaattttctctttcactaagactcagtcacaggtgctaataaataataaaatgtcaccaccttgaattctatcactctctcttttcttgccccatctctgacaagtaggtggtccctcaagaacctgaaaagcagacattaggaggaaaggaggagtgggggcaagaggcccacacctcacctggccggctcccatccatgcgcccttgactgaggtaacacctaccctgggaatccttcccctgcctctcgtgagccaggccgggtgctcttgggacagctcccactgctcctgtgtgctcccccagcttggcacatgactccctgaattatagtcagttccgtacctgaatctccctctagaatgccagtgccacgaggacagaggac

SEQ ID NO: 474135 - DNA, 1088 bp, Homo sapiens
cccgtcttctgcattgctcacgctgggagctccactactgccagggttgagtcaggagccattggcagcaaccccacacccccaggaaaggagtggccaagcatcttcacatgccccaaggacaaattccacaatccacaatttctgcagctgcaggctgctgtgaggctgaagtgcctaccctaactgctatgacaaccacagctggcacccacccccatgtgccacctgcaggcctggggactggcccacttagccagtcacaccttaacatggaccaagaacacttgggtcccagagggttgtcccaccattgctactgccataacccacacttcctgctgcccaggggccccaagaacctacctaaccacccaaactactgctgccactcctggcacccaagcaaggcacctggaggtccaagaatcaacccatctggacttaccaacactagcactgctgctgccaacaatggggctaaaggactggccatggcattccagtccccagcaaaacttcatcacaacctccactaagaaccacaccctaagccaaagaggaaatctctggctaaagctttctcaattcagtttattttttcaaaaaaccaacttttcatttcattgattttaaaaattgttctctgtatctcaatttcctttatttctgctcaatctttattattcattttcttctactaattttgggtttggttagctcttgctcttctagttctttaagatgcattgttaggttgtttatttgaagtattctacttttttgatctaggttcatatcactataaacttccctctcagcagtgctttctctgtatcctgtaggatttggtatgttgtgtttccactatcatttgttttacaaaatttttaaattccctttttaatttctttattgacccactggtcattgaggagcatattgttaatttttatgtgttagtatagtttccaaaattcctcccatttttgatttctagttttattccattgtggtcagagaagatgcttgatattatttcaatttttttgaatgttttaaaacttattttgtggcctaacatatgg

SEQ ID NO: 474136 - DNA, 615 bp, Homo sapiens
tccttcatgtttaaaggatgttttcatcagtcagcacgtgatgaatcctggcaagactgggtccttttcttcatggcagcaacatttcttgggcccagagtgtgtccagaagcattgtccaggtgctagggccaagaataggagacttacaactctgcctagtgccctagcctactgtggcttagctggtaaccaagatacaagacaaagttttatttactcttccctctcctcatatggaaggaaaaagtctttcggtgcccttttgatttcaagtgagagatgtgtggcttttccttccactggagcacttggaggacacagcaggtttattatttggtttaatttcaatatttttgtgtctcagggaataagaaggacaggtggagagatagggaaaggacgagttggaggagcagtcagaacacacacaacatttatcggttaagtttgccatcttatatgggcaagatttatgacaccccccaaaatttacaatcataacatcaaagaccactgatcacagattagtgtaacagatataataataaggaaaaagtttgaaatactgtgtgaattgccaaaatgtgacataaaaacatgaagcgagcacac

SEQ ID NO: 474137 - DNA, 576 bp, Homo sapiens
gaccaccccagccaaactctgcattgttccaccagtcgatggcctgccgaaatctgtcagtgcctgtgggtgtgctcttacgcgggtgtgttcctctcaatttccagccgcttgtgtcctcaaccattggtgtgttcctcttgatgtccagctgcttgtgtgtgacaaagaaaccagtggtctcaacaatcccagtggcttttgggtgctctcagaacaatgtagagaagcttgtatgggctcaggggtcattcaaacctctgctcagtagcctggattatcttggtggaaagatgagtgttctcacgggtgaacaggggagaagaatgaatgcatggattcctgttttggctcatacttcagattctgaccgtgtggaagaaaggactaacagaaggtcaagtagagctcttacctggaactcgctgttccatgaagacgtcagcagttgccagtgctccccgggtgcaggcctaccctcaatacggcccagacaggttctcttttagcctgaacacgttgtattttaaggcaaatcccagacatcatatgatttcatccataagtacttaatgc

SEQ ID NO: 474138 - DNA, 781 bp, Homo sapiens
tgaggtagcttctcatgcagatatggctgcagccacctgtctccactcctgcctccaccatgtccatcagggtgacccagaagttctacaaggtgttcacctctggcccccgggccttcagcagcaactcctacacaagtgggcctggtgtccacatcagtttctcaagcttctcccgagtgggcagcagcagcttctgggatggcctgggcagaggctgtgatggggccagcagcaagggaggcatcacagctgtcacagtcaaccagagcctgctgagcccccttaacctgcaggtggaccccaacatccaggccatgtgcacccaggagaaggagcagatcaagaccctcaacaacaagtttgcctccttcattgacaaggtatggttgctggagcagcagaacaagatgctggagacgaagtggagccttctgcagcagcagaagatgactctgagtaacatgcacagcatgttacagagctacatcaacaaccttcagcggcagctggagactctgggtcaggagaacctgaagctgggggcagagcttggcagcatgcaggggctagtggagggcttcaagaacaaatataaggataagatcaataagcgtacagagatggagaatgaatttgtcctcatcaagaaggttgtagatgacgcttacatgaacaaggcagagctggagtctcacctggaagggctgactgatgagatcaacttcctcaggcagctgtatgaagaggagatccgggagctgtcctagatcttggacac

SEQ ID NO: 474139 - DNA, 535 bp, Homo sapiens
gcacaccgtggaatactactcagacataaaaggagcaaaatcatgtcttttgcagcaatttggatggagttagtgaccaatattctaagtgaagataaaggtttaaatgaaaatatgttcaaagttttactgctggcaatggcagaggcacagagaagagaaaacagacctaaagagaatgggcttactatgagacaagcttggaaagggaggagaggaaatgggaaagatcaggaagtgtttgcacagcaggcagatcaggatgggcccctcgccaacttctctcatccattccaaacacatcttcctacacacatgcactctagtttcccctacagagaaccatattgcatggctaaaccaataacaggtcagcttctggtagcatccaattctagtaaagaacatgggatttttgagtcaagaaattcaacttcccctggctagctatgtgaccttagtcactttttttagtctttttgtgcttcaattctctcattaataaattgaaattatttagaaaaatatgtttttt

SEQ ID NO: 474140 - DNA, 548 bp, Homo sapiens
ggacgcactacctactgcatatggttgtgtttataatcaataggaaaagacaaagaagggtattacggaatggtaatgagttcagttcaaccagaagatctaactatgctaaatatacatgtgcccaacacaggagcaccccgattcataaagcacgttcttagtgaccttcaaagagacttagactcccacacaataatagtggaagacttcaacaccaccacactgacaatattagacagatcattgaggaagaaaattaacaaagatattcagaacctgaactcaacattggatcaaatgtacctgatagacatctacagaactctctacccgaaaacaacacaatatacattcttctcagcaccatatgacacacacacccagaaacaatactttgtgtcctttaatccgatcaaattgacatttaacattaaccatcacagcagtgttaaagcagaaatgtatataactaaacccccacatcaaaaaattagaaagatctcaaattaacaatctaacttcacaactaaaagaactagagaaac

SEQ ID NO: 474141 - DNA, 1552 bp, Homo sapiens
aggagcccaggtctcctgagtggtatgaaaatgctggcctcaagtgatcctcctgctgtggcctgccaaaacactgagtctttcgctggccgtctaactgctgggtctagatctttcgctggccgtctaattgctgggtctagatctttcgctggccgtctaattgctgggtctagatctttcgctggccgtctaattgctgggtctagatctttcgctggccgtctaattgctgggtctagatctttcgctggccgtctaattgctgggtctagatctttcgctggccgtctaattgctgggtctagatctttcgctggccgtctaattgctgggtctagatctttcgctggccgtctaattgctgggtctagatctttcgctggccgtctaattgctgggtctagatctttcgctggccgtctaattgctgggtctagatctttcgctggccgtctaattgctgggtctagatctttcactggccgtctaattgctgggtctctggagttgattgaggagcggactataaaactggggcctctcatgctgtcagaagtattaatggcaaattgtctttctagttttcagtgtgagagttgataattgaccaagaaaatcgtgattgctacggaaactcgtagtctatggaaagacacaggtatgcaaaccacaaagtacaaaacagggtaacagttttctaatagagagccgcacataaattgttctcctctgttggtgcctttgagacataaattatttaaaataaattatggagatttattttaataagactaaatgagaacatcattgcaacaaagcaggagcttcttccataactgtctgcatcagcatcattagagttctggagaagccatccttgggtttaggggaacacttgcaggtttttttatataagtaaattatgtgccatgtggatttggtgtgtgaattatttcatcatccagctcatctttattattccgtttctgtcctgcattaccttttaaattacactgtcttttactattgttttagtggtaaccttagaaattaaaatatgcatttctattaatactgtctactttaaatttgtacattgtcacttcctaatcataataagattactacatttttactctttgtattgactttatgcattttgtgtttctgttttcaaatattttacccatatgtatgctcaaaatctcacatatcataatttttaatatcattactctattgttttaaacaggtactgaatatatcaattcttctgtggcttcgtcattttctcttacttgtgcttttatttctggttttaatgtttattgtgaaaatactgttgtaacatttttagttgattattaaacttatttacataaaaaaaaatatttcaagaaacaattgtttaagtaaataatcttgaatataatttaaagctgaattctgatttccaggatgtctttgccaatgtaatatcaggaaagaaaatatttatatctagaaaaataaaatggaatatgcatgaagctgtcaataatgtcttcat

SEQ ID NO: 474142 - DNA, 847 bp, Homo sapiens
ttaattcgtctcaaagtgtggcgttttctctaactcgctcagctgctctcctccagccagagcaaagggccagtgtgacagccttttgtatctgcactcgtggctcccaagctcttgcccagaatccagctaaaatgaggttgcacgaacgaattgaaggatggtaaatgaggaggattttattgctgacgaaagtcactctcagagggaaggggaaagggatggggcaggctttggggaacatgggctttggctcccagtggcagcagttgagagagccagttctcatggtgtgtgcaggtatgtggtggccctgctgctgggaagcttggggtcactgccagtaacacctgttttggtccctggcagcagcagcagcagctgctatggctatgggtggggagagcctgtgcttaaggtttgtgcaagtctgctactggcggggaggggtcaccgacagcggcacatgttttggcccccactggtggctgcaactgtggccgcagccaggatgaaagtcctggatccctactggccttctttgccaccacctcattggaaggattgggatgtagtatcttgtagccactttgtggtcacttttgatttatcttcctcctcataatgggaagcattttcatatttcttttcatggttggtaatttttcttggattctaacaatagtcaaatatatattttagatgctggatgttttcatatttttataaatgttaatgggtttttgttctaagtcattcaaatttattttgaaaaagtttgatctttcagggtctttttacgtgatcttttttgttatgtggtcttttttgttatgtggcattagag

SEQ ID NO: 474143 - DNA, 1054 bp, Homo sapiens
atcctttctgctgtcagtaacctcgtctatgccatggatacaggcaagacctccattcaggctcctctcctcctcctagcctggttatgtctcattatctttacagaagtgcctgcaaactctggcccgttcaaacattcacttctcattcatgtgatggtcgtttggagggaaggacccgagttcatcatactcatgaagcttgatatttctctgttctgctccctagcttcagtggggctccccagatcatgtgaaaattcatctaaagctttgatcagttcctgttcctgttacccactgtgggttgctgttctaaatgttcaccactcttctgaaattcctgtcactaccactttactctcagcagatgatcttgcctgcaactgtgtggagagtattgaggttctcagacagaaactctttagtttacctcatcaccctggtaaggtctattggtttcagaaaaacatctttgaaatacttttagaccacggaagcaaacaaaaagatgaccaaagtcaaggagctgctaaatctcaaattgcaataatactgttatcagtaacggtttatgacttcaaaaactgaaaatcatgtttgattaacaaaggcaactcctcttcatagttaaatttcaaaaggttgtcaggcaactgttgggcttggtaattgaggctggaaggatggtttgttgatggactcttgcagaaataagtagttctatactttgttggtgacaaaatgcaggagggttttagaaaatcttgtttacacttctaagataaaagcataagagaactatatcctctatatcactttttgggccctttatctgggagtttttctaagctaatagagtcagctcaaattttgcacaagcaaaaaaatttacctgctaattctggtctttgagttctttgctgataggcaagcacttccctgcatggatttgtttttcagatgacagctttttgccatctgattcctagttcttttaagattgtgcatcccaaatggtttgcaacggcagacttccatttaactgcctggg

SEQ ID NO: 474144 - DNA, 631 bp, Homo sapiens
aactctaagggggtgtgcgtgagagggtcgtgatcgattgagcaagcggggggcaaagagccagaaaatggtaagaagatgggggccagtaaaaattcaagggatggagagccaacaaatatttttaagaatgcttcagcttaattgttactattatttgcattgctatgaaataatcattcttctcccttatacaaattttcaaaatattttagcaacttttcgagactacacctgttttgtggaaactaaagagtgctatgtttgtgtgtgggttagtgcagtatgtcacagaggaatcatgagcccagatggcaaaggaggctatgagaaacaggcctgcgggaatttgcagaaattttggcgagcgctgagtgaacactcgaggtaccagcactcgaggacccacttgtgtccatggatctctcagagcggctccggatggtgggaggaaaccagaggcaagtcctgtgttttactataaagtcaggtgcaggaatactaaccaattcctttatatttcccaatattacccagttcattcgttggtacacagtaggttccagaaaaatgttaaggggaaaaattgattgctatgagaatttcacatgaattatgtttcttccaaggc

SEQ ID NO: 474145 - DNA, 948 bp, Homo sapiens
actcctcccacatctccttgcttcctcctggagacaccttctcagatgtctccctgagagtacctaccctgcccactttgggactgtcagctgacagctaggactgccacctggctgggaatggagaacactcaccagtgctcctccagggcacctcttcagggtagagtctgtagagcacactctgggcttaacccccaggcaagcttgccccccagaggggaccaccctctgctgaagtggatgaccctcagggctgggttgggggaccatccactgctctgctatcactctagaatctctctctggcaggatcccttcctgccctgtgggagagggacccagtgggcaatcctccacccaggaaatgtgggagaaaaagggcattgctgccacctgtggccccagccctgccactgttaccccacacggggaccctaccaccttcaatgtcctagggttttctcctaccatctgtgttggttcctgaaatccagacacttcttttttgtacctgtggcatttctggttttgggcatgaaaacagcagcccatgctggtccagaacctgcctccgtttctgaggctccactcttatgcataagcatgaccctgccctccaggcccttctcagagaacacagcctccaacagccagttggagctgcccaacctccacccagggccccccagaacaagagacatttatgaaaacaagctggaatttccccagggcttctgacatctttgaatgaaaccagtctccagaaagctgatcttgtccccagctcccactccctatcctccattggcctccaaagaattgctctgggaagctgctgcccaccccagcagtgaatgatacctctgaaatcttacacctgagaaatttcttttagagtcaagtaccaaaatctttaccctcctaaaaaacagatatatattgtgt

SEQ ID NO: 474146 - DNA, 584 bp, Homo sapiens
ttttaaacaaccagatttcatgagaactcactttcatgagaactgcaacaaagaccctggggatctggtaatggcagtggcagtggcagaacaatcttcttggttttgggctatgcacactggtgttggcaatagcttctgtgggcttgatgggcctatctccaggcccgctgatgttgcgtgcattgattggcatctgagggtgtccgcagtaatcaggcggaggcgactagactacagggaggttgacacaaacttgccctaccttaactgtgtagctgtatctatgagctggttacttgctagtggagtcgaaaaggctaaacatatcgctgcgtggacgtgcatttctgcgaaagggcgtgtaaaccactttagtgtacaccactttctgccgcgttcgcgacgggaggttcctgaacacattactattaaaattaaagatataccacattttaaaactttgcaacaagagtggaagagtgggcaaaaatactgataaatatgtactaataaatatgaggatttcaacgtgactcttaggccagtgaaataaagaaaataaataacacgatacctaagat

SEQ ID NO: 474147 - DNA, 904 bp, Homo sapiens
aactgcatctcctctgctgcaaggacaaagcttctgtgggccagaagcccccaaccagatgatccaacaacaggactgagggtgcccggggcaagtgccagctcatgtcgtcaccctcactgagccctggggatcctgcagaccacacggcccaacttatgtggacagtcttgcctcaaggttttagggatagctcacatctgtttggtcaggcactggctcaagatctaggccacttctcaagttcaggcactctggtccttcagtatgtggatgatttacatttggctaccagttcagaagcctcatgccagcaggctacactagatctctttaactttctagctaatcaaggggccctcaacaaggaacaaatacagcctatactgggttatccttaccctaagacattaaaacagttgcaggggttccttggaatcactggcttttgccgactatggatccctggatacagcgagaaggccaggccactctatactctaatcaaggagacccagatggcagatacttatctagtagaatgggaaccagaggcagaaacagtcttcaaaaccttaaagcaggccctagtacaagctccagccttaagccttcccacaagacagaacttatctttatatgtcacagagagagaaagtcgatttgtggagaatgggacacaaagggcaggttatgccatagttagtgatgtaacagtactggaaaatagtgttgcccccacttttcctggacctcttcagccatggccaccccttttcaattcggcaaaagacccccgacacttcgcgcgtgcccccctgacctcaatcagggggcccccgctccagaccaaggctattaattatttgggttgacgtgccttgcccccccaaacttgcgcggt

SEQ ID NO: 474148 - DNA, 740 bp, Homo sapiens
ggtgaacaaatttattatttgttcttgataactcataagaaatatagaggaaatagaaacatgaaaccattaaaatccaaacttggaaaactctgcaagtcaaatagcctgtgttcttcaacaaattacattcatgcatcaaagaatgatattccagtcatgtacagcattgacctaacagaacagaaaatcattttggaaatacccagccgcctacagccaaacaccaagggaacccaactgccccatggtttcagtgagaaagagcagagagctgacattccaccccatccattccccagcaaaataggtggcggcactcagacaagtggtattggtaaaaagaacaaggagctaaccttccacccccacctgggaggagcaggttctattccagaccatggcaataaagcagggagactaattggtgcagctgtggcagaacacagtctttcttctgggaaagccgccttgcatgaaatagaacatgctaaaggacttgcaggtgttatgaattgagtaaattgagcacttattgtgtgtcagatattgctctaagtgggaaggatatataagggagtaaaacagatatagctgcatatgtaaagcttaccttcttatagaaagaaaaatatgacacaggttaaatatataaagtagattaaatatatgaaatagattatatagcagaagatgataaaagctttggagaaaaataaagcagacaagtttcatagtgc

SEQ ID NO: 474149 - DNA, 1645 bp, Homo sapiens
ctttctctctctctctctctctctctctctctctctctctctctctctctctctctctctctctctctctctctctctctctctttctctctttctctctttctttctttttttgagacggagttttgctctttcgtccaggctggagtgaaggaaaatgaacagaggcaggaggtctcctctggcgatatccaccgagccgccacatctggagcagcatggtcaactctagttggggagttggtgatctcatccataatagacttccggatgaatatcttcgaggcaaggatagacagcgagccctgattgcagcagttcggcatcacctgaagaaagttaattaccaaaagtttgacactttgctggcagccttcaggcactatgacaaggccagtaatgggggagagctttttggtaatgcatgggcttacagatcccagcagtttggtgtagatcaggggtcagcaaactatagcctgtgggccaaatccagcccactgtttgtttgtgtcaataaagacgagctgcaggaagcttgtgaccaggccaacttgagtttagatgacaagctcctggaccagctatttgactactgtgatgtggataatgatggcttcattaactatctggaattcgcaaattttcttaactggaaagacaaaatgcttcttaaagagtatgaagagagggtcattattaaaggtagaaaaccagattgtgtaaaccctactgaggctaatgttgaagaacctgaacaaactctcctcataaagccagaagatattgtcttaaaagaagcaggaagcacagaaaagactctccggacacttctgagaccaagtgataaagtttccaactactataagacaacttcttctgagatcaatgcaattgtaggagccattccttctacttgttaccccatttgtggtgttccaaccattcgatctgacattcctgctccccgaattcgtcgcatcagtgacagaactaattatggtgaagaaggtagtgcatattcactactatatcctaccatttttgcccggaaaggagtgtttgaaagagacttcttcaagaccagatcaaaagaagagattgcagagatattgtgtaacattggtgtcaaactgtctgatgaagaatttgaaaatgtatggaatcttgcatcaaaaaagcatcacagaggagaagtttgtgttgagaacatcagaaatgttctagatgagctacggcatgcagaccggatcaagtgtaaaacactcatgtgatatttttggacttcattcattcaagcaaaagaattattaactctgtgtttatctaaaatgttgaatccattctggttttagatattatgttagagttcacagtggtaagactcatatgcctgtatgtgttgctaataaattagattttggattttaaaatttattgttttccataaagcacctaagagcttgacaagtgattgaagagttaacattcagcctcagcaaagacagttcagaatgatattagaagtttttttcagccaaggtgtttggaagacctggggagaggtgtgtttcctttaagcagctgcgtcttgagctgcttctcactgggaagaccataggtccatcctggctcttaaactcat

SEQ ID NO: 474150 - DNA, 535 bp, Homo sapiens
gccattctaactggtgtgagatggtatacaatcatatcattggcaaacagcagcagtttgacttcctctttactggtaatgatgatgttgatgatgataatgataatgatgatgatgattattattattattattatttaagacaggacctcactctgtccctcaggccagagtacaggggtgaccaacatcaaaaaccaaaggtagataaatccacaaagatgaggaaaaaccagcgcaaaaaggctgaaaattccaaaaaccagaatgcctcttctcttccaaaggataacatctcctcaccagcaagggaacaaaactggatggagagtgactttgacaaattgacagcactaggcttcagaggtggaataaccagtttagagaagaacataaatgacctgatggagctgcagaacacagcatgagaacttcgtgaagcatacacaaatatcaatagctgaatccatcaagcagaagaaaggatatcagagattgaagatcaacttaatgaaataaagcaagaagacaatat

SEQ ID NO: 474151 - DNA, 670 bp, Homo sapiens
tagtttctgtaggaatggcatatgctgcagctgtacctgctactcagcagactgaacccttgtgccccaactgccacagagtgcatgcacacctgtggacctactggccaaggcttctgctacaaccctgtgtgtgcccatgagcccggcaaacccaacccctgcatgtccctggaactgatgtctccggacacagatccagacctggagccactgtgcactttgcccagctggcactctcacagctacccatgggaagaagtctttccctacctaggccagtccttgaagtttggaagggcctctggtaaccgctattctactctccacctccaggtgagtgagcacggcccctggaccagcatcatcagcatcatctgggagcttgttagaaatgtagaatatgaggccttgctccagaacttttaaatcagaatctgtatgctaaccatatctgcaagtgtttctatgtacatttgagctttggaagcactgcagtagaaaatcagacatctaatgaagcctggttatctagttccttataggactacctcagatttactgctccataaataaaatacctccattgaccctagtctccttgatattttaaaaacatcataaagccctgtggtccatcatataagtaactccttttaatttaacctgg

SEQ ID NO: 474152 - DNA, 1016 bp, Homo sapiens
gtaggggaggctctggctgcgcagaagcccgcggcgggagggaggctcgggcacggcgggctgcaggacccgagccctgccccgcggggaggcagctaagtcccggcgagaatttgagcgcagcgccggcgctccggcactgctggggaagccggcgcaccctccacagggccggccagccggccgctccgagtgcgggccgccaagcccacgcccacccggaactcgcgctggcccgcgagcacccgcgcgcagcccgggttccctcccgcgcctctccgtctacacctccccgcaagtagagggagccggctctggcttccgccagcccagtgaggggctcccacagtgcagcggcgggctgaaggcctcctcaagcgtgggcggagtgggcaccgaggccgaggaggcactgagagcaagggctgccagcacgctgtcatctctcactttcatgggtctccatattttaaaaagctaaagaaaggacttcaattatgtctccaggagaaatcaagagaagagtccaagttttaagtctggatcaatacaatattggaaaaagtctccctcatgtgactagactgtggcagaacaatcagggcttcaagacaggtaagacagaagccagtctgcttgggagtctccttgcaaagttgcaaaccaactttgcaatccagaagggttggatgcacaaagcaagcccttccctctcgtgggtaaaactgggagcttgggagtctccttctcattatatggcactgcactgggggcatggtctctggcagtttcagtgtcccaatctctctactgacttcagtgagtctggtttcatattcttctgggatgcaggagcctctcaattagtttctgatgtattacaaaggaaatatgcctatgagttgtgtctgaatcagtatgtgaggggaagaagtgtccagggctttccatttcaccatcttgctgacatcatttctccccaaaactttctttgcttttaggatatgtagtgtttc

SEQ ID NO: 474153 - DNA, 805 bp, Homo sapiens
gtaacattaggacttccagtactatgttgaatcacggtgatgacaatgggcatccttttcattttccagatcttagaaaaggtagatccactgacagcttgcactgtgcacctggaaaagccgtaggcactcaaagccagcctgtgaaaaaagccatggggcctgtaccttgcagagtcacaggagtggacttgcccaaggccttgggagcctaccctttgaatcagcatgccttggttgttgaagctataaaagttgtggctttcaatgtgtggacaaattcctttcaggagggattagtagaactggcatcctggggtgagctggggggaaaagcttgggaagtgccaatctgcatttcagctgccagcaggctgtttgcacctttgactctccaatgtgatgaagcccctagatgtacttgcatgcccacataaaattgctacagagacttacgtatgcctaatcccctctgctcccattggtgaattaacagccaaacttgcttttgattactttttatctcaatgggattatgtttccctctttctcctcacaccaacccctataacttggacagcaagtgtacttcattccaaacatggatactgtcttaattcatcaaccatgtggtcaattaattagcctaaattcttgagcacctgttaagtcttgctgagttggcaggtccttctccttccttactttcattttatgctttgtctttttgacgagtcatctggttccagtgatgaatcatgtggttttgctgcttgttaagagtgtttttaagtggaaatgtgaa

SEQ ID NO: 474154 - DNA, 656 bp, Homo sapiens
tggctttgactaaaatgctgatagcgatatggacaatgaagtccaggctaagttggtctcagatggagatgaggaacttgttaggaactggaataagggttatttttactatgctttaccaaagagactggcagcattttgcccctgccctgtagaactgtggaatgttgaacttcaaagagatgatttaagagtccccagtggggcactgcctagtggagctttgagaagagggccactatctttcagaccccagaatggtagatacgataacagcttgcactgtgcacctggaaaagccacagacactcaatgccaactcatgaaagcaactgggagggaggctgtactctgcaaagccacaggggtgaagctgcccaagcccgtggaagcccacctcttacatcagtgtgacctggaaattgccccagcaactctaaccttcagcagctactcaccttgatcagtcagcagacatcaacatggaagcaaaaccctccttagtaataaagtatttttaattaagacatacattgttttttagacatgatgctattttacacttaatagactatagtgtaatataaatataacttttatgtgcaccaggaaacccaaaaacttgtgtgacttgttttattgcaaaactcatttta

SEQ ID NO: 474155 - DNA, 657 bp, Homo sapiens
cggtaccatgtttcctgtacaacctgcagaaccaaacgcataatgtcatgtatctaccaatacagtttaatacaaaatgattttgcgtccggaattggttctttccggtgggttcttggactggctgacttcaagaatgaagtcacagaccctcatattcagatgtgtccagtgtttcttccttctggtgcgttcgtggtctcgctgactttaagagtgaagctgcagaccttccggtcagtgttacagctcatgaaggcagcaccgcagttgttcgttcctccaggtgggttcatggcctcgctggcttcaggagtgaagctgcagaccttcccggtgagtgttacagctcataaacgtggtgcagacccaaagagtgagcagcaacaagattcattgctaagagtgaaaaaacaaagcttctacagtgcagaaggggacccgacagatatcctcagagcaacaaatcactaggccttttaaataaaaaacagtctaagattctgtgtgttttatgtatgaatatcaaatatttatattacttgcatctgtcttatgccttttttggagaagtacatttcctttttctttttctatttccattgtcttttgtatttttagtataattagaaaaagcaaatgtcttctttctaccct

SEQ ID NO: 474156 - DNA, 2210 bp, Homo sapiens
tcgaacggaacggaatgtaatggtatggaatggaatgcactcgaatggaatggagttgaaatgaatggaatcgaatggaacggaattgaatggaatcgaaaagaagagaatggaatggagcgtaatggaaagaatggaatggattgtaatggaaagatatcaaatggaatggaatggaataaaatggactcgaatagaatggattggaatggaatggactcgaaaggaatggactcgaatggattggactggaatggaatggactcaaaaggaatggactcgaatggaatggagtggaacaaaatggaatggaacggattggaatcgaaaagaacagaatgtaatggaatggaatggaatgcactcgaatggaatggagtcgaaagcaatggaattgaatggaatggaatcgaatggaatggaattgaatggaatcgaaaagaagagaatggaatacaaattgaatggaaacgaatgaaatggaatggaatggaaaggaagaatggaatggaatcggatggaacacaatggaatggaatggattcgaattcaatagaattgaatggattggcaatgaatggagtggaatggaatggaatggactctaatcgattgtatttgaatggaagagaatcgaatggcatggcatcgaatggaatggaatggaatggactcaaattgcaatggaatggaacggaatggaatggacccgaatggaatggaacagaatggaatggagaggaatggaatggaatggaatggaaaggaattgaccagaatggaatggaacagaatggaatggaatggaaaggaatggaatgcaatggaatggaatggaacagaatggaatggaatggaaaggaatggaatggaatggaatggaatggaatggaatggaatggattgaaatggaatggaatagaatggaatggaatgtattggaatggaatggaatggagtcgaatggaacggaatgcactcgaatggaaggcaatgcaatggaatgcactcaacaggaatagaatggaatggaatggaatggaagggactcgaatgaaatggaatggaatggactcgaatggaatggaatggactcaaatggaatggaatggaatggaatggaatgaactgaagtggattggaatagaatggacacgattggaattgaatggaaaggaatggaatcgaatggaatggaatgcaatggaatggaatggacacgaatggaatggaatggaatggactaaagaaaggaagagaatggaatggattcagaatggaatggaatggaatggatttagaatggaatgtaatggaatggagtggagtggagtggattggagtggaatggagtggaatggaatcgagtggagtggagtggaatggaatggaatgaaatataatggagtgaaatggagtggagtcgaatggaatggaatggagtggagtggaaaggatttgagtggagtggaatggaatggagcagaaagtaatggaatggagtggaatgtaatggaatgtaatggaatggaaacaaatggaatcaaatggaatctaattgaattcgaaacaactcgaatcaaattgaatcgaatgcaatggaatggagtcgaatggaatcgaatggaatgcaatggaaaggatttagaaagaatggaatggaatggaatggaatggaatggatttagaaaaatggaatggaatggaatggaatggaatggatttagaaaaacggaatggaatggaatggaatggagtggagtggagtggaatgtaatggaatggaatcgaatggaatcaaatcgaattgaatggaatcgagtcgaatggaatcgaatggaatcgaatgaaaaaatggattcgaatggaatcgaatcaaatggaatcaaatggcatcaatggaatcgaatggaatgcggtgaagaggaatggagtgcagtggaatggagtggaatggaatggggtggaatggaattcaatggagtggagtggagtggaatggaatcaaaccgaacggaatgggaaggaatggaattgactggagtggagtggagtggagtcgaatggaatgcaatggaatggaatggaatgcattggaatagaatggaatggaatggaatggaatggaatggaatggaatggaatggaatggaatggggaaatgaaatatgaactgagattgtgcacctcagtgcagcctgggtgataga

SEQ ID NO: 474157 - DNA, 680 bp, Homo sapiens
cttattcatgcaacgaactaccatctggagattaggatggtggagtggattagtcgctttagacctactcatcgctgctgggagggtccagaagatatacccttgaccaatgccttgcaaaataggtttgcgagagcagcacctgcatctttgaagatccctgtaattgctcttttctttatgtcagatctaacagtgggaaccacagtccctcaactacaaaatttaaatacaatgagaataattggatcccaaggtggcagggggcaggtggcagcactaaactgtcaaaggcaaggagacttacagccttttaccagggtaactgtgcattgggaaaagggaaatgatcagacattttggagactactggacactggctctgagctgacattgattccagggtacccaaaatgtcactgtggtctgccagtaaaagtcagcctgcagacagcctattgtgggaccttgtgattgtgtgggttaatacttgataaactcccctttatatatacctattccattagttctgtcctctagagaacactgactaatacacctcactttacagatgaccaaactgaggcaatgaagaggtataaactcaaggccaaggagttagtaagttttggagccagcgcacaatcctatagagcccctatttcttcctagagggtact

SEQ ID NO: 474158 - DNA, 624 bp, Homo sapiens
ttaagaaactgtggttatatgatttttttttaatagcatggactcgtggctacgactatgcttttgcccttcattcacctgaaaggggaaattgaggtcctggtctgctgggccgctggccctgatctgagcctagcagtggaattggagaaaacaccacagttcctatttgaaattatacagttggatgatgtttctcttggcttcaactataaaagctggtgcccagagccaatttttggcaaaactgagaagtatgaaggttttttccttcgaacattcccagcatccttctttagcactttttatcttgatcctcctccaacttccccaagacttgtttcttcctttacctcatccacatgtgaacagcaaaggctcagaaacatattgtctctatctacactgaagagccttcagatggaactcattttggaaagcagaaagaatccagcccacaaacctgatctaggaccaaagccacagtcctcagtgacacagattggtcctcatcccagccggactgactcaattatgctgtcacagggagagaaaagcctgtgagccaatacaaaaagtttattttcatgatgattctggctttagtgcccttttaacaggatg

SEQ ID NO: 474159 - DNA, 645 bp, Homo sapiens
ttttttttttttttttttttttttttttttttttttttttttaatagcatggactcgtggctacgactatgcttttgcccttcattcacctgaaaggggaaattgaggtcctggtctgctgggccgctggccctgatctgagcctagcagtggaattggagaaaacaccacagttcctatttgaaattatacagttggatgatgtttctcttggcttcaactataaaagctggtgcccagagccaatttttggcaaaactgagaagtatgaaggttttttccttcgaacattcccagcatccttctttagcactttttatcttgatcctcctccaacttccccaagacttgtttcttcctttacctcatccacatgtgaacagcaaaggctcagaaacatattgtctctatctatggaactcattttggaaagcagaaagaatccagcccacaaacctgatctaggaccaaagccacagtcctcagtgacacagattggtcctcatcccagccggactgactcaattatgctgtcacagggagagaaaagcctgtgagccaatacaaaaagtttattttcatgatgattctggctttagtgcccttttaacaggatgtaatgcataaaagaaggaggtcaacctt

SEQ ID NO: 474160 - DNA, 592 bp, Homo sapiens
ttatcatagtatctgggacaaagacagagaaaatatgactcccagaaggactggcttcatgggcatgtgacctgggctgagcaatgcccccacttactgtcgctggcttgaaattcttagggggcctgcattttcattttgtactgagccctgaaaattatgatgatggtggtgaccacaacgacaaaaatgattactattttaaaaaaggagtcaggcactatgcagacttgagattgggagatactaatattgttctttccatttctcttgccctcaggtctccagacctaccagtcatgccccatgcaggattctgtgaactgtctccagatcacttccatttaaatccttcaatggctaccaatgccctgtgtgattttgaacttgaccctctgcaattccccgtcctcatctcagaagtaggtcaagagcaggcttggagccattccattggagcagcttctctgagaaacaccaaatgtaacctggcatcaaattgttagtagagaaatatctcctctcagagattactgcatgtttttggaaagcttaagacacttggggatggaaagatcatagcatactaatc

SEQ ID NO: 474161 - DNA, 768 bp, Homo sapiens
ggacagcagtcaccggatcccagaccgccctgttcctccgagcctttgagaaggatcgctttccaggcatcgctgccagggaagacctggccagatagacgggcctcccagagtccaggattcagatctgatttcagaatcgaagggccaggaacccgggacaggctggcagggcgcctgcacaggcaggcggccggtgcaacgcggcttccggcgggtgtcaccctgctccctcgtggatcgccttcgcccataccggtgcatggggaacggggcttcccgaaccccacgtgtcctgtgctcctggagctatcccacagggggctttgctcctccagaagaggcgctctcccagcctcaggctcctcgggggcctccacacccgggcaaaatccgggaggaccgggacacgcagcacgaccgccttctgggtccttgcatggtgggacagcctgggcccactcaagtggggccacagggccaaggtgtgcttgcgccacccacatcccaggggagtccgtggtggggctggggacggggtccccaggtagccggggtggcgtgggaaccgcaagctggggcagctccacctcgccagccggtgccaccagaggcctgtgcgaggcaggggcagatgaaaggcatcccggcgccctcccaggagctccagaagccggggcgctcgtctgcactcccctccggcctgctgctggatgatctcctagtgagcccagagtttctgtagcaggcacaacctttcctagaaac

SEQ ID NO: 474162 - DNA, 713 bp, Homo sapiens
gttaatttccatgtaggagaccagagcgagaccccagagagatggtgcctccccagcgtgatggcctgaagatggattcccgtgagcggcaacatggggactctgcagtgtggccggtttggaaactggcaaggagagcgaaggcaccatttgggtcttccacccttccctgcatgtttccgggtgcccgcagagctctgggagcaaacagtgacgggcccttgtcttagatctgtctatgagggcatagtgacatatctctgcactgatcactcatgtgatgtaacggtttttaagctgcgcctaaaggggaattgtgacagatatctccactgctcacccaggggctttgtgacatatctctgctctgatcaacctagggaggaaacacttgactgcactctgcatagaggagactttacgacttatcactgcgttgattacaaggtgatgtaacacttgtctaggctctgtctacacgttaattttcatatatctctacactgatcacctaagtgatgtaacccttgtctaggttcagccttttggggatttctgacatacctatgcacagatcaccgaggtgatgtaaatcatttccaggctttttgtactggcgacattgtgatatatctctgcactgatcaccgaaatgatgcaagtctcccctaggctcctcagggtgggggcattgtgacatacttctgaagtga

SEQ ID NO: 474163 - DNA, 879 bp, Homo sapiens
ccaggacccacagcgtgacagcctgctgggcccttgcacggtgggacagcctgggcctgctcaagcggggtcacagggccaaggtgtgcctaagccacccgcgtcccaggggagtccgttgtggggctggggctggggtccccaggtcgccatggcggcatgggaaccccaagccggggcagctcaacctcgccagcctgctctcccagagacctccatgcggcaggtgcagatgaaaggcatcccggcgccctcccaggcgctccaggtttcggggcgctcatctgcactccccttcggcctgctgctggatgagctcctttcgacaccagagtttttgcagcaggcacaacctttcctagaaacggaggccccgggggagctggaggccttggaagagggcgcctcgctggaagcacccctcaacgaggaagaataccgggctctgctggaggagatttcagatgcggggtttggccaggatcgggtcgtggcagagcggtggcctctatttcggggggaacacctggctggctatggaggggcgtgtcttccccccgccccctccaccgggctgaccggcctaggattcctgccctatagttctaggcccggtgagaagctccacacaatggagaactgccattctttcctgggcatcctggggatggcagagccggcccaggcctgcgctcattgtgcaccccagctgatgtgcaagggagccagctggcctctctctgcccttgtccgtccgtgaaattctggctgaggctctcccaacaccttccaacgctctatagtcaaagcctggagaatagttacatctcctggatgttcagttcagaaatatgtcacaatgccccctccctgcagagc

SEQ ID NO: 474164 - DNA, 726 bp, Homo sapiens
gctggcctgcctgtgcccctgcagcctcccagctgccaccatggagcgcctcatggtggaacgcagacatctagctctctttgccggcctcctggctcgacctgcactcattgcacaccccgggcagaacctagacaagagtcccatcacctgggtgatcagtgcagagttatgtcaaaatgccgccttttggcagagcctagacaatggttacatcacctgggtgatcagtgcagggatccatatccttgacaaaagtgacaactcctgggtgaccagtgaggagatatgtcccaatgtctccagtagtcagagcctagacaagagttacatcacctggatgatcaggcagcgatatgtcacaatgccccctgtaagcatatcccagacaagagttgcatcacctcggtggtcagtgcagagatatgtctcaatgtcccctgtcggcgaagcctataccagagttacgtcatctcggtgatcagtgcaatgatatcttaaaatgcccctgtaggcagagcctagacatgggttacactacctgggtgatcagtgcagagatatctcacaataccccatgtaagcagagcctagaaaagagttacatcacctgggtgatcagtgcaaagatatgtcataaatcccactgtaggcaaagcctagacaagtttttcataaaatcagtgatcagtgcagatatttgtcccaatgtccctataggcagag

SEQ ID NO: 474165 - DNA, 2153 bp, Homo sapiens
gttcatttccacgtaggagaccacagggaaaccccagagagaatatgcctccccggcgtgatgtcctgacgatggattccagtgcactgcctactgggggcattgtcaaatatttctgcactaataacccagaatcgaatggaattatcattgaatggactaaaatggaatcaacatcaaacggaatcaaacggaattatcgaatgcaatcgaagagaatcatcgaatggccacgaatggaatcatctaatggaatggaatggaacaatccatggacccgaatgcaatcatcatcgaatagaatcgaatggaatcatcgaatggactcgaatggaataattattgaatggaatcgaatggaatcatcgtcgaatagaaacgaatggaatcatcatcgaatggaaatgaaaggaagaatcatcgaatggactcgaatggaatcatctaatgaaatagaatggaataatccatggactcgaatgcaatcatcatcaaatggaatcgaatggaatcgtaaacgaatggaattatcatcgaaaggaatcgaatggaatcatcaaatggaatcagatggaatcatcatcaaatggaatcgaatagaattatggaatgaaatccaatgtggtcatcatcgaatggactcgaacggaatcatcatccaatggaaactaatggaatcaacatcgaatggaatcgaatggaaacaccatcgaattgaaacgaatggaattatcatgaaattgaaatggatggactcatcatcgaatggattcgcatggaatcatcgaatgaaattgattgaaatcatcatcatatggaatcgaatggaatcattgaatggaatcgaatggaatcatcatcagatggaaatgaatggaatcatcagagaatggaatcgaatggattcattgaagggaatcagatggaatcatcgaatggacttgaatggaatcattgaatggactcgaatggaatcattattcaatggaattgaatggaatcatcgaatggtctcgaatggaatcattatcaaatggaatcgaatggaatcaccgaatagaatcgaatggaacaatcatcgaatgaactcaaatggaattatcctcaaaaggaatcgaatggaattatcgaatgcaatcgaatggaattatcgaatgcaatcgaatagaatcatcgaatggactcgaatggaatcgtcgaaaggaatggaatggaataaatcgaatggaattatcattgaatggactaaaatggaatcaacatcaatcggaatcaaacggaattatcgaatggaatcaaagagaatcatcgaatggccacgaatggaatcatctaatggaatggaatggaataatccatggacccgagtgcaatcattatcgaatagaatcgaatggaataatcgaatggactcgaatggaataatcattgaaaggaatcaaatgaaatcatcgtcgaatggaaacgaatggaatcatcatctaatggaatcgcatggagtcatcatcaaatggaatcgaatggaatcgtcgaatggactcgaatgcaataaacatagaacggaattgaatggaaacatcatcggaggtaaacgaatgcaattatcatggaatggaatcgaatggtatcatcaaatggaatcagatcgaatcatcatcaaatggaatcgaatagaattatggaatgaaatccaatgtgatcatcatcgaatggactcaaacggaatcatcattcaatggaaactaatggaatcaacatcgaatggaatcgaatggaaacaccatcgaattgaaacgaatggaattatcatgaaattgaaatggatggactcatcatggaatggattcgaatggaatcatcgaatgaaattcattgaaatcatcatcaaatggaatcgaatggaatcattgaatggaatcgaatggaatcaacatcagatggaaatgaatggaatcatcagagaatggaatcgaatggattcattgaatggaatcagatggaatcatcgaatggacttgaatggaatcattgaaaggactcgaatggaatcattattgaatggaattgaatggaatcatcgaatggtctccaatggaatcattatcaatggaatcgaatggaatcaccgaatagaatcgaattgaacaatcatc

SEQ ID NO: 474166 - DNA, 891 bp, Homo sapiens
gaatggaatcgaagagaatcgatggaataatccatggactcgaatgcaatcatcatcaaatggaatcgaatggaatcgtcgaatggactcgagtggaataaacattcaacggaatcgaatggaatcgtcaccggatggaaacgaatggaatcatcatcgaatggaatcgaatggaatcatcaaatggaatcagatggaatcatcatcaaatggaatcgaatagaattatggaatgaaatccaatgtgatcatcatcgaatttactcgaatagaatcagcatccaatggaaactaatggaatcaacatcgaatggaatcgaatggaaacaatatcgaattgaaaagaatggaattatcatgaaatggaaatggatagactcatcatcgaatggattcgaatggaatcatcgaatgaaattgattgaaatcttcatcaaatggaatcaaatggaatcattgaatggcatcgaatggaatcatcgtcagatggaaatgaatggaatcatcacagaatggaatcgaatggattcattgaagggaatcagatgcaatcatcgaatggagttgaatggaatcattgaatggactcgaatggaatcattattgaatggaattgaacggaatcatcgaatggtcccgaatggagacattatcaaatggaatcgaatggaatcaccgaatagaatcgaatggaacaatcatcgaatggactcaaatggaattatcctcaaatggaatcgaatggaattatcgaatgcaatcgaatggaattatcgaatgcaatcgaatagaatcatcaaatggactcgaatggaatcatcgaatggaaaggaatggaatagtcaggaactcgaatggagtcgccattgaatggaatcgcatggaatcatc

SEQ ID NO: 474167 - DNA, 825 bp, Homo sapiens
tggaatcaacatcaaacggaatcaaacggaattatcgaatggaatcgaagagaatcttcgaatggactcgaatggaatcatctaatgaaatagaatggaataatccatggactcgaatgcaatcatcaacaaatggaatcgaatggaatcgtcgaatggactcgaatggaatcatcatcaaatggaatcaaatagaattatggaatgaaatccaatgtgatcatcatcgaatggactccaacggaatcatcatccaatggaaactaatggaatcaacatcgaatggaatcgaatggaaacgccatcgaattgaaacgaatggaattatcatgaaattgaaatggatggactcatcatcgaatggattcgaatggaatcaccgaatgaaattgatagaaatcatcatcaaatggaatcgaatggaatcattgaatggaatcgaatggaatcatcatcagatggaaatgaatggaatcatcattgaatggaatcgaatggattctttgaatggaatctgatggaatcatcgaatggtcttgaatggaatcattgaatggactcgaatggaatctttattgaatggaattgaatggaatcatcgaatggtcacgaatggaatcattatcaaatggaatcgaatggaatcaccgaatagaatcgaatggaacaatcatcgaatggactcaaatggaattatcctcaaatggaatcaaatggaattatcgaatgcaatcgaatggaattatcgaatgcaatcgaatagaatcatcgaatggactcgaatggtatcatcgaatggaacggaatggaatagtcaatgaactc

SEQ ID NO: 474168 - DNA, 590 bp, Homo sapiens
gaacggaatcgaatggaatcatcaatggaataatccatggactcgaatgcaatcatcatcaaatggaatcgaatggaatcgtcgaatggactcgagtggaataaacattcaacggaatcgaatggaatcgtcaccggatggaaacgaatggaatcatcatcgaatggaatcgaatggaatcatcaaatggaatcagatggaatcatcatcaaatggaatcaaatagaattatggaatgaaatccaatgtgatcatcatcgaatggactccaacggaatcatcatccaatggaaactaatggaatcaacatcgaatggaatcgaatggaaacgccatcgaattgaaacgaatggaattatcatgaaattgaaatggatggactcatcatcgaatggattcgaatggaatcaccgaatgaaattgatagaaatcatcatcaaatggaatcgaatggaatcattgaatggaatcgaatggaatcatcatcagatggaaatgaatggaatcatcattgaatggaatcgaatggattctttgaatggaatctgatggaatcatcgaatggtcttgaatggaatcattgaatggac

SEQ ID NO: 474169 - DNA, 1648 bp, Homo sapiens
gaatggacccgaatggaatcaacatcaaacggaatcaaacggaattatcgaatggaatcgaagagaatcatcgaatggccacgaatggaatcatctaatggaatggaatggaataatccatggacccgaatgcaatcatcatcgaatagaatcgaatggaatcatcgaatggactcgaatggaataatcattgaacgcaatcgaatggaatcatcgagtggaatcgaatggaatcatgatcaaatggaatcgaatgtaatcatcatcaaatggaatccaaaatcaccatcatcaattggtactgaatggaattgtcatcaaatggaattcaaaggaatcatcatcaaatggaaccgaatggaatcatcattgaatggaaatgaaaggagtcatcatctaaaggaatcgcatggaatcatcatcaaatggaatcgaatggaatcatcatcaaatggaatcgaatggaatcattgaacggaattgaatcgaatcgtcatcgaatgaattgaatgcaatcatcgaatggtctcgaatggaatcatcttcaaatggaaaggaatggaatcatcgcatagaatcgaatggaattatcatcgaatggactcgaaaggaatcaacatcaaacggaatcaaacggaattatcgaatggaatcgaagagaatcatcgaatggactcgaatggaatcatctaatggaatggaatggaataatccatggacacgaatgcaatcatcatcgaatagaatcgaatgaaatcatcgaatggactcgaatggaataatcattgaacgaaatccaatggaatcatcatcgaatggaaacgaatggaatcatcatcgaatggaaatgaaaggagtcatcatctaatggaatcgcatggaatcatcatcaaatggaatcaaatggaatcatcatcgaatggaatctaatggaatcattgaacggaattgcatggaatcgtcatcgaatgaattgaatgcaatcatcgaatggtgtcgaatggaatcatcttcaaatggaatggaatggaatcatcgcatagaatcgaatggaattatcatcgaatggactcaaatggaatcaacatcaaacggaatcaaacggaattatcgaatggaatcgaagagaatcatcgaatggaatcgaagagaatcatcgaatggactcgaatggaatcatctaatttcattagaatggaataatccatggactcgaatgcaatcatcatcaaatggaatcgaatggaatcatcgaatggactcgagtggaataaacattcaacggaatcgaatggaatcgtcaccggatggaaacgaatggaatcatcatcgaatggaatcgaatggaatcatcaaatggaatcagatggaatcatcatcaaatggaatcgaatagaattatggaatgaaatccaatgtgatcatcatcgaatggactcgaacggaatcatcatccaatggaaactaatggaatcaacatcgaatggaatcgaatggaaacgccatccatttgaaatgaatggaattatcatgaaattgaaatggatggactcatcatcgaatggattcgaatggaatcaccgaatgaaattgatagaaatcatcatcaaatggaatcgaatggaatcatcaaatggaatcagatgaa

SEQ ID NO: 474170 - DNA, 593 bp, Homo sapiens
gcgtttccaaagaggaaccaccccagctgcagcttgtttatgtgaaggtcttggagcctgcagacaggaatgtttaagtctgctgaagctgcacccacagccaccccttcccctggtgctctgtcccagggagatgggagttttatatataagcccctgactggtgctgctgcctttctttcagagataccatgcccagagagaaggaatctagagaggcagtctggctacagtggttttgctgagctgcagtgtgctccatccagttcaaacttcctgggggctttgtttacactatatgaaagagaggcaggagagtcaacgtcagagttgtatgatgtgaggaagactcaccagccattggtggctttgagagtggaggaagaggccacaagccaaggaatgtgggcagcatctagaatttggaaaagtcaaggaaatggattcacccctgaacctccagacaggaatatggctctgctacaccttgattttagtttctgaggccttcagaattataaactctaaacttgtatacccaaatgactagtagatatcactcatggacactcagatgagtatgtcaatttaaa

SEQ ID NO: 474171 - DNA, 1038 bp, Homo sapiens
accacactgcaagtgccacccgggtcctgtagggttcattgagcagggctgaagccaggacatggggctgcttttggtcctgcattcaagtctgcaaatggcaggcttgttaccaggagcatggataagtgtggctgccagcagccctaagtgggctcctgctggttccctggacaagcagcactacatctgcaccatgacaaaatgggacaaactgcagccaaatggagctaaatctaagtccataggaggatggagtggttttcagtcagcacctggacccacatttggcaagcctgccaccaggaataaccaagatctggctaaacaggactctgtggggagatgggtgtggctagcagtaaatcctgggaacttcggatttataggcctacaagagatctccataaacagccaggatagagcaggatacgtgcacattcgtggagcaacacagccgtgtgctcacttctcagctgccacatctttgtctctttctagaatgcatttcccatattctgtctgcctgagccacattcaggccccacacagatactctattctcaagagacttttctacatgtacaaagtcaagattcatctttctctctcttcttttcctgttgaactctgactcactcgtaggacttaccacaccctgtcttctattaatattgggcatgtgccctgtgctaggctagttaaatgttcttgaataaaaatattgactgtagataatgaacactaatctactttcaagttcaacttcctgaagcacatttattcagctttctctatggagtatctgggcatttaagcaattacattatagtatgttgcaggggtggtagaaactcccctttaccctgcagcagactgctctgagaaatctgacttattcattgatttttaacagatgtgaaaaacaatcttacatctatagcaatgagtagctttctggctatagtactttattcatctattttccctttacacctaagttcattttatatacagatgtttttaaaaacacatttt

SEQ ID NO: 474172 - DNA, 1218 bp, Homo sapiens
ctggaacatcagatccccatgggtctccagctgcagggccctcaaactggaacatcagctcccccaccagatctccagctgcacggacctcaaactggaacatcagctccccgccgggtctccaggtgcactgcctgcaaactggaacatgagctccctgccgggtccccagctgcatggccctcaaactggaacatcagctccccaccagatcgccagctgcacgaccctcaaactggaatatcagctccaccccggggctccaaggtgcacagccctcaacttgcaacatcagctccccaccgggtctccagctgcacggctctcaaacaggaacatctgctccccacagggtctccagctgcacggctctcaaacaggaacatcagctccccacagggtctccagctgcacggtcctcaacctgcaacactggctccccaccaggtctccagatgcacggccctcaaactgcaacatcagttccccccgggtctccagctacaccgcgtcaacctggaacatcagctccccgccgggtctccagctccacggccctcaaactgcaacactggctcctcaccgggtctccagatgcacggccctcaaactggaacatcaactccccaccgggtatacagctgcatggccttaaactggaacattagctccccgcccaggtctccagatgcacggccctcaaactggaacatcagttccccgccaggtctccagctgcacggccctcaaactggaacatcagcttcccgccgggtctccaggtgcacggccctcaaattggaacatcagctccccgctaggtctccaggagcacgggcctcaaactggaacatcagctccctgccaggtcaccagctgcatggccctcaaactggaacatcacctccccgccaggtctccagctgcatggccctcaaattgcaacatcagctcccatcagagtctccagctgcatggccatcaaactggaacatcagctcccccgcgggtctccagctgcacagacctcaaacttggacatcagctccccgccgggtcatcaactgcacggccctcaaactggaacatcagctccacccttgggtctccagcagcacggccctacaactggaccatcagcttccccccgggtctccagctgcacagccctacaaccggaacatcagctaccttacgggtctccagctgcgttgatgt

SEQ ID NO: 474173 - DNA, 5067 bp, Homo sapiens
ctggaacatcagatccccatgggtctccagctgcagggccctcaaactggaacatcagctccccaccagatctccagctgcatggacctcaaactggaacatcagcaacccgccgggtctccagctgcactgcctgcaaactggaacatgagctccctgccgggtctccagctgcttggccctcaaactggagcatcagctccccaccagatctccaggtgcatggccctcaaactggaatatcagttccaccctggggctccaggtgcacagccctcaacctgcaacatcagctctccactgggactccagatgcacggccctcaaactggaacatcagctccctgccgggtctccagatgcacggcctgcaaactggaacatcagctcccgtcaggtctccagctgcacggccctcaaactggaatatcagctccaccccggggctccagcttcacggccctcaaactggaacatcagctccccaaccaggtctccagctccacggccctcaacctgcaacatcagctccccaccagatctccagatgcacggccctcaaactggaacatcggctccccacagggtctccagctgcatggacttaaactggaacatcagctcccaggccctcaaacaggaacatcagctcccaggccctcaaacaggaacatcagctccccacaggctgcaccacttcaaactgcaacatcagctccccgctgggtctccagcagcatggccctcaacctggaacatcagctcccccgaacccgggtctccagctccacagccctcaacctggaacatcagctccccccaacccgggtctccagctccacggccctcaaactggaacatcagctccctgccgggtatccagttgcacggccctcaaactggaacatcagctccccaccaggtctccagctgcacggccctcacactggaacatcagctccccaccagatctccagctgcacggctctcaaacaggaacatcagctccccacagggtctccagctgcacggccctcaaactgcaacatcggttcccccctgggtctccagctacaccgcgtcaacctggaacttcagctcccccccgggtctccagctccatggccctcaacctgcaacactggctccccaccgggtctccagatgcacagccctcaaactggaacatcaactccccaccgggtatacagctgcatggccttaaactggaacatcagctccctgcccaggtctccacatgcacagccctcaaactggaacatcagctccccgccaggtctccaggagcacggacctcaaactggaacatcagctccctgccaggtcaccagctgcatggccctcaaactgggacatcacctccccacgaggtctccagctgcatggccctcaaattgcaacatcagctcccatcagagtctccagctgcatggccatcaaactggaacatcagctcccccgtgggtctccagctgcacagacctcaaacttgaacatcagcttcccgccgggtcatcaactgcatggccctcaaactggaacatcagctccacccccgggtctccagctgcacagccctacaaccggaacatcagctccctgccgggtctccagctgcacagccctacaaccagaacatcagctccctgccgggtctccagctgcacagccgtcaacatcagctcctccccgagtcctcagctgcacgaccctcaagttagaacatcagcttctccccaagtcttcagctgcgtgaccctcaatctagaacatcagttcttctctggggtctgcagctgcaagaccctgaaactacatcagcttctctccagttctgcagctgcaagaccctcaaactacaacatcagcttccctccaggtctccagttccatgaccctaaatctagaacatcagctccttcctgagtctccaactgaaagaccctcaaagcgaacaacatcagttcctccccgagtcttcagctgcacgacactcaatctacaacatcagctcctgtctggttctccagctgcacgaccctcaaactacaacctcagctcttccccgagtcttctgctgcatgaccctcaatctagaacataagctcctctctgggtgtccacctgtagggacctcaaattagaacgtcagctcctcccagagtcttcagctgcatgaccctcaatctttaacatcagctcctctccaggtctgcagctccatgaccctaaaaatacatgagcagctcctccctgaatcttcagctgtacgaccctcaaactacaacatcagctcctgtctgcacctccagctgcagagccctcaaactagaatatcagctcctccccgagtcttcagctgcacgaccctcaaactagaacatcaaaaaatgtacagatttccaactgtagggccctcaaactagaacatcagctcctccccgagtcggcagctgcaagaccctcaaattaccaactcagctcctcccggagtcttcagctgcatgaccctcaatctcgaacatcagatactctctgggtctgcagctgtagggccctcaatctagaacatcagctcctcccgagtcttcagctgcatgactctcaaactagaacctcagctcctccccgagtcttcagctgcacgacccttaatctagaacctcagctcctcccgagtcttcagctgcacgaccctcaatctagaacatcagctcctctccaggtttgcagaagaccctcaaactagaacatcagcttctccctgagtcttcacctgcatgaccctcaatctagaacatcagctcctctgcaggtttgcagctgcaagaccctcaaactacaacatcagctcctctccaggtctgcagctgcaagaccctcaaactggaacatcagctcctctccaggtctgcagctgcaagaccctcaaactagaacatcagctcctccctgagtcttcacctgcatgaccctcaatctagaacatcagctcctctccaggtctgcagctgcaagaccttcaaactagaacatcagctcctctccaggtctgcagctgcaagaccctcaaactagaacatcagctcctgcccgagtcttcagcagcatgaccctcaatctagaacatcagctcctctctggatctgcagctgcaagaccctgaaactagaacatcatcttctctccaggtctccagttccgtgactctaaatctagaacatcagctcctccctgagtctccaactgaaagaccctcaacgcgaaaaacatcatctcctccccaagtctgcagctacaagaccctcaaactagaacatcagctcctccccaggtctgcagctgcacgaccctcaaactagaacatcagctcctctccgggtctgcagctccacgaccctcaatctagaacatcagctcctccccgggtcttcagctgcacgaccctcaaactagaacatcagctcctccctgggtctgcagctggaagatccactaactagaacatcaactcctgtctgggtctccagctccatgaccctcaatcaagattatcagctcctccctgaatcaccagctgaaagaccctcaatgtgaacaacatcagctcctccccgagtcctcaactgcaccaccctcaaactacaacaccagctcctccccgagtcttcagctgcaggaccctcaatctagaacatcagctcctccccgagtcttcagctgcacgaccctcaatctagaacatcagctcctctccgcgtctgcagctagaagatccactaactagaacattagctcctgtccaggtctccagctccatgaccctcaatcaagattatcagctcctccctgagtctctagctgaaaggctctcaatgcaaacaacattagctcctccccaagtcctcaacagtgcgaccctcaaactagaccatcagctcctccccgagtcttcagctgcacgaccctcaatctagaacatcagctcctctccaggtctgcagctgcaagaacctaaaagtagaacatcacctactccctgggtctgcagctggaagatccactaactagaacatcagctcctgtccgggtctccagctccatgaccctcaatcaagattatcagctcctccctgaatctccacctgaaagaccctcaacgagaacaacatcagctcctccctgagtcctcaactgcatgaccctcaaactacaatatgagctcctcgccgagtcttcagctgcacgaccctcaatctagaacatcagctcctctccgtgtctgcagctagaagatccactaactagcacattagctcctgtccgggtctccagctccatgacccacagtcaagattatcagctcctccctgagtctccagctgaaagactctcaacgcaaacaacattagctcctccccgagtcttcaacagcgcgaccctcaaactacaacttcagctcctccccgagttcagctgcacgaccctcaatctagaacatcagctcctctccgcgtctgcagctgcaagaacctaagagtagaacatcagctcctccccgagtctccacctgaaagaccctcaatgagaacaacatcagctcctccccgagtcctccactgcatgaccctaaaactacaacatcagctcctcgccgagtcttcagctacatgaccctcaatctagaacatcagctcctctccaggtctgcagctgcaagaacataaaagtagaacatcatctcctccctgggtctgcaactggaagatccactaactagaatatcagctcctgtccgggactccagctccatgaccctcagtcaagattatcagctcctccctgagtctccacctgaaagaccctcaatgcgaacaacatcagctcctccctgagtcttcagctgttcgaccctcaatctacaacatcagctcctccctgagtcttcagctgcaacaatctaaaactagaacatgagctcctccctgagtctccagctgaaagaccctcaacgtgaacatcagctcctccccgagtcctcaacag

SEQ ID NO: 474174 - DNA, 1476 bp, Homo sapiens
gtcttccataaaaccagtcaaagacgttggggacagctgtttcactatgtcttataagtgttgggcagtgcgaaagggaaatgtggggtcggagcccccacgcagagtccctcccggggcaccacctagtggagctgtgagaagagggccaccatcctccagaccccagaatggtagatccacctacagcttgcactgtgcacctggaaaagctgcagacactcaatgccagcccatgaaagcagccagaagggagactgtgcccttcaaagccacaggagcagagctgcccaagaccatgggaacccaccgcttgcatctgtgtgacctggatgtcagacctggaatcaaaggagatcattttggagctttaaaatttgactgccccattggatttcagactttcatgggccttgaagaatccaggagtagagacgaaactgtaattgaaaacagacctttaatacctgatctgtctgcagaattaaaagattttctgcattaatgtttgcctagacatgatctgaagacatgttttgtttgtttcagtgtatatttattcaacacaaggatattaaaaaatatatcttacagattttgtgatagaaaaaaagttattgaaaaaagaaaagataatcagatctatactcgggtagaataaaaactaaaagatgttccctggacatagacttctttaccttctggaagtcactgaccacttgaagaaatgagtatacatatatgtacctatgtgtacaatatagtgcacacaagatgaggaattcacagaatgcctaactcattaccgtggatccctttgggcttcaggaacacagggtggtgaggggggaaatgtgccacaagactttcttgtccagacaagttgcatttcttacgtgaagaaaatggaaacagtctgagatatacaatggatacccatttactcttaaaggaaaaaggttagctattttattttataagctagcaagataaattcagttgacaaatccttatttataataatggaacccttatttccatttttgtcatacattagtatatttccccattatatactttattccctttattatatttatgttctttatgcatttttctctcattcctcaccattatgatattcttggcatcaatattacagcagaccacatagtcaattctgaagtgtcttattgtcttaatactacttctagaagtatgcaaagggaatgttaaataaaaattttaatgtaaaaattatatgtaatatccagtggtatattacaatgagaaggaacatcttgcatttctgtcccttactagaagcaaaggaaatcataaaggaatttagtcttcctctgaagaaatagagggcaagaggagaaatagaactctactttcttagtttattttgtctgctgtaacagaataccacagatggagtaatttataataaacagaaatttattggcttat

SEQ ID NO: 474175 - DNA, 463 bp, Homo sapiens
tgagtttgactactcttagtatctcatgtcgaaagaacttatactttcaattccactcaaaggtttcaagattcctaatagaagagtgaagcatgatggccacttcacagtcatccagttggtcggaatgctccgaggcattgcatcaggcatgaagtatctttctgatatgggttatgttcatcgagacctagcggctcggaatatactggtcaatagcaacttagtatgcaaagtttctgattttggtctctccagagtgctggaagatgatccagaagctgcttatacaacaactaagtaccaaaaagcagaggctgaagaaggcgtcacaaaaagtcaaaatgtgaaccaaatcttaggagaatttattacgctgacagttggaggaaaggtagtccagatggagaagaagaaagaaaaaagacatggaaatgcaaaaaagtgaatgggcctatcgatg

SEQ ID NO: 474176 - DNA, 707 bp, Homo sapiens
tttcctgccagcagcctaacctgatgtggtggaagaggcccaaaaggcagcagagaattaaagatgtgacctggctttttctgaacaaatacagttatatgtgtacacaaagagatggtctgaaattggaacttatgtttaaaagggaagcagagtgtaaaagtttggaaaatttgaagcctgaccttttggtagaaaagaaaatcccattttgggggaagaaattcaagctaccagctgcagaaatgtgcttaagtaaagagaggtcaaatgttaatcgccaagacaatggggaaaatgtctccagggcatttcagagatcttcatggcagttcttcccaacacaggcctggaggcctaggagtgaaaagtggtttcattggctgggcccagggccccactgctctgtacagcctgaggacttggtgcccagtgtcccagctgtgccagctccagtcatggctaaaagaggccaaggtacagctcgggccattgcttcagagggtgcaagcgtcaggccttggtggcttccatgtgatattgggcctgcaggtgtgcagaagacaagaattgagctttgggggcatctacctagatttcagaggacgtatggaaatgcctggatgtccaggcagaagtctgttgcaggagcagagccttcatggagaacctctactagtgcaatgtagagggaaaatgtggggttg

SEQ ID NO: 474177 - DNA, 880 bp, Homo sapiens
gcgggcacctgcccagatatacctgaacctgtttgtttagccatggtgcctcttgtggggcattcctttttgaacggcgcccattcccttgatttccacagtatcacctttcttatagattcgcatacacgtggccaaaggaacaactccatgttttctaaaaggcctggagaacatgtatcacgtgtctctcctctttcccttggcgttcgtcattttggcaaattactggaagatggcgattccttggtagtcaagctgaactccctaagaggaaacactaggtcagtgaagtatatcaatggcctttataagaacatgatgttgattcatgattgcgagacttgcattagggtttgccttgctcatattgttaccggcagaacatatccgtatctgtacaggtctgcagcaacctcaattcttgcctcctcagaagaaaggatttcactgagggggataatgcagaaggagagactggggcaagtttctgagcaggagtgaaagtttattaaaaagccttagaacaccaacatggcacatgtatacatatgtaacaaacctgcacgttgtgcacatgtaccctaaaacttagagtataataataataaaataaaattaaaaagccttagaacaggaatgaaaggaaggaaagtacacttggaagagggcctggcaggcaacctgaaaggcaagtgtgtggtttgaccttttgacctggggttttatatgttggcatacttctggggtcttgaatttcttctttcatcccacttacctaactcctgagagcttatcaggaaactgctgatcaccagtttcaggtgttacctattatgaggctgcctttcactggtgccggctgtgaccaattattacc

SEQ ID NO: 474178 - DNA, 1397 bp, Homo sapiens
ggttggagcccaccgcagctcaaggaggcctgcctgcctctgtagactccacctctgggggcaaggcatagccaaacaaaaggcagcagaaacctctgcagacttaaatgtccctgtctgacagctttgaagagagtagtggttctcccagcacgcagcttgagatctgagaacaggcagactgcctcctcaagtgggtccctgacccccgagtagcctaactgggaggcaccccccagtaggggcagactgacacctcacacagccgggtactcctctgagacaaaacttccagaggaacaatcaggcagcaatatttgctgttcagcaatattcactgttcttcagcctccgctgctgatacccaggcaaacagggtctggagtggacctccagcaaactccaacagacctgcagctgagggtcctgactgttagaaggaaaactaacaaacagaaaggacatccacaccaaaaccccatctgtacgtcaccatcatcaaagaccaaaagtagataaaaccacaaagatggggaaaaaacagagcagagaaactgaaaattctgaaaatcagagagcctctcctcctccaaaggaatgcagctcctcaccagcaatggaacaaagctggacggagaatgactttgacaagttgagagaagaaggcttcagacgatcaaacttctctgagctaaaggagaaagttcgaacccatggcagagaagttaaaaaccttgaaaaaagattagatgaatggctaactagaataataaccaatgcagagaagtccttaaaggacctcatggagctgaaaaccatggcacgagaactacgtgatgaatgcacaagcttcagaagaagtagaatatctctgaatagaccaataacaggcactgaaattgaggcaataattaatagcttagcaaccaaaaaaagtacaggaccagatggattcacagccgaattctaccagaggtacaaggaggagctggtaccattccttctgaaactattccaatcaatagaaaaagagagaatcctcactaactcattttatgaggccagcatcatcctgataccaaagcctggcagacacacaacaaaaaaagagaattttagaccaatatccctgatgaataacaatgcaaaaatcctcaataaaatactggcaaactgaatccagcagcacatcaaaaagcttatccaccatgatcaagtgggcttcatccctgggatgcaacgctggttcaacatatgcaaatcaataaacgtaatccagcatataaacagaaccaatgacaaaaagtacatgattatctcaatagatgcagaaaaggcctttgacaaaattcaacagtccttcatgctaaaaactctcaataaattagatgacatga

SEQ ID NO: 474179 - DNA, 1617 bp, Homo sapiens
tgctgattggtccatgagcagccatggacaggcctggaaaaggcaccacaagttcccactctggtctgtgggagtgggactggaagcccagcccccagccttccggcatacctggcctgaaagttgggcctcaccaggcacccacccccttctgctcaggaacctgtctgcctcctgctgccattgatggcatcaaggcttggccccaactttgttccaaggttgcatgggtgctgacagcaggagaactagaaagagttctcagttctagttctagggaaccctacttgttccctattacagagattattctccttcattacctgataccgtttgtccttcaaaatgttgttttatatattttgttcatttgttttggcaacttcaggccagaggataaatacttccatgtttctttatcttggtctaaagtgacataaattgtattaattcataatactaatctttaataaatgtatattaaaacgtcaaaattcaagcattcatgaacaaggctaaaaaagttaatgaaaatctcaaattacttaaaataataactaatatttagataaaaagaaatttcaaagagcgcatgatgatataattaatgactcttagagtgagagtgaatataattttgttcaactttttactcaatgtaccaatatttactactttatctctgatatgtggctaatcaacttttgcttaaacacttgcaatggctataagcttattattgcacaaggcagatcattccattttgcaaaactccttttaataagtacaaatatgtccacttataacttatgctcactgtatcacatctaacatttggagtacactgaagtctaatcttttctgtctgaacaaatgttctaatatttaaaaataattaccactgaaatcaataataaaaatgcatttgaggggtaacagaaaaatttaatatagcatgttatatttaaatatttttttaaaaattttgtgaatgttaaacatatttttaacaaaatgtctcttttataaagatgcgtggtaaactacttagtgatgagtgtcataatatctaatatttgctttaaaatgatttataaggattatttatatgataattaaataatatggcaattatataagatggcatttaaaacttgcttttgtcaaaggcatttacttctactcttgaacaggaatgtgtctctttttaagtaataactttttaaatctataaacatactaactaactagacaaaataagttctatttcaatacttcatagagggtaaaagacatactctaggttctaacttagttaacatagccgtttcttctcagagaatatcacatgaaacaaatgttaaattgtgcactatgttagcatgaactcagaatgttccactttgcctacattcgccagttgaaaggtatgaatgaatggcatattctataaatttctaatacattttctattcataccacttccatgcattagaaagtatccttaacatgaagagatgttgaattttatcaagtgccttttctggatctattgggatcatcatgtggtttttgtctttagttctgtttatgtgatgaatcacatttattatttgc

SEQ ID NO: 474180 - DNA, 593 bp, Homo sapiens
gctccattatttttcttataccccatgaccaatccatcaataaatcctatgggatttaatttcaaactatatactcaatcaaaaattctctcttctacttatttgaaatacactatgcattattgttattgtcaccatactatgcaagagtaccagaaattattccttctatctcactgtaacattgtacctattgaccaacctcctctaatctccccttaccccactctcctcagctctagaaaccactgttctactctcaacttcaatgagatgaagattttttattccaaatacggggaatgggctaatccacggagtgctcagcagtctgatctttacctgattaagagtattaatgctagcagagaaaaagaatcaatatgtgtcaggaatagcaacgtgcaggataaagcaaagcaacaggtagtcatcctaatgggtgcaaagtgatatctcttcatggttttcatttgcattactctaatgattagtgatgttgcacaagttttcatgtgcttattggacaataaatgtaactaattttcttcagcaatgaggcattggagctatgttcatgatttgttattcaa

SEQ ID NO: 474181 - DNA, 1297 bp, Homo sapiens
tattgcctttctccagatggtgactaaagaccaagtttgtctcagctctcgcaatcaaccagacctttgccaatagggaatggaggaggtcccaaaaagagatcatcagtgtggtagtattggcaaggggcttgtgctcaggagccctgtgtggaatgtacctgctaacatgttctgccacatgtctgccaccttcatcagcaacaacacggctatccatgagctgtttaggtgcatcttggggccattcatggccatgttcagatgcaaggatttcttgcaatggtatttgggtgagggcaaggatgagatagagttcactgaggctgagagcagcatgaacaacctggtgtccaagtatcaagagcaccaggatgccatggccaaggaggaggaaatttgggaggactgggctgagagggaaagacatggaaggttcagaagacaggaagatgtgggaaggtttggaacttgctggagacttgttgatggctttgaccaaaatgctgatagtgatatgggcaatgaagtccaggctgaggtggtctcagatggagatgaggaacttgttgggaactggaatgagactttagacttggacgagactgtggacttggacattttggttaatgctggaatgaactaagactttgggagactgttagattacccaattttgggaatataattattaataagatttcctcaaggttcattttattcctgtctgcaagttgacatgaccctatgtataaaaaaccctaaagacgccactgaagaactgttagaattaataagcaaatttagtaaagtttcaggatataaaataacatacaaaaaataagttagattttttacaccaattaatgatatattcaaaaaagaagtcaagaaaacaattccattcacaatagcatcaagaagaaataaatacttaggaatatatttaaccaaataagtgaaagatccttatactgaaaactatgaaacattcatgaaagcaattgaaaaagacacagtaaatgaaaaaaatctagtttttgcatatcagaagaattaatatattaaaatgtccatactacctaaagtgatatactgattcaatgcaatctttgtcaaaattttactgacattttttacatgaatagaaaaaacaattcttaaatttgtatagaaccacaaaataccccgaggtcaaaatgatattaataaagaaagttaaagttgaagccatcacactccctgatttcaagttatattaaaagcaatggtaatcaaaacaatatggtactgacat

SEQ ID NO: 474182 - DNA, 676 bp, Homo sapiens
agtcaaagctggagctattatctacatgaatgtggggaacaaattacccatttgttgtcccctacttgaagaaggaatcaactctgaagtctggaacttggaaggacaatttggaagggcgaaaactccccatcccgttcaaatcaggctaaaagaccccatcgcttttccttatcaaaggcaatatcccttaaggcctgaagctcacaaaggattacaggatattgttagacatttaaaagctcaaggcttagtaagaagatgtagcagtccttgcaacacctcaatcctaggaatacaaaaaccaaatggtcagtggagactagtgcaagacctcagaatcatcaatgaggcaataattcctttatatcctgctgtacccaacccctatacactgctctctcagataccagaggaagcagaatggttcactgttctggacctcaaagatgccttcttctgcattcccctgcactctgactcccagttcctctttgcctttgaggatcctacagaccacacgtcccagcttatgtggatggtcttgccccaaggatttagagatagccctcatctgaatcactgttttttgccaactgtgaattcctggacacagtgaaatggccaggccaccctatacccagatataggagactcggaaggtgaatactcatct

SEQ ID NO: 474183 - DNA, 1287 bp, Homo sapiens
ggtttttgacaaataaatggggtgggatgcttgcttggccgcccgctgccccagcccgagccctgggctcacttagcagcctgatgccgagtttcagacgcagtcctgctgcgcttacacccgggcttcttcgcccccttgccaaagtctgcagcccgatggatgctgggcgcgggctttccctgagcgctttaacgcagcttaggctaaagccccagagctcccaccttctacctcctgtttatccgcccgcccctctaccaccgccaaaggacgtgccccttcacagccggagtgacagcgacgcctcagccgcctctgttgctctcggagccccggcttcccctgcaccgggaaagcgccccctctcgagaggctggtccctggagaactgcgaacgagctgcagaaaaccagattttaaaatgtagaagtcgttgggctgcattcctccgaggaccagtctgatcgcccaggactaagagtggcagcgtatgagaagttgggaccatagagcaagggggggaggggagtgttgcagcaggcattctcttctggaaggagtcgttgggagcagtgcggttggacacaagtttgcgtaggagtgttttccttttgtcaataattaatcaccggaattagccaggtagaatttgagttttagcaagagtcctgaggcggggccgaacacctaactccgggaggctcccagcgcccggcgcagtgggaagctcgcagcagctggggaggagccaaagcctcggcgctcacctaagccgcagggagatacacccaactgggagtaagaactgcaaacaattgtgatgcttgaaccacaatatatttccccaccctctccagttgagtgtgatgatgttccactaaggatgggtgcagccactaacgcagggccccctctcaacctagatcctcgtctacagtataccctgagagaagcaggccaccagcattactcatcatccccagctttgtgtttcagagctctattctagataagagcaactgagagctctgaggctctcttcctccaaccatcctccactcttaagacagaaaatgaagaactcaacaacaagaacacaactcatttaaaagtggacaaaaaaatttgaatagacatttctccaaagagcaggtagaaacagccaatttacacatgagaaggtgtttactagccattagtggttggggaaatgaaaatcaaatcaaaaccacagtacaatcccacttcacaccaaccggaatggctatcacaaaaaaaaaaaaa

SEQ ID NO: 474184 - DNA, 739 bp, Homo sapiens
taaacaaagcattctaagaaactattaatcaattcacatcagttcatttgcttaacaaatatttattgaaagctgctctgcgtgctgtgttcagggtgctgggaagaagagtaaacaaaactagcagtttcctgccctcctggcggaggcgagtaaaacaagcaaatacacgctccatggaatttcaggaatggaaagagcatcaaagaaaatgcaaacacagaaacaagaatgacaggatggtggaaacgaagccgaatcaggatgttgaccttggccacatcaatgtcatagagcttcttcacagcctgtttaatctggtgcttgttggctttaacatccacaatgaacacaagtgtgttgttgtcttctatcttcttcatggcagactcagtggatatctgggctgtctccggagtcgcagtgtcttcggccgccggaaggtgggtgacgtgcggatcttcttctttttgtggctgtggacacctttcaacactgccttcttggcctttaaagccttcgctttggcttcagctttaggaggggcaggagcttccttcttcgctttcggcgccatgttgtgaaaagggtccatatgctgtgttttaagaatatctcaaaacctgtaattatttcatttatgtattccttttcttgcttcctgttggcttatcccactgaaatataattttcatgagggcaaggattttgtctatcttagttaccttttgtcttagta

SEQ ID NO: 474185 - DNA, 1759 bp, Homo sapiens
tccctgcaggccagttgcctgaatgttggcaacggggccccagctggtgatgctcttatgcaatgatgttgctcttctcacaagccaggctccagattctccagccacagaggttctgccctgctttggggtacatggtagactcacaggaggtgttggtggcccctcagataaacagaccacccacttcactgccagcaaagagcacctgaccatattcagggcacccaaaggaaaagaggtttcctttgcagtccattatcacactgaattcaactccacaggtcattttggtaatgggctggcctttataccttgtctgtgccaagctgtggacagcatctgtctggttaccacgacccagctatgccatcttgttctccccaaatgtgaacaaggagctggtttctgtcaaggtcagtgtgtggttctgcccacatgctgccggcaggatcacttcatggctaagacctttgatgagtctgggagcttcctctctcttggtgttgtcatgtcccagatgccccttctcttgtccacagcagctccacagcttcccttctatggtgatgaggaggctgtgagcagcacactaaccagaaaccactgcccacacctgggcactaccaggtacccacatatctgaggcccctcacaaattctgactgagattgccgtaagcagcttttgctgtttaggcacttcctttcaaccagtcaagtcccagttgactgcccttcaaatcaaaagttgcccattgtacttcgacccttcaagtttgatgtgttccttggtgtacttaggctgagtgatgaccacagccacgctgcccgcccttgcctgctgctgcatgcctgatcccgtctccactgggggcccagtggagctccagaccgtcctcaaggtcgttgctgctgtccttgccgctgctgctgttgcagtgcttccgccgcgtgtgcctcttgctggaagtgcctgcttcatttcctgggcccagcaaggcagagccgttgccctagggaggcttctgacagacggcagcccccgccttcttcctggatatggtcatggctggagggagaaatctaaactattttgtattaattttctcaaaagaatacatgtaatttaaaatgtcaaataacactaaaggctgacaatgaaaataagagtaaaaacaaacagcaatgatctgatcatgctctatcatgttccatcccaaaagcacatagtcatcacttaggaaacttctcacaatatttacctacatatacttatgctatgaagaaactatatcttttatgttcaatgcttgcaaattacatgaagggaattatatacatgctgctttatgttttgatgtcatctttcttttatttttgtattttctgtatctctatttcttttttccccttaaatttttttttaccacccctaacatcttccacctactccaataaaaacccctgtccttccctccttaacttctccccatcccatgaccaagctctaatccatgctaaagaacgaaggtttgttccttccttttcttcttttgagttatgtaactctctacatgtttgtatgtgtttatatggtatatatatatgtggaatgttttggtcgtgttttgatttttttaaaacatgaagataatatttcacactttaacctgtatctttctattttcactcaataacacctgatggaattactttaaatcatttggaataatcattcttttaaatggcttaataat

SEQ ID NO: 474186 - DNA, 490 bp, Homo sapiens
actgttctaaagcctttttaataaacttccacttctgctctggaacttgcctcagtctctttttccgctttatgcccctcagtggaattctttcttctgaggaggcaaaaattgaagttgttgtagacgcctacagattcgtcaccagtaacttggggcgagccccacacaggatagaaagggctgaactttactattggcatcacgtttggtcatcggctgacatggacagtgtggcagatttgaagatttggcagctgaagactgtcatcagcaacacttttcccaccagcagaacttccatcaatctgggccccaataatgagcaggctcttaccaactcagatcaggccttaagaaactggcagttcctacttcctgtctcttcagacactctggaaaccaccatgctgtttgttacattggtatacatgtgccatgtttgtttgctgcatccatcaactcgtcatttacattaggtatttctcct

SEQ ID NO: 474187 - DNA, 622 bp, Homo sapiens
agcagcatctacaaagattttctatattaggttaaatgaggtcataagagtgcagttctaatatgataaaaattgatgtttttgtaaaagaggaagagacaccagagaaatttgtctccatgcatgcacagaggaaaggttgtatgagatccagggagaaggcagccacttgcaaaccaaggagagaagcctcaccagaaaccaacccttttggcatgttgatcttagacttccgtattccagaacgggttgcccttgtggctacctgcccatggtttggtagcccccatacagtgacagatccagaggccagcccaagtggccacctagttctcttggactgggggctgacgctggtccagtgtcttctggcaaggcgctgcccacccaatgtgcatggacttaattgcaacagagaaatggacttggggagacatcccacaactgtagttccatggagtcatgcagctgaaatctgctagattctgacccttcccaaattgctcctaggataacattgccactgtaaaatctaagatcagggcttaagatattttgcaggccttgcatctgatggatcatctggtatcacccacattgataaactagctcatctgttctt

SEQ ID NO: 474188 - DNA, 489 bp, Homo sapiens
aaggggggcgcgtccggggggactggtggcttgcatgggtgctggtcatggcagtggtgggctgggcatgtggacatgttcttcagccactgggcagctggtgtgatgtggctgatggcagtgggactgttggagcaacctaccggaacccatgcagtccatgctatgttggtggtgactgtgacaggttgggcaggccggtgcttatgggtttcagctgtggtgatattggcaggttgagtcagccagacctcagaccacagcaggagggatcaggtgccaatggtggtagacttagctgggtaatttttaggctcatgggttggatgctcgagtatttgggggatgggaccaggctgataaacttgtcctcaggccccttagtagtgcattcaggtgctggctatggtaggaagaggtggagtggtcccaaggtcactggtggaatgctcaggtgtgagcccctctcagctagctcagcgtaggcag

SEQ ID NO: 474189 - DNA, 846 bp, Homo sapiens
agaaacttctgcagacttaaacatccctgtctgacagctttgaagagagtggtggttctcccagcatggagtttgagatctgagaatggacagactgcctcctcaagtgggtccctgacccccgagtagcctaacttggagacacctcccagtaggggccgagtgacacctcatacacaaactccaacagacctgaagctgagggtcctgactgttagaaggaaaactaacaaacagaaaggaatagcatcaacatcaacaaaaggacatccacaccaaagccccatctgtagatcaccatcatcaaagaccaaaggtagataaaaccacaaagatggggagaaaccagagcagaaaagctgaaaattctaaaaatcagagcgcctcttctcctccaaaggaacgcaactcctcaccagcaacagaacaaagctggatggaggatgactttgacaagttgacagaagtagacttcagaagatcggtaataacaaacttctccaagctaaaggaggatcttcgaacccatcacaaagaagctaaaaaccttgaaaaaagattagacaaacggctaactagaataaacagtgcagagaagaccttaaatgacctgatggagctgaaaaccatggcaagagaactacatgatgcatgcacaagcttcagtagcagattggatcaagtggaagaaagggtgtcagtgaatgaagatcaaatgaatgaaatgaagcgagaaaagaagtttagagaaaaaagaataaaaacaaatgaacaaacctccaagaaatatgggactatgtgaaaagaccaaatctatgtctgattggtgtacctgaaattgacagc

SEQ ID NO: 474190 - DNA, 655 bp, Homo sapiens
accagttactgaaaactattgtgatatggtgattttctttacccattccatcctttacctggaaaacttccagtcagttcaggaccctcagctgcaggtcaagtggactttgctggaggtccactccagacctgtttgcctgggtctcagcagcagaggctgcagaacagtgaatattgtggaacagcaaatgttgctgcctgatcgttcctctggaagcttcgtctcagaggggtacccggccgtgtgtcatctgtcacagcttcccttggctaggaaagggaattccctgaccccttgtgcttcccaggtgaggcaatgccttgccctgcttcaactcatgctcggtgggctgcacccactgtcctgcacccactgtccaacaagccccggttttattttccataatcctttttcccccaatggtgtgtcttctcattcgtaatattttggttttcatttagtcctatcaatcactatatttcttcagtaaggagtcattgcactagctaaggagtcattgcactagcaaagcagtcatcagcttatgtaaattcctgtggtacaaaaaagagatctttaagctgcttattactttattattgctgaaagaaaaaaaaagcaaggcataaagagaaaagggggtgggagaatt

SEQ ID NO: 474191 - DNA, 2294 bp, Homo sapiens
gctgctgctcactctttggctccacactgcctttatgagctttaacactcaccgcgaagtgagaccacgaacccaccagaaagcagaaactccgaacacatccgaacatcagaaggaacaaactccagacacgccgcctttaagaactgtaacactcaccgcgagggtccatggcttcattcttgaagtcagtgagaccaagaacccaccaattccagacacaaaattacctagcgtgtacatctttgacacgtgctacagggcatctttcataccatacctctcagatgcttcatacaattctcatacactcatcctttacccaagagctgctatcccaggttgggcatttgtgcatttcacaaagaatctaagccaaacgggaaacagtgtgccagtgactaaccttgcaccccaggatccactcaaggagattctttttcctaactgatttgtccaccaggagtacctttttctaatttttacaaaagcatcctataggctaattcctgatcactttttgaattctatacaagcttggacattaaagcataagattagctaggtaagaaaacagtgggctgaagtttcataacacgtgcaaatagaaactctcctttattgtattggatccttggttttcttgtagctaagattttctacatcaaacatccctttgatgaaaatgttgagggattttctccagattctcagtgaaggatatggttgaggaaataaaaccaagagtcagattatcttcttggcaaccaagcacagatgacgtattcaagttacattaggacatttgcaatctattgattgaagtaaataaatctggaaggtgtgtcttgtttgctaatcatgcaagaggcttccatgtgatcctgaatttttctttgaaaaggaaaaaaacactaattcctgtcaattattttcacactaaaaaatacattccaatcaagatacagcagcaaacatttcaaatgcataattcaaagattgtgaaagcaattcagcatagtgacctctgaattgagctagaggctgtgtattctcttttggtgtcaggtctcaaaactcgcggcaattaatttgatgtattgatttaatatttcaggaaggaatgtatttacctggcaaaggcactgtgaaagatgttttgaagagaaaagaaatgtttgcaaatgaagacaagctcctttgatgaaaggaaagctgagagtgagtagcattcacagaatcagaccccaaacacttattacttcaaggctcgatttcccaaattagagctaataatgattcagcattgcactgttggatacttcattctgtaaaagaataccatggggtagaaaggaagccatgcaacagatatgatcttgtaggctggcccattaagagagggttatttaaactagagctaaattagaaagaaccatttcaacactatatacctaagccagcagttttggaaaaaagatgccatctctctttttcaatatataaatttactattactttttaaattgtctgttctgattatataaataagaaagtactaaataaaatataaaatgtaaatgtaaaaaaagtataattccattatacaaagaccaccagattttctctcatctttcttatttactcaaaagaagttacagtttatctacaacataccgagcattatgcacaataaggacactacactagtgaatgacacaatcctttcccttggatttgtttggtgtagtggggaacatgcataaataaaaaggaaaacatagtacattttaatcagtgttatcatagaagtatagaggtgtatatgcatattatatattaataaatcaaatttttaagaaaatagttcttctttttcagttaatgtaatatgttcccccaagatagcagatatacatttttaacatcatgttattgattgcaaaatagcccacaccttggatatactatagttactatactatagtaacataattggatatagtatgttagccattttcttatacttatttgttcagattttttaaaatttttcattcatatctaacatgatgatgaacgcattttacatctttcttaaggcaaattcctagaagttaaaagttttgattcaaatggtaaggacatttccaaaactcttggcacatattgcaaatttgcgttccgaagaacgaaagcattgtgccaaattacatgcccaccaggaatggaaccttatgaaagatatacaagtacacactcataaatcacactgtccttgttttcttcagttt

SEQ ID NO: 474192 - DNA, 789 bp, Homo sapiens
tttttttcatgttcgttggctgcatgacacgctgatgcagaaggtgggttcctacggcctttggcagctccacccctgtggctctgcagggtatagtccccatcttagatgctttcatgggctggcactgtctgtgggttttccaggcacacagtgcaagctgtcagtggatctaccattccggggtttggaggatggtggccctcttcttacagctccactagatggtgccccagtagggagtctgtgtggtggctccaatcccacatttcccttctgcactgccctagctgaggttctcatgagggccctgcccctgcaacaaacttgtgcctgggcatccaggcgtttccatatgtcctctgaaatcaaggtggaggttcccaaacctcaattcttgacttctgtgcacttgcaggctcaacactatgtggaagctgccatggctttgggcttgcaccctctgaagccatggcctaagctctattcaggagtaacaggatcagggacccacttagaaaaacagtctggctgctttctagtagtgcagctgtgctgcgttgtgggagacccttccttgtccaggctgtctggactctccagagctggcaggttggaactgctgagttgcctaaaccacagagatgttggccacccctcccactggggactcggtccttctcaggcagactcaagcctgctgctgctgactggctggaatttgccattaggtcttaatttgtgagacactgtggaaggggggcctgcagaacatgctgcttggcttcc

SEQ ID NO: 474193 - DNA, 1239 bp, Homo sapiens
attagaaactaatggaaaggagtggaatggaatggaatggaatggaatggaatggaatggaatggaatggaatctacccgagtggaatggaatggaatggaatttaatggaatggaatggaatggaatggaatggaatggaatggaatggaatcaacccgagtggaatggaatggaatggaaaagaatgaatggaatggaatggaatggaatggaatggaatggaatggaatggattggaacggaacggaatggaatggaatggaatggaatggattggagtggaatggaatggaatcaacacgaatggaatggaacggaatggaatggaatggaatggaaaggaacggaatggaatcaaccggagtggaatggaatggaatggaatggaatccacctgataggaatgaagtggaatgtaatccaatggaacggagtggaatcaactcgagtggaatggagtggaatggaacggaatcgaatccaatggattcaactggaaagcaatgcaatgaatttaaatggaatggaatggaatggaatggaatcatccgagtggaatggaatggaatggaatggaatagaattgaatggaatggaatcaacccgattgaaatggaatggaatggaatggatcggtacggaatggaatagaatggaatggaatagaatggaatggaatcatccgagtggaaaggaatggaatagaaaagaatggaatgtaatagaaacgaatggaatgcaatggaatgcaatggcatggaatgtagtaaacccgagtggaatggaatggaatggaatggaaggtaaaacaggaatggaatggaatcgaatgaaattaaccctagtggaaaagaatggaatggaatggaatgtaatggaatggaatcaactggaatggaaggaaatgcaatgcaatggaatggaatggaatgcaatggaatggaatggaatcaacccgagtggaacgcaatggaaggtaattgaatggaatggaatggaatggaatcaacccaagtggaatggattcgaatggagtggaatggaatggaacagcacggaatgcaatggaatcaaatagaatggaatggaatggaatggaatggaatggaacggaatcaacctgagtggaatggaatggaccggaacggaatggaatgaacacgagtgtaaggcagtggaatggaacggagtagaatggaaaggaacaggaaggaatggaatggaatgcaatgaacac

SEQ ID NO: 474194 - DNA, 4082 bp, Homo sapiens
gcagcagtgttctagaatcccatctgcaggacaaacatttagacactcgcagcagtgttctggaattctatgtgagggacattcaaaccccaacagcagtgttctagaatcctatgtgagggacagacgttcagaccccagcagcagtgttctggaatcctatgtgaggtacaaacattcagataccagcagaagtgttctggaatcctatgtgagggacaaacattcagaccctcgtagcactgttctggaatcctatgtgagtggcaaaaattcagaccacggcaacaatgctcaggaatcctatgtgagggacaaacattcagaccctagtagcagtgttctggaatcttatgtgagggacaaacattcaaaccacagcagcagtgttctggaatcctatgtgaaggacaaactttcagaccacagcaggagagttctggaatcctatgtgagggacaaactttcagaccaaaacaggagtgttctttaatcctatatgaaggacaaacattcagaccccaggagcactgttctgaaatcctatgataagggcaaacattcagaccccaacatgaatgttctggaatcctatgtgagggacaagcattgagaccatagcaggagtattctggaatcctatgcgagggacaaacattcagacccttgtagcagtgttctggaatcctatgtgattaacaaacattgagaccacagcaggagtgctctggaatcctatgtgagggacaaacattcagaccccagaaggagtgttctggaatcctatgtgaaggacaaacattcagaccctcatagcagtgttctggaatcctatgtgagggacaaacattcagactctcccagcagtcttctggaattctatgtgagggacagacattcaaaccccagcagcagtgttctggaatccgatgtgaggtacagacattcagacctcagcagcagtcttctggaatcctatgtgagggacaaactttcagaccctcatagcagtgttctggaatcctatatgaggtacaaacattcagaccctcatagcagtgttctggaatactatgtgagggacaaccattcagaccatggcagttctgaaatgctatgtgaaggacaaacattcagaccctcgtagcagtgttctggaatcctatgtgaaggacagacatttagaccctcgaagcagtgttctgcagtcttaagtgagggacaaaaattcagaccctcgtaacagtgttctggaatgctttttgagggacagacattgagaccccaacagcagtggtctggtatcctatgtgagggacaaacattcactcctcaccaacagtgttctgtaatcgtatgtgagggacaagcattcagaccccagcagcagtgttctggaatcttatgtgagggacaaacattgagaccctcgtagcagtgttctggaatcctacgtgagacacaaacattcgtaccacagcagaagtgttccggaatcttatgtgagggacaaccattcagatcacagcaggagtgttctggaatcctttgtgaggtacaaccattcagaccacagcaggtgtgttctggaatcctatgtgagggacaaatattcagaccctcattgcagtgttctggaatcctttgtgagggacaaacattcagaccccagcaggagggttctggaatcctgtgtgagggaccaacattcagaccctcgtagcagtgttctggaatgctatgtgaaagacaaccattcagaccctcatagcaatgttctggaatcctatgtcagggacattcagaccccagccgcagtgttctggaatcctatgtgacagacaaacattcagaccacagcaggaacgttctggaatcctatgtgacggacaaacgttcagaccatagcagcagtgttctgcaatccaatgtgagggacaaacattcagagcccagcagcagtgttcaggaatcctatgtgagggaccaacaatcagaccctcgtagcagtgttctgaaatcctatgtgagggagaaacattcagaacccagccgcagtgttctgaaatcctatgtgacagaaaaacattccgaccacagcagcagtgctctggaatcctatgtgcggtacaaactttcagaccacagcaggagagttctgggatcctatgtgagggacaaactttcagaccccaggagcagtgttctgaaatcctatgttaagggcaagcatttacatcccagcatgaatgttctcaaatcctaggtaacggacaaacattcagaccacagcaggagtgttctcgaatcctatgtgaggaacaaacattcagaccacagaaggagtgttctggaatactatgtgagggacattcagaccctcttagcagtgttctggagtcctatgtgatgaacaaactttcagaccacagcaggagagttctggaatcctatgtgagggacaaactttcagaccccaggagcagtgttctgaaatcctatgttaaaggcaagcatttacatcccagtgtgaatgttctcgaatcctagaccacagcaggagtgttctggaatcctatgtgagggtcaaacattcagaccacagcaggagtgttctggaatcctatgtgagggcaaacattcagacccacgtggcagtgttctggaatcctatgtgagggacaaatattcagaccacagcaggagtgctgtggaatcctatgtgagggacaaacattcagaacctcgcagcagtgtcctgaaatcttatgtgagggagagacatttaaaccctcgcagcagtgttctggtatcccatgtgagggacaaacattcagaccctcccagccatgttctggaattctatgtgagggaaagacattcaaaccccagcagcagtgttctggaatctgatttgagaggcagacattcagaccccagcagcagtgttctggaatgctatgtgaaggacaaacattcagaccacgggagcagtgttctagaatcctacgtgaaggacaaacattaagactctcatagcagtgtcctggaatcatatctgaggaacaaccattcagacaccagcagaagtgttctggaatcctaggtgtgggaaaaacattcagaacctagtagcagtgttctggaatcctatgtgagggacatacattcagaccacggcagcagtgttctggaatggtatgtgaaggacaaacattcagacccttgtagcagtgttccggaattccatgtgagggacaaacattcagaccacagcagcagtgttctggaatcctatatgacggaccaacattcagacccttgcaacagtgttctggaatactaggtgagggagaaatattcacacccttgtagcagtgttctggaattctatgtgactgacaaacattcagactccagcaacagtgttctgtaatcctatgtgagtgacaaacattcagaccccaagagcagtgttctgaaatcctatgttaagggaaacattgagaccccagcatgaatgttctggaatcctatgtgagggacaaacattcagaccacggcaggagtattctggaatcctatgtgaggagcaaacattcagaccacagcagaagtgttctggaatcctatatgagggataagcattcagaccctcgtggcagtgttctggaatcctatgtgagggagaagcattcagagcacagcaggagtgctctggaatcctacgttagggacaaacattcagaacctcgtaacattgttcgggaaacctgtgtgagggacagacatttagaccctcgcaacagtgttctggaatcccatgtgagggtcaagcattcagatcctcacagcagtgttctggaattctatgtgagtgacaaccattcagactccagcagcagagttctgtattcctatgtgaaggacaaacattcagaatccaggagcagtgttttgaaatcatatgttaagggcaaacatacagaccctagcatcaatgttctagaatcatatgtgagggacagacattcagaccctcgcagcagtgttctggaatcctagatgggggacaaacattc

SEQ ID NO: 474195 - DNA, 5974 bp, Homo sapiens
gggcatggaatggaacggaatcaacccgaatggaatggaacggaatggaatagaatggtatggaatggaattgaatggaaaggaatcaacccgaagggaatggaatggaatggaatggaatggaatggaatggaatggaatggaatcaacccgagtggaatgcaatggaatgaaatggaatggaatggaatggaacggaaaggaacggaattgaatggaatggaatcaacccgagtggaaaggaatggaaagaatggaaaggaatggaatacaatggaatggaatggaatggaatggaatagaatgaaatggaaaggaatggaatggaaacaacccgagtggaatggaatggaatggaatggaatggaatggaatagaatggaatggaatcaacccgagtggaatggaatggagtggaatggaatggaatggaatggaacggaatataatggaatgcaatggaatcatcccgagtggaatggaatggtatggaatgcaatggaatggaatggaacagaacggaatgaaattcaatggaatagattgaatgcgagtggatttgaatggaatggaatgcattggtgtggaatggaatggaatcaacaagaatggaatggaacggaacggaatggaatggaatggaatggaatggaatggaatggaatggaatggaatggaatggaacggaacggaatggaatcaaccggagtggaatggaatggaatggaatggaaaccacccgataggaaagaaatggaatgtaatccaaaggaacggagtggaatcaacacgagtggaatggaatggaatggaacggaatcgaatccaatggattcaactggaatgcaatgcaatgaatttcattggaatggaatggaatggaatggaatcatccgagtggaatggaatgaaatggaatggaatagaattgaatggaatggaatccacccgattgaaatggaatggaatggaatggaattgaatggaatggaatggaatggaatggtacggaatggaatagaaaggaatggaatcaactcgagtggaaaggaatggaatggaaaaaaatggaatgtaatagaaaggaatggaatgcaatggaaagcaatggcatggaatatagtcaaccagagtggaatggaatggaatggaatggaatggaatggaatggaatggaatggaatggaatggaatcaacttggagtgcaatggaaaggaatggaaatgaatggaatggaatggaacggaacggaatggaatgaacacgagtgtgagggaatggaatggaacggaatagaatggaaaggaacgggacagaatggattggaatggaatggaatgaacacgagtggaatggaatggagtggaatggaatggaattgcattcaacggaatggaatgcagtggaatggaatgggatggaaaggaatggaaaggaatcaacctgaatggaatggaatggaatggaatggaatggaatggaatggaatggaacggaacggattggaatcaaccggatggaatggaatggaatggaacggaatagaatggaaaggaacgggacagaatggattggaatggaatggaatgaacacgagtggaatggaatggagtggaatggaatggaattgcattcaacggaatggaatgcagtggaatggaatgggatggaaaggaatggaaaggaatcaacctgaatggaatggaatggaatggaatgcaatggaatggaatggaatggaatggaatggaacggaacggattggaatcaaccggatggaatggaatggaatggaacggaatcgaatccaatggattcaactggaatgcaatgcaatgaatttcaatggaatggaatggaatggaatggaatcatccgtgtggaatggaatgaaatggaatggaatagaattgaatggaatggaatccacccgattgaaatggaatggaatggaatggaatggaatggaatggaatggaatggaatggaatggaatggtacggaatggaatagaaaggaatggaatcaactcgagtggaaaggaatggaatggaaaaaaatggaatgtaatagaaaggaatggaatgcaatggaaagcaatagcatggaatgtagtcaaccagagtggaatggaatggaatggaatgaactgtaatggaaggaagtgcaatggaatcgaatggaatggattgcaatggaatggaatggaatcaacccgaaatggaatggaatgcaatggaatggaacggaatcaacctgagtggaatggaatggaatggaatgaatggaatggaatttattggaaactaatggaatggaaaggaaacaaaccgagtggaatgaaatgcaatgaatttcaatggaatggaatggaatggaatggaatggaatggaatgccattcaactggaatggaatggagtggaatggaatggaattgcattcaacggaatggaatgcagtggaatggaatgggatggaaaggaatggaaaggaatcaacctgaatggaatggaatggaatggaatgcaatggaatggaatggaatggaatggaattaacccgtgtggaatggaaagtgaaatggaatggaaaggaatggaatggaatcaacacgagtggaatggaatggaatggaatggaatggaatggaatggaatcaaccagagtggaatggagtggaatggaatgcaatggaatggaaggcattggaatcaactggaatggaatggaacggaatgcaatggaatagaatggaatcaatctgggtggaatggaatggaatggaatggagtggaatggaatggaatggagtgtaatggaatagaatggaatggaatgaaatggaatggaatggaacggaatcaaccagaacggaatggaatggaatggaatggaatggaatggaaagcaatggaatggaatcaacacgagtggaatggaatggaatggaaaggaataatggaatggaatggaatggaatggagtggaatggaatggattggaatggaaagaaattcaacggaatggaatcaacaagaatggaatggaatggaatggaatggagtggaacggtatggaaaggaatggaatggaaaggaatcaacccgaagggtatggaatggaatatggaatggaatggaatggaatggaatggaatggaatggaaacaacccgagtggaatgcaatggaatgaaatggaatggaatggaatggaatggaatggaatggaatggaatggaatggaacggatcggaacggaacggaatggaacggaattgaatggagtggaatcaacccaagtggaaaggaacggaatggaatggaatggaatggaatggaatggaagagcatgcaatcaactttcgtggaaggtggaatggaatggaaaggaatggaatggaatggaaactaatggaacggaatggaaacaaaccgagtggaatggaatgcaatggaatggaatggaatggaatggaatggaatggaatggaatacaaccaaatggaaacaacccgagtggaatggcatggaatggaaaggactggaatataatagaatggattggaatcaaccgattagaaactaatggaaaggagtggaatggaatggaatggaatggaatggaatggaatctacacgagtggaatggaatggaatggaatttaatggaatggaatggattggaatggaatcaacccgagggtggaatggaatggaatggaatggaatggaatggaatggaatctacacgagtggaatggaatggaatggaatttaatggaatggaatggattggaatggaatcaacccgagtggaatggaatggaatggaaaggaatgaatgcaatggaatggaatgggatggaattgaatggaatggaaaggaacggaacggaatggaatggaatggaatggaatggaccccaatgaaatggaatggaatggaatggaatggattggaatggaatggaacggaattaacccgagtggaatggaatgtaatggaatggagtgggatgaaacggaatggaatggaatcaaaccgagtggaatggaatggaatggaatgcaatggaaaggaatggtatggaatcaaccctagtggaatgaatggaatggaatggaatggaatggaatggaatggaaaggaatggaatggaaacatcacgagtggaatggaatggaatggaatggagtgcaatggaatggaatggaatgcaataacatgcaatcaacattggtggaatggtatggaagggaatggaatggaatggaatggaatggaatggaatggaatggaatggaataaaagggcatggaatggaacggaatcaacgcgattggaatggaacggaatggagtggaatggtatggaatggaatggaatggaaaggaatcaccccgaagggaatggaatggaatggaatggaatggaatggaatggaatggaacggaacggaacggaattgaatggaatggaatcaacccgagaatggaatggaatggaatggaatgcagtggaatggaatgaaatgaaatggaatggaatggaaagtaatggaatggaatgcaacggaatgaacccgaatggaatggaatggaatggattggaatggaatggaaaggaatcaacacgagtggaatggaatggaatggagtggagtggaatggaatggaatgcaatggactggaatggaatggaatggaataaacccgaatggaatggaatagaatggaatggaatggaatggaatggaactgaatggaataaacccgaatggaattgtatggaatggaatggaaaggaatggaatggaatggaaactaacggaacggaatggaaacaacccgtgtggaatcgaatgcaatggaatggaatggaatgcaatagaatggaatggaatggaatggaatggaacggaatgcaatggaatggattggcctggaatggaacggaatcaacccgaatggaatggaatggaatgcagtggaatggtacggaatggaatcgaatggaatggaatcaacccgaagggtatggaatggaatgcaatggaatggaatggaatggaatcaacctgagtggaatgcaatggaatgaaatggaatggaatggaatggtatggaatggaatggaatggaatggaatggaaacaatgcaatgcaatggtatcaaatggaatggaatgcattggaatggaatggaatggaatctccctgagtggaaagaaatggaatggaatggaatggaatggaatggaatggaatcgaatggaaaggaatggaatggaatggaaactaatggatcggaatggaaacaacccgtgtggaatggaatgcaaaggaatgcaatggaatggaatggaatggaatggaatggaatggaatggaatggaatagaatacaaaaaaatggaaagaactcgaaatgaaatggaaaggaatgaaatggaaacaacccgagtggaatggaatggaacgcaatggaatggaatggaatcaaccatagtggaatggaatggaatggaatggaatggaaccgaatataatggaatggaacggaatcatcccgagtggaatggacagatatggaatgcagtggaatggaatggaacaaaacggaatgaaattcaatggaatagattgaattggaatggaatggaatcaacacgaattgaatggaacggaatggaatggaatggaaaggaaagaaatggaatcaacccgagtggaaaggaatggagtggaatgtattggagtggaatggaatggaatcaacacgaattgaatggaacggaatggaatggaacggaatggaatggaatggaatggaaaggaacgaaatggaatcaacccgagtggaatggaatggaatggattggaatggaatggaatggaatgcaatggaatggaatggaatgaacccgaatggaaaggaatgaaatggaatggaatggaatggaatgaaccc

SEQ ID NO: 474196 - DNA, 2672 bp, Homo sapiens
ggaacggaatggaatgaacacgagttggaatggaatggaatggaatggaatgaaatggaatggaatggaacggaatcaacccaaatggaatggaatggaatggaatggaatggaatggaatggaatggaatggaatcaacacgagtggaatggaatggaatggaaaggaacggaatgcaatggaatggaatgttatggaatccacccgagtggaatggtatggaatggaatggaatggaaaggaataaaatggattggaatggaatggtatcaacccgagtggaatggaatggaatggaatggaatggaatggaatggaatggaatcaaccagagtggaacggaatggaatggaatggaatggaatggaatcaacccgatggaatagaatggaatggaatggaatggaattgaatggaatggattggaatagaaagaaattcaagggaatggaatcaaccagaatggaatggaatggaatggaatggaatggaatggaatggagtggaatggtatggaaaggaatggaatggaaaggaatcaacccgaagggtatggaatggaatggaatggaatggaatggaatggaacggaacggaacagaacagaacggaactgaatggaatggaatcaacccaagtggaaaggaatggaatggaatggaatggaatggaatggaatggaatggaatagcatgcaatcaactttggtggaatggtatggaatggaatggaatggaatggaatggaatggaatggaataaaagggaatggaatggaatggaatcaagccgagatgaatggaatggaatggaatggaatggaatggaatggaatggaatggaatggaatggaatggaaatgaataaaaccgagtggaatggaatggaatggaatggaatggaaacaatgcaatgcaatggtatcaactggaatggaaagaattggaatggaaaggaatggaatcaccttgaaatggaatggatcggaacggaacggaatggaatggaatggaatggaatggaccccaatggaatggaatggattggaatggaatggaacggaattaactggagtggaatggaatgtaatggaatgcagtggaatggaatggaacggaatggaatggaatggaatcaacccgagaggaatggaatggaatggaatgcaatggaatggaatggtatggaatcaaccctagtggaatggtatggaatggaatggaacagaatggaacggaatggacttaacccgaatggaatggaacggaatggagtggaatggtatggaatggaatggaatggaaaggaatcaacccgaatggtatggaatagaatggaatggaatggaataaatggtcatggaatggaacggaatcaacccgaatgggatggaacggaatggattggaatggtgtggaatggaatggaatggaaaggaatcaactcgaagggtatggaatggaatggaatggaatgcaatgcaatggaatggaatggaatcaacacgagtggaatgcaatggaatgaaatggaatggaatggaacggaatggaacggaacggaattgaatggaatgaaatcaacccgagtggaaaggaatggaatggaatggaatggaatggaatggaatggaatggaatgggatcaacccgagtggaatggaatggaatggaatgcaatggaatggaatggtatggaatcaaccatagtggaatggtatggaatggaatggaacggaatggaacggaatggaatcaacccgaatggaatggaacggaatggagtggaatggtatggaatggaatggaatggaaaggaatcaacccgaagtgtatggaatagaatggaatggaatggaatggaatcaacccgagtggaatgccatggaatgaaatggaatggaatggaacggaatggaacggaatggaacggaattgaaaggaatggaatcaaccgagtggaaaggaatggaatggaatggaatggaatggaatggaatggaatggaatgaaatggaataacatgcaatcaactttggtggaatggtatggaatggaatggaatgtaatggaatggaataaaaggtcatggaatggaacggaatcaacccgaatggaatggaacggaatggagtggaatggtatggaatggaatggaatggaaaggaatcaactcgaagggtatggaatgcaatggaatggaatggaatggaatcaacacgagtggaaagcaaaggaatgaaatggaatggaatggatcggaatggaacggaatggaaatgagtggaatgaaatcaacccgagtggaatggaatggaatggaatggaatggaatggaatggaatggaatggaatggaatggaataacatgcaatcaactttggtggaatggtatggaagggaatagaatggaatggaaaggaatagaagggcatggaatggaacgcaatcaacccgaatggaatggaacggaatggtgtgaaatggtatggaatggaatggaatggaaaggaatcaacccgaagggaatggaatggaatggaatggaatggaatggaatggaataaacccgagtggaatgcaatggaatgaaatggaattgaatggaatggaacggaaaggaaggaaattgaatggaatggaatcaacccgagggaaaggaaggagggaagg

SEQ ID NO: 474197 - DNA, 901 bp, Homo sapiens
cagaatcaacccgaatggaatggaacggaatggagtggaatggtatggaatggaatggaatggaatggaatcaactcgaagggtacggaatggaatggaatggaatggaatgcaatggaatggaatggaatggaatggaatcaacacgagtggaatgcaatggaataaaatacaatggaatgcaacggaatggaacggagcagaattgaatggaatgaaatcaacacgagtggaaaggaatggaatggaatggaatggaatggaatggaatggaatggaatggaataacatgcaatcaactttggtggaatggtatggaagggaatggaatggaatggaatggaataaaagggcatggaatggaacggaatcatcgcgaatggaatggaacggaatggggtggaatggtatgcaatggaatggaatggaaaggaatcaacctgaagggaatagaatggaatggtatggaatggaatggaatggaacggaatggaatggaatcaacccgagtggaatgcaatggaatgaactggaatggaatggaatggaaaggaacggaacggaattgaatggaatggaatcaacccgagtggaaaggaaaggaatggaatggaatggaatggaattgaatggaatggaataacatgcaatcaactttgatggaatggtatggaatggaatggaatggaatggaaaggaatggaatggaatggaaactaatggaacggaatggaagcaaccccagtggaatggattgcaatggaatggaatgcaatggaatggaatggaatggaatggaatggaatggaatggaatacaacaaaatggaaagaacacgagtggaatggcatggaatggaaaggacttgaatataatgtaatggattggaatcaacccgatt

SEQ ID NO: 474198 - DNA, 886 bp, Homo sapiens
aaacggggtttgagccctgaacgtagaaggaggtaaactgccaagctgcagtaacaaacgtgcttttcagaagctgttcagaaaggccacgctactcatggttatgaataatgctactcccaaccaccggctcctgagccgcggcaactccgtgtcaccttttcaccgccccccacctagccccaaatccccaatccaggcccaaatccccgctccaacccccaatccgcgatccaatcccccatccgcgatcccaaatctgcgatctagcccagaatccgcgatccagccgggtccaccacagccttcagcagcgacactcccagcttccgacctcttagatccactgagcctcgcaagggcattagcagcgcccttgcacggcgggggccgcccacctcccagaagccgctcccaggcggcgcgccggcaggtggggctccagcccggggcagtcgccgctgggctcgcgggttctcctgagctgaaacaaatttgggcacattgagacatgttttcttttcaaaaagtcctagcactttaattactgtgtaaagagatattagtgtataattttcacacatattgactaacatccctgcaaaatgttgaatcaatttatactttcagcaccaatcggcaaattaatgtccattatgctttcgcttcaccaaaactgatacctatattttattttgctagacaaaaatacatattatcttaatttgtgtaactgtatttaatagaaagattaaatttttttcagatgtatcatagggcatcattttttcttgagtctggtgcgtgcttagttcctttaaagcattaatcatgtatacattaattttatgtgcaaaacaatcattaagtacaatttgaaatatgg

SEQ ID NO: 474199 - DNA, 1156 bp, Homo sapiens
attgagttgctggaggccaagcttgtcctaatttaccaactttcctaagctgatcacctccagatgagcactgtttgccaatgcgtctccactgcccaaattaatccaactcaaccaccctcggtcattctggagtgtgcatcctcgtgcccagcagttcacactcactcttcgaatggtctaacccaactcaagccctgccttccccacgaaggagcttctctgcaggctgcggaattggcgtgcttgcagcggcacggtccaggcctccggctctcaggcttcactgtcctgcattgctctcatttcctgtatcccccggggcttcgtacagtcactgcccacctagcagagcaaggacaaaggtcagctgatgacccttacgtgagcacagacagcagctttgcttccacccacctcaccctccatcgcccaggacctggtgctggggactgagcaggacactggaggggatgaccacatgctgttttgaccttagcacccctacaaagacagggtgatgtgtgtatatgtcaataaagtttatttttaaaatgcagatcactcaccaaagggggctagacaccaggatggctgacatagcacagtgatccccctagagagaaagctgccaaggccaggccctccttcccaatcatgacctagaaacagctttcctccactggccttccccagctccacactgtgactgtccacagtggaaactgcgagtcacgccctgctgtaacaggcattcaaaactagttgcctatgtatttataggtctatattaatgtcatcgatatttataaagttggacgtgcaggataaatcactgaggaagtcagaggcagggccaagactaaaattcaagtcacacaacagcactccatggaaaatctacatactcctatgataaagttctactagacagtccagatacatcatcccctaatttgtgggtatgtaagcaaatgtgaagcatgtctctaacctggtcattcactgtgctataaggcccactgccagtgaataagttcagcagttactcttcaaggatatatggtcttttttgaactttaatgctgcctgttttgggtgagaataacatgaagtgagagtcaatgtttcatatttagtaggaattaacttattc

SEQ ID NO: 474200 - DNA, 1144 bp, Homo sapiens
atacaccctgcaggtggctggggcatgagaagcgttgagttgcctctgggtgacagggggcctagagcccttgcatcttggctgtgtgtgtagtgtagggtgtgtgggtgctgcagagtcttgagctaagagtttacgtattccaagacaacgcacatgggacatgggacttcctcccccgtgctcctcctgtcctccgcctccttgatgagctggacgtgcggggagaccccagacctggcgcatggctggttttgctctgtgcctgcacagaccggagatgcccttggtgacgccgtctgctcctcccgtgctttcagacacaggggcctagagcccttgcatcttggctgtgaccgtggccttcgatcgagcacagtgggtgagggccttctgaataagaagggcaccgccacaccctgtggggccgatgagcaaattgacgactctgctttctcttggtccgtgatggaagaggaagcccgaacgcacgcctctatcagcaactctgcagcaccgcacttgccactcggagaaaatgctttgaaagcccagacagccacataccattagaaacagcttgatcttaatccatgttagcatttccatgtgttttctctgtaaaaggagcgactttggagctttgcagattggaaaaataagtagggtgaaggaagggtgagacctgggtgagcccagacccgggggtccaggatccaggccctcagcatggactgcccatcccccaggcagggggcctttgacggcccaggcagacaagtcaatgcagcgtgtgctggtgtgtgcatgtatgtgtgacgcgtatgcacgtgcatgcatcatagtctgtaatttacacatagcgagttgcttctccccttccgctggtcgttgtttccttcattcccttgggcctgatgttgcacagttgcttggtggaattcccgctcatttcccagtgagagagcagaagaagtaatcaattgatctccgtgggatttggtctaagtgaagaaagcacaagtgagaattttacatcaccctttggggaaaggttttggtccaagaattttataatgaccgtgtttgggtgtggatattgtgcccagcaatgggaaaacatgatgttttgatgaggggttac

SEQ ID NO: 474201 - DNA, 1142 bp, Homo sapiens
cagcagtgattaccaaccaggatgtcttctccagctcaggccaccatcagtctcgggaatcccagtgtggacagggcgctgcgtgtccccaaggctgccgcgtgtccccaaggccgccctccctgggggatggtctggcttcaggaccggctgctgacaggggcttgtgctcagaggggcctcagcttggtcaccagcgccctgcaaccaatggcctccaccgtccaccacctgcactcagcccctgggaacgcctccaccacagtgtcgcggctgctactgggcctgccacggccactgcctgtggctgacgtctccaccctgctgggtgacattgcgaagcgtgtctatgaagtgatcagcgtccaggtgcaagatgtcaatgagtgtttctatgaggagctcaatgcctgctctggaagggaactgtgcgcaaacctggagggctcgtactggtgcgtctgtcaccaggaagctccagccacgtctccacggaagctgaacctggagtgggaaggtaatggctaggctctctcagatggcatgggaatggcttaattcctgtttgccccgggaatactcaccagcagtgcttacagctgcagcattcaccccgagataactctgccatgaaatatcttgcttttattattattttcgcatcactgtggtatattgactttggaaacagaggacacaattctacttatagcattctgcttttagtagtggtatttccatttacaaaatatagtgattctcaatcactgaaaatgtcaaatcctagaaaacagcagtcccacgtgtgttgttaacattgttctcgaacaagttgttggccgacgattcatttgctgaacctgtttttctgaaatagatgattctgatgattcagacagttctgatgttagttctgtttagaagtaattccaagaacagtttttatattttgttttcatattgaaaatcagttagatttgcttcagccccaaagagcttgtttatgtaaaattaaatgagtgccggcagtgagctgccgtttttttcttcgaaacgggaaaagggtgaaggcattttttaaaggctggatggtcttcagaccacagggactcttcttgccaagagggaatggctggctaacc

SEQ ID NO: 474202 - DNA, 1994 bp, Homo sapiens
ctggcaggaggaaccgccttgagacgggcatctgtttcctctcagcgtggggacctcctcacatggcctctttccccgcaggtgcggggctccctgccagccaccatgtgtcagcacatggacgctggtggggtcaggatggaagtcgtcagcgtcaccaacggcagcatcgtggtggagtttcacttgctgataatcgcagatgtggatgtccaggaggtgtcagctgcatttctcaccgccttccagaccgtgcctctgctggaggtgatcagaggcgacaccttcatacaggattacgatgagtgtgaaaggaaggaggacgactgtgtgccggggacatcctgtcgaaacaccctcgggtctttcacttgtagctgcgagggaggagcccccgacttccctgtggaatattctgagagaccctgtgaaggtgactctcctggcaatgaaacctgggccaccagcccagagaggcctctcaccacagcagggaccaaggctgcctttgtgcaaggcaccagccccaccccccaaggcctgccccagcggctgaacctgaccggagcagtcagggtgctctgtgagatcgagaaggtggttgtcgccatccagaagcgcttcctgcagcaggaatccatccccgagtcctcgttgtacctcagccacccctcctgcaacgtgagccacagcaatggcacacacgtgctcctggaggccggctggagcgagtgtgggaccctcatgcagagcggtgcctctgtgtcacagcgaacgctcccatgcaggcccttgttcgtctccaaccccacttggccacatggagcacaaaggcttcgtgttcagggccctgcttgggggacaagaggaggggagagccagcaccttccaccagctcagcctggtactggacacaggggcctgggccgcatgggcctgggagtgcagggtggatcagggaagctgcctggaggggccggcggcttcagagggagcccgtgccggctctgggttggggaagtggccttctgggaaggggctcgacctagaaaggaggccagcgtcgttccaaggcttcttagacggccacctggaggccgagcgttggcagcaggggggtgtctgcaagggggatgggcggtgatcagtggctcctgtggcttctcggcagtttccctgaacatgacgaacaccgtggtgaggaccacgctgaggaacgacctgtcccaggagggcatcatccaccacctgaagatcctgagccccatctactgcgccttccagaatgacctgctgacatcctccggcttcaccctggagtggggggtttacaccatcatcgaggacctccacggcgctgggaattttgttaccgaaatgcagttgtttatcggagactctcccatacctcagaattatagcgtgtctgccagtgacgatgtcaggatcgaagtggggctctacaggcagaaaagcaacctcaaggtggtcctgacggagtgctgggcaaccccgtctagcaacgcccgggaccccatcaccttcagcttcattaacaacagcaggcactgccattgcctggccttgctgtgtggccagctctgggctctgcaggatttccaggcgagtgctgtcatggacctgggttttggggaacaaatgaggtgcccggtcctcgacttccacggagcctgtggaatctgcgactgccctgtgcccaacacatacaccaacgtgattgagaacggcaactccaataaggcccagttcaagctgaggatcttttcctttatcaacgactccatcgtctacctgcactgcaaactccgcgtctgcatggaatcccccggagccacgtgcaaaatctgcttgttcctgctctcatctgagctgttttcctgggtgaccaagctctgagcgtctgcaggacgtggatagagaagcaacacaaggaaggctgattctgttcatgtctgttttgctcaaacactaga

SEQ ID NO: 474203 - DNA, 2038 bp, Homo sapiens
ggtgactcacatggctgggcaggggtgtgtgagagagggagactcacgtggctgggcaggggtgagtgaggaggagactcacaaggctgggcaggggttagtagggggtgactcctatggctgggcagaggtgagtggggagaggctcccatcgctgggcagggatgagtgaggggagactcatggctgtgcaggggtgagtgagaaagggagactcccatggctgggcaggggtgagttgggggagactcatatggctgggtaggggtgagtggggggagactcctatggctgggcaagggtgagtgagaggagactcatagggctgtgcagggatgagttggggggagacttacgtggctgtgcaggggtgagtcgggggagactcgcatagctgtgcaggggtgagtgggaggagactcacgtggctgtgcaggggtgagtgggggaagactcgcatggctgtgcagggataagtgagcaggagactcacatgtctgggcaggagtaagtgaggggtgactcacatggctgggcaggggtgtgtgagagagggagactcacatggctgggtaggggtgagtgaggaggagactcacatgtctgtgcaggggttagtcgggggtgactcctacggctgggcagaggtgagtcgggagagactcccatggctgggcaggggtaagtgagaggagactgacagggctgtgcaggggtgagtgagagagggagactcacatggctggacaggggtgagttgggggagactcacacggctgggtaggggtgagtggggggagactcctatggctgggcaggggtgagtgagaggagactcacagggctgtgcaggggtgtgtgagagagggagactcacatggctgggcaggagctagtgagggtgagactgcatggctgggcaggggtgggtgagggatgaggaatggaggcaaagagcagattgctccttagggacctgggttgctaatggtaagaggctgctgaggaggctcctggttgcagagaagggtttgttttcgccttgtgcaagatgggcaggtttgtgggctggagggcaggaggcgaagacacagcctggatgagggggaggaggaggggcttgggaagcaatggggaatgggtcgctgtgagcagagggccctgccagcttcggatggaggggcagtggtgaaggagggaacgtgagtggacagatgttagggctcagtggggggtgcggggtgcagggttgggcccgctggtggagtggaagtcggtcatgagggatgtgccaggggcccagtcctcagtgcggtcagaggagagagtcctaaagctctgtgactgagagagcttgtaaaatgaaacgatgggcgaagaacggatggacagcctcaaacagaaacgaagctgggtttatatccttaatgtcaggtaaggctgagttcagggagaaacacaccaacgaagaccagaataggttctttagaataataaagaatgcaattgacaacagatatgtcccaactacaaatatttatgtaccaaaaaggtgcttcaccatgcatagggtgaaaattgtgggagatacagtgagaggaaagaggaaatcatggaccatcaaagagtgccttaaagagaatagacttttaaaagtcacaaataggactcaggtggaccctaagtttggctgcctgccaggagctgctgaacgtggccctgttgggtgcgtcattgtgtctggaggccttgggtgtgtctgtattgtgaacaaatgtgactgtggaaggtgtcctgctccatctgacagcaagttctgtctcctttgggcttctgcaaaacatggacatttgatcaaacgctgcttaaatgtcggccatgttttggatgctcgagtggccatgcgtgttcgtgtgtctgagcgttgaaactgcagggacttggcgccagtggagctggcagtggcctccactggccagtagggaccaatcgttaaacccactcttggtccaaaattgaattattttaaaaccaagag

SEQ ID NO: 474204 - DNA, 596 bp, Homo sapiens
ttgccaggttatgggacaagaatgtgcttaatgctagtggatgctatcaaccagttttccaaatttttaccgacttatactcttgcctgcaatgactccagtcacacctgtgttggcattgactatatcaacataatcatatttacaagcattacttcccagtctttggctgctcacttccttctctggagcatggcccctgaacacacagctgtttccagaggggaggagctgctggcattgtctgcaggcatctccatgaagcccatcatcggtgtcatccgcccatgctcctgcagcgcctgcccttggctggctcctgtggcttctccagccggggcagctgaggctgccagcgcctctaacgagtccaaagacagcgaacacagggcccagtgcttcactgctttgccctgaggccggctgtgctgcccttccatattctgatctttggagaacctgcccaggcagtgtgatttagtgagcgggagtggctatgaaccacattgacacgtggctacgagccacagtgatgtgtgaaggcacgcctggaatgtatgcccctctgttttactggacagtgcaggcgaatttgt

SEQ ID NO: 474205 - DNA, 1727 bp, Homo sapiens
gccaagcacaataacctcgcccccacccaccccatgagctctctttccctggctcggaatcgctgcaggcgccacagaccagacgcgcactgttccccactcctgcttatcggccgcgcggcatccccttgtcgcagcactccagcatccatgcagccgcgcggcaccccgtcttcggagcactccagaatccatgcagagcgcagcaccccacatccagagcgctccagaatccatgaagcacgcggcaccccctcgtcagagtgctccagaatccatgaagtgcgcagcaccccttaatcggagcgctctagaacccgtgcagcgagcagcaccccacacccggagcgctccagaatccatgaagccagcagcaccccacacccggagtgctccagaatccacgcagcacgtggcatctcctcgtcatagcgttctagaatccatgcagcgagcagtaccccacaccgggagcgctccagaatccacgcagcaagcctttctggaaccccaagcagaaggatatccaaaatgtaaaaacggtggggcctgcaatcccacggagcaccccccactctcacggtgcccaggtcgtcccactcagcacggacattctgcctccagccctggggcctccaggttatacccaaaagaggtgactcttggggacgtaaggtgcgtggggtgccatgaaccctcccaaggctgcagcctcttgggcaaggagtccacagtgctgttgccagccaaattggctgcacccctgcacgagggggctgatcttccccacaccaccactgtggctggcatcgcagtaggccaacagggacaaagacagctgcacagcgagaagcagcaaatgattcctgtgcctgagtgtggtcttggaatggcagagagaacccttgagcctgggagccacctggaagggaacaaggccgtctggcagccacctggcaggacccatggcattgaagatcagatgtgccagccacaccttggtgctcgcaaccactgaaacactgtctgtctctgtgggtttccctattctgcacatttcatataaatggaatcacacaacacatggctttttgtgatcggcttctttcacttagcataaaacacacttcagttttgaaaacaaaataaaacctaaggaagaaagggagcatgaactctaaatgcagtagaaaactatggccgaccaaggggatgcggctctgacctcacaggggaatgagctttctcagcctgcaccttgcttctgcagctgtcggcaaccctctgatacagccattataattgtcccattttgctgataggaactttgaagccccagggctctctaactctttccaatacatgacagtgcctctcgagcccccaagaaggaggactgaggggagaatttccagcctccacagctgtgtcacagcccagggccctgcagggcctcagagcaaaaacctagtgagcagggaggcttcttggccactggagatgcacctaccactcagctgtccctcagagacgacctgctgcagggacccaggtcaccgacagccccgcatccagcatgacatccacgccaggcccacttccctgaggctgctcccaaccagggcattcccaccagacacagggtccctcgaggggcactctgctttggggactccccatcagcctgcgggaggctcttcctccccagtccttcccccactcatttc

SEQ ID NO: 474206 - DNA, 1599 bp, Homo sapiens
gcctgcctatttcactggcaagggcaggcccccaggggtttctgggagaggagcgagggttccagattcactaagtcagggctggcagcgacttcatagagcttaactacatgaatgccagaaccgagctgaccgaccccgtctcctataattgcttctcaagccatctctgttacctggaccagccaggcagggacctggaggagcgcagggagccaggagggcaggcagttgacttgagggccgcagcggctgtcctggttaggtcgatggccactgggccctcccgccaagcctcaccggctctgccatccatgaggtccctgcctgcactggatagggattattggagcctctgcagggaaagggaacagaagggaagggaaccaggggcaagcagaggagacgagaagcagcaggagaccccaggaggaaggggcagggaggcaatgattgggggagaaaatggaaaagagggcgaagggaaaaggaagccttgttttactcaaggggtgggttcaaatgtcaccagctgttgctccagggcccctggggggaccccccaaaggaggaggaagggggtggcccactctgagctatcttgtggtggcacgtggttaattaactcactcatagtgctggagccagcaggagctgtactatcggtaacagatcagagtggcccacggacccccaagcccaggcccatggcaaacacaacggaagttgcttcagaatgcctgctcaaggatccgaagggcaatgtaggaactggttcagaaactggggccttcatggatcagagaatttctgaaggaggaaatgggattggagtaccagcatgagaagaaagttcccagaaagacaccatgggaaacacaagtgcccacatattaaagacgttcctgcacctagagcctcatgccaagtggcctgcagacaactgcctgagaacaaaagtctgcagaccagaaactgcccgaagaggcatgaaaccagaagctttcacctcatccggcacccaagaaggccccagtgccaactccgggagcagaacctccacactcttcacccgggaggcacagaaaattcacatgcccctggagagcatgccaaccaccctttccaggaatccactggcctgatttggcttttccgccagtgtggccagggctggctgaccctggaacccataaactaagtgtactgggggggacaaacgagagaggacacggcagtctgggaaggataaattcacaaacatgagcatccgtctccgccacctgattatcttgagtgtttctgagaccccgtgttgctaacaagggccactgttcattgagctgatgatatgttgtaggtaagactgagacacagctgagacccaaggcagcatgtggcctcctcgcaaagcaggcatccggagagttgatgtaaggccacatccgttccttgaagaagcacttcctaatactcccatcttccaataggaagctagtggcactggccccaacccaccctggagggcagaggccttggattttctggggtgacaggagtgggctattgggtgacacatttgctaaggcaattggcttc

SEQ ID NO: 474207 - DNA, 574 bp, Homo sapiens
gagggtgagatggacatgaggcctggagatgaagatgcagacgtcctccgggaagagagccgggagtatgaccaggaggagttccgctatgacatggatgaggaggccacagtgcacatggcattcttgctgtcctggagagttgcctttgtcttgctggagcgtgtacgccctttccctgcagtatataagccccaggtctggggagtaacagtgcagagagccacctgtcctgtggccgcccagggccacgcttccatgtcaccgccctgcatcaatgccttcctgagagggggttttgggacctccaccttggagaaacccttcaactccacctgctcttcccccagctgggagctgctgctgctgctatctgaaatcatggtggagccatggttcagggttaagaatagttctggacagaaatatcgttacaattaaacattaatcaggctacactttgacccacttccttgtaagggaaagtcccatagcatgagataccaaccatctgcaccccactgttcctctagacaggaacttccctgctgttagaatcgtaaggcttctgttt

SEQ ID NO: 474208 - DNA, 710 bp, Homo sapiens
cagcctcacagggtgacctgcttcagctcccaaagccatgctgtggctgaccagggtcaggacccagacgaacgaagccactgacgacccgacaggccacgtgacttggcacagcgcagccctcaggatcagggtcctatcagagccctctggggatgctggttactgccgaggaaacgagaaatacatgcctccaaattatatgaaaggcaagaaaaccacccaagtgccagtgactcacaggagctggggtgggttcaatcaggatagggaactcctggagggccttcaactgggcggcaagttgatggcactgctgtcaccctgcaggaaagacccggctctcttccaaagcctccccagccatttgcaagctcagcgtgggaagcaggctgggctgagcacgtccagggctcccaaactacgctggagccaaaatccaggactcccgcctgaattgggatccttggagcggggtgctggagggaatgctgcggcctctcaggtctgtgaccgcgtccacgccaaggcttgctgcatgcaacccgtaagctgagagttgccaccatccagacaccaccctgtgcagcggagtggggcagggcaggactgagagacggtgtctgccctccagaccaccttgcaggcccatgctgtggggctcagtctccctcaccctggggcatggatcaagcaggcctgtcccctct

SEQ ID NO: 474209 - DNA, 2611 bp, Homo sapiens
gagaggccgtggagtggatctagatggtctacaggggatgcccagtgaggctccgggcggcggcaccttccgggcccagcatggctcccatcgcgccttcctctgccgtgtgctgcagggccttggccggcatctccacgtgtatgggcggctcgctggggtgcagcccagatgcctcctgggaccgctgtgccttcaccgggctgcgcttgtgcacttgtctgtttacaagcagagccggccgtgggggaggcgaggtgcccaggggtcacaggactgccaaacacgtcccttcctctacctgcaggcagcagcagcccccatctccgtgtgaccgggacgcccatccctgccagagggcccgtgcccgtgtgaggggttcaaagcgctgctgtcactggcctctatctctgggaccccatcaccctattgttcctatggctgcttgggagcccaggacggcaagagcaccccctccagccccatcccacggaggaccctggcactctcaggtggagcccttcatgggtgcacgtcgaggacatctggaaaaaagcatcaccagtaactgtgataaagacttcggaacagtcgcactatgtgcacacagaggctctttcaaatcaatgaaagagctctgcaagggtggggcggattccacggagctgccagcgagccagcgagcgtggacctcactggaaattccacgcatgcaaatgaaaagaacggtgcaacaccgtctttctctatcaggagcaaagattgaaaagaactttggggcttttcctccgcaggttgcctgaggctccagctttgcctgtaagagggctggtctggggggacatctgaacccaattcaggaacacctcacaggtctgccagcagggctagacccggggtgagatccagggcaacagggtctgcctgggaagctcagctccggcactgcctggggcgtctctgcctacacaggaccattcctctcgcctggactcctcttggagtttgccaaggctggcctctgcagaaataggagactcctggaggaagacagtggacttcagcaagctgcaccaaggagaatccacagcggcagctgccctgccaggcgcgggatctcggtcaaggtggatcaacacagcctcaggtgtgtgctctgccccactgagatggcaagtgcattcttttctattcctacgaggaaagagcatccgaaagagcctgccttcacataggatgaataacagtggaccttggctttgcctcagtgttatgtgctaataaaccatgtattctatgccctaaggaagcccagagagaactggacaagctggatatcccaaagagcatggcactggcccaccacattgattacattgcgctggccgggtgctaaccaagaagcagctaacacactgggagtcttggtaagatgcctgagtgcctgcagctggcagacaaatcctacaaagattctgggaactgccactaataacactcttggtggggaggtcccatatcccataaccaggagcatactgggcctcctgtccacagcaaagagccaattactgcatcttgcatctcccatgaccaagagagacagacaatgccagtacgccttctggaggcagcacgttccacacacatgaagactactccagcctatgtaccattgataggagaagctgtcggccttccctgagcctgcagcaggtcgaggctgcagtgctggcagccctgtgactcaggccctgcagctggtcggaccctgtgttatgagaggtatcagacgtgggaaagcaatgctgtgtgtttatggcaaaccactatgccagaatcacagtgcaggcccctgggattcagaaacaaagccgtgccatctgcggcagaggattctgcgaaaaattctgaaaagtccctgttgatgtgctcctggggcctggggtgatggaatacctgattgtgcatgtggaactgctcagatgagctggattctgtctcacccctgggtcatgaggttggggactcagaaataacccatcacaggtgggagtgtgcgtgtggcagcagcagaagcaggagcaggaggccaagcagcggcagctgcccagtacccccccccaccctccacagcagtccccacagccccagtggaggaaccttctggtgaactgaggagggagggacaagcccggcctcagttcatggaggtgtctgctctgcctgtggggccagcccaaatcgcctggctgccatactccagtctcagcaagctgccctttaaagagggtgatatggtttggctctgtgtccccacccaaatctcatcttgaactgtaatccccaggtgatgagggtgagacctgatgggaagtgattggatcatgggggctgttttccccatgctgttctcgtgatagtgaaggagttctcatgagatctgatggttttataagtgtctggcaattcccctgcttgcacttgtctttctcacccaccaccacgtaagacgtgcctgcttccccttccgccatgattgtaagtttcctgaggcgtccccagccatgcagaactgtgagtcaatgaaacctcttttctttataaatta

SEQ ID NO: 474210 - DNA, 567 bp, Homo sapiens
ggtgtgatcgtagtcatggcggcagttctgaagcacacacagatctaccttatcttccaagggctgttcctgaaaggctggcaaagccaactttccccatttgctggcgagtgccactgtgttcacagcaacttgggtgcttctcagtgggaagcactggccccaccggctaacgcttttgccattgcccgtgagtctgtaaacacgcaattgtactttcagccaaccctactttcgtgtgaagcatttcgtggcattctgcccccaggaggattttccttctgcattgtctttgagggtcacctgctgggtggcagtaccttggcccccacttctcacttgtgtagcctacagccagaccctctgctaactgggcctgccctccccttctccatttgctggccagagaaacccctgtggccacaggtgtggtggagggagggctagtgaaggagcgggacagcttctcttaagtctgagctatgtgtcttccaggtgaatcaggccagctctcccatgtgaaaacttccactctacaatggaattctgttgcacgtatccaagttt

SEQ ID NO: 474211 - DNA, 2122 bp, Homo sapiens
ggctggctggctctccaaacttccatgcacatgaacgttggaaccacacaattcagcaccgcatggcaggtggcttggtcagcttcttcactgctgggggggaggaataggaacctgggctccttggagaaatggctgattctacaattggggcaggaaatatacaagatgagcctggaatgccctgtaagtgccagaataaaaagaagtgctcaaaaacacaggaaggaaaacaggctcacttatggggtgtgtcacagggccacaggatccaaccgaaggagctcccaatggccaatgctggaacactgggagcaacatttagtaaagttgtatggaattgtagcccacagtatgagtccatacagaataaacaaaaatggtggaagagacaaatacgtgggggagaagaaacaaatgtcccatgccagattccaaatgacgtgggcagacgccccctcgaggaggtgctgtggaccccccaccctaagcgtgggctgtgcacagtgactcccttccagagcacacggcctggagatagggagagagagggtgaccttacagtggggaagcctgactcacagcacctcagccaggtggccaaggtcaacgtcaacaggaaggactcctttggaagtgtgtgcctttgacatgatttggccacaatcgccctgctcctttgtggtcttccccctcaaacacccttaaccccagtctaatcaggagaaaaacatcaggaagatactaactaagggacagtctacaaggtacctgactaggcttcctcaacactgtcaagatcatcaaaagcaaggaaaggccaggaaatcgctacagccaaagggagctgaggacacagaacgactaaatgtcatgtggggtcctggatgggatcctgggacagagaaaggacatgtttaacaaaaaggaaatctgaataaacatggacttcagttaataataaagtatcagtattggttcatttattttaacaagtgtaacttcctgaaggaaggtggtaaaactggggtagggtctatgggaactccatgcactatccttgcaagttttctgtagatctaaaatagttctaaaataaaaatttgattttaaaaatataattagtgaattaaacctgccactcctgggtattactgcttagaggggaccccaccatagcactcagggcacccagtccccccactgaaatggctcaccgggggcccagctctgccctcagggttctctccagaacatttctcatgaagttttcgggaagttactctctttctaccaaggttatgaggctggtagggtgtgagctctgggcagccagccaaccctgatactggccatacgggaggggaaggcctttgggggaggggaggggagagagggaaattgagtccctgattctacttggcgtctaaagccagatcaatctctggactatttagttatgagtcaaaacatagcctttgcttaagtttatttgacctgagcttccttcttctgtagctgaaagcattctcacacacctgagatacgagcaagatttgctagtcctgtgttttagacaggaaaagaaaaaagctttggagagccatgtatggtgtcatccaataatgaactgaaatttgtattgggcacctcatcagtgaaaagctcaaatctgtttgtttctgaagcaccgggcttccctgtgcacagtggccaaagctccttgttctttgtttattaggatggttgaggaccggcttgccttaaaataactaacgttttgctggtgggctattagatttgctcctaccactgtgctttgaaagggagtttatctgaaagcagcaatggccacgaccgcccgccccccgcccccccccccgccgtccaccgatgtgtttcagaagcacagtcacagagctactcccgaacaaatgtcaaataaatgtagactgtggttgccaggaagacagccttggaacggtgctcgttctgtgcccacagggcagcccagtgcatgctttggctgtggggtgagcaggacccatgaaggctgcaaggaatgacacggggggagggtgctccaggcctctgcaattcttcggagatttcagctgccccc

SEQ ID NO: 474212 - DNA, 957 bp, Homo sapiens
ctctctggaaaacagcaggtaaccagtttaggcgaccgagctaagggcctttacacctcctccttcttgagccttggactttggtgcccaccttccatggggcagacaaagggtggtgccctgctgggaccggagccctgcctggaagccagagtaaatggcacatccattttggactggtggctgctcttgcaggtgctggagctctttgtcctactggtgcagctctccagcgcctccgtcactctcgccaacaggtttgtcacggtgcaggtgttttcttttcctctcctacaagctgacctagtggagctcgctgggggaggtcaagtgtctttcgtccccgttgcatcacaggacagtctttattattagccaagggagggggtaggtgggggagaagccaatcaagcctttggagggtctgcagctgaatcggcactcagacccccgtggtgtgaaatggggatggggggacgagtgggcgcagccactgggagcattgatggaggtgaagagaggggagcgaagcagctgagcagttccaaaggccgggaaggtgccacctgcccagtgagccgtcgggatgacccagggcaggcactgcagcctctggccaagcaggtgcccaggcagcactggacctgggggtcacccctgggagaactgtcactcatgcccacggctttggatgttgaccagtctggtgtcatgaagtcagacctgagtgtcacgcagagacaggcgacctgggacgaagctcttgggcgcggacacagcgttcctcagtggctctttgatcgcagccctgcgccccactgtgtagcgttgagaggccacttccaccagcctctgtccagctccacttgtgaccaggtgcaagaggttcccgagccagcatcctgaacgacattttgtcccatgtttagagtcgaatcctgtgatgtctttgggtaa

SEQ ID NO: 474213 - DNA, 649 bp, Homo sapiens
tgctttgtgaatgacacagtgggccttcccattcctgtcattggccattcgaccttcaatactaattgcctggggatctccaggccccaagagtgactgcagtgaggtccatgctgttgggggtgacagagcagccctggaggtggccaaagagaagcaggcagaggaagcttctccaagcaggcttggaaagaaatttccgcatatcacttacgtcactcttgccactagaaggacaatttttacggtggaaattttgcgtcttttgaagacatttgccagaattctacttttgaaggctgccccttttgacagtcagttactgaagaaactgtgggacattttcaaagccttttatattaaaaaaagacacaacatactgctgtgggtctgtgtgcagggaccaggaagggcacagctgccacggttctgtgtcgcagatgctgtgggaagtgccttaacacacacagatgtgcttcatgcaaccgggtgaggaacatctctaaaacagtttacagtcaagaaaattcagtgccaagtaggttgaattcgttatccaagatcacacatatgtcctgacagattcggggttcaatgaagaattatgtatcatgaattatagggctgtattttaattttgcattttaaa

SEQ ID NO: 474214 - DNA, 705 bp, Homo sapiens
ggcagaagccccccccgaccccccccaccaggtaccacaggacaggagtcaccaggtagacatcaggccccagatggagctagcaggccaggcctcaccagtgatcccaccagggccacatctgcacattgtccttttccagccggagcctctggagctcattgagacacaggcacatgctcctgcttcaggtgcagaaatacagctatttccagtgccagctgttgagccagtgccagcaccaggggcagattcccctccagggacagcgctggagctagaggaagctccagagccctccttctgctgccctgggactgcccaggaccagcccagtgaggagctgcctgacttcatggcacctcctgtagagccacgggcctcagccctggagctgaaagtgtggctggagctagaggtggtagagaggggtgaccagcacagctccagccagaagctcccacactgctcccagtcctgggcacaagcagcagccctgctgctgaagagcctgctgctactgctgctgggggtatttgcatgcctgcaggaggtgctggagagcaagaaaaggagcctctttgcggaaagagggatcatgtaggttcatttctcaggcagatcagtcaccttttgccatcaaagttttagcatccatttccaaaatttggtgtacaagttggtattttggtgtttttagctaat

SEQ ID NO: 474215 - DNA, 1384 bp, Homo sapiens
gggcagcccggttcccaggggaccctgcgggaacgacgacgttgtgggcaggtcctcacaaagggcatggcccagtttctgggcatagatagggaaacgttccatgaccaccccatcccacactggggacctcgagcccctcctccacagcacccttcacatgcctctgcataagcagtgctgcctgtggccgccacagggccctaggtatgggcagagagtagtatcccccacacagcatgctgttctccctgtacccccaggggctagttagcactctgggtgccctggactctggggcctccctcagcaaattgtggagggtggcctggcatgaatccaggcagatctgggaagggacatggcaagacagcccctggaagctgtgtccccgggtccaccgggatctggcccctgcagtcatgttcatccactcaatcactccctgcagcccgtctctctggaaggtgcaggaggaggggctacagatgtgggggctggcacttgtggcagagggttccaaagtcatgggcatagagaagacaggttggcaggagcaagggcagaatgggagcggggtcctgggggtcctgttgggccctgaggaggactgcagaggtgtcgggacccggcagggcgggggtggaggcggagagtgtgactgtagcttcacagtcatcagagtggacgtggagatgcaggcagagtcctcgaagctggctcaggggtctgtgtggggagggggcacacccagcaggggcctgagggtgcggctgatccaccctgaggtcccggacacactggtggggacaggaaggctcatcttggagctgctcctggaggggccatgtgggtcacggcccctggccctctgctcagaccacagagcacaggacacttgtccagcctttgctgcgactgtgctgcttgctctgggagcagctgctgctgggcctttggaggaggaggaagggtggcctggctgggacccagcccctgtgcccagcctcttagaaggggagtcactttccatgcgctgccccccaccctgctccttgactgtccgatcgcacttgcccatgctgtcttcgaggctgagcccagtctcttacccactgcagaatctcatcgccgtggtcccttatgcctagtgacacggtcctggatagtcttccccctgctccttgacggtccgatcccacttgcccatgctgtatttattgctacaaccttccctcacagcactgattttgctgaatccaaaggcttttggtatatgatgtttccattttcatttgtttgaaaacattttcggattttcattttaatttcttcattgaatcagtgctcattcaggagggtggggtttaattttcatgtatgc

SEQ ID NO: 474216 - DNA, 1254 bp, Homo sapiens
aagccctgtgttccttgctggcgatcctgccttcaatttgaatgcacaggtaccacagcaagccggtgctgtgtgctcccaattccaggatgtcttgcagctcagccagtgcactgagcacaaggactctctgtggggcccaggagcagggagtcacccctttggggcccacaacatccagttgtgccccagactcctgtccagagaagatcgtgttgagggccctcctgaagaggggggcagggatgcctgagcaggacaaggaccccagagtccaagagaatcctgatgatcagagaagggttcctgagggcaccggggatgcacagtctgcatttaggcccctgtgggacaatggaggcctctctcccttcgtgcccaggcctgggcctctgcagagagacctccatgcccagaggcaaggggagcctctgatgctgccacctcccttacagctggggtctggggtcactgctgaagacctggacctggagaagaaggtggcactctggtgcaaaagcgcactgcgggttctgtgagagatgacactggtattttggtaggggttgtattgaatctctagactgctctgggcagtgtggtcattttaatgctatgaattccttccatgagcatgaaatgactgtccatttctttccgtcctcttaaactttgtcatcagtgttttgtagttttccttgtagaaatcgttcacctccttggtaaaatttcctctgtggcatatcatttttcattttgttgctattgtaaatgggattgcctccttaatttctttcctagaccattattggtgtataaaatgctgctgatttttgtatgttgattttgtatcctgcaaatgactgtattaatttatttatcaagtctagagttttctggtggaggctttacatgtttgtaaatccaagatcacatcttcatcagacaaggataatttgatgtcctcttttccagtgtgggtggcttttatttttttctcttgcatatttgtgtgatgtctaataaaagtggaaaccatttcagtgcgtgcctgtctttgtccccgcactggctggcctctctgaaccatgagaacttgggttatgcgaggctctgcctgtcagttgagcatcatgaagcagctctcttctgttccagtgaggccgaccaggctccaacacccctgccacgggtctgaccattctccccctcacccagaagtgacctccaacccgatcctgctccctgtcttct

SEQ ID NO: 474217 - DNA, 704 bp, Homo sapiens
ggctttccctgggatctctgtacccgctgagaaccgggagctgcacacagcctgtccagcatcctgggaactcaccctgttgctgccacttgtcctgggtcatcctgcggctcactccttgccattcagacccctgtgaggagagcactggctagctccaatgtcatgctcatggctgaggagaaacaattatctcgctgggaatgagtgcaagtgggagaatggaaggagtcctgagcggggctgactgcatgtccgcaggggcccggacaggcagcacagcggcctctctaccctcgaaggtctgtttcttgtctgcttcctccttgggagtggcaggccctggtgaccggcccaacctcgggggcgcccagcagctgggtcaccaccacatgcccaagtctggccctctcagctctgcctgtctcctgagctggagaacagaccccacccctctgtccccggcactcaactcccatccagccgatctccctgaggacccccccaccgccaactcccacctggatcctctggccctggcagggcatcattctttcaaaataatccatgactgggcgcagtggctcatgcctgaatcccagcactctgagaggccaaggtaggaggattgcttgagcccaggagtttcagatcaacctgggttgtaggggtgggttgcccctacacacctgtgggtgtttctc

SEQ ID NO: 474218 - DNA, 2154 bp, Homo sapiens
ttgtgaagttaatttgctcagcaactggccaaagtctataaggatggctccccatgaggacaccgtacacaacatcactaacgaggatgcctcacacgatatcactaacgaggacgctgtccacggcatcgctaacgaggccgccgcccagggcatcgccaacgaggacgccgcccagggcatcgccaacgaggacgccgcccacggaatcgccagcgaggacgccgcccagggcatcgccaacgaggtcgccgcccagggcatcgccaacgaggacgccgcccagggcatcgccaacgaggacgccgtccatggcatcgccaacgaggacgctgcccacggcattgctaacgaggatgccgtgcacggcatcgctaatgaggactccgtatacgacatcgctaatgaggatgccatatatgacatcgctaatgacaccgtacaaggcacgctaacgaggatgctgtacacgacatcgctaatgaggacaccatacaaggcatcggtaatgaggacgttgtatatgacatcgctaacaaggacactctacaagccgtcgctaacaaggacactgtacacaacatcgctaatgacggcaccgtacaagacatcaccaatgagggcgctttatacgacattgctaatgataccgacaaggcacgctaacgcggacactgtacacgacatcgctaatgaggactccgtatacgacatcgctaatgagggtgccgtatatgacatcgctaatgacaccgtacaaggcacgctaacgaggacgctgtacacgacatcgctaatgaggacaccatacaaggcatcggtaatgaggacgctgtatacgacatcgctaacgaggacaccatacaagccgtcgctaacaaggacactgtacacaacatcgctaatgacggcaccgtacaagacatcaccaatgagggcgctttatacgacattgctaatgataccgacaaggcacgctaacgtggacgctgtacacgacattgctaatgaggacaccgtataagacatcgctagtaactatcgcaagaacaaaaaaccaaacaccgcatattctcactcataggtgggaattgaacaatgagatcacatggacacaggaaggggaatatcacattctggggactgttgtggggtggggggaggggggagggatagcatcgggagatatacctaatgctagatgatgagttagtgggtgcagcgcaccagcgtggcacatgtatacatatgtaactaacctgcacaatgtgcacatgtaccctaaaacttaaagtatatataaaaaaaaagacatcgctagtgagcacgctgtatacgacatcgctaatgaggacaccatacaaggcatcgctaacgatgacgctgtacacaacatcactaatgatgacaccgtataagacatcgctaattatgacgctgtatacgacatcgctaatgacaccgtacgaggcacgctaacaaggatgctgtacacaacgtcgctaatgaggacagtgtacaagccatcgctaatgaggacactgtatatgacattgctaacgaggacactgtacaaggcattgctaacgaggacgctgtacacaacatcgctaatgaggacaccatataagacatcaccaatgaggatgctgtatatgacatcgctaatgacacccacaaggcatgctaacgaggacgctgtagacgacattgcttataaggacaccgtacaagacatcactaacgaggacgctgtatacgacatcgctaatgaggacgttgtatatgacatcgctaatgaggatgctttacaagacatagcgaatgaggttgctgtatatgacatcgctaatgaggacattgtatatgacatcgctaatgaggacgctctatacgacatcactaatgaggacgctgtatacaacatcgctaatgaggacgctgtatatggcatcgctaatgaggatgctgtatacgaattcgctaataaggacgctgtatatgacattgctaatgaggacactgtacaagacatctgtaaaaaagaagatgctgccaatgtaagacacttttctttgtcttgaacagaaatgttactttcctggcttctttccaatcagatgtagacatgaacatctgccagtgtgcattatc

SEQ ID NO: 474219 - DNA, 881 bp, Homo sapiens
gttcctcttctgctctcaccgcttttccttctccctggtgctgcagagcatcccacagtttgtgtgcactgcctccccacactccctcctcatctcactctgcctggctcatgtctccaccatcccctcttgtggctcctcaggaggctgcccctgacctccatcttccccagggcagtgggggctggggtgggaggcgggcagaggctgatccagcagttggaaagggtgcagcccaggttctcctaactcaggaagagaaggggggaaaggaaggccttatccaaggatatagcacgttctctttggagatggatgaaatgagcgtgtgctccttgaaggagtcttcctggctgtgcccaccaacgggcaggcagtggcggcccccgtcggtcaaagctgtgccgctggtcctttggttcggcaagcctgccagcagcacagcctcggggacgtctgctccttttgcagcagagcagatcttcacctgggtttccttcccaccatcactttctgagctgctcagcgtcagaaaaaggactctggctgtcagagaggagaactatgaactcacctactcattcatgctgcccagtccagtgtgctttctgctacaaaaacaacaactcatcccctgctacagcaggctgagcaaatctgcctcctcaggcaaggagccacactgagccctctgccaaatggaaggaacaaccccaagttccagagcctagagggaatgaattcgcttctgtttaggatttctgtgtcttcgcttgagaaagtctaagtacttgtagacatagaggagatgatgtgtcccactggatgtgtgttgaggaatccatttgtgggcataatagtgctaaacagtggttacatac

SEQ ID NO: 474220 - DNA, 737 bp, Homo sapiens
tctagtagtttgtagagccattttattggaagggacttcagaaaggaattagtttacctactcatcagattaccggtgaccgctcgggatgttaagctagtgaagacaatgcaaggtggcctgaagcagcatgaggcagaccatggtcccgacctgcattggctggtgctggctgcagctgctgatggaggctacaaacacagctgtgcaaagcttaaaccatgtgaccctgaaagcacaacactgaaagcctctggctgtgccaagaggagagcccaccgcaacctcatcaatccttacctgaatgcatttaagattccagaaagcagaagaccgattccggaccacacaggaagcccgacgcccgacgagaacgggcacggaggcgctgcctgcgcgcagctggtttacattcccttgctgccgcagaatcacgcggtgcctcgagcaactcctttgaccctcttagaacccattccttttccaaggggattagttccttccgtgcaaaggcagacagaaacgcgttctgcccctgtccatttagggagctcggcaaacaccacgtgccgctcgctgctggaaaggcaggccgaggacaggacttgagttgccttttagggaagcagccttaccagcaattccagtttgaaaaattactttgccagcacagatcaagacttggctccttctgtctggaacagtatgaggacgacgtctttggggttctaccctgc

SEQ ID NO: 474221 - DNA, 751 bp, Homo sapiens
gcaaggctgtgcctctaggagggcctgtgtggcactccctgaggtgctccccttcctcccgaccgccacctcctgcagggctccatgaagaaggagttcccgcagaacctgggaggcagcgacacatgctacttctgccagaagcgggtctacgtgatggagaggctgagtgccgagggcaagttcttccaccggagctgcttcaagtgcgagtactgcgccaccaccctgcgcctctcggcctacgcctacgacatcgaggatggtggtgtgtgcagggtggccctcgtcagtgatgagcctgagactgtctccatccctgcagcagcctccaagccagccatgcatcttccacttggaccactggtctccttgcctctgttacaccccagtctgtttccacagagcaaccggagggattttaaaaggtgtgacttggatctcaccagtgtcctagccgctgccgtgcagacagagcccacaaccttgtcccaggtggagagagcattgcgtgtccaccccagcctctgccgtcagctgcccccagcatgctgcactctttgctccagtgtctttccatcccataagcatgatgaagccactgctcccttaggacgtggctctgctgtgtcctctcctggagcacaccccctggtctccacagggtgagacgcctgtgtttcacatctccatgtggcgctcctcagagaggggtctggctcttttgatagaaggcagctgcccaggcacc

SEQ ID NO: 474222 - DNA, 702 bp, Homo sapiens
cgcgggcacctcgcacccgctcgctccccttccctcctcacccgccactcccggggtatttctcgtaatgctatcccttcccttgccccccaaccccaataggccacattgtgtaatgctcccgtccctgtgcccatatgttctcattgttcagctgccacttatgagtgagaacatggcggtgtttggttttctgttccagtggaatcctttccccattgctagtttttgtcaggggcagggaaaagctgaaaattctgaaaatcagagcgcctcttctcctccgaaggaaagcagctcatctacagcaacggagcaaagctggacagagaatgactttgacgagttgacagaagaaggcttcagacgatcaaactacatgacacatgcacaagcttcagtagccaatttgatcaagaggaagaaggcatcagtgattgaagatcaaatgaatgaaatgaagcgagaagagaagtttagagaaaaaagagtaaaaagaaacaaacaaagcatccaagaaacatgggactatgtgaaaagaccaaatctacgtctgattggtgtacctgaaagtgacgggcagaatggaaccaagttggaaaacactctgcaggatattatccaggagaatttccccaacctagcaaggcaggccaaaattcaaattcaggaaatacagagaatgctgcaaagataatcttc

SEQ ID NO: 474223 - DNA, 481 bp, Homo sapiens
taaaatattatatctttccaggtagtgttggggtgatcagatgcaacaccagaccatgagggctatgaagtctggtggagtgaaaggaatgagaaaagacaagttaagatcagacccctctgctgcagctctactggagtttgctggaggtccactccagactctgtatcaccggcagatatcaccagtggagtatcaccagtggagactacagaacagcaaagatggatgcctgttccttgctctggaagcttcatcccagagcagcacctgccagatgccagctggagctctcctgtatgaggtgtctcagggctcgggcgttgtgctgggagatatgctgctttcttcagagccacaggcagaacgttttgtaagtctgctgaaactgcgcccacagctgccccttcccccaggtgctctgtcccaggcagatggggttttatctataaacccctgactcggactgtagccttttttt

SEQ ID NO: 474224 - DNA, 530 bp, Homo sapiens
ggcctggatttcctcatctgtcagggccaccagaagcaagttgtctccagcaggaaaggccagcaatatgcctttactgacctacctcatggatattccttctaaggtgaagaacaagctgctacatttggctcctcctacaaccaagaaagaggcacaacacctagtccaggctgctgtgcaagccactctgctacttgggacatatgacccaccagatccaatggtgcttgaggtgtccgtggcagatagaaatgctgttctgagcctttggcagacccccatatgtgaatcaccatgggggcctctaggattttggagcaagaccctgccatcttctgcagataactgctctccttttgagagacagctcttggcctgttactgggctttgatggaaactgatcatttgactatgggtcaacaagtcaccatgcgacctgaactgcccatcatgaagtgggtgctttctgacccatctagccatagagtgggtcatgcatagcagtattccgtcatcaaatggaagc

SEQ ID NO: 474225 - DNA, 508 bp, Homo sapiens
tgttacttatgcaaccgctttcatggttctgtcctctgactcactggactccagacttgactctctggtttcctggttctgccctaaacaaggctcacacaatgaatttaagcttcatgggatcggggccattgtctattatttgcattgctgtatcccagtgtattgggagtacctggcaaacactatccaagaaagaaaacagcccttggagtgctccagaatccaattaaagaagtgcaggaacacaacgggagaaaagcgcagagtaaccatgcaggaaggatggctgggagatggcacatctgagagttttgagacagccaggggcaaagaagcaggaggcaagtgttaccagctaggaggcagggccactgcagtccccatggcctgctctgtggaggaccctgcagccttggcagctgaggacctcagtatcccccaaggcagctccactctacagctttcctaatgaaggccccttagtgttcattaataaggatcacaa

SEQ ID NO: 474226 - DNA, 1505 bp, Homo sapiens
tgctctcagctgcctgcagcacatctccagttaactactctccttttgagagacagctcttgtcctatactgggcttttgtggaaactgaacatttgactatgagtcaacaagtcaccatgcgacctgaactgcctatcatgaactgggtgctttctgactcatctagccataacgtgggtcatgcacagcagcattccatcatcacatggaaatggtgtataagtgattgggctcaagcaggtcctggggggcacaacggccatggtggcagggatggaggctatgcatggattcagcaatgtggacttccactcaccaaggctgaactgtctgtggccactgctgagtgcccaatttgccagcagcagcagagactaacagtgaaccctttgtatggcatcattccctggggtgatcgaccagctacccagtggcaggttgattatattggacctcttccaccatggaaaggagagaggtttgtcctcattggaacaggcacttactcaggatatgggtttgcctacctgcatgcaatgcttctgccaagactaccatttatggactcaaggaatgccttatccactatcacggtattccacacagcattacctctgaccaagcactcactttacagcagctggattgatagaatggtgggacggccttttgaggtcgcgattacaacgtcaactaggttacaatactttgccgggccggggcaccatactccagaagaccatgtgtgctctgaatcagcgcccaatgtatggtattgtttctcccatagccaggattcacagatccaggattcaaggggtggatgtgaaagtggaaccactcactatgatgcactagcaaaatgtttgctttctgttcccacgacattaggttctgctttactagtcatcttagctccagagggaagaacgctgctaccaggagacacaataatgattccattaaactggaagttaagatggccacttggacgctttggggtcctcctacctttaagtcaacaagctaagaatggagttacagtgttggcggcagtgattgacccagactatcaagatgaagtcagtccgttactccacaacggaagtgaggaagagtatgcatggaatataggagatccattagggtgtctcttggtattatcatgcactctgattaaggtaaatgggaaactatacccaatccaggtaggactacaaatggtccagatcctctctgggtcacgacctgctgaggtgcttgctgaaggcaaagggaatacagaatgaaaagtggaagaaagtagttatcaataccagctacgaccacctgaccagctgcagaaatgaggactggaactatcatgagtatttccttcttcttttgttaaaaacatgtttgtgcatgtatgcacttgtactaagaaaatatcttcatttcatttcccttttctttatcagaaaaatggacttagacttcccacaagccttccagaaagaactc

SEQ ID NO: 474227 - DNA, 2601 bp, Homo sapiens
tgcttctggggtttgatggacgtgtgatgctatgttgttaattggagatctttctaactttttgataactaaaaaggcggcttcagactcctccaaagaacaagtggccaattcgagggaatcctccccgtcaccaaaagaagtaaacgacagtccgagagccgccaccaagtctcctgaatcccagaatctcatcgatgggacaaaaaaaccatccctaaagcaaccagacagtcccagaaacatctcaagtgacaacagcagcaagggaaccccgtcctctcctgcaggatccacaacagcaatccccaaagtccgcataaaaaccattaagacatcttctggggaaatcaagagaacagagaccagggtattgccagaagtggatcttgactctgggaagaaaccttccgagcagatggtgtctgtgatggcctctgtgacatcccttctgtcatctccagcatcagccgctgccctttcctctccccccagggtgcctctccagtctgcagtggtgaccaatgcagttttccctgcagagcccacccctaaacaggtcacaatcaagcctgtggctactgctttcctcccagtgtctgctgtgaagacagcaggatcccaagtcattaatttgaagcttgctaacaacaccacggtgaaagccacggtcatacctgctgcctctgtccagagtgccagcggcatcatcattaaagctgccaatgctatacaggagcaagctgtcatgatgccagcatccagcctggccaatgccaaacttgtgccaaagactgtggtgtcgtccttgcagaattctgtggtggaaactttcaacaaggtgctgagcagtgtcaatccagtccctgtttacatcctaaacctcagtcctcctgccaatgcagggatcacattactgatgcatgggtacaagtgcttggagtgtagggactcctttgcacttgaagagtctgacccagcactacaacagatggagcatgtgcatcgaagtaacgtgcaaccattgtacaaagaacctcattgtttacaacaaatgcaacctcctttcccaagccccaatagttcttcttcatcttccactcttcagagccctgtgggaactggcatacacactgtcacaaaaattcagtctggcataactgggacagtcatatcggctccttcaagcactcccagcaccacagccatgcccctagatgaagacccctccaaactgtgtagacataatctaaaatgtttgaagtgtaatgaaatcttccaggacaagagatccctggctacacatttccagcaggctgcagatatgagtggacaaaagacttgtactatctgccagatgctgcttcctaaccagtgcagagaatccatcagcacaaatctccctacacctgccctgagtgcagggccatctgcagaaaaaagaggacagcaaatccatgagtgggaaagagaaactggaaaagaaatctccatctcctttgaaaaaaaatcaatggaaaccaagaaagtggccagtcctgggtggacgtgttgggagtgtgaccacctgttcatgcagagagatgtgtacatatcccacctgaggaaggagcatgggaagcaaatgaagaaacacccctgccgccagtgtgacaagcctttcagctcatcccacagactgtgctggcacaaccggatcaagcacaaaggcatcaggaaagtgtatgcctgctcacactgcccagactccacaggtacttttaccaaagggttgatgctggagaagcatgtccagctgatgcatggcatcaaggaccttgacctgaaagaaatgacagacgccaccaatgaggaggaaacagaaataaaagtagacgtcaaggtccgcagtcccaagtggaagttgaaagaaccggttctggagtacaggcctcccagaggagcaataactcaaccactgaaaaagctgaaaatcaatgtttttaaggttcacaagtgtgccttgtgttgcttcaccaccgaaaacctgctgcagcacctctttgttgtacacaagttaaaggaacctcagccagtgcccaagcaaaatggggctggcgaagataaccaacaggagaacaaacccagccacgaggacgaatctcccaatggcgtcatgtcagacagaaagtgcaaagtgtgtgcaaaaacttttgaaactaaagctgccttaaacactcacatgcagacacatggtatggccttcatcaaatccaaaaggatgagctcagacgagaaatattgggatgcacgacgtcaaccaccgacttatcaatgcagccggctgtgtatcgcaattggccgttaccttaagcactgagccacatgggattagttcagccatttcaagaggtatatttaatgttggtagttctgctttactaaaatgcagtagagagggtaatgtaatgaaggctatgaaacaaagttttgaaaaaagcagtttccatggcaatttgatttaaaaaaacccacaaaactcttttcatatatttttttcaccttcagtttcaaatgagtttagggttaaattttcaatttttgcattttagctagaactgg

SEQ ID NO: 474228 - DNA, 685 bp, Homo sapiens
gcacacatgcacgcatacatgcatgcatgcacacatacattcagaacacaggtcacatgaaaggagctgtgaagagttcaaccgcaagggcagcagggcagaggccagggccactgaggcaaatgcaaaacagcggttctcacgttcccaggcagcctggaggggctctgagtggccaccatgtagccccattcccctctcccgcccaccttccaggggtgctgctggctgttggcttggcaactgtgctgttgatgggcctgggcctcctgctgagtccctccctgccccacgcctgccccatgcaggcttggaagactcagtggagaaggctaggacagcctcaggtgcctgctgagtatgtgatcctcagagacagcctcctgttctatgaagaccttggcccttggggatctggggaaggagctgactccaagaaggccatgagccggggcacaggtaccatgctggtgtgcagccaacccctcctcaacaatacttgttattttccctttactagatagtagttataggtctattcagattttctatttcttcatgatttagtcatggtgggtttcgtgtttccaggaacttgtccatttcatctaggttgtcttaattcgttggcatacaattgttcatagtactcttatagtcctattttatttttgtagacttgtcc

SEQ ID NO: 474229 - DNA, 699 bp, Homo sapiens
tggtagattcactgatggcttgcactggcacctcttaagaattatgctaaatctactctacccgtgctctataaatggattcactattgtagacgccactaagaacattcatgattcaccagaggaggtaaaaatagcagcattaatgggagtttggaagaagttgattctaaccctcataaatgactttgaggggttcaagactttagcagaggaagtaaccacagatatggtgaagacagcaagagaactagtattaaaagtggagcatgaagatattgctgcaatcttaacggatgaggagttgcttattatgaatgagcaaagaaagtggtttcttgggatggaatctactcctggtgaagatgccgtgaacattgtggaaagaacaacaaaggacttagaatatgccacgaacttagttgatagaggagtggcaggaaccaaacctgcaatatctccaaggtgtgcctgtacccctgaaagcagagctggagtaaagacttgggtgtggatggtttatttgggaagtgattccaagaagcaagagtgagatgtgggaagagtgagccaggcaagaaaaaaaaagccaaaataatgaaatgccattgaggctgctcccatggactttttttatgcgggacctaccgagaggctctggaaagttatccaggactgtccacctgaaacgtgagcctc

SEQ ID NO: 474230 - DNA, 503 bp, Homo sapiens
tctagcaagtgtggccacacaatggtcaagttggatttagatgatgttctctataaatccattctcctctcccgaaagggagaagagcacggtgtgatagggcaggaagagaagaaaacggaggagaggaggggactttcccataaacaggcagaagaaaaggcagctgtggtgtgtgatggacatggaagcagtggtgtccaatgtggggtcagccctagaggagagacagagagagagacagaaaagtccatcacctcttcctgtactgctatttttgagagtgatgctcctgagccccatgacccagtcaaatttgatgtccccttgagccagattcagtgctgggagtccagtgtgatctgcctggatcttgctgcattgagaacaggccagatcttgaccccaatacaggggctggatatgaacaggcaacagctgggtttctgagtcagaaagacttggttgattgctaattgcttagcatcaagtactacacagcc

SEQ ID NO: 474231 - DNA, 656 bp, Homo sapiens
gcacaggccatgctctgccctgcatgtcccagcctgggcccagcccttgccctaccatattcctgaccccagcctggtcctgccctgccctggcagtgccttggccccagccctgccttctccctggccttgccctttccctgccctggcctgaccccaggcctaccgagtccgtgaagcgaccctggacctgccttgcagtcatctgtcctggccctgtattgtccccaccatgctctggccccacactggccatgcttggccctggcccctcctttggccctgccctggccctgtgctatcttagtcctgccctggccctgaactcgccctggccctaccctcaccctacactggccctgccctaccctggccttgccctgccctggccctgcctttggcctgccctggctctggttctgccctggccttacccttgccctggaccctccctggccatgtttttactgtgtctacagtgattttgtaatatttgtgcacatataaaataatatttccaaaaatgtaatccagtgaggaaatatactttctaaattctagatttataatttagggtttaaattataaaatcattaaataagacaaaagggaaatatagtcaaatatccccttggaaaaaaaattaagtggcctct

SEQ ID NO: 474232 - DNA, 546 bp, Homo sapiens
actaagggggcgggatcgccaccatggaggtgtgcaagcacgtgcctgcgtcccggagacagccagactcaacggagaagctgagttcaagccccacatctccactaacccttgcttccagccaaagtcccaggactgactttcactggatccgtttgcgccacattcccctgcctgagccaatcaccacatccagcctggccagacctggctttcatgaagccccttcaggaagcggttggggtcatctcctccagaaggacatggggaaaaccagaaagtgggaggagggatgcttccttctgaaaaatagggatgcaattaccacaagagccttaatgatagaagccaacattcatgaatcccttaccacatgccagtggttacctatataccctggattgtggccctttcctccatttttaaagcacaccactccaatctctgcacagtgctatggtttgaatgtgtcccccaaagttcatgtgttggaaatttaatctccaatgcaacagtgttgagagatgggacctttaagaggagatt

SEQ ID NO: 474233 - DNA, 512 bp, Homo sapiens
ttgtcatgaaggcatagacacatgatgaacacactgctactgacattaatttctgcttttatctgcatagctggtacctccaggaaaaggagaggaatgagcactggaccttgtcaagaagttgttggtagtggatccaaaggcacgttttatgacagaagaagccttaagacaccgtggcttcaggatgaagacatgaagagaaagtttcaagatcttctgtctgaggaaaatgaatccacagctctatctcaggttctagcccagggccccttggaaagttccagggaaaggagcatagcgaggttgggggtggagtttgtagagactggctggctggctgctgacatcttcatgagaacagcaggtaccttggtgcataataacaggccaggttatattctcatccttgccctcataaagatacaggtctacagtctctgaaacctttgggctagataagttgtgaaatttaattacccaattttaggaaggtgagcattttgtattaa

SEQ ID NO: 474234 - DNA, 763 bp, Homo sapiens
cctccagcaaactccaacagacctgcagctgagggtcctgattgttagaaggaaaactagcaaacagaaaggaacagcatcaacaaaaaggacatccacaccaaaaccacatctgtaggtcatcatcattaaagaccaaaggtagataaaaccacaaagatggggggaaaccagagcagacaagctgaaaattcaaaaaaccagagtgccgcttctcttccaaaggattgcagctccttgccagcaatggaacaaagctggatagagaatgactttgatgagttgacagaagtaggttttagaaggtcagtaataacaaacctctctgagctaaaggaggatgttcgaacccattgcaaggaagctaaaaaccttgaacaaagattagatgaatggctaactagaataaacagcatagagaaaaccttaaatgacctgacggagctgaaaaccatggcacgagaactacatgatgcatgcacaagcttctgtagccgattcaatcaagtggaagaaagggtatcagtgatggaagatcaaatgaatgaaatgaaaagagcaacaccaagacacataattgtcagactcaccaaggttgaaatgaaaggaaaaatattaagggcagccagagagaaagaatttcatatccagccaaactaagcttcataagtgaaggagaaataaactcctttatagacaagcaaatgctgagagattttgtcaccaccaggcctgccttacaagagctcctgaaggaagcact

SEQ ID NO: 474235 - DNA, 580 bp, Homo sapiens
aggggtcagggtcaggggtcggggtcagggtcaggggtcaggaaaggaagccaggttgaagagggatggcaatgagttttgtgtttggtctgcaggacagagatgccgggctgcggggaggacaggtgggaggacaggtaggaggtgtgcatcacagccaggctgtctccatccaagcttcaatgaccactggcctccctgctgacccatgtcccactgaggagccccaagctctgaaccaactgcctacgcaccatcccctcggactgcacctgctccccaggccttccccccctttggagctgcctctgtctaccaagggtgctgtcgctcacctaaccttccaaccagaactcagtggtaccttgctgccccctccactccctgaagaagctgcccccatgcctgtcaagttcttccaactgctcgaaccttctggaactccaggcctcagcatgtcttgtctgggtggctgcaatggctatgcttgcttctctgtctctctccatcaatcagtcaaccaatcaatcgatcaatcatctatcaatcagctatccacctattaatctataatcaataa

SEQ ID NO: 474236 - DNA, 884 bp, Homo sapiens
gccgccccagcaggaagcccgacgtaggtcccagcgtgtctgtcagtcatgccgctgccctgtggagctggagaggcaggacgtgcacccagcctgtggctggcggggcaagggacctgcagctcctccagccatgggggcttccctcagtctgaggacctggacaggggtagatgcgtcctcaaccctgccaggccttattccaggtcacctaaagggactgaattaacccagggcaaggtctctgttgtctacactgtcatctacccaggcagctgggggtcccaggcactgcaggaatatgcccagaactcccacaactccaccatgaagaggaaagggccgattaaacaaggggcctttgaacatttctccagagaagagccacacacggccagtgagctcatgccaggacgccgggcaccggggaaacgtgaacctcaactgagcgagacacggacccgcctcgcgccgacggccactgagagcaaacaccatgagctgctgggtcgaggggaatcagaccctccgcgtcgctggcgggagcgtgtggggtctgagcgctgtccacacacagacctcggcacggacgtccacggcaacacgatcccatcactaacagatggaacgcggaaccagccctcaaccgccggagggagagacaaaaccgggtttacccgtcaacaccgcttcgtacagccaaactctgagacacgctgccccgcgggcaaaccccgaaaacatgcccagccagtcacagagacctgtcgacacaactccgtgcccaggggatgtcgtggaggggcacgccagggctcagggccggtggaaaggtgccacggttagactggtcgcggctgcgcaccgaatgtgctgggaagaac

SEQ ID NO: 474237 - DNA, 800 bp, Homo sapiens
ggtagccaggcacaatcacgccgtcaccaccccagccctcaaccagaccctgcctgctcgccgcgctcggccgccatcttcctgtggacgccacttaccctccggcgtcgccatcggctgcaaattgccttgtttttcatctttggcagggctcaaaatttgatcatgaaagggaattttcttttttctttcttaattagtacttggtaatatcaccaagctgtgagtttatggctttgtagatcttgtgtgtttgacactaattactcacaaaggcttttaaagctgcatttcaactctgcaaccaccatgccagtaattaagctagaggaagcggcaacagatttcatttttcacagacacccttcccacctgtgctcccgctccgtgtggccgcagcccccgtggccctgtggaaacccagcagctccttgcggctccggccctggaggcctgaggtggccttgcctccaggagcccgggctcagccgtcacagccgggcagagacgactaacgagcagctcccctggctgccccagagccccccacaggggccgtggcttctgacccttcagactcagctgttcccaggggccctgcttctgccccgcccgcccccacggctgcactcaagcctgcgctgtgcacaccgaggccagctgaatgccactaagaacaacgcaaagttctggcgcgcagggagggaagtccgtgttgacttgggggcgggtctgcagcaggaaggctgggcacaccctccactggctgctcactaactcccctgctggcagaaccttcc

SEQ ID NO: 474238 - DNA, 580 bp, Homo sapiens
tggcacttctgaaatggctcctgatggtccccacctccaggcatcacccgcatcagcgccagcccttcagcgtgacttacagctgatgcaaagttcacgtcacggcagccgtgacttctgcggctcccaccctggttctcagagctctgacacgccagctgccgtgcgtgagctgcccacatggcgaggagctgccataggaacccagcgcggcagcccaaccacggatgagaagcagaatccttctgacggccacatgggtgtacctggacgtgggaccttccccagcagagccaagaggaccgtggcttgtgaggtctctgagcagagagccagctcagccacacttggattcctgaccccagaagccatgagccactgagttctgcagcgatgttattcaaggactggtcgccagtggtggggacagcaaagagtcttgaaaaagtaatggccccaattttctgaaatgtgtggaaaagtgtaaactgagagatctgagaagttcaaagaaccctaaccacccccccaccaaaaaaaaaaaaaaaaaaaaggcagggggaggaaacaacattaaagt

SEQ ID NO: 474239 - DNA, 951 bp, Homo sapiens
gtagtggccatttcgactcacagcaacctccgcttcctgggttccaggctttgtgctgggcccaggggccacaaagtaagcaagagagccatcgtccctgccctcatggagctccagcccaagggacagcagcttatcctacgccaaggggctcctctcaaaattcccacagcagtagtgatctaaggacctgggcaggggcactggacttcaagtctcagcctctgagggtggaaaacagtcagagaagagagcagaggcccatctgccacaggaagtccttcagaggactgcagtagggactcttagagtggcttcccctctgaccctccggggctcttgcagtcccagcaaggctggcaccagttccttcaagcccttttgggaatttccagtagctgagcttctcccagttcttagtatgatgaactcctatacagccctcaatgccctgctcaggtgcccctcaacctccctagaaggactcgatccctcctccctctggatgccctcctcttcatctgataccctttcctgtcccacactgcgactcgtactgtggaaacctgcaaatgtgcagcttgtgttggaaaagggtccctgccatccggaggccccagagccccgcccaccctactctggttgcagacccttcccgcatctttggcagcctcgccacccctgggcacagcaggagcaaccccagtgcccggggatgaagcacctactgtgcttcaggccttcctggagccccagctcattgactaacagtgacctcctggggcagtcctgtttttatccccacctggtgggtgggaaaacaggctcagaggggccaggtccccaagtgtcacagctcccaggagcatgacaaaaattgcatggggaaggaggaggatttgctaaatgcccattcctggcattcctgcccccccacccccaccccccatc

SEQ ID NO: 474240 - DNA, 1055 bp, Homo sapiens
cctgcagattcggtgtctgatgagggccgtttcctcatagatgccttatagccttgtcctcacgtggtggaaggggctgcttccagactctgccggttgtcgagtgccctggaaacccgctcaccctgcaggagttactcagtgtcctgtgtgcatccagaccttggcattgagctcctggggttgggcaaggaagggagagcaagtggcagggggtgggtgggcagcaggttcccagtcctgcaggcgctgctgggatcaggatgccaccctcgccaccctgggagttgtctgcagcacaggggcagctggaggtggaggtcgtgtgctccatggacaggtcctgctgactggatatggtggggtgttggggagacaggaaggggctaacgccgacacccaggagccccaagaggaagaagaggaggaggaacaaagcacaggatacccagatggcttgggccagactgaaggcacagccgtagccagcaaccagccacctgagccctgctgccttgggccccagtcggcccagccagatcttcagagccgatttgatcagctgccagatctcccaattgtcagctgcaacgttaacctctttaagagagcacccgaggcgatctttaagctaggaggctggagccccatgctaatggagcctgctccgagctcacagctctgcctcctgcctccccagccttggttctgggagcctgtggcccccactcttcaggctggacagcagcaggactattttttgagcctgggtgaagcggggctttgccagctgagatcagtccctacagcagcccccaccagggagccccaggaaggaggggaggggcctaacccagagagggagtggataagtatttgttaactgaatggctgcatgaacctccaaagctgcctaagaggcgagtgctgacggcgctttctgccctgccgtcaccttcagggggagatgctcaggggctttctattccctgtcactgaagggttgaagggctgtcaccttgtctaaagcctccatgttttcccttccaaccctc

SEQ ID NO: 474241 - DNA, 599 bp, Homo sapiens
tgcaaacagttgctgctctggacagggaagccagaggaaaaaggcctctgcagtgaggcccctggactgacctggtacttgctagaacttaactgatgctggcgaccatggcattgctggtggtggtgctggttgttgtagtggtggtgatgatggaggtgatggtggttggtcatggaggtgatgattgtagtcatggagatgacagtgactgccatggtgatggtcctaggcctcagccctggacccctaaaccctgcaggtgctccttgggctgcagtggtcagttcatagtctctctgggggtccggagtctgttctctgcaatggagagcagagttggattgtcaactgaaggagcagagagccactggttgagacctgggtttgtggagggagcggctcagccccaggcctctgggagtttgggatggcacccggtggagacatgggagcccagccgcctcagccaggaaggcgtgcatcggggcgagtggactgtgaggctggagcaggtatgggtgagagagctcttcctgctcctccgcacctgacttttccctgtcatgtgcaagcccttgctatttttttacacagct

SEQ ID NO: 474242 - DNA, 897 bp, Homo sapiens
ttttgaaatgcttttgagaccgggtttggccctgctgcccagcttcaacgacatcggccagggctggcggctgcggcattttgtcagctggttgtggtatgaacgggaggtgaccctgctggagcgatggatccaggacctgtgcacaagagtggtgctgaggattggcagtgcccacttctatgccatcgtgtgggtaaatggggtcgacacggtagagcatgaagggggctacctcccctttgaggccgacatcagcagcctgttccaggtggagcccctgccctcccacctctgcatcactatcgccatcaacaacacgctcaccccccaaccctgccaccagggaccatctgtacatgaccgacacctccaagtggggaccatcctgcctccactgcacgcacccaccttcccgccccaccctgtggtcttcctgccagggacagggtggccttcgcagagaggaggccctggatctggggaggcatgtgagctgaggtcaaaagacccatggcaagggcccagcgaaccacaattctcccgccctaggtatcccaagggttactttgtccagaacacagactttgacttcttcagctacgcaggactgctgtggtctctgcttctatacacgacaccccccacctacatcgatgacgtcaccgtcaccaccggcgtgaagcgagacagtggtgagggcttctgctgtgagccaccgcacatggctggaataccctgtctttaagaaaaaaaaatgttttttaatttttttttttttaaatatatctttttccttttgtgagatgaggccttgcactgttgcccaggctggatggcagtggtgcgatgattgacagctgttgtggggccgcagttgtaagtttcaaagaattt

SEQ ID NO: 474243 - DNA, 1174 bp, Homo sapiens
caggaaatgacggtgagaaccggtgtgagggactagctagtggccagtgctaacaaggagagcccggccctgaagcaggtctctgctccacgcttttccttagttggggaatcgagagttgggggatcaaagccccccacatctccctcacccgctgcagctatgtttatcaaggtgatgtttggggctggctgctcggtgctggtgaacacctcttgcaggctggtgaacctcaccgcccacctgaggcagaaagcagggttgcccccagatgcgaccattgctctcctggctgaggatggcaacctagtgagcctggaggaggacctgaaggaaggggcttcccgggcccagaccatgggcaactccctactgaaggagcgagccatatatgtcctcgttcggatcatcagtaagagggagaggacatggcctccacccgctatgagtccctattggagaacctggatgaccattacccagagctggcagaggaactgcgcaggctgtcaggcctctcctctgtgggccacaactggaggaagcgtatgggcactcggcgaggccgccatgagcaaagccccacttcaaggcccagaaagggccctgattaaggggatggattgcacactgtagtgagacatccatcctgaccccacctcatcagccagggagctccctgaagacaggccatcgagagaggcacacaacaggctgtggtctaaaataaacttttaattgcacatttgtgtcttgggttatctgtggggtgagaaacctcctcacttccaatcccagctatctgggtacaatctggtgttgtggtctggctgtcggcgaggggtagaggtgggtgcaggactggcccccgagtctgcaccgacctcttcagggcagggagctcagacctgggaagggaggggcagcacaggctggtggtcagcctgcaggtgcaagaggagggttggcctctccccctcccggcctgagtcggggtccactcactcaccatggtagtacttgcactgcttcagggcctcgctgaagccctcacacagggacaggtcactctgagtggtggaacagtccaggaactgcctgatctcataggcgcagggccccatctgcaggggctggggggcagcgggggtgggggcctgggggtacagtgcaa

SEQ ID NO: 474244 - DNA, 729 bp, Homo sapiens
gtcctgtgcagtgctaggtgcaaccacccatatgtggatgtcagcctcatttacgaggggagtccctgaggctctggaggcagggcccagcgttggggacatcccagggattccgtctcctggtggagactttcccagccctcggggaatgaatgggctcaccgcgcccgggtcccgcccccgttcagcttcttccccgcaggcttttcgggatttccccgacgccgcccagaccggctccggccgcgagggggcgacagagcccgggctctgcggaacccagcaccagcgattgccgccgactcgcgaaggttcagtggtggcggtgacacaaaggaggcctgcgcccaggcgccgctgggagctctcctgccccacggctgccctggaccactcaccagtgcatttccactccctgcttgccctgcaggcctctctggctgttcctgaccataggcccatgaaggctcctggctgagaggagacagcgaggaacagatccggcagagaggactggcaggggccctccagcttcctctgttgttacctcagggcctttgcacaggcccttcccctatcctggcctagctagtgcaacccatcctctgccccattctgcttcctccctccccatcccacccagagaccagcttattcctggaaagtccagattctgctaccaggttcagagggccaggcccaggccgctccctctgcagcctgacacaa

SEQ ID NO: 474245 - DNA, 678 bp, Homo sapiens
tgcggcggtgaacccggaagatggccccttacccttccagagatgaagcccagttcattccactgcacgcactgagcccctgtacctcctgtctttgggccacatgtcctcaagggctccagtcccgcatgcgatgctgggaggcaccgaagggaaggaggcgaggtccagagcaggttcagtggttcaaacgtgctcagctccccttctctgggcctctgggcaacttcagctcctcagggaagccacaccctagtcaggtccaccgtgtatggcctctcatagagcccttggtgaatttcttaaatgtcttttccactaatgtctacactacctgcatcccctttggcctggaccactgtgacttccctatggtggactgctgctcctcaagggaggagtctgtttccagccccaggcagcagagcagaagactgaagagccagggcctggttgacctgtgccctgtgaacctgaatgacaaggtgcagcctcgccagcaagcacatgagctgcccctggagccgcctaaatccagcccgaaaatatcagcctaatagctaatgtcagcataaccagaaacattccaaccctaagataaacccttctctgaccagaaacatgccaacccggagacagcctcccttctgaccagagacattccatccccgcaataaa

SEQ ID NO: 474246 - DNA, 2838 bp, Homo sapiens
cctgctgtccgacaatccccagtgagatgaacccggaatgaagctgcggacctttgcacccccaccagattcaggagtccagctggcttcacctcgtggatcccacaccagggccacacgggcggagctgcccgccagtcctgtgcgtgtgcatgcacccctcagcccttgggcagtcgatgggactgggcaccgcagagcagggggcgtcgcctgtcggggaagcttgggccgtgagggagcccacagtgctggggagcatgccttgggcatggtgggctgcaggtcccgagccctgccctgtggggaggtggctgaggcctggcaagaatttgagtgtgctggcctgggtgctaagcccctcactgccactctgagtgtcggacccactgagcccacgcccacccagaacgcatgctggcctgtgagcaccgcgagcagctctggttcccgcccgcgcctctccctccacacctccccgcaagcagagggagtcagttccagcctcggccagcccagagaggggctcacacagtgcagcagtgggctgaagggttcctcaagcgtggtcagagtgggcgccaaggccaaggaggtgccgagagtgagcgagggctgccagcacgctgtcatctctcaatgtgaccgttttttaaattaaactttttattttgagattattgtagcttctcatgcagctgtgaggaataatacagaggaatcctaggtactctggccagttccctcaagggtaggaccttgcagctacagtaatggatcagagccaggatactgacattgatacagcaagaagggaatgcttccctcccaaacatccctcatgttgccctttcacaggaacactcacttcccactgtcccaaacccctccttagcccctggcaactactaatttggtctccacttgtataattttgttatttcaagaatgttctgcacatggaatcatacagtatgtgacctctggggactggctttctcccactcagcatagttttctgggtgttcctccaggtggctcaattgcaacgtagttttttcctttttaatgctgactaggagtctaagtatgtaaccttctgagcctggcttcctgagttcagtgtaacaatgttgcaattcatcccagttgccttatggatcaatagtttgttcccctattattgccgagcctgattccatttatgaaggtatgacactttgtttagccattcaccagttgaatgacaattgggttgtttccacgtgtgtgcatatgtgtgtgtggtgggtcaaaccagatgtttctgcttcttgccagtggtgaataaaaccagtataaatatttgcattcaaatttttgtttgaacataagttttcattccatttggataaaaacccaggagtagggtttgcttgatatgcataagcgtgtatttattagaaattgccaaatggttttcagaggggaagcctcctatgggggtggggacataggagtaggggagggttcagttaatgcagcctctgccagcccagctgggaagtgggcctgtgtcccagcaccaaggtgctcaagccccatgcccagacctgagctagatagggtctcaagatcacagtcaagggacagaagcagcatcttctgctccagaagcttctgttcatgcaggccctgcctccgcctcagggctctgcaggaactgttcaaaatgctgggtgcagagctgtggccaactgtggggcacagccaagacactcacagctcagagggacccagggtgggctggccgaagctggaagtgggtccctgcagttcatacccccccccaacccccaccccactgcctccagaccctggacatttcagtggggctgggccagttacagggaggtaaagggaaatggggacccttccaattgctgccctggttaccctaaggtcttgagtagtgacaaggaacttggcagcacagctgcccccaagaggccttccagggtccctcctctgtggacaggacttcagactggacagttactcatctgtttttatcagtctgtccatccatatatctgtccatacacacacccccatccttccacaagccccctgaggcctcctgggtcctgacctatatagaccctcagctcctgatgtcccaggcaaggcaggatcggcctagcccagccccaggtgagacctggcctagcccagccccaggtgagacctggcctagcccagccccaggtgagacctggcctagcccagccccaggtgagacctggcctagcccagccccaggtgagacctggcctagcccagccccaggtgagacctgaagtgtgcctgctcatgcaccatgggagaagggggctgtggcactggggtcccctgggagtacttgtccctgctctgaccccatttcagggatgcagaaaagaggcctcagagcagagtaaggccgagtcagggctacagagcccgatggccacccctcccctgaacggctaggaggagggagggcagctggcaaaggcctgcaggagcccagagcgtgttcttccaagtggagcctctgctgtgggagccccagccacagggtcagacaaagtgtcctgcccaagctcagccctcatcagcccttgaacttgggaaatttgattcccttcagtgggcctcagtttcctcatctgtacggggggtgataacagtctctcttcttgtcttttgatttgtcttccctggaaagagtcctcctggctgtcaggagggctttccccttcagatacattcattgccagaggagctatccaaagtgcctttatttttccgtttttc

SEQ ID NO: 474247 - DNA, 558 bp, Homo sapiens
gcctcagccttctattggaaaataacctaaagggagggggaaaattactacttaaaaccacaagtgccactcaagggatgcctcctatgaaaggaggagtgctaactgccaggtccccactggtccttctccatgcagtgggtgccaagcctggaggtggggtggtctggaaatcattccggaacaggaaatctgttcttctgtcttctgtgcctattggggtgatcagaaccaacaccaggtcgtggggggcaacgaagtccagaggagacaaaggaatgagaaaaagacagtttgagagacagagtgggaccagagggcgtcacgagggtggaggctgcgaaggccttgagctctgggaatccactctatttattggtgttcaaacaaacaaacaggtggaggcaagttactgtgaccagccaaatgatcaggagggtcaaagaaatggctacagaaacagggatggacaatgactgtcagaaggaggagagaagtggaggatgacagctgagccagagccctaagcaggccccacccacttgagtccaagctgct

SEQ ID NO: 474248 - DNA, 2244 bp, Homo sapiens
acttaacgatggcccgaaactgcaggagtactagaatttgcggggcagagtttacagaaaggggagctgcaactaagagagctccagacatttgcacagggctctcctcaggtctttgacgagtatgaataggtgcatgtatgacaggaaacttcctgaggctagggaagaggaatcagaaagcaataggccaaacaattggagcaggagcattgccatcttggacaagcaccgccattctaaagttccccttgatcaaaaaccacctaaatccaaagggcttcagcctaatggctccatggtaaccttgcaaaccagaagcttcgtagtctcagtatttgtaaaaaccagtagcctagcagccactggagggaatagaccagggtctcaggctctgggagaccctggttctgtccctgagcctctggctggagttattgaagttcctgcagggaagccctgcccgggcagcttttgtgatacaacagtagaactcaatagttgtgatagaaattatatggtctgcaaaacttaaaatattactctctgaccttttatggaaaaagtttgctgacgcctatgctacttagtaatgattgcactttttcattttctttgtttatgtaatttattaaaatttcagttcaaaatattttaaaatttcttttgaaatttacttgaaccattaattatttatctaagtgtggtgcttaactttgcagcatttggagattttctgttaatttttttggtaattgatttttatcttaattctggtatggccaagagaacataagtaaataaattctaatctttaaaatgtattgaaatgtgttttatggaatgatatgtggtcaattacagtaaattccctacatatgctttaaaagaatgcatattctgcagtttttaggatcaatgttctatatatgcttgagggtcgatttcttaattgcactattaacattttctgtattcttactgatttttgtttatcagtttttgaaaaagttctttgtacgtatttaagctaggttgttaagtttatgcaaatgttcaattgtttaatcttcttggtgaattaaaactttatatatgaaatgtgtctcctcacctccagtaatgacttttgcgttaaagtctgctgaactgactgatttggggatatattaatgtataagatatatcaattttggggctcacatttttgcatggcatttattttttcatacttgtactttcattgtttctatattcttatgtataagatgtgcctttgtaagtagtttatgtttttgtccatttctgcttctataacaaaatatctcacactgggcaacttagagagaacagaaatttattttcttatgatactggaggctggaaagtcgaaggtcaaggcaccggtagatttatttctgaagaaagggagagtcttcaatattaagtttttactgtttaaaataactctttactatttaaaaatgattttgttaagcttatgattaattcatagcccctaaatccaacctttgaccaccttctttgtaacatacatataaacctataggatggcctatataatagtatgtatatgtttaacatcacacaagatagcttcaagggggactgagattcattttatattgatacaatctgtaagagaactattttacaattacttgcttaataggaaaaaatctgtaaataaggaaataattttaattttggttctgaaatgtaaacaaagtttctgtgagttgtatgcagttgtaacaggattctgagtattgcagagttgtaggatacctttagagctagaagtaaactcagagatcacctaagccaatcatctcatttttcgtaatataaattttggctgtgattaatatctttctaaataccggtaagaaaacaaacccaaaatgaacatatggctcataagttcaatcgtataatttctctgaaatattcacctgttagagtaaattgaacactgagtagtatttagtatttatcatatattctataatgttagctattttaaaatctcatgcccatatttgcctttgcctactgggtgtcttcacttggaatttgcacatgcatctttgaattgttatgtctgagacatttcttatcaccaaggagttttccagcggatattctgattataatgatttattttttagtttcttgtttggattgtgctctgtacacttcctccttcttctttaaactatc

SEQ ID NO: 474249 - DNA, 483 bp, Homo sapiens
tccaacatcacagagctagtagatggtagagctggtatgcctgatacacaatcatgcagactttgaattacaatttccagtgacagccaatacttttatacataatactttgagcagaagacaggaacacccacttaaaacagctgacctgaacttacaagtacagaagtgttatagtgacaaagacggtgggctggacaagaagatgacacacatgcttcctgatttagcccatcaaaacctcacagagccaacagtttttcagtgtgtggctgcctatgcaccagctccacctgactcctttcttacctggtgcacgacccttcagttgaaaattccagcagcgtgcaacttgtctttggcaaatgaattatgccaggggctggccctcaatgtctatcctgtacaaagtcttcttcaaaaccttttgatgaactaaatgattagatctttgttgggttaaagtctgttttgtcagagact

SEQ ID NO: 474250 - DNA, 624 bp, Homo sapiens
tggtggatcccactgacagcttgcgctatgtacctggaaaagctgcagacactcaatgccagcccatgaaagcagctgggagggaggctgtaccctgcagagccacaggagcagagctgcccaagaccatgggaacccacctcttgcatcagcgtgacccagatgcgagatatagagtcaaaggagatcattttggaccttttagatttgactgccctgctggattttggacttgcatggggactttagcccctttttctgtgaagaatgatggtggtattttgatgggaattgggaaaacagtatggagattccctaaagaactaaaagaaggactaccatttgattcaggagtcccactactgtgtatctacccagaggaaaagaagtcattacatgaaaaagacacttgcacatgcatgtttatagcagcacaatttgcaattgcaaaaatgcagaaccagcccaaatgcccatcaatcaatgggtggataaagaaactgtggtatatatacatgatggaatactactcagtcataaaaatgaatgaattaatggcatttctagctacctggatgggattggagattattattctaagtgaaggaactcaggattgaaaaa

SEQ ID NO: 474251 - DNA, 581 bp, Homo sapiens
ggtacaggtggtgtttggttacatgaagtaagcaccttgcaaatgacaaagctggtcttaaactcaggcttagttcaacccaggctgcttagctctagcaggtccttactagaaatttccaatatgcatgcatttattttcacatacgatttttccagagttttggaaaataataataaagaaagaagtcaccctgattatcacttgacccataacttgctgaaccatgttttctttttcaagtattactattccggactcactagtaactcacagtatttttcttctaacaagtgttactccaattatgtctgcacctttggtcagctactgtgtgaaataaatattcggtacaagctacatttactcatttgtattcttagtgccactacccttaccttatctctttcatgttctacctgccccaggccttggatcattcaaattcatagcaggccaagcgattatcaaaactgaaaatctgacctgactctcctcctgaaaacccctccatgtttcttcctgcattttataaccttttgggtctcctgaatgctaaatctaatctcccctctcctgaa

SEQ ID NO: 474252 - DNA, 556 bp, Homo sapiens
agggtcagcagcctcaaagaccgaaactagacaaactcacaaagatgagaaagaatcaacaacaaaaaaatgctgaaaacccaaaaggccagagtgcctcttcttctccaagtgatagcaacatctcttcatcaagggtgcagaactggatggaggatcagatggatgaattgacagaagtaggcttcagaagatgggtaataaaaaactctgctgagctaaaggagcatgttctaacccaatgcaaagaagataagaaccttgataaaagtttagaggaattactaactagaatgaccaattcagagaggaacacacgtgacctaatggagctgaaaaatacagcacaagaactttgtgaagtatacacaagtatcaacagccaaatcgataagacaggccaacatgcaaattcaagaaatgcagagaacactattaagatacgccacaagaagatcaactcctaaacacataataatcagattctgcaaggtcaaaatgaaagaaaaactattaagggcagccagtgagaaaggccaggtcacctgaaaaggga

SEQ ID NO: 474253 - DNA, 3237 bp, Homo sapiens
ctatcggggggctgcactgtcaccctggcagcaggcagcagaggtgtcagtgacagcagtggtcagaggagcagtcctcctctccctgactcaggctccagagggccatctcctcctgctcgagtttctgggggaatcctgagcagggcccagcccccagccccgagatggttcccaggcctgcgccctcttgctacgtgttgcagagaccacctgggacccccgcacatagagtagcggataccacggggtgaccaggccctgtgggtggaggcgtcaggaatgggaaccggcacttgggtggggagggctggctggggttgagtttctgctgctcctgcttcccaggaaatgcagccagggtgggcccagcagttcctatggagtaggaagcctggacgctgtggtgtctccagtccccaccccagggcccagtcactggccagcttgggccaaaaggagaggctggactttagagggtgggtgtgagtgtcttcactgaaactgacacctgccacccagtggccagcatggcaaggtgaggctctaatgctaccactctctgcatcccgttctaggcttttctggctttgcctgcccagttgctccgcgcgaagaggagggactacctgctgcttgctggaggctagagcctgcgacactgtggctcgcctcgctgtggttggtggcagcgatggggactgcagagtgccaaagcggtaggagagcagtgatggagactgcagagcgacagagcggtaggagggtggctggctgctgtcagggcacagttgactgaattatttccctagtctgtcttgtcgccactcttgatggccacatgagaggagctaaggtaatttctggcagcctgggagtccttgggaaaaacagaaggtgccacagactccattttaggaggagcctctgttttcctcatggacccccaagaagtgtgcccccaactagtcctcagtgccctccgtgggagtccaatgaaaagagcctgtggggacagcgcttgcccatctactcatgtggacgaggactgggtgctttgtgaggagtgaagaagacagtatggaggagttcacggagtccgagggactggacattatcatattgcatggctcagagcagcacgcatggacattcagcatctgtaaggggaccatgcagcagaggctgacagtggagagtgcagtgcacataaagacacgccagtgtttgcggtgtgcaaatggcgactatgggatagcaatggccgatgtcaggctgctggcagagagcgcaagacatgatggaaacaccattggccacaagtctacagaggtcttggcgctgacctggatgcttcctttgaagctggtggtggccaacgcagtggcagcgctctcagaaatcgccgagtctcacccgagcaacaacctgctccatctgaacccacagttcatcaacaagctgctgacagccctgattgagtgcaccgagtggggccagatcttcatcctggactgcctcaccaactatacgcccaaggacgaccgcgaggcccagagctatgggcatacgcatggcctggcctgggagctaacagaagcccagggcacctctgttgagttcagggagatctttgagctgaaggcagagctcaatagtgacaagaaggagaaggaggaggaggcagtgaagaaagtgattgcatcaatgaccgtgggcaaagatgtcaggtgtgcaggaggtgtctagggacccatgtctcccctcatacagctcccttcataaaactttattcccagtagaaaattttgtttactcaggaatcacaagcccagatgccgacaggtcaggtggtgatggaattttaaaatctcaaaggcagagactggattttacaacagtttaatatttgcacaatatttgagagtctgcacagaacattttgagatttgttttctcagtagttccttacaattcccatattgtaggtaatgacagttttaatgccactgaaataaaaacataaagtgactgcctaagagtcacatggtttatggcagaactaggactcaagcccagttcttctgaaatccaaatccaggccactttcacccatgccctcgtggtgcccagccctgtgcctcataacccgggtgctgaggtggagcagctcccatccaggtcccaagataggctcccactgctccagacgtccccatggattgcccccagcaaaggacctcctgccagcagctccgggaaggagctctgcagagagccctttggaagccagagcagaaagggagcaggcacctgctggacaactgggcctccatccaagtcagattccttccaggacaaagctgctctccttcacccagaacaccactgtcacctcctcacagaggagaaacatctttgttcttccatctcaaaagagctggctttgctgatatgacaggccccaaagagcaagtcagcctcatcagcagtttttcctcctccctcctccgcattcttcctgactgggctggaggaactctaagaaacagacttcctgctgaccctcctgcgccgacttctaggcatgtctttggtccaaatgtgggctcctcttcctccctcatgcaaatgaactcttaaagattagtccaccaagtcttctagagaggtctacacaagtctgaattttaaggtaaaagtggctgagatttaagttgagagtcagtgtggcagattcctggctcttaaaggtttttactttgaagaagataaaatgcacgaatcctactagggcagaaagagttcacaatagatgttttggtgacaaagcacttgttctacatagcccaagggtaaatgccaatacctattcagaatggagcagggaaattgaaaataaatttgaacccttctaatgtaaagcttctgtttcatatcctggctcttagcagctgagtgaccttgggcaagtaatataacatttctgagcctttattttctcaccctaaaatggagataacatcaatattgtctccatcactccgaaacccccttacagtttggtaagaattacatgagataaaatatgtaactagcacagtactagcacaaaataaggagtcagttaatattagttcttcttcctccaccagctcagctcctttgctcttccttatccaggaaatacagaaatatatggattcactgtagaagctggacccagctcttcagatg

SEQ ID NO: 474254 - DNA, 588 bp, Homo sapiens
acagcagcagacagacgaaaacagagggtaaacagcctgtaatgacatggtttggctgtgtcctaacccaaatctcatcttgaattcccatatgttgtgggagacacgctgtaggagagatttgttgaatggctttgaccaaaatgctaaaaatgatatggacaatgaaatccaggttgaggtggtctcagatggagatgaggaacttcttgggaactggagcaaaggaggcccctgttatgttttaataaagagactggagtcattttgcccctgccctagagatttgtggaactttgaactggagagagatgatttagggtatctggctgaaaaaacttctaagcagcaaagcattaaagaaatgacttgggtgctattaaaagcattcagttttaaaagggaaacggagcataaaagtttggaaaatttgcagcttgacaatgcaatagaaaagaaaatctcattttctgaggagaaattcaagcctgttgcagaaatttgcgtaagtaaagaggagctgaatgttaatcaccaagacagtgactaacatgtctccagggcatgtcagagacctttgcagcaaca

SEQ ID NO: 474255 - DNA, 766 bp, Homo sapiens
gacgtctgtgtgattcacaagcacttgagaaaatgatccaggcaggagatgaaaatgcaaaaagccatcgtgccagcacggcacacccacgtgaaagactcagaaacggtgaagaggaggcacagaggcaggaacgcggaggaaggtggccaacgcgaccaagagaccaccgaaaacagaatgaccaacgcttcagccgtgatacagacggaggaggagagttggctttgcaagaagcagatgataaggtgctctctctggacacgcggcaagtcaggggctcctgggacacccaaatgggatcagaacagaaacctaagcagaaagacaagtgtaacaagaacagaggtggaaactgaggccattcgaggagtggaggccctcagggacagcacttgtggctggtttagcacctccaagagcctccgagcttctatgatggtcaactctttggtgaaacctggagtgccttttccaaatctctagatgaaatgctacctgatttatgaatcactaataaaagccaatttaatctttacattggttgaaattttgtttgtgaacagacctcaccatgaaagtaataggaagccaatagctgtttttaaacggacacgacgcatgctggtacttgctgtgttagtgaacattgttctaagtacagtggtgtgtcacttaacaatggggatgcattatgagaaatgcactgttagcttcatcattgtgggaacatctcagagtgcacttacacaaacctagatgggac

SEQ ID NO: 474256 - DNA, 2217 bp, Homo sapiens
ctggtgttcacgtcactagctctgggactcgggaggagactgaggcacacagatgatcagttgtaatcacatggactcaggggagaccaggtatccctgtccatgaaaattcctcctagtggcataaatgccctctgataaactcatccccatgactacatgatggttggtgggaaaaccaaacccaagacgccgatgtcctccagggatcctgctgctggtcacaggatgtcacttgtccccttatctgtgggggtgcttgcctggaagtgcagcggcggcgagtggggcaagtcttccctcaagccctgggacagtatctgggtgggctggttcccagacacaatgaaggtacgtgcaattttgtgtcagccctgctgctgggggtgggatgtggggttgctgtcagtggcagcagccacaggcagatggctctcaggctcatgcacttgggtttcctttgtcatggagctggcctccttggtgcactgcattgcccattccctggggtgtaggactcttgtgtgggctagagtgctggagacgcggtcaaaccgctggtctagccggcatcatgctgctgtagccctctaagtggataaggggagatgtcaggggggctctagggatgtggagatgcagggctgttgggccccagggcaagaggcaatcctcatggggtctgggctctcaaaatggcacgtgctggagcttcttggatctaaagtgtgtgtgtggtacccagcacgactccctctggaacaatgccattgcgtggacaagtacaggcagcatcctatgctgtctcagggcccacaagagctgaggggctctcccatggccagggttgcaggaatctgtggtgggaatgtggacccctgggaatctctcacttaccttttcccctgcactggggagctcatctggtcttgcttttctctccttccatatctcggatggttctgtcacttccccgctgaattccagcattctctgttagatgctctatttgacatgtgattatctgttttgctccttctttgtggaggagacgaatgttgggcacctctagtcagtcaccttgaagctcttctccaagtgtcatttttttttttgagttttaaagttggcctgttggtctttttattccggatacaactcctttgtcagacgtgtgcgtactctaagtattttcagttattttgtgggttgtttggtcatttcctttaaggtgacttttgttggctagaagttttcaattttgatgtagttcaatatattgcttttttctcctatgattggtaatttttgtgtcctctgtatgaagacattgtctattccaaggaggttatattatatatatacacacacacacacacacacacacacactatatatatatatacacacactatatatacacactatatatacacacactatatatatacacactatatatgtatgtgtgtatatatatacatatatgtatacatatatatctatatatgtatacatatatgtatacatatatatctatacatatatgtatatatctatatatgtatacatatatatctatacatatatgtatatatctatatatgtatacatatatatctatacatatatatggatatatatctatatatgtatacatatatatctatacatatatatggatatatatatctatatatgtatacatatatatctatatatatagcagggaagcccaagtctgtttcttcctatccaaatgcagttcaacagttaggcttacttgtctctttctcatttatttatgggagctctttttttcctgttttgtaatatcttttggactccacattttcaatttcatttgcactgccttttgatatacaaaatgtgtttattatttttaggtttcctgttttaagaatgttcctcaccttaaaccacttgatagaaaaataggaaaaggttataaataggcaactaattgaagttaaaataactgattagttagcactcctgtgagatttttcaccaagggaattagcaagatatatatattttttgaaaaagcaacaacttttgttgctactgagcctgcaggggaaacggtcctcctgcttgttccctgttgatgggaatgtgaattgcttcaactttttggaaagtaactaatcagtatctattaaaagtgtaagtaaacatagctatggctaagtt

SEQ ID NO: 474257 - DNA, 640 bp, Homo sapiens
ctatacatagcacagtatgtatattaaacaaatatatatgtatattaaacaaatatttactgaacatgtactagacccctggcccagtgccaagcacagctctgatgctgatcccagcagccgcagccctgagtccacccagagagccccttttccatcttggaggccaaccagccagtccaagcagaaggtgacaaggaatgctgctggaactcagcatccagtctcacagagcctgaagaaaggccagtcagctggtcctcctctcatgcctgttctgctcgacacaaaggactggaagcatcagtgtgtctctggagtccagcatggagccagcagtgagaactgctgccaaggtgttttcatggatgttcccactggacttagtcttctctctgccttgctgcagctgctccctgctataaaatgaggataataatacctccttaacaagatcggcatatgggtatataaagcatttagcagtgcctggtacataacatgtgttgagtaaatggtagctatgattataataatctataaactgtgaatactatctattctgcctacttcgcaggagtgcatatgaaatgagggaatttatatgaaagtactttgaaaaactacaaaatttacatac

SEQ ID NO: 474258 - DNA, 581 bp, Homo sapiens
catctctctattgcctgtcagcagtaacctataaaataggcgcagtcatgggctatgtcaaggtggtcgccaacattgtccacccaatgggcttcagtgatcgtggacacaagctgcaatacagctccttctgcagctgcaataccactccagctgcaatatggcggttcctgctcatagccatccttggccacagcatgtttatttctcatatggatgccattcctcataatacccacatttgcacagctctgaaacagctcaaattcaaaaccaaagtggtacacactagggatggtacaggtgaatccttcaccagagaaatggaaatggaactgagtattataaagggcttccttgaagacaatgggctagaagggcactgggagggtggtgatatcaaagagaaaatgacaagttgtggcgaggatgtggagaagtcaaaaccctcgtacgtcgctggtgggaatgtaaaatggggcagccactttggaaactattttggcagttcctcagaaagttcagcagggagttactatgtgatccagcaattccactcctaggcatatacccaaaagatc

SEQ ID NO: 474259 - DNA, 639 bp, Homo sapiens
gagcctgtaatggaagggatgctggacactgaggagtcctcctgggcattgttgcttccctcatactccctgtcaacacatcttatgtgcagtcacactatcttccaagggactctcaggacttccccttctttccatatctatgggaaccatgcttgccagctacgctcccgcttagccttctgggatagtctcctaactgctctgctcaaatccatctttgcccccatccgatctattctccatcagccagaagccagaaagaggatctttcttgaatctcgtaaacttgggaaggttcctggaggtaaagttcacaaatgtggcagaccctgtaagaatgtggctcctaggagtttctcactcacggctgtctacactcaagctccagcaatttgccaaaactcccacttgagtcttcctaccagtttatgattccagaggtttctgctctagtagtagtctttgaatatttttacttatgaaacctaaaaataattgcggacaataatatgtcccccaaaaggttttgaattgacacctacaatgtgtatcttaagtttaaatagttgccaaggaagaaattttctgtgaattataaatagtaacattttaaaataaaactgccatattgtgctt

SEQ ID NO: 474260 - DNA, 648 bp, Homo sapiens
gcacctgtgagcagcccattcacattgcctgcctccagaactatgagaaataaaagtatcacttacgttatccaatgtgtggtattctgctctagcagcctgagtagacttagacaagctgcaaaagccaactggattgtgggctccatgaggttgacttccaacattaacctaaaaagcttccgcacagcaaatgaaaaaatcaacagagtgaacagaaaacctgcagaatgggaaaaaatatttgcaaactatgtaaccagcaggggactaatactgggaatttataaggaattcagacaactcaacaacaacaacaaaatcaatctcattaaaaagattcatgtgctgaacgtgcaggtttgttacataggtatacatgtgccgtggtggtttgctgcacccataaacctgtcatctacattgggtatttgtcctaatgctatccctcccctggccccccaccccctctaacatatatactcacttgctaaactcacaactttgctttaaaagtaaagttttgtgattggcagataatgaaatgcctaagatataataactataataatgataataatgataataatgacacttcctgaagacaggccccttatgcatcttattcatagctccgtcccttcacct

SEQ ID NO: 474261 - DNA, 654 bp, Homo sapiens
agaaagtcttctctcctctttccggtccaggtctttgctcttggccacatgagctcaactgagatggccaaggaatgcaatggcttgagacataagacccccattccagggaaggccctgccctatagccagaaagatgcaatgcatggtcagcaaagccaaggagaatctagacagacaggcctttctggctctgattcctccaagcttaccttccacaaccatcaccctgctcagcaaacagagaaccctgtattcaccagattttgtctttctcagactgcaaaatgtggttttagaagtcctaaaatggcttcgacacaggctgctgttgaagtgcagagaaagtcagtgcagaagtgggtgcagggagggtttggcttggaggtcaagaaagtggactcttacacagtctgcaagaagaagctgggaatagagaaagttccagattggctcccatcagcttgtccgccattgtcaatggctccagccatgagcccctgtgctaaatgatggactctctaccgtaatcagcagcatatttacagcaagagggcaattatctgaggtccaaactcttagtcttgggctgaaaatagcactggctgtatagatttctatgagaacagccaatgagttgccatctccaaaatc

SEQ ID NO: 474262 - DNA, 673 bp, Homo sapiens
agacttaggactgaattatttagcaaaaaaagagaaagaaaagagagtggggttactaagaacttgcatgatgtttctggatgacttagctccagagttcagctttgctgctgctcattccaaagcagaggcagcagctgagcccaggggcaggatctgggaagacttacagcgtggggtgacaggtaaggtggacctgggagaggaagtagatgagaatataccagaggaggtggcactgggcatctcaggctttgagacaaaagacgaagggtcatacaagcaagaatgcaacatgcatgataaagagtggccaagccagttgcagctggaggtaggcattcaggatgcaagagcccaggaaggcagtggtggcactattggggccttaagtgcctctctctttctggagcctgttgccttcaggactgcccttagactgctgaagttgctgggcacaatagacaaaatcctaaatatggagataggaaattaactaataaaaaaatgacaagaaaatatttttacaaaagataatttaagaggaaagtaaaagctacttccctctttgtcttgtagcttccttttctatgaaacatgaagcccagggcttcttggactaagtgagagagtgaagaaaatgtaggtattaaaattaacagccagagatggc

SEQ ID NO: 474263 - DNA, 650 bp, Homo sapiens
agcacctgtcttccctttagcctcatcagcatggcttttactgtccatatttctattggattttggtcacgagcacttaatcattctctaacaagtttcaaacattccttcgtcttcctgtcttcttctgagccctccaaattcttccaattgctgctcattacccagttccaaagccacttccacatcttcagccacacccaagtcacaggaatagcctccagacaaccatttaaaagggagagacttgatcaaaatatagacttcagatcctttgtctttctctcttcttcctctgtggatgttggacatgaattcctaaggtacagatgccttcttgaagccatgagacaactcgaagatgctgagagccacgagaacgcagaaacacaatccagacatccttgtattttttactctacaccagcaaccacctactgcagatttcttgctttgcaaggaaaattaacttttcagtgtgtatattcctaagtattttaattttttgcagctattgtaaaaggggctgagttcttgatttgattctcagcttggtcactattggtgtatagcagaggtactgatttgtgtacactaattttgtatcctgaaactttgctgaatttatttatcagttctaggagcttttt

SEQ ID NO: 474264 - DNA, 1017 bp, Homo sapiens
catctacaacaaccatatttccaaaagccagagctcctgagggtggccatgtgcattctcatcaaggccgtgccaagcaccaagcgccccaagagctctggcaattcgaaaccctcacctgcccttactgcttcccgccagctggtgagaaaggagtgtgacttgggagctctgggacctgtggctgctgtccaaagtgaggacagttttgtggagggcagtgcagagggcactgccggccctgaaccactcgatctccgtctcgttgaaggtgtggttcaggaggttgatttcctggggtgcttgacgatgtacttcaggggcttgccagcgtcaagtccttcaggctctgaatggtcagcttgtccacaaggtgaatcttgttgtcagctggggaaggggccaaactcgtgggtgacagcatcgtgcacagagttggccttgccattttcaatgttgatggcaccactgagcaagttgttggagatggtgtccaagtgcccacggaacttgagtcaggggccggcagctgagatgtggtcagtggtaccccatgcgggggtgctggtaggtgtcctgccctgggccaaactctgcttggggaagctcatctgcatccggagcctccagcttgaacttcttgccatccttgcctgtcaggtagttggtctctgggttgaacttgagggttcccacaatggccagggctgtgacagtctctggggatgtgatgaaggcatgggtctcggggttcgtgtcattgtggcccatgaagttcctgttgtaggaggtgacaattatgttcttctcctgcttgttgatgtcctttctgtgcaactgaccaatgcaggggccacaagcattggccaggacgatgccacccacatccctcaaggtctgtgcatagccatcctgctcaatggaggcacggatctgctcggagcatggagtaatagtgaactgggacttgcacttgaggccatgggccagtgcctgcttggccacacctgctgagca

SEQ ID NO: 474265 - DNA, 580 bp, Homo sapiens
aggcacagataggttgtataatggacatgcgctcagataccagggtgaaggctatgccagtaaaattaaataaaatgaaaacttcatatccccagttatatgagcccatttctagtgctcagcagtcccatgtgggcagtagctactatatggggcaatgcagatataaaacatttccatcatcacagaaagtcctttcagatagcattactctagagctactgcagggtgtgaaagaaatcagagaagagaaggaatttttaagaagtattgcttcgcattataaatcagattttctttatccttctaagagagatgcagataaaaaactatttttttcagtgataaagatacttttgacagttgatctctattgttttttgtatggaaccagccatgtttcagtaaggcagcagaaagatggtgcattgccatcctgcatgtctaaccgcctgcccagcccagggcttcaatgcactgaagtgtgattttttttttccttcagttttatgacttagagtgcaggataggaacaaaagtcaatctttcagacttaaagagcagagtgccccttgctgac

SEQ ID NO: 474266 - DNA, 571 bp, Homo sapiens
attgtcattaattccctcctgacaatgaaactttttcttaaatgtgactttgttcagggactgggccactgggagcactgggatttatatagtttagagcaatgtttgctgacattgcttgtgactacttatggcaacctccccccagactctagatccgtctgcctcccaccccttgtacatcagaggatgtctgctgtctctgtttcagcccttcccaggctgctcaacgagcccccacaactgggagatttggatgggccctgcctcttcactggctgcaaagcaaaacaggatgctggctgtgtcgatgaggagcccccagaaacccttcctcacgatctgggattgtactcagacagccacggctcggttttcccttgggtcctcgacaaagcagttgtatctctccacctcacggccacagaccactcggagatcaaggcttctgcatgccccccctgtcttgaatggaggagaagagaaggtttcagtggttctccaaatgtgtcctgaggatgacgcttcaaaactaactaagcatctccaagcctctaccccaagttagctc

SEQ ID NO: 474267 - DNA, 1058 bp, Homo sapiens
gagcacagacatgagagacttaaagtggccgaatggaagtcttgacttccagtttaatcaaatcatcactgtgtcccaatggcagaacctatccctccctaagacctctagaccaaagttgcaaggatgaaaagcaaaaatatcactggtggattgctagctgtcctggatcccagcccgctactactctccccaagtcccaaccatttctgggcaatggtcattggcccagggctcctaccgaaagtttaatgatacagacaggcaatttgggctttgagcagagttacctgcttctcccagagagacgaggacagattgcctccagcaggggcacagcagacaaaaggcacagactgacctgggcagcccttgctaggcaaccaagctatgaaatcacagctcactggcaccagcccaagcctctctcttcccctgggctcatgaccagaggttggtttccagtgggcaactgattacctgctgtgccaattctctttgcattgtgatctgaagatgggcctggggtctactatgatatgaaaatgtcctacagtacctggcattggaggtgtatgggtagtgggagaaaaacaaggtttgaaatctacagagtctgaaagtaggtcatggggcattcctcccatcattagagggtgtacatttgttggtgaaggattgattcatctcccatcaacaccttgtcagcctgaagttcctttgtcagaaatatacttgataatgcgggtccaaattgtatatgtgtcatatcctataaagcatggatccatcccatcctctattgtggccacaaatgccttccacagtaacctgcagccgacctactactgacaaatcccagcaaatgtgtggtagtcacttctcttcctcgggtctgcagggactcagggtgcagcactgttctcagatttgggctggagctcagtatgactgttggggtctcctgctacccctggagcctccatgtgctccactcgggttgggatccagcagtgcagaggtgaactctgggcgcttggaaggcagcagcctctcct

SEQ ID NO: 474268 - DNA, 683 bp, Homo sapiens
ttgacatgtggaaaactatacacaattaatgtatacaacttgatgagtctggagtttaatgtaatactacttgtctatttttgcttttgctgcccaagctttttgtgtcatatccaaaaatttattgccaagaccaatatccagaagcttttttcctatggtttttctagaagatttatggtttcaggtcctatgtttaaatatttaatcaattttgagggttttttgtatggtatgagagcccgggtcttcatgggaaaacctggagcctggatctatgagggcagacccacaacaagtcttgagaggcagcagcagcaaaaggaggaggagaaggaggaggaggaggaggaggaggaggaagaggaggagatggaggaggaggagatggaggaggaggaggaggaagagggggaggaggaggaggaagaggaggaggaggaggaagaagaggaggaggaagagaaagaggagggagagaaggagaagtaggaggagaagaaggaggaggaggaagagaatgaggaggaagagaatgaggaggaggaggaggaagagaatgaggaggaggaggaagagaatgaggaggaggaggaagagaatgaggaggaggaggaagaggaggaggagaggaagaaagacatagcaaggcacagaatagagtagaacagaaagcaatgggg

SEQ ID NO: 474269 - DNA, 636 bp, Homo sapiens
gcagccagaggaggaagagcaagtggaagcggttatgaaaagatgggataccactgcaggaacgtgaagcactgtctcttttctgccaagtccaagcttcatcctttcttccctgaaccagagcaatattctcctcactggccttggcacatccagtttgcctcttttccgttcgattccaacacagtgaggttttacaaatgtcaaccccatgatggtgcttctttgctccgagctctttactggtcctcattgtctatatttctgaccatcacatatagggccctacttttatctctctccactgttgcccttgctgtcttgactccagccacactggcctttaggagcatgctccttcctgcctctgggccttcctcacgtactcttccctcttcctggaactcctactcaacttcagctctcaactcaccatacttcctcaggaaagccttctctgcccttccagagcagggatgggcagtgattgaaagctggcaacaagcccatatttctctgcctcttattttctcacgtatctcctaggaaatactattcgatctgaagaagtacttaaggaaatattaatttttttctaacagttatttatctgtcagcatgtttctccacttctgc

SEQ ID NO: 474270 - DNA, 588 bp, Homo sapiens
ccgccggtttacactgtttctccaagccatcacagctgatatctcctggccatcaccaataattctaaatgacaaatgtttcttctaacaaccccacaatatcaccctttaccacaaaatcttccttcagcttaatctctcccactctaggttcccatgccgcccctaatcccgctcgaagcagccctgagaaacatcgcccattatctctccacaccacccccaaaaacttacgccatcccaacactttactactatttcattttatttttcttaatataagaagacaggaatgtcaggcctctgagcccaagctaagccatcatatcccctgtgacctgcacgtacacatccagatggctgcccgcctgcacccaggtgaaataaacagccatgttgctcagacaaagcctatttggtggtctcttcacacggacgtgcatgaaagtaataatacaagaagtagggatttcaaaatctccagagtgtttagagtctttggaggggcagtggagagacacacatcccaaacttagcccacctattcaatgcattggatggcaatcttcatagttacaaatggtagag

SEQ ID NO: 474271 - DNA, 1576 bp, Homo sapiens
cagcggacgctcactgagcacctgctatgtgcgagctactgtaccaacctctgcccaaagagaggccgaagggatacctgtggagatccggtgagaatacctgtgtgaatacccatggggataccagtgaaaaaacccatgagaatacctctgtgaataccaatgagaatacctgtggggatgcctgtgagaatgcctttgggaatgcctatggaaatgcctgtagaaatacgtttggaaagacctatgggaatacctctggaaatacctgtaggaatgcctgtggaaatatctgtgagaaagcctgtggggataccagtgagaatacctgtggggatacttgtgggaaagcctgtagaagtacctttggaaatacctatgggaatacctatggaaatatctgtaggaatacctgtggaaatatcaagaatacctgtgtgaataccagtaagaatacctgtgggaatacctgtggggatacttgtgggaaagcctatagaaatacctttggaaatacctacaggaatacctatggaaatatctgtgggaatgcctatgggaatgctgagaatacctgtgtgaataccagtaagaatacctgtgggaatacttgtgcggatacttgtgggaaagcctgcagaaatacctttggaaatacctatgggaatacctatggaaatatctgtaagaatacctgtggaaatatcggtgggaatgcctgtgagaatacctgtgcgatcaccaagaatgcttgtgagaatgcccgtgtgattaccagtgagaatacctatgagaatgcatgtggggataccagtgagaatacctgtgagaatgcctgtggggatacttgtgggaaagcctatagaaatacctttggaaatacctatgggaatacctatggaaatatctgtaggaatacctgtggaaatacctgtgggaatgccagtgagaatacctgtgtgaataccaagaatgcttgtgagaatgcccgtgggattacccgtgagtatacctacgagaatgcatgtggggataccagtgagaatacctgtgagaatgcctgtgagaacccctgtggggatacctgtgagaataccatgggaatgcccgtggcaatacctatgggatgcctgtggaaagctgttttcctagagaagatggctatggatctgctcccacacaagaaaaaaatgtcctagccgatcaagctaagccatgatcattttagcttcaatgtttttcaaagtaccttttactaatctcccaagaaggacttagaaaattcctaatactgcacccataagatgcctaatgttaagcaaatataacctcctggtgagtccctcgaatggcttagtgggaaaatggaaccctaagtgactaaacgagtgaatgcaattcacaggttgttgaataaaagccaactcaatgttggaggacatctgccaaaaatgacaattggggggtgggagtagctcatcctgagccacttttttctgacagtaatgaggctattcctggttcatgacaataaaaccatgtcatctgcatagaaaagacttgtaactttctgttc

SEQ ID NO: 474272 - DNA, 4776 bp, Homo sapiens
cagctcccagtcagagagaaagggcctcttcagtctgtctcaggagactgggagaaacagcataaaggaccccacaaggaagggagaggtaccctgggtcaggcgcttgtggagagagggcttcgcatgtaaagtgacgtcagggaaaatagaacagaaaaaaagccagggccagcccagaggcacctgagaagaatcagacccacagctcagcccagccctggcacagagaagagacaggcctggcagcacccagggaccccctttcctcagcctccacctgcaggacagcaggagcactgatgcgctgaaggtacgttctggagtctggaagcagcagaactgaaggaagtaaacacgggtgtctgggaagacccctcaagctgcagtaaagcccaggactgaattggccacctgaggccaagggtggcactccaacctcctcctaaaggctggctagagccacaggaaagggccagaagccagagaaagggcaaaggtggacccctgcctccaaacctcctctggagactgacctcctctttcctgtgccttattgtttctccctcttctctttgttcgccactgggcggtgacctcagggatcctggcctaacctggtgattgtgcaggcaactgtgtccgagaagacccttctctggaagattgaaccccaattcagccatggtgactcctttgatgtcaaactggtaagggctgagccgtgggcacaggataccactccttccagctcttctgctgtgacctgcccatggaagtccctgtggacacgaaatcctgtttggatcatctaactggaggctctctgttcttcacctccacgcgccctcttgaccccaggaggttcaggggaggaagtacgccactctccactggcaccctccttggcctacacagagtcacccctgagcccctcaatgtgtgctgaggtgggccctgctctctgcaggggtatggagagaaatagcttggggtgctgtgaggccccgaagaagctgagcctgtccttctccattgaggcgatcctaaagaggcctgccaggaggagtgatatggacagaccagaagggccaggtgaagagggccccggagaagctgcggcctcaggctctgggctagaaaagcctccaaaggaccagccccaggaaggaaggaagagcaagcggagggttcgtaccaccttcaccactgagcagctgcatgagctggagaagatcttccactttacccactacccagacgttcacatccgcagccagctggcagccaggatcaacctcccagaagctcgggtgcagatctggttccagaatcagcgagccaagtggcggaagcaggagaagattggcaacctgggggctccacagcagctgagtgaagccagtgtggccctgcccacaaatctggatgtggctgggcccacgtggacatccactgctctgcgcaggctggctcctcccacgagctgttgtccatcggctcaagatcagctggcctctgcctggttccctgcctggatcaccctcctcccagcgcacccatgggaaacacagcctgtcccaggtcttcccatccatcaaacttgcatccctgtgctatgcatccttccacctccacaccccaaatggggcagcatctgtgctacttcaacatagagattggacatgctctccccaaatgagccactttcctctccaggtgaaggcaggtagcagatgtgccctgggcctctggggaaatcgatttcacaatccaaaaatggcccacagcccaggaagctaccctgaacatgccagttggaaggctgcaccagactcaaaagcaaactaaacaataaaggacagctctcttctctcctggctaaagctgctctcctggttcagaagacaggctggatgagatctcaggccgagctctgaaatagggaggtaatcctccagcacctgtgtttcctctaacttgctgtgtgacctccagccggtcactcaccctctctggacctcatctgtaagaggagccagctggataagatgatttctgaagacgcttccatggtgggcactgaggcacagaggaggccaaggagaggttgtttgttcatgcatgcattcatccgtgacacatgagtacctactgaggactccataaacagaacgggatacagagataaacaatttgggttctgtccacgtttgtcaaaaggtggtgctggcccacctctgaaagcagaacacttgctcaacaaccttgctgttggcccaagtctaacacattctttatgactgtgagcatctcagagtgagagaaaaatgtagaaagttttttaaattctaaacaggatttagtgtctttagttatcttgctggatgggaaagggatgttgtcatttctggcacaaatgaaaagtaggacggaaagctcctttcattcagtttatctttccaggatatatgaaaagggaccagctggaagactagcctcactctgtcctcgaaagcctgagctttcattcaactccctatttccatgcaaagacgctgggcaaaccacatgttctgtctgagcctcagttttcctatccataaaatgaaggtagccaggcctgcctcaaagagcattcaggaggctctgagaggacatgagagtattttgcaaagtgagggcaaggcccagtgtggagtgatattgttattccaagattccactgcaaaagtggctgctttggatgccagcccaggatgagtagttcctgttctcagggaggtcatccgctgagcatcccttctgcacagatgtctctgattcttgtccttgcaggtggaggacagggcctgctcccctaagctgggaagcctggaatgacctcttgcacaagcctaaattccaggaatcttccccaaatcccagatcctctgcaatctacctgcacccctgacccacccaggagttggaccgggagttgggaagcctaggtcttagtcctacactccttctaatttgctgtgtaaccttaccattaatctctctgggtctcagttttctcatctgtattggaggtagcagtgctagctctgccttcaggcatgcaatatgccagaactacagacaacagcccacaggatgcaaaagtgctttgccatcttaaaaatgccagatcactcagagcctatgaatgtggatatcaacaccaggtctctagcaccgctggatgaaaggagaaggctagaggctgagggaggaaagagcagttaacaaacaaaggcagtagctcatcacttgggtagcaggtacccattttaggaccctacactcaaatgtgcaaaataaaatttctatcattttgctataactggatttactttctatgttgtttgcaggaaatgtattctggtaacttctaggttactgatgcctcaggcacttcaggtttaaaggcagtcacttgagatcgttgccctctgttccccttcttcccacaggggtctttgctaggctgaggggcagggttggagaagtgtttatgcaaatgccacctccagcctcccagaggggatgtttgcttcccagctttctcagtctcctactagtgtcttatctagcctggccttgggcatgacccctctgccctagagatgtatcaccccattcaactccctattgggggttcactccacatcctccgctgtagcctctcaccacagttgtgaatcctcgctggcttcctctctttctcatgagcaagaggaaaagctgacaactatcccacacacttctagggccatgggagccctgggccaggcagcaggtctcattcattctagacctcctacagccatttctcatgccctggtgataggaaggtcatggatgagacttgcagatctccaaacttgtaagaggaatggaaaagatgcaggtcccctctgctctggggtcccactcccctttctcagcaacatactccttccccaggctcctcttgaaacaggattttctcaaccatagagattcagatgatcagatgtctcagcttcactactgaggtaaacattgattttgtgaggccacttctttccccccaggaattttctccccaataactatttttattccctttaccttatgtgtgtgggataaaggaatcactttagaactcttgccaggtgtgtgaccttgggcaagtggcatgtcccctctctgtacctgttccctggataacaacaatttcttgcctcttagagtttctgtgacaattaaatgagttaatacattttggcacatggtggacactcaagccatattaagaaaaactcattttcccaaatacaccttctacctctttctacttctgagcttgagcatccattctgatctcaagctctattccaggagttcttaaaccagtctccaggaagtcaaggagctcccaagagactatgcaaaattgtgtgtatctgtgtgtttattttttctagggaaagggttcattgctttcatcagcttttcaaagagctctggggcataaaaaataataataataaagaatctctgtcagacatatctgagtcagatcttgacagcttcatattctagctgtgaggactacagacttgagagaagatgaaggataactattttagaaaggtaaaataaaaaaatattgctatggtttgaatgtgtcccccaaaaaatgtgtgtcagaaacctaatcaccgttgtaacagtgttaagaggtagaacttttaagaggtgatt

SEQ ID NO: 474273 - DNA, 1594 bp, Homo sapiens
gcctaagtaccaggaaattaacaccacagcagcagccctccatgatgactggtctccttctggggaacccaaacgatgccatagccctaatctttgcaaatgactttcttgaagttggcttgggtgggagccagggccgtacagcaggaaacgaaaagacacagcgctctccccatatttcaaatactcccttgtctacagatggcatcggggaagtccttactgaagaactgacacttgctgaactgaattttcgaggtggaactggtagatggcatgaaagaagttgttggaagacattcccagttccacgtgactggggaagcctcacaatcatggtggagggcaaggaggagcaagtcccatcttacatggatggcagcagcaggcaaagagaacatgaagaagacgcaaaagtggagacccctgataaaaccatcagatctcctgagacttactcactaccaagagaagagtatgggggaaactgccccatgattcaattatctcccactgggtccctcccacaacacatgggaattatgggagtacaattcaagatgagatttgggtggggacacagccaaaccatatcacttactaaaatggcaatttcatatgatttaatctaatgtttttccactgaaaagtaggttttgtgtcccctgccccaccccataactagagtactctgctcctttcatcaaattatcagatgttcttaatgcttctgtatgtgtgtgtgtgtgtatatatatatgtgtatatatatacaccacatatatacatacatatatgtatatatacacatatatacatgtacatatatacgtatatatacacacatatgtacgtatatacacatatatacatatatgtgtgtatgtgtatatacacatatgtgtatatatgtatatatacctacatatgtgtatatatgtatatatatctacatatatgtatatatatccatatgtatgtgtatatatacacatatacgtatatgtgtgtatatatatacccatatacgtatatatgtgtatatatacgtatacacgtatatatgtgtatacgtatacatgtgtatatatacgtatacatgtgtatatatgcgtatacatgtgtatatatacgtgtatatacgtatatatacgtgtatacatatcatatacacgtatatatacgtataatcatatatgtatatatgtgtataatcatatatatacgtatatatgtgtataatcatatgtatacatatatatgtatatacacatatatacgtgtatatacacgtatatatgtggtgtgtatatatacatatatgcatatatgtgtatatacatacacactatatatatgtattttaatctcctgtctgcataacttggtgccaaggttgctgtaacccctgctccacaggtcttcctgcctctcgtctcttccatatcagcttgcttagctttgcaggagacagagtctcctgaaaaagggtttctttgtctcattccacttcttaaaggagcctaccatgggtttttttttccagcgctcttcaagggtacccgaagcgaatttgcaccaaagcagcagctgc

SEQ ID NO: 474274 - DNA, 1077 bp, Homo sapiens
gattttttctgagcagtctgggagcctggagcagccccaggatgtgctccctgccccagatgtgctccctgccccggatgtgccccctgccccggatgtgtcccctgccccggatgtgctccctgccccggatgtgctccctgccccggatgtgtcccctgccccggatgtgctccctgccccggatgtgtcccctgccccggatgtgctccctgccccggatgtgctccctgccccggatgtgtcccctgccccggatgtgctccctgccccggatgtgtcccctgccccggatgtgctccctgccccggatgtgtcccctgccccggatgtgctccctgccccggatgtgctccctgccccggatgtgtcccctgccccggatgtgtcccctgccccggatgtgtcccctgccccagatgtgtcccctgccccggatgtgctccctgccccggatgtgttccctgccccggatgtgctccctgccccagaggtgctccctgtctcaagtgtgctccttgtcctagtgtgctccctgccccaggtgtgctccctgtcctagtgtgctcccagtctcaggtatgctccctgcctcaagtgtactccctgtcctagaatgctccctgccccaggtgtgctccctgcctcaggtgtgctccctgtcccaggtgtgctccctcccccagatgtgctccctgcctcaggtgtgccccctcccccaggtgtactccctccctcaggtgtgctccctgtctcaggtgtgctccctcccccaggtgtgctctttgtctcaggtgtgctccctaccccaggtgtgttccctgcctcaggtgtgctccctcccccaggtgtgctccctgtgtctggtgtgctccctgctccaggtgtattctctgctcccaccactgctcaaaagctcactctggcccctgggtctttgtacatgcaattcctttgccagggtgcctgctctgctctagccaattgtcccaccatttttaggaaccagcaggagtccccacctcctccaggaggtcttttgagtctaccctgtggttgagtctgccagccttgact

SEQ ID NO: 474275 - DNA, 572 bp, Homo sapiens
tcccacaggcctggatagatgtggcgcaggtagtaggtttgcgctgcagctgaggagcactgagcttaggggatccacctcttttataacaggtactgaatgcttacaatgcaccaggcaaatggagatacagcagccaacagaacaaagtctttgacctccaggtgcctgcattttagtacagaaagacagacaccaaataaactaccaggggagcacattgtacagggccttgtagaccaaaataaggacttggaactggctacgggatgggaagccaaagaagtttgcacaaaagcacgtcacaatccgattgaacaggctgtcgagagaacaaacttcggcgatggagagctgacgtgccagcttggagtgggtggtggtggtgaggtactcgctcactttggcctgtcacagtccaacacacaagggaagcagccttgggaacactcagcagtcaagcaggtgaacagaggagcatccgttcactgtcatcctcaggggctgcttccaggtactggaggtagaaggcaggcagccacagggtgaagatcaagtaattggagtcagcc

SEQ ID NO: 474276 - DNA, 948 bp, Homo sapiens
aggtagccacatggcagcctcccacaatgggctccagcaaaccatgggaacatgcttaagggcgcctgcctcctgatttccaggagacagcttaggactatgtgcatcaacatggtacaccataagatgcacatcattcttttgtcacctgacgtggatattctgccacatggacaggccctcaaaggggcctgccccaaacctcccaactgtaagcagcccattgactgctttgtcgttacccccattctatccatatggtgtcagtatccatttgcaccgtcagcactgaccatcacaggggacggcttaaaggaaacccatccccaggactgttggatcccatccagactgacaccaattcctgggacccataatgacccagagtgccactgtgattgttcacgtagacccacggatgatgactatttcagtgacagacgccggtggaagccgttggttttacatacctgcctaaatattttaatcagagtcaacagcaaattcatggaggagttagagagattgctgccatcatcaaggtttaaagggagcagaagcagtgattcctgtgactcacctgttcacctcttcaatgcagccagtcgtcagcagggaaacaactgtttgtcttccaacagcagaacaaagcaggaagctcatcagtagaagctgccattcctaaggtgttcttgttaatgaagcaaataaacacagcctgcagctctcagtctctatcaatcaggcttcttggtcaagcagaggtaccatctctggtttttaagggcagaaaacaacatgaaattcactggaatcatatcagaagagccccacctgcagaggaggctggagtttggcttggaagataaaaagaagccaagacagtgacacggtatcaaggctgcgagcacaagagccctgctttgtgaggagtgacacggccacagc

SEQ ID NO: 474277 - DNA, 2677 bp, Homo sapiens
ttaggaaggctgcctggaggaggcaggccttgaagagccttgacctgtacacctgagaaatgggcgtggtgactcctgctggcagcagcagtggtgcgcgtggggacacgcgtgcggggagtcaggcgcccccgggtgctcgcggcaggaaggagtgaagcctgcgggcgggtgtgggggcaagaactgaagccgggggaaccagacgggctccgggtgcgggggctccgctggggccacgccagtccgcctgcagcagccggcagctccggaggcggccaccgggcggcgctgtggagcagggaccccggggcccgcaggggcccgcggaggagtgagaataattagtaacagcccctgtctggggtgcacttcccgggggaggggagaatgaggtcactctggtccttctgtgacaggagggaaaacaggcgaagaagcccatccccccaaccaaccccccctaattcaagtcggccaacactgcggccatgggaggatccgggtttggagtcgggggctctgggtgaggtcctgattctgacctctgagggacctcgggctgctcggcctggtctcccacctgtagacggggacacctgtgcctccctgcagatgccggctgcaaaggggcgttgccaactgtctggtgccgagccagagtcagtgcgtgcctgggattgagaggcgaactttgagagatgaggataaaaataacagctgccgatgctgagctaaatgcctactcttctttatactctcttaacagccggtgaggttggaggctgcagcctcgccccttctcacagacaggcctgaagccaagaaggcaggcctgggaagctccagcctcaggctgcgggctccaggccccacccttctgccgccaccttcatgatgccacaaagtcgaagtctgatttcattacccccctgaccccaagctggtctttggctgccaggaggtggcaaggccatttgcggccccctccgcacccagtccttccctgcagtgactgggctgtgaatagcctggcccatcctctccacggccccacctttgccgtccccatgctcaattgcccatatcctccctcctctcacctgccatttcccagtcattccattgtctcgcgctctcctgcccactgaggtgcctctggcagcttcccaggtcctccctgactggttttggaaccccaaaagtggcccccctattcctgctgccccattcaatgtcccacagcagccccagacacctggagactggcagaggctgcgagaaggctggccccgtccaggctgccactctgcccacccgggcctgctggcttcccatccctgcccagcccctgctccaggccactcagctgccacgtgcagctcctgaatgccacctccgtcacccactcctctgctcccagcctgcccagagctccccactgcctacaggaaaaggtcccaggtcattagtgtgtcgtcctcacctgctcacctggcccagcccccaggcagatggggggtgtcaaatgggaaatcagagagtaaggggctccatcacctggaaagtgcaccattcactgtgacccttaccgtaggggattgctcagattcccctccagcggtgataagagactgggggtgggcctgacagggtaggagtcaggggcggtggaggagatctcacagccaggacagagtcgccgcctgctccagcccacagggcagacatcggggtccccatctgcagagaagaagataggaggcttggggcacacagctgccaagcggaactggcattggcaacaggcctgtcctttgcccccaacacgcacgcagcggggcttctctgtctcttcttggcctccttctcactgtgggcactgtgagagcggaaagcaacctccacccagcaggggctctggcttacttgccccattatcaaagcccctgcaaccgcagtggacggctccagcgaccatgaccaagaagccctggctgctgtcccaagcctgagcagaagctggtgggaaggaagccatggtgaatctacaaggattaggcctgaaccgtggaattccaggcaggcaggcagcgccgcaggagccggagtggagtgagggatcagaggagcggcacgaggagggaggcaggtgggagggctgtgaaaggggaacaggtgggagagggaaggtgagtcagccccgagcagagctgagccagcaggagtttgcagcgcagccaggcctgggagcctccctgcagctgcgggctttcggcaccgcgtggccccctcccccagtgcccacactggcactgccctttggcactccagaagtcctggctttgggctttcacttgcctcttctgtgtgaccctgccacaggaaagaggcctcaagtttccttctgcagcagcgcagcatacggggtgcacagtgatccacccaaacggcagctatgctgccggggctggtgagacgtggtcattcacaaggcagctcgctgtgctgcacagcaggttgctgcccggagtcgccatgaaggaatgtgatgcagcctattggaggagaaccaaaccccaccaccaccccagaaagccataccagctgccgacatgtacatgggctcatcgggggttttccaggcccactgatgttccagctgagcacagctgcc

SEQ ID NO: 474278 - DNA, 5926 bp, Homo sapiens
gcctgtagactcaggaggccaaggcaggtgtccagataggcaacgcccgctgggaactgtactgccttgaacttgcaattcagcctgacggtcaaatgccaagtgacaaaaccatcggtggtggggatgactccttcaacatgttcttcagtgagattggggctggcaagcacgtgcccagagcagtgtttgtggacctggagcccactgtggttgataggtcctcgggcactggatggcagctttcctgggagagtgggagagcattggtaaaaccccacgtgcgctcctgtgaagtgcacacagggacctacaggcagctcttccacccagagcagctgatcagtgggaaggaagatgcagccaataattactccagaggccattataccatcggcaaggagaccttgtcctggaccggatccacaaactgctttgggggcggcaccgtctctgggttcatgtctctgctcatggagcggctctcggtggactacgggaagaagtccaagctggagtttgccatttgcccagccccccatgtctccatggctgtgatggagccctgcaactccatcctgaccacctacacgaccctggaacattctgactgtgccttcatggtcgacatgtcagtgcaacctggacatcgaaaggcctaccacgagcagctgtccgtggccgagatcgccagtgcccacttcgagccagccaatcagatggtcaagtgtgaccctcaccatggcaagtacatagcctgctgcatgttgtaccgaggggatgtggtcccgaaagatgtcagtggggccatcgccaccatcaagagcaagcgcaccatctacttcacggaccgctttcttgcccttctctggcaggtgggcattaactaccagcccctgacggtggtccctgggggaaacctgaccaagttgcaatgggccatgtggatgctaagcaacatcacagccatcaccaaggcctgggcctgcctggaccataagtttgatctcatgtatgccaagcaggcctttgtgcaatggtacatgggggaaggcatggaggagggggagtcctctgaggctcgcaaggacctggcagctctggagaaggattatgaagaggtgggcatggattctgtggaagcggaggctgaagaaggcaaagaatactgaggggagggtgtggtgggctctcctgccgcccccagcatggctgctttcaggttgtttgcaattaaagtttctctataaaaccaagacctctgtgtgtcatgctgcttggctctgcctacaggagcaggtgggaccccagagcctgcatggacagtcagtggggtcccagcctgccctgctggcatgcggttggggtgcagcaggagtgtatgtacttaaggagctgccatggaagtgacttgacccaggagaaacaagccaagcgttgagtggataggtttcctaaattctaggaaagctaagtcagggtttcaactgaatttgcaatttttggggcttttctattgatgggatgtactggctaaaaagaagagcctagaagcagagtgtttaaatctgaggtctatgaatggggcgtgtccatgaaatccctaaagctgtaggtcaaatgtgtaaggtcaggacattttagaagggggaaagtgttactgagttctccacagtatttgtgacccacagaaggtcacaacacacccatcctgaccccccactgctccatggtaacctggaaggcagcatttaccctccacgcacacacacggtcaccttgcccctcagcattgtcaactgtcttggtagaaaaccttgcacctttcacttcaagtgaagtgtgttaacatctgtttgtaaaagacctgggaatccagatatcttttctcagaaccaaagtcagctccaggaagttgactcaaggtgaagtgacctggttagttcagctgtggcacaaccaggacctgcataaaaacctcattctatgtttgtgccataatatcatcaaaaaacagtagagaacatatgacccggaccctctgcatctcagaaagacttattatcaactgaaggagacaacacgtagcctttgctggggacagtggtgtgacaagtctctggcccatcctaggtgctgccccgcacctgctgccttcttccaggcccaccccacttgggcagcctggtagcgctgggctggcggggtgtcctctggctggatcctttgcggccgctgcattccaacagggccggcactctcccgagggaggtgctgtctttgtttctccctgaggagacacaaagcgcagccaataggaacggacgagccccgtaactgcagcacctactgaagtgtgctccttgagcaacatttgtgtctgcacatttccctcaaagccacttcaagctgaaagccctgtatcagtcctgagtcctgaggctcagaactgccaaaggcaggtcatgccccagaagcccttggccacgggtccatttagggaaggaaaagcagatattcatagctctgggaatggaatgcaacccttgtggagagcctataaacggatgcatggggggcgcctgtccatatggataagatacggctataaacgccctcatcttgccacagctcttctaggcctctttagggtgaaggcatactcccttctgagaatttctggtctaaccagttgtctagcttcacgtcctgtttccatggattgtttgtaaccagcttttgttgcaattgttactgctgattaatatcttgctaatcataggttatggaaagactgtgtttctgttctaagactctgttagaaattactgatgcacacactatattgtaaattcttatctttgtataccgtacttctacatacaaatgtactgtacttctacatacaaatgctatgttaaagaattacttcatccccatgtgaccatctcacctcataatcaaatgaccctaaatccctcactaacctacccccgccctcactaaacttaatagtaaatgctggtatatccagtgcattgttggcaccatgggaccagaaggcagtgaccccctggacccagctttcactatcttgtgtgtgtctattatttctcaacctgccaatccacctaggagcaaagagagagccccattgcattgcgggctgctggccagatccctcaataaagcctctcactctggagtttagctactggattccatgactgggttcctcccgtggtctgaatgcttgagactttccttctgaccaccagagaatcccagatgaagaccactggttcagatttccctcgatttgtaatttgcttactcctttttgtgaagatagaaagatctgcaaccacacttgggccagagctttattttaacgggatggatttccctggacttggtgttgtcagcatcagcaagaccgagaggaccctctagaggacaaatgtgcttgggtagaaggcttgcccatggggtcacagccccccatgtggagtaccttggccagggctctcctttgctctggcctggtagagtctgccccatgggctctaaccagggcatgtgtcccctgcttgactcacagtgttgggtctcccattttgtccccccagctttgtcctgaccaagagtgtgccttgactgctctgtgacctggtcagctgtatgttccccctgcaggctcaaaccctagctggggccttgcttcttaccagacactgataaacatgttgtttgttgcctgaaacagtaaaagatctgacatgttgctaagcatgtggaaactggccccgccccagccaaattccttgcacccttatataaactccacactccaccccctcactgcagcatgcctaggcagaacctccatccttgccgtccctcgtgaggccatactgcagccttgtgtgtatggaagttcccctaacacatgctttggactgaccaccctcacattaagtgcttcttcctttggaattccaactggctctcatcccaactggctctcagtcacccaagtggaaggtctggggcagtcccttgcgggagctctcctgccaccacttttggggtgagaccagatgacggttcagccaacagaacactcagcctcaatcctggttcttccctggcctcttaccaagtttagtcaaatcacctgcaattggaaactgcgctcttgaaaaaaagatgcaaccaggtgttttagggatccatgaggacatttccgtttcaccatttgtcatcttgaacaagtggaggctcctgtgtctgagacgccatggatcttggctactccagaggccactccagctccctttccatgccaatactgaaaagaaaattctccccaaatccctgcagggataggatggccctccttgtgagagtttctggggagttcttcctcagagaatgagatctttgctgctcggtgggtggtgaaggaaaccgctactgtaccttctgcttgaaggtaaagttttttggattccatataagtgagatcacatagtgtttgcctttctctacctagtcgatttcatttaatgtaatgtcttccaggttcgtctgtgtttttgcaaatgacatgttgtcatgaatttttatgcatgaggcatatttcatcatgtctgtatgctgaagtcccttcatcctttcattggttggtggacaggtaggttgatttcataccttggttactcattgttagtgagtagtaggtcactaaacctcagaaggcagctgttgcttcaacagaccgatctcattttctttaagctcacaaccacggttagaattactagatgaaacagttcttgcatttttaatttctgagggtgctccaagtggttttctcagtgcgtttcatcattgaaatttctcccaatagtgtataagaggatctctatatctaacagcaccctgaacttttatttttaaattatttctgttttggtattattcattttacttagcgttagatagtatctgagtgtggtctttatttacagttttgtgatgaccagtgatgttgagaaacaccttttttaccttttaatcaatatcataccttcttttcagaaatgtctgttattcaggtttttttgcccagtttttttgggggtattgggtcttgtatgttttgtccctctgtagcgttagtttctgctgttgtcagataacactccctttcagatatatgattcctcataatttcctttttttgatgtgtaaaaagataaacctattgtggcaacagccaagaacggtaataatcaaatgcaggaattaggtgccatttatatttccccactcagagtataagacttcctgcctcacagaagtaaatgagatttttctgtgcatatagtaaaattttacttttcatattttaatttttcgtgtcctaaaaagttaacacaatttaattaaaaattaaagccactaaaacatttatgtaacaatttctttttaaattttactttaagtcctgggatacatgtgcagaatgtgcaggtttgttacataggtatacatgtgccatggtggtttgctgcatctatcaacccgtcatctaggtttcaagcctggtatgcattaggtatgtgccctaatgctctccctccccttgcccccaaccccctgacatgccatggtgtgtgatgttcccctctctgtgtccatgtgttctcattgtaacaatttctttaattaccacataaggtactatgttatctgacaaatctatgttttacagagaaattgtagaaaagtcattcacaagtttcttcttgatttcaaactgtaacacaatgttgtaagtaatgcaactagacagaattcggctggatattgaaattcaacataataaaaaatatatatgctggtttatccatactactca

SEQ ID NO: 474279 - DNA, 997 bp, Homo sapiens
catgagtcagcagcggccggcgaggagattacccagtctcctcctgcacccgacggaggagaccccatcaacgtggagggcctgctgccatcaaaaataaggattaatttagaagataatgtacaatatagtgtatgacatcaccgatgtcttagatggaatcgacctcgttgaaaagaaatccaagaaccatattagatggataggatctgatcttagcaattttggagcagttccccaacaaaagaagctacaggaggaacttgctgacttaccagcaatggaagatgctttggatgagttaattaaggattgtgctcagcagctgtttgagttaacagatgacaaagaaaatgaaagactagcatatgtgacctatcaagacattcatagcattcaggccttccatgaacagatcgtcattgcagttaaagctccagcagaaaccagattggatgttccagctcccagagaagactctatcacagtgcacataaggagcaccaacggacctatcgatgtctatttgtgagaagtggagcagggtcagaccagtaacaaaaggtctgaaggtgtcaggacctcttcatctgagagcactcatccagaaggccctgaggaagaagaaaatcctcagcaaagtgaagaattgcttgaaccaaaataatgtatatatggaaagtgacagacaaattctctaatctctttggtatctataacttattagaatcctctggatgagggttagaagagactttttccaaacttctacatgtagaagtatcataaatgtgctacacatttatgtttgtggatttaattaaagtattttaatatggttttcagtgctaaaattggagtcagatacttcttggttttaagctgtctacctaattgctgtctcccagcagatcggtggcatgcccagtggctttgggggcaaggatagaaatgtcatcaggaaatagctgaattcattgtgaaacatgaattcagt

SEQ ID NO: 474280 - DNA, 3327 bp, Homo sapiens
gtgactatatacttacctttcccttgtggattgtgccttcaccctggaatgtttatgccctatcaccatggtgatgggattagggatctcctgcccttggtcctaagtgccactatctgtgctgagtttttcaaaggtcagagcagattgaaccattgtggtttcattttccctgattttgatttttcttatggggaacctgtgtggctgcattcaaggtgactcgaagaagccttccaaaaagcatgtgaaaaggaagccctactctactaccaaggtgacttcagggagcacattcaatgagaatacaagaagatatgctgtgcacaccaaccagtgtaggagacctcatggctcccgggtaaagaagaagaggtacccacaagaagatgacttccatcatacagtcttcagcaaccttgaaagattggacaagcttcagcccactcttgaagcctctgaggagtctctagttcacaaggacagaggagatggagagaggccagtcaacgcgagggtggtgcaggtggcccctctgaggcttgaatctactccccatgaggacaccgtacacgacatcactaacgaggacgccacacacgacatcgctaacgaggatactgtacacgacatcgctaacgaggccgccgacaagggcatcgccaacgaggatgccgcccacggcatcgccaacgagtacgccgcccacggcatcgccagcgaggacgccgcccacggcatcgccagcgaggacgccgcccagggcatcgccagcgaggacgccgcccagggcatcgccaacgaggacaccatccagggcatcgccaaggagtacgccgtccacggcatcgccaacgaggacgccgcccagggcatcgccaacgaggacgccgcccagggcatcgccaacgaggacgccgcccagggcatcgccaaggaggacgccgcccagggcatcgccaacgagggcgccgcccagggcatcgccaaagaggacgccgcccagggcatcgctaacgaggccgccgacaagggcatcgccaacgaggatgccgcccacggcatcgccaacgaggacgccgcccacggcatcgccagcgaggacgccgcccacggcatcgccagcgaggacgccgcccacggcatcgccagcgaggacgccgcccagggcatcgccaacgaggacgccatccagggcatcgccaaggagtacgccgtccacggcatcgccaacgaggacgccgcccagggcatcgccaacgaggacgccgcccagggcatcgccaacgaggacgccgcccagggcatcgccaaggaggacgccgcccagggcatcgccaaggaggacgccgcccagggcatcgccaacgagggcgccgcccagggcatcgccaaagaggacgccgcccacggcatcgccaacgaggacgccgcccagggcatcgccaacgaggacgccgcccacggaatcgccagtgaggacgccgcccacggcatcgccagcgaggacgccgtccagggcatcgacaaggaggatgccgcccagggcatcgccaacgaggacgccgcccagggcatcgccaacgaggacgccgcccagggcatcgccaaagaggacgccgcccacggcatcgccaacgagctgtatacgacatcgctaacgaggacaccctacaagccgtcgctaacaagtacactgtacacaacatcgctaatgagggcactgtacaagacatcaccaatgagggcgctttatacgacattgctaatggcaccgacaaggcacgctaacgtggacgctgtacacgacattgctaatgaggacagcgtataagacatcgctagtaactatcgcaagaacaaaaaaccaaacaccgcatattctcactcatagatgggaattgaacaatgagatcacatggacacaggaaggggaatatcacactctggggactgttgtggggttggggggggagggatagcatcgggagatatacctaatgctagatgatgagttagtgggtgcagcgcaccagcacggcacatgtatacatatgtaactaacctgcacaatgtgcacatgtaccctaaaacttaaagtatatatataaaaaaaaagacatcgctagtgagcacgctgtatacgacatcgctaatgaggacaccatacaaggcatcgctaacgatgacgctgtacacaacatcactaatgatgacaccgtataagacatcgctaattatgacgctgtatacgacatcgctaatgacaccgtacaaggcacgctaacgaggatgctgtacacgacatcactaatgaggacagtgtacaagccatcactaatgaggacactgtatatggcatcgctaacgaggacactgtacaagccattgctaacgaggacgctgtacacaacatcgctaatgaggacaccatataagacatcaccaatgaggatgctgtatatgacatcgctaatggcacccacaaggcatgctaacgaggacgctgtagacgacattgcttataaggacaccgtacaagacatcgctaacgaggacgctgtatacgacatcgctaatgaggacgttgtatatgacatcgctaatgaggatgctttacaagacatagctaatgaggttgctgtatatgacatcgctaatgaggacattgtatatgacatcgctaatgaggacgctctatacgacatcactaatgaggacgctgtatacaacatcgctaatgaggacgctgtatatggcatcgctaatgaggatgctgtatacgaattcgctaataaggacgctgtatatgacattgctaatgaggacactgtacaagacatctgtaaaaaagaagatgctgccaatgtaagacacttttctttgtcttgaacagaaatgttactttcctggcttctttccaatcagatgtagacatgaacatctgccagtgtgcattatcgatgtcatctgcagtttaatcaaatgtagacatgaacatctgccaatgtggactatttatgacatctgcaattcccttggtgtggtgctattgattggcagcctctcaccaacccatgccaggcacactggggtgtggtagatggcagcatccacgatccactgcaatgcagaggtgtttccctccacagcagttttcccccatggattaagagttgtgaaactgccaatctagatacactttaaagataaattctgtgggaaaaggtcttgtcttttccacaggtgtcttccgtgccagttttgggggacttcgacctttgactcaatcactataccccttcctattttctctctcaagttgtc

SEQ ID NO: 474281 - DNA, 2804 bp, Homo sapiens
caatccacactgtgaggtccaactgctgccatgcagacagggtgaaggcacaatccacactgtgaggtccaactgctgccatgcagacaggacacgaaccggtgctggtccatggcttgggtgttggggaccattggcctactgtattcagcacagtgacatgctgcacagagaatctgcaatctccccaagcccacaaaattcagccgtcacagtacttttcaagcatgccagcagccctccccaacaaacgaatccttaatttcttacagaaacatcttctgggcttcctgtgggacacagtgcggaactgtcggcaccgcagcattattatcactgcagctaccactggagatggctacagacaccagaaacggaagagcacctctcccctcctccggcagtgtgactttcagtcggctcctctcgtagccagatgtgatacaccgttaaacaatgggaaaaaatggaagcaccaagaaatagatccatagatatgctgaatacattggacttgtaataaaagatatgatactaaaagtcagtagaaaaattatactattcaataaatgatgtcagaaaaaacatataaatttttatccatatagaaataaaaatctgtatattacagcatatcacaaaatcctgtatctatttaggttaaagactcaaatcttaaactacttgtgaaattacttatgaatattacatgtttaagatatttaaaagtatatacagagaactaatgacgttgggcaacaaatggcttattaatcaaatgccagaatgcatgaagaagaaaagaaaagaaaaataaattagactgtattaaaatgaaaaatcctaggcatcctaaataaaggttaaatgcaagccagaaaattgggtaaaatatttacaaaatatataattgaaaagtataatatccattatataaagaggatttctacaaattaatgatataaaataaataatatagtagaaaaaatgattaagaactactacacaatattcacaacagatgataaatagtgaattattgtgaaaagacaactgaaaagagcaaggtacaattcaacagcaataagactttatgcccttttctataaaaacacaaaactatgccaagggctttaggaaccgtgaatttatatacggcgaaggggagtttaaatctgccactttgaagagttttttggaaatatatagtaaagttgaaaatatatacatatgtgtatatatatatacccacacacatacacatacacactagaaattccacaaggtaaaccttctccaggagaatacacacacatttgcagaagagatgtccaaaggtgtttgttgaaacattattggtaatagctaaaaattggaaataatcttaaagctcattactaggaaaatggaaaagtgaatcgtggtatgtgcatataatgtaaaactatacatcagttaaaattaattgtctgaatttatatggatcaatttttatatattgaaacatcgttgcattccaggaataaatcccacttggtcatggtgtataatccttttaatatgatgctgaattcagtgttgttcaagtgctgtatttccttacttatgtctggtctggttgttttattcatttgtgaaatgaagacaagggacaaaatcctaagacatcccccttaaaacggaaggaccacccacagaaaaggactgagagacccccagaatctatagcttagctaattgatggtctttctctcctgaagttagtaaagagtggaaaagatgactccttcttcaaacatgaagaaagcaatctaagtcttcaaagaacaggaagcatgagaaaatatgacaccaccaaagaaacaaaatgaaactccagtggctgactccaaagacatgaagatctacaaattgcctgacaaagaattcaaataatcatcttagggtgacatcagcaagatggcagaacaggaggccctccactcacctctccccacacaaacaatgatctggcggccattcatggacaaaactgcctttgcaagagttttaatatccaggcaggaggtggcaaaactctagcaaagcccaaaaccaaggagagctgctttgagaaggcaggtccacacaccagtgacaggttcccagttgcagactgaaagcagctttgtcctcctatggacttgggtccagctccactagatcatggtcttgcaactagccccatccactaagcacctaggaggaaccatgaccatttatgcccccagtaacaggccttctaaccatggtcctgactgcagaaactaaagcagccctgacctggcttcagccccactctaccacagtcagtcgtgcctgcccaggaattcagtgatgcctttacatacccttggtaacaggcctgctgatctcagtctcagctatggacagtaaagtagccctgtgactccattccagtcttgctttgccacagtctgggcacagtccagcccatcctgggacctggtgaaagacataccatccattctcctaataagaggaccaccaatcttgaacccaaatgtggtcaccaaagctgtcctgtgacttggctctagccctgctctactgtggtctggaggcagtcctgtcttcccatggacctacctagtaaaccagcaggagctcaatctgggacccacagggagctataccagtccatgcccttggtaataggcctgatatctgaagacttgactgtagaactagaagtggccccatgacctggctccagtcctgttcaatcagggtatcagaggcag

SEQ ID NO: 474282 - DNA, 3884 bp, Homo sapiens
tgccacgacgccaggcctgctgccaagcccaccatgcacaaggagctgcctgcgttggctgcctgtggtcttgttgctgactttgaccccgtgggggaggaggaaactgcagactttggcccattggtgctagattcagacagtgacgattccgtggaccgggacattgaggaggccatccaggagtacctgaagcggggcccagccatgcacagccttccagggctgcaggcggaggcagtagatgtaagcgggaactggctcacagcagtgcccaactgccctgtgttccccaaaacttgtacctggctcaggtggtgtggccctggcagccaggtgggatccagcaaggaccagggctctgcctccccagtcagcatgagcagagcagactcctttgagcagagcatcagggcagaaatagaacagtttctgaatgagaaaagacagcatgagacccaaaaatgtgatgggtcagtggagaagaaaccagacacacatgaaaattcggcgaagtcactctcgaaatcccaccaagagccggctacaaaggtggtgcaccggcagggcctgatgggcgtccagaaggagttcgccttctgcagacctcccccggttagcaaagacaaacgtgcagcccagaagcctcaggtccaaggtcacgaccacgaccacgcaggagaaggagggcagcacaaagccagcaacccccaccgcccttcagaagcagtacagaataaaagtgggattaaaaggaacgccagcaccgcaaggaggggaaagcgagtcacgagcgccgtacaggcgcccgaggcgtccgactccagcagcgacgacggcattgaggaggccatccagctgtaccaggtgcagaaaacacacaaggaggccgacggggacccgccccagagggtccagctccaagaggaaagagcacctgcccctcccgcacacagcacaagcagcgccacaaaaagtgccttgccagagacccacaggaaaacacccagcaagaagaagccagtgcccaccaagaccacggaccctggtccaggggatctggacgctgaccattcccccaagatcccaaaggaaaccaaagctccacctccaacgagcccggcttccaggagcaagtttgtggaatggtcctcttgccaggcagacacctccgctgagctgatcccactcttctactcccccaacgtgccttcccgctctgatggtgacagtagctccgtggacagcgacgacagcattgagcaggaaatctggacgtttttggccctcaaggtgcagtctagaagtttgctggccagaggtgagagctgccctcaggctgcccagggcccactttcaccacctggcctcagcagccagaccggcagccccaaggcccctctctctaaaacactggacccactcctggctgcaaaaggaagcatagaggcggctgccaaggcacagccagcgaggccccgggatgggagggcgccgctagggtgggacctttccatccagggcacagccagcgaggccccgggaggagagggcgccgctagggtgcccggtgacactcgcacgtcacagggccagggacctggacacagccatcaaggacttgttaaggtccaagtgaaagctcaagaagaggtccagggagcccagggctgtgtgcaggaagaaggtcaggttcagcacctcccagacgcacttccaggagcagctgggcaggctcctgagagagtggaaaaacaggcacctgcaggtgctgaagagctgcctaagtccaagagagacagctgcgagggctccaggaagaaaccccccagtgtctttggcagcagggccgagaggacgaagccccggccttcctgccttggctccttgtctgacaacagcagttcagtggacagcgacgatagcatcgaactggagattaggaagtttttggtggaaaaggccaaggagtcggggtccgagggccccacccggggcctgcccagcctgccccttgcgggcttctccccgctgctgtccacccagctcttccactttggaaagggtgtctcctgggggggcagggagaccggcctcttcagcccctacctggggctgcctctgcagggcctgtccttctcggccttcagggagtcccaggccaggcccagccctgtctttggaagcccacacttgctggcgaagaaggactgcggtcaccggccaagcaggaaggaccaggacaccttgggcagggacaccagtgatttcagcaacacctccgcagaggtgttgctgctgcagtggcggcagctcagtagtgaaggtataagacctcgagctgtgggttcgcgtcctgggttccatgcattcgtggaaagcggcatagccgacgtgactggaagtcctagccagaacaattaagcaagtaaagaaataagaatggaagtaaaatggtctccatagatgacatatttttatgtatagaaaactgtaaagacttcactaaaagactgttagaagtaataaattcaataaagtagcaagatacagagtcaacatccaaaaatcagttgcatttctatgcatagatggactggagggcattatgttaagtaaaataagccagacacagaaagtgaaatattgtacaatctcacttatgtgtggaacctaaagacgtcaaactcagaagaagagaacagaatggtggttgctgggagctggggaagagaaggaaatgggaagttgatggttaaagtgtacaaatttcagttatgcaagataaaaccctctcttgtaatagttttttacttaaaatctattttgtctatactttttttccatatatttactttttattgaatttgttaacgttacagagttcttgcactgccaaaccatgcctgagaattcaaacaaatggtacaatggacagcctcatccacccatcatacagtatattaaaacttgattcatctatattttgatattttcacaatcttttaaaaagttataataagagctggaatttaaatctgctgcaggtcttcagattttgagtacagtatgcctttacataacacctccacttactcatctctgttcattcttcagtaacataaaccccaacaacttgtacagccataacttgtacagccattcctgatctgttttggttactttttgcacggaatattctccattctctcatttttcaacccatttgtattggatttcaaatgagtctcttgtagacagcatatatagttgaatcccgtttttttaaatccaatcagccgatttatgtctttttattgggagtttaacctatgtacatttaatgaaattattgattaggaaggacttactaccaccattttggtcattgttttctgtatgtttagagcctttttgtccttctttcctcccttattgtcttcctttgtgttatagttgattttttgtagtgctatgctctgatttccttctcatttccttttgcatatattctgtagcttttatttatctgggaatgtcttaatttctccttcacttttgaaggacagttttgtcaaatatagtattctcagttggcaggctttactctttcagtactttcaatgtatcatcccaccaccttctggcctgcagggtttctgctgaaatatccactgataatcttctagaggctcccttgcacatgagaagtcacttttctcttgctgcttttaagattctctctatacttactaccactaaattctacacttaaaaatggtataatctgttatgtatattttgccacaataaaaacattggaaagaggtaccatagaagagtatattacatgcaccataggctggaaaacattttcagagatt

SEQ ID NO: 474283 - DNA, 606 bp, Homo sapiens
cagaggtgagatggcaccggatatatcggggaacctttcaaatacagagtggctgatgtggaatggggcagatgctgtgcctactctctcagaaaatagtccttctgggcagagagatgtgagtttggacaagagatcagatggtatctttacaaatactgtcacagaaaacctcttggaaacacctttagaaaagcaatcagctgcagaaggtcttaaaacattgacaattttaccagcatgttggtcaagtaaagaggagtttatcagccccgacttaagggtatcaaagtcagattctactttccataaccaggcctctgtagaaacactctgtctctctccctcattcaaaatatttgaccgagtgaaggagattgtaatcaacaaggcctaccagaaaccagcacaatccagcattcagatggatgataaaatcctcaagacaaccacacgggttgggaaagtcccccttttattaaagggctaatagataattcatcaccgtgggttctgagtccttggttgaatataagatctgagcaattttggtgcagaccaaattagaaggaactagtgtgaaacttttttgatactgaatagcct

SEQ ID NO: 474284 - DNA, 471 bp, Homo sapiens
gggtgaagactcacaacatgagggaatgcacagatgccagctatgatggacagggcaagataatccccaggcccctaggtggtgtgtctgggccctggaggtcactggtgctaggccacgcaggcttgttctcaggccctctggttttatactcaggcactggctgtagtggggtgatctccaggctccctgcagtggagtgctcaggtggctacagcagtggtggcagtggatggtgggagcctgtccctaattctatccctcctctgcttcttatgttcctgctgtcttcggaactcagtctaaatctccccacaagacttccgctgcccacatgccattgcccctgcctgtctttctctgatctctcacaccaccatcccctcgtttgctacgttctagccacaacggcctccttgcaattctagaagcaaactaaccttttctccataactgaatctctcgatttgc

SEQ ID NO: 474285 - DNA, 624 bp, Homo sapiens
tgtgagcacattgtgagcgttcaatgaagagtagctgtttactccagggaacagttatatggtaccctcaattctggctgctgagacaagtgaaaaactttgtgaaaaattactcagatgctgaaataaaagtcagggaagcaacttctaacgacccttggggtccctctagttctctgatgttagatatcagtgacttgactttcaacacaatttctctctcagagattatgaatatgctgtggcacagactcaatgaccatgggaagaactggcgccacgtgtataaatcccttaccctaatggattatctcatcaagaatggatcaaagaaagttattcagcattgcagagaggggttctgtaaccttcaaacactaaaagattttcagcacatagatgaagctggaaaagaccaagctattgcactgaacatgggagtttgtcgagtgtttttatcatgaaagaagttgtctttttatgcatttgtaccttttatatgtataagataaggtatacatgaatgtgtttaaattgactatcataaagatctttcagattccctaacaattgatcttagcaccaaaaaaaagcaccaggggatttttctccagtatttactgc

SEQ ID NO: 474286 - DNA, 1114 bp, Homo sapiens
atttgttttgctgggaattatttaggagagaaagctccttaactgaatggtaagttttaatgtgaggttcatgttttatatttctccacaaagctatacaaatggtaggagacaagtgaaaaactttgtgaaaaattactcagatgctgaaataaaagtcagggaagcaacttctaacgacccttggggtccctctagttctctgatgttagatatcagtgacttgactttcaacacaatttctctctcagagattatgaatatgctgtggcacagactcaatgaccatgggaagaactggcgccacgtgtataaatcccttaccctaatggattatctcatcaagaatggatcaaagaaagttattcagcattgcagagaggggttctgtaaccttcaaacactaaaagattttcagcacatagatgaagctggaaaagaccaagggcagttttaggtttacaggaaaattatgcagaaagttacgcagagttcccacatacccttccccactcagacacaatttctcttaataacatcttgcattagtgtggtccatttgttacagtttatcaacaaatgctgatacattattgttaatgaaagttcatatcttacattaggagtcactctttgtgttctacagttctgtgggttttgaaaaatgcatggtgtcatgtgtccaccattccactatcatacagagtagatatgtcctgtgttccacctattcatccttttcctctcctcttgaatccctggctaccactggtctttttatcatctctatagttttgtcttttcagatgtcgtatagttggaatcttaaagtatgtagctttttcagactggtttctttcacttggcaatatgtacttaagattcctccatgttctttcatagcttgagagtttatttttttcttccctttttttaaaaaaaaaaactttattgagatataattcacataccacacaattcacccatttaaggtgtacagttatatggattttggtgtattacagtataattttttagaattgtaactataacataaaatttgcctttgtaagtgtgcaattcagttgcattaattacattcacagtgttgtgc

SEQ ID NO: 474287 - DNA, 1115 bp, Homo sapiens
ggagacgtgctttcaggttcctacacatcaccctgtgtttggccatgggtaaattggtactggaggaggtggcaggggtccagctcaccatggatgatgatattgctgcgctcgttgttgacaacagctctggcatgtgcaaggccggcttcgcgggtgacgatgtcccctgggccatcttcccttccatcgtggggtgcaccaggcaccagctgcatgtggctcccgaggagcaccctgtgctgctgaccgaggcccccctgaaccccaaagccaactgtgagaagatgacccagatcatgtttgagaccttcaacaccccagccatgtatgtggccatccaggccatgctgtccctgtacgcctccgtccgtaccgcccatgtacaagggcttcacaccacggccgagcgggaaatcgtgcgtgacatcaagaagctgtgctacgtcgccctggacttcgagcgggagatggccatggtggcctccagctcctccctggagaagagctacaagctgctcgatggccaggtcatcaccatcggcaacgagcggttccactgccccgaggcgctcttccagccttccttcctgggcatggaatcctgtggcatccacaaaactaccttcaactacatcatgaagtgtgacgtggacatctgcaaagacctgtacaccaacacagtgctgtctggcggcaccaccatgtaccctggcatcaccaacaggatgcagaagaagatcaccgccctagcacccagcatgatgaagatcaagatcattgctcctcccgagcgcaagtactccgtgtggatcagcggctccatcctggcctcgctgtctaccttccagcagatgtggatcagcaagcagaagtatgaccagtccggcccctccatcgtgcatgccaccaagcctagctaggttttccatttttgttctattagaaacacttctgctctaaacgataatttataagactcctggaacacatagggaaggcttcgtcaaggaaatttgtcctatggatatactcacgtgtgaaatgacacgttcaaggatattcagggtaacattgtttataatagcaaaattttgaaaagaacttgaccaggc

SEQ ID NO: 474288 - DNA, 2398 bp, Homo sapiens
gaggaggcagggacagcacagtgtgaaaaatgccacagtgggtgatgcccagggcactggagaggaaggcttcctggaggaggtgtcaggggtcggatgaagagaaatatgggaaaggtgacaggagaaaagagtgttccggggaagaagcagcacttgcaaaggcggggtccctgcctggctcagccccactttctcctcgctgtccccagctgacccagcggctggacctgcagggcaatttgctgaaggtgatccccgcagccgccttccagggcgtgcctcacctcacacacctggacctgcgccactgcgaggtggagctggtggccgagggcgccttccgtggcctgggccgcctgctcctgctcaacctggcctccaaccacctgcgtgagctgccccaggaggcgctggacgggctgggctcgttgcggcggctggagctggaggggaacgcactggaggagctgcggccggggacgttcggggcactgggtgcgctggccacgctaaacctggcccacaacgccctggtttacctgcccgccatggccttccaggggctactgcgcgtccgctggctgcggctgtcgcacaacgcgctcagcgtgctggcccccgaggccctggctggcctgcccgccctgagacggctcagcctacaccacaacgagctccaggctctgcccgggcctgtcttgtcccaggcccgcggcctggcccgtctggagctgggccacaacccgctcacctacgcgggcgaggaggacgggctggcgctgcccggcctgcgggagctgctgctggacggcggggccctgcaggccctgggtcccagggccttcgcacactgtccgcgcctgcacaccctcgacctccgcgggaaccagctagacaccctgcccccgctgcagggcccgggccagctgcgccggctgcggctgcaggggaatccgctgtggtgcggctgccaggcgcggcccctactcgagtggctggcgcgggcgcgcgtgcgctcggacggcgcgtgccaggggccgcggcgcctgcggggcgaggctctggacgccctgcggccctgggacctgcgctgccctggggacgcggcgcaggaagaggaagagctggaagagcgggctgtggccgggccccgcgcccctccgcgcggccctccgcgcggccccggggaggagcgggcagtcgcgccttgccctcgcgcctgcgtgtgcgtccccgagtcccggcacagcagctgcgagggctgcggcctgcaggcggtgccccgcggcttccccagcgacacccagctcctggacctgaggcggaaccacttcccctcggtgccccgagcggccttccccggcctgggccacctggtgtcgctgcacctgcagcactgcggcatcgcggagctggaagcgggcgccctggccgggctgggccgcctgatctacctgtacctctccgacaaccagctcgcaggcctcagcgctgctgcccttgaaggggctccccgcctcggctacctgtacctagaacgcaaccgtttcctgcaggtgccaggggctgccctgcgcgccctgcccagcctcttctccctgcacctgcaggacaacgctgtggaccgcctggcacctggggacctggggagaacacgggccttgcgctgggtctacctgagtggaaaccgcatcaccgaagtgtcccttggggcgctgggcccagctcgggagctggagaagctgcacctggacaggaatcagctgcgagaggtgcccactggggccttggaggggctgcctgccctcctggagctgcagctctcgggcaacccactcagggccttgcgtgacggagccttccagcctgtgggcaggtcgctgcagcacctcttcctgaacagcagtggcctggagcaggagctcacattggggcctggcaactccttgcagatttgtcctggggccttttcaggcctggggcccgggctccagagcctgcacctgcagaagaaccagcttcgggccctgcctgccctgcccagtctcagccagctggagctcatcgacctcagcagcaatcccttccactgtgactgccagctgcttccgctgcacaggtggcttactgggctgaacctgcgggtgggggccacctgcgccacccctcccaatgcccgtggccagagggtgaaggctgcagctgctgtctttgaagactgcccgggctgggctgccagaaaggccaagcggacaccagcctccaggcccagtgccaggagaacccccatcaaaggaagacagtgtggagcagataaggttggccatggggcaggagggacccggaactatcgttgatgagagcaatactaatctcagttggcagtcacgtgcgc

SEQ ID NO: 474289 - DNA, 959 bp, Homo sapiens
agagggaggggaggggtatggacatgagattggcaagtggggcgcctgggctcctggtaaggtctgagcaggctggatttgggtcctgggagcctttggccaagtctctggaggacagggctcgagggcacagtgagggaggggactcagtgctcatcttcggtcgaggacagtcagtgacccacaccggcctgcccatcatggcctccctggccaacacagctatctccttcagctgcaggatcacctatccatacactccccaattcaaggttttcacagtcagctactttcatgaagatctccagggacagaggagccctaagaagccaacaaactgccaccctggactgggcacagagaaccagagccacaccctggactgccaggtcacccttgtgctgccgggagcatcggccactggcacctactactgctctgtccactggccacactccacggtgagaggcagcggcaccttcatcctggtcagagacgcagggtaccgagagcccccgcagagtccacagaagctcctgctctttggcttcaccggcctcctgagtgtcctgagtgtagtgggcacggccctgctgctctggaacaaggtacgggatcagtgctcacagccatgcagcccctccacccgacacgccaccggctgcccgcctgccctctgcagggcgtttggtgggccctggctactgctccaccctccggggaccttcggggccaagcctgggggcagctgagtcagcaacagccctgggtgtgaggcgtgaacactggcaccatcattggggtctccctgggtcaaaaaaggctcagcccctgcatctgaaggccaagaccctacccacacccagagaagagctctcttccacgggaatttatgtgttcattcattcaacaaacactgaaaacctacattccaggccctgttctaggcaccagggata

SEQ ID NO: 474290 - DNA, 528 bp, Homo sapiens
cctacacagatgttttcatcagccaggtggcaagcacagtacctgacgggtagcttttccatcctcaccctgctcccaccctccaccctcaagagtcatatggccaagattcatgacgtccccaatggctcctatagacaatgtcactattgtagaaacggagattggttttttgagatgtttttcacacttttgcattctgacaacctactgaccccacctggatctatgacgactcatgactcaaccagtccgtgtcccccacccaggggtggactcagagcacaaggattgttcccacccacttctgagtgcatccccaaccaatcagcagcacccattccctactacaccctcctcaccccccttcactcccaccccccaactgcaaaccaaattatccattaaaagcctagcctctgagttcctggggaggctgatcagagcaatcataaactcctgtccttccagttggccagccttgcattaattaaactttctcatcttttttggggggtggggtggggg

SEQ ID NO: 474291 - DNA, 794 bp, Homo sapiens
agccagagaaagtccttttctgctcttacagctcatgggactggaccagacccactatcccagccatgtctaggataatttccctccctattttaaggaaccaggagtttggcccgaacgagggcccaggcagccacgacgtggggtccaagacacgagtgggactgactccaactgcatttgaccccaacagaagtaaacacctcagccccaggggtgcgggcagtcccctccggccacgggccttcccaagccaggctcagccaaaagctacggccctagtcattgggagcagggctgggcctcagatcagagaaggtcccagtgtccccaggaacactgcacagcccctctgggaagtgtcccagtctgacgtgactgctacatggtacccggacggcctcccactcgatcttcagcgagtatgtgtcttccggccagagcgcgagggccagcagacccagggggaccaatccgagtccagatcggggattttgctaccttgcacccagctgattggctcaaggagaaccaatcagaacccagagttgggattttgcaaacaaaatgcagaagagaactttgtcttcccagtcccacggagagccagtctgtcaagaacagagatgaggagtggacaggaagagagtagtgggggcattggagcactaggcttggggagttcctgcttgtccgaatattcggtttggaatcttggcaattccacaagccagtgaatcttctttgtgggagagggcaggaggaactcagctcttggaggggcaacaggacct

SEQ ID NO: 474292 - DNA, 1188 bp, Homo sapiens
tttctggcacagacagcctgccactgctgcagcggggaggtgctacccgggctacacgttccatggagctggcaggagccctgccccttctgagttgcaagtctgtaacttctgcagccacccaagttgtggctgcagatctgagccttcctgtgctcttgcggggcaagcagggcgccaaaaactttattgccagtggtagttctggcaagacctgcatccatacagcaggtgaaggcacctggctgaccatcagtactttccacattgtatttatcgccagtcacctccacttggccgtcatagatcttgtccatgccaaacctatcaagaagcctgcgggccagcagcaggccagtacaatatgcagcagcataatttgtcgggccaaccttcacaccgtattttggcagttcgtgtgcatatgccgcgcagactatcatatccccctctatacgggcataagcaatctgacaaatgatatctctgtcatcaacaacatctgtcaaaggggagggcctgcatcgtctgctaacctgaaggatctggagaaccacgagctggaggagcagctggccgagctgcagagcggcttcaaggagctggtgctcagccccacctggggagcctccccttctccctagccctctgggtctttgtttccccacctgtgaaatgggcgttgtagccctcaacgtgaaatggtacttctgaaggcacctgtgagccagagccctgctcggatggctgttggggaggggggatggtttttctctaacctgcctccacccttcctggggccatgggagacaaaaggcagacaccaagttctggggtctccagctgcagtgggtggccactgattgcttctctctgtccggaacaaggagaacatggagatagccagtccgttgcagtcggagctgcatggcaagaaggagctgcaggagaagctgggctgaaggagacggtaaccctgccccatacaaaaagggctaggaggtgggtaccagcccctggggaggggaggtatgaggtcagaggcagctccagcgtgggggacagtgaccccagcgccctccagggcagtcctgtgactgtttcttgcttcctgccctctgacttttagaggcgggtagccccgggtctggacatcatcatactgaatagaggcatggagctgtccag

SEQ ID NO: 474293 - DNA, 883 bp, Homo sapiens
tgtccgaccatgagcgtccgggtcgcacgggtagcgtgggtcaggggcttgggcgccagctaccgccgcggcgcctcgagcttcccggtgcctccgccgggcgcccagggtgtagcggagctgctgcgagatgcgaccggggcggaggaggaggcgccctgggcggcgacggagcggcgaatgccgggccagtgctccgtgctgctcttcccgggccagggcagccaggtggtgggcatgggccgcggtctgctcaactacccgcgcgtccgcgaactctacgccgccgcccgccgcgtgctgggctacgacctgctggaactgagcctgcacgggccgcaggagaccctggaccgcaccgtgcactgtcagcccgcgatcttcgtggcatcgctggccgctgtcgagaaactacatcacctgcagccctcgggccatggcaagggaatccagagccctgggttggcgtcagtgtgaccatggacggagttgatggactgtaactaaccaggaaagctcctcctaaataaaggggcaggactcaatgattgtcaaggtcacttttgtgtgtcctcttccagctggtgcaccaagttcgtagaacctggctcactgagatgctgaacaccccgccagctctcaggtgatgggaagggagcacatggacaggggtgacattggcacatgaggacagggctttgctgtgattccttttcaagactgaaggattcattagggatttcccttatttttgtaatctcatgaaatctgcttgctgaactgtctaacccgctatcctgtgcactcatacctgcagcacctgcaacacgagagtatgtgttcagtagatattcgttgaattaaagagtaaataaatattgga

SEQ ID NO: 474294 - DNA, 632 bp, Homo sapiens
aagctgggatccccagagaagggcgacctgggtgccttggcccggaagagggaagggctccggcggttcgatggcacaatcacagatacagttgtacatcaaaagaggctgtggaccagtgccttccagcctcaaccacgccggctcaggtcacacctctctgctgtcctcaaagcagcttgtacttcgcctcttccaggaagcctcccatctctgtgctctggcccagtgccctggagcttggtgtccctggcagctcaggggtagtgtggcacagagtaggtgcttggtgttcacggaagatgctggtcatggcctcaagccacccaagagatttggcagccatgatttcctcccctcctcgggggccggggatgtggacgagtgtcaggacaataatggtggctgccagcagatctgcgtcaatgccatgggcagctacgagtgtcagtgccacagtggcttcttccttagtgacaaccagcatacctgcatccaccgctccaatgccggaccctgtgtgaatccagctcctcctctcccacgctggaagccttcccatgggcggctctactgactgctccccagattcctcgcctgcaaaatggggaagtggtgttacccggcagggc

SEQ ID NO: 474295 - DNA, 2525 bp, Homo sapiens
gaggtctggtatgggtggcgtagggtctattcctggtgggtcagtcgacgtggatgagtgctcagagggcacagatgactgccacatcgatgccatctgtcagaacacgcccaagtcctacaaatgcctctgcaagccaggctacaagggggaaggcaagcagtgtgaagaggcttctgggcttccctccatcatcacacttctgactctaggtcataattacttgtcttggtcccccacagaactatggcaaagtcttcaccatgatcctgtcattatcatcatctgcattatcaccatcatcattatcatcatcatcaccatcatcatcatcaccatcatcattatcatcttcatcaccatcatcatcaccaccatcatcaccatcatcattatcatcaccaccaacatcaccatcaccatcatcaccatcaccatcatcaccaccatcatcattatcatcatcaccatcatcatcaccatcatcatcatcatcaccatcatcatcaccatcaccatcaccatcatcatcaccatcatcatcatcatcatcatcatcacctgttctcactagctgtcaaagtagtttcaggctcaaatgagactatgaatggtgaagacctttgaaaattgctcagttctgcatacctgggaggtgatagttatggtgcaacatagtccttggtctccagaagcttgtggtctggtggggctgcatgagctggaaattcctgataacagacttagggtagcatgggtcatgaatcagtgtctgttgagttgccatgttaacagtatgagaacaattgttaggaaccaaaaggaggacatcgtttggttatgggcttcctaaaccctcaatagtgtgagaattaaatgagttaatgtatttaaagcctttgaacatagcttggcacatatgatgctgtatataagcactagctgcccttactgtgatgatgatgacggtgctattgatgatgagggtgatgggggtgatgataatgttgatggcgatgataatgttgatggtggtgatgataatgttgatggtggtgatgataatgttgatggtggtgatgataatgttgatggtgctgttatggtgctgttgatgagggtgatgatgatggtgatattgatgatgatggtgctgaagaagatgatgatgatgtatctgatcatcatcatcgtcactatgttgatgtcaatgatcacagtgttgttcaagatgtgaaagaactaaagctttgtcttttccaacaattcctgggacctaaaatggttgggaaatgaggtattctggttcatcgactgttcatataaaccatatgcatatacttatatccccacagaggtgaacagtcaggtgtgtcattcacagatggctgcttatcaagaacatacaataagaaacacttaggaaagaagactttcctttgttcaactaagcctacttcggggatggcaaatatgccatcaccttctgccatagcagacattaataatcaattaccgcaccctccagtcatttttgcagtagatgaaacttgctttccctccctgggttcctgcatctgcaggtcctgagctggagtagggttctgccaaggctggggttggagtcttggaggcagtgagccccctgtcctgcagatctcactgactgtgctctttgctgtgataagaataaaggatggactctcagcagagcatgccccgaggacatggctgccacattctccccagttcttcaccaccatgttgagtgtttgcttccagacaccctgctacatgttccacgtccatgatctcatttaatcctctcaagaaccctaccagatagggactatgccttccatttttcaagtgaggaaactgaggcatggagaggtaaagtgactggccaaaggttacacagttgatagaggagagctagaatttaagccccaaaccggcagttccgaaggtctctcctcttgaccgctgggtgatactgcctgcttttaactggctgtcccatagggactgtaagatttgtctttaccaactaatcagtgcccgaaatgtactttctctatcattttcacaacccgagcctggattgtgggaagcccgatgtgaggctgaccgagcctcttacccacttcaccaggtcaccttgaaacttctgctgcttgagaaatccctgttagcaaatccagccctggaggccacctgccccccattctgggaacagtttctcttcccaccttcaagggcaacttgtcttatggccagtggacatgtgtgatgatggcatagcctccacatgtggagacatgttgcatctgtgtccaggagtggcctggggccccctgcggtcagcctaatgccggtagagggcttgctgtagccagacaggtgagtgcctcagacagccgggaaaggctctgagcagggctggagataaagcactgttttcttgattgaatctgaagtgccttgaggcaaagtcctggctgtgtggagttggaagaaacttc

SEQ ID NO: 474296 - DNA, 996 bp, Homo sapiens
gctcctggctgcattcagagcttggggaagggtcccccactcaatcctcttaggcctgacaaagtcggacctggagatggtctgtccgagcggccggcattctatgtcgggatggaagggcaatgggctgtttaaattgctacttaggtttccagctggggcttcttcctaagagcttattttggggggaatgtctgcctgctgcctctgagcattcctccaacacattaacaacaaatgatgatgataatggtaggacctgggtactgagagcctactatgtgccaggccttggatacagcacttttcttaactcatactgtttccttctcacccaggtctacaaaggaggtggcttctgccatgatggccattttacagatggggaaactgaggcacagaagaaggggccacttggccaagttcacataggggcatacagcagggtcagggatggtctgaattccagagtctgggctcttgaccactaccctgctgccggatggctgtgggagcttgggccacctaaaacaggccaggggaggagactccagggatctggggttctagcttcattcttctgacaacgtgtatgagagccagctgttgggcccagttttcaggaaaaactgcaggggtgtagggagggggcagcagagaaagggggtcaagaaacttaggaacctcatctggaaggtgggaggagtctgaccttagccatctctatccagaacccacctttcattgcacgaaaataattctccatccatcatgatttaaccctaatatgctaaaaagcaacacatttttcttatgacaaaagttaaacacgtaaattacagagagcttgaaatatataaaattaggtaaagagagcatataaaatgtttggcgttgtccttggcatggcgtgtttaacatgagtaagctatcatcatcagcattatcaatgtttttttgagtcggagtttctctcttattgcccaggttggaggg

SEQ ID NO: 474297 - DNA, 809 bp, Homo sapiens
gaagacttcccattcctcctgagatctgccctctgccgccccagcttcttttttggagcacgggtctcagatgaggggctggctgagcagctgtgggaggacccctcatttgcaactgacatcgataggtcaagcccagcagcccctgaatgagcaggaagattggtgcagctggggtcttccacaggcaggcgattccctccctgctgggatcgtcaaccaatctggggccgtaactcacacggggaaccacccccaacccccaaccaccgtgcttggtgttggagggccagagggtgtctcccaagtcaaagacaaagtctccagggcaaacaggaaaagccatggctaccccgtccccggggcctcacctggcagccctggcttgcaggctctgtctaggatccgggaacagtgtttatttcttctctttatttttagcttttattttcatgaaacttatacaggcaaatagctctacaagggcctcaagatttggatggtgcctgcccacattggggagggccatctgctttactcaggctactgagtcaaatgttgatctcctcagggaggaccctcaacagacacattctagaataatgtttagcaaaatatgtgggcaccccacgatccagccaaattgatgcataaaattaatcatcataccttctgttttgcatctctgtccttttgtttgaattcctgctacttgtgtggtttaaaaaaactcaagttgaaaattgaaactggcccctgcttgatagtacccgcagtcagcttgcagaagcaaaccttaaaccttcctc

SEQ ID NO: 474298 - DNA, 905 bp, Homo sapiens
gcagagccacggcccaggactgcagagccatggttggcctggtcctgctggggctggggctggcgctggctgtcattgtgctggctgtggtcctctctcgacaccaggccccatttgacccccggcctttgcccacgccgctgttgctgctgactccaaggtctgctcggatattggacatctctgtggcctcctatgagctgacacagccatcctcagtgtcagtgtctccgggacagacagccaggatcacctgctcaggagatgtactggcaaaaaaatatgctcggtggttccagcagaagccaggccaggcccctgtgctggtgatttataaagacagtgagcggccctcagggatccctgagcgattctccggctccagctcagggaccacagtcaccttgaccatcagcggggcccaggttgaggatgaggctgactattactgttactctgcggctgacaacaatctcacagtgacacaggcagatggagaaatgagacacaaaccccttgccatctgtgtcaccttcttcctccagccccaggaggactgtggacaaagccacgaacaggtctggcccagtacacccagatcagagactctgaggcctccttccttccagatctctacggaggccctacagaaggtggatcaataataaattcggggttggcaggtccagtaggtcctggtgttttctgggctggagtgtgacttggggaaaaatgacttgaatggaagtacagtcagtgggagacatctattgagtggtgatggtcccagtatttccttgtgtggtgactgaacctagggcagtgccactactctgtggcccaaatgccctgggttattcctctgagttccccgtgtattattgagatgctccagcccccactct

SEQ ID NO: 474299 - DNA, 1138 bp, Homo sapiens
agacaaagtagttctgctgggacacatcctggtgatgtttctcaggatggttcaggtccctgcaattgcaggcccagagaacaggactgaaggctggaagatgtgctccctttctcctgtacacaaaacagtgccatgtgtgcatgccacagccctgaccccggacctgtccatgctcagtgacaggacaataaccaggaacctggctggagtaaccagggaccacccatcctctggagctcacatgctgtgcagagaccatgaccctgggaccctgggaccctgggaccctgggaccctggaaccgtgctgtccccaggccctgctccaggccctgctccagtcttattccccacagatcccaagctctgaggcctcctatgagctgacacagccaccctcggtgtcagtgtccccaggacagacggccaggatcacctgctctggagatgcattgccaaagcaatatgcttattggtaccagcagaagccaggccaggcccctgtgctggtgatatataaagacagtgagaggccctcagggatccctgagcgattctctggctccagctcagggacaacagtcacgttgaccatcagtggagtccaggcagaagatgaggctgactattactgtcaatcagcagacagcagtgaccacgcacatgatcttgtctgattattctgaatccttgcatgctcagctatgcattatggtaaccaagccacagtgtctttggcaataaaatgccactacttggcccccacctaacctgggatcccctcaaccacatcttgctacccaaaacaggtttcacctccactgagagaaatttatttttatattgagaagatgaaagattaattatttcaattgtgaaaattttataggacagtaatgtgaaaatattttaaaagacactttacgaagagtgaaagaccttccattaaaccactcaatatatgacactgtaattggcctacccaaaccctaagttcagctccgggttgggaccttctgggaatggacccttcatcctcacgccctcctctcctctcctctcctctcctctcctctcctctcctctcctctcctctcctctcctctcctctcctctcctctcctctcctcttctgt

SEQ ID NO: 474300 - DNA, 1732 bp, Homo sapiens
cccagtgctgggatctcaggaggcagctctctcggaatatctccaccatggcctgggctctgctcctcctcaccctcctcactcagggcacaggatcctgggctcagtctgccctgactcagcctccctccgtgtccgggtctcctggacagtcagtcaccatctcctgcactggaaccagcagtgacgttggtagttataaccgtgtctcctggtaccagcagcccccaggcacagcccccaaactcatgatttatgaggtcagtaatcggccctcaggggtccctgatcgcttctctgggtccaagtctggcaacacggcctccctgaccatctctgggctccaggctgaggacgaggctgattattactgcagcttatatacaagcagcagcactttccacagaggtccaagttcctggggaactgagaccaaaacctgccctgggctctcaggccccctccttgctctgaagatgcttcctcgcccagtgcaagcggcttcctgcagctttgtggcttcccgtaagctgactccagagccagcagtgtctgtggacagtcagcaagggtaacctgccagggagaaaacctaagaagccatggtacaaactggtaccagcagaaccctgccagatgcctgtgcaggtcatacatggtaacaacaaccagccctcagggatcccagaccgattctctggctccaagtcaggaacacagccaccctgaccatcactggggctcaggttgaacatgaagctgactattaccgtcactcatgggacaacagtggtactcatctcacagtgacacagacagattggaaagtgagatctaaagaccttcactgtctgtatcaccctctttctccagccatagcaggactgagcagggctggcccgggtcacctggatcgaagcccttcaggctgcccttccctccagccctcccggcagactgcagagagtaggtcaggataggatttggggctggcagaaccaggctgtcctgctgttatttggaatggatgtaccttggctcaagatgacctgagtggaaggacagtaagagggagacagctactgagtgctcatggtcactgaatttcctcctgtgtgttgactgaacccaagacagtgcctctactctgtggcccaaataccctggattatttctctgaactgcccatgtttaactgagaccctcaagccccagctttgtgcatcctgatgttctgaacatggaagcctttcataatgtgcactgtgacatccttcagattcccatttcaggacttatgcacccaccatccacccagggctgcagggagttcctggcttctcacagctcttccccaccagaaactgccatgcagtacagagaatagctttgctcaaagaattgcccatttcaaaatgtgtttcatgggcagtgactccctgattgccttaatctgaaagtcatgctttaatttaagaccctgaatatcaaattgaagtgccttctagctgaacgctcaattgtaaaacattcccagtcacacactccacacttctttcctgagaatgtatcctgaaaccctactgcatggaatcctccctctcagagtaggattgcagggaactcaaaaattaaaaacaaacaaacaaaaaacagtctagagggaaaagtattgaagaggagagagagagtgcacaaggagacaactctgaagtctgcaaatattcatgca

SEQ ID NO: 474301 - DNA, 1023 bp, Homo sapiens
gaaagcctgagagggaataagagaggcctgcggagcccaactgttctgtgggtccaggaggcacagctctgggaatctcaccatggcctggatccctctcctgctccccctcctcactctctgcacaggctctgaggcctcctatgagctgacacagccaccctcggtgtcagtgtccctaggacagatggccaggatcacctgctctggagaagcattgccaaaaaaatatgcttattggtaccagcagaagccaggccagttccctgtgctggtgatatataaagacagcgagaggccctcagggatccctgagcgattctctggctccagctcagggacaatagtcacattgaccatcagtggagtccaggcagaagacgaggctgactattactgtctatcagcagacagcagtgagacagctgctctcagtcttggtggccctgagactgacaaccatgatcacatgctctggagataaactcaggataaacatacacttaggaaccagcagatgccaggccaggcctcggtgcttgtaatctggtaggtcagtcctgactggatgtgcccccagcgccctgatagtttggagtttatctttgggctctgggctgctttctgaggagctcactaagaaacccttgatgccaggcccaggacctgcgcctctgctgcatgtcccagggctgcaggtgtgaagggagggtcctgctgggatgtctcagtctttttatttccttctttaaaagtacaactggtttagggtgacctgctcgggtccccttccacattgtagaagctttgttatttcactcttcacaaaaaatctcgctgctgctcactctttgggtccatgccaccttaaaaaaaaagtacaactggtttaatcatgaaatcatgtgtacacactgaagtttacagattattgccatcagcatatatatatatatatatatatatatatatatatatatactgtttctggttgggacaactgtggacaaggccatactgggg

SEQ ID NO: 474302 - DNA, 797 bp, Homo sapiens
ggggtttgaggactcagctgtgacttagggaaatggggcctgattgaatcatcagactgagggaaacccgggacaggaggagaagcctcaccccatgcagggaccacagatgcacccacagggtgagctgcaggatggacactgcccacagggatcctgggctcagtctgccctgactcagcctcgctcagtgtccgggtctcctggacagtcagtcaccatctcctgcactggaaccagcagtgatgttggtggttataactatgtctcctggtaccaacagcacccaggcaaagcccccaaactcatgatttatgatgtcagtaagcggccctcaggggtccctgatcgcttctctggctccaagtctggcaacacggcctccctgaccatctctgggctccaggctgaggatgaggctgattattactgctgctcatatgcaggcagctacactttccacagtggtccaagttcctggggaactgagaccaaaacccaccctgggctctcaggctcccttttgctctgaagatgcttcctcaccctgtgcaaggggcttcctgcagcacggccttgagaattcttctctctcagctcctctcctttcccaccatgaaatccaacaggaaacctgccctgtggtttctcatcccggacagggacagcttcctggtgcttgtgtgctgtggtccctgaatgtgcagctcttcccagctcttcaaatgcagggacagtgacaagcagctgcctgattggtgcagtcactgcttttttttcagagatgtcttcaccct

SEQ ID NO: 474303 - DNA, 1594 bp, Homo sapiens
agagggccttgttttgaggaccccagtgacttccctggtcagaacatcccagggaattcagggaaatgttttcactgctattttcccatgagcaccagtcctcaggggcattctttccagttcttctgtgcattcagcatcattcatgacattctgtttacaggtctctgtgctctgcctgtgctgactcagcccccgtctgcatctgccttgctgggagcctcgatcaagctcacctgcaccctaagcagtgagcacagcacctacaccatcgaatggtatcaacagagaccagggaggtccccccagtatataatgaaggttaagagtgatggcagccacagcaagggggacgggatccccgatcgcttcatgggctccagttctggggctgaccgctacctcaccttctccaacctccagtctgacgatgaggctgagtatcactgtggagagagccacacgattgatggccaactaataattgcaatgtctgtcaactttaaaaacatactggatgtgattaacaacagattagattatgtaaaacaaaagattagcaaacttgatcatgtagcactagaaaatattcaaaatgcagcacataaagaaaaaacaatgacaaaaatgaaaaagcattatcggatattcataaagaaaatgaagtatgtataattgacatccatggaatgtaaaaggtatgggtgggtagaaaagaatatttgaataaataatagtcaaatgtgctccacatttggtaaaaaccaaaaactggtatatccaagaagttcaacaaaactgaagcacaggaatcatgaagcaaatgactccaaatgacataatagtcaaattagtaaaatctggtgatgaagagccacttaaaagtatgattctaagagtacatttctcattagaagcaatgtaagcaagaagacagtggagcaataattttaaaatactgaaagaaaacagctgtcaaccttaaattctttatccaacaataataactttcaaaagtggaggataaatataatgttttcagacatataaaaacttacagaattgattactatcactcttgtcattagaaatgacaaaagacacccctagacagggggaaaatcataccaaattgaaatatgaattcacacaaatatcagataatgcaactccatttgaatatataatcacatttgaagacagattttaataagtgatatatgtatcacaaagcctaaagtaaacattaaacttttttataaaagaattatgactagtaagctgtattaggattctccacagaaacaacataaatcagatatgcatgtatgttatacgtgtgtgtatatatatacatatgtgtatagtatatatatgtgtgtatatatatacatgtgtatagtatacatatgtgtgtatatatacatgtgtatagtatacatatgtgtgtatatatacatatgtgtatagtatatatatgtgtgtatatatacatatgtgtatagtatatatatgtgtgtatatatacatatgtgtatagtatatatatgtgtgtatatatacatatgtgtatagtatatatatgtgtgtatat

SEQ ID NO: 474304 - DNA, 1493 bp, Homo sapiens
gagtcagctccaccagggagaccatttatccctgaccatgggagttcactcctagtgacacagtgccctccaataaactcatccccatggctgcatgatggttggtgggaaaaccaaatccactgtcctccaggaaccaggatttctagggatcctgctggtcacaggatgtcacctgtccccttctctctgtgggggtggacaccaggactctgacctcctgcccctcatccattctgcaggtccgctcaaggccacccccttggtcactctgttcccgccctcctctgaggagctccaagccaacaaggccatgctgaaggaaaatggcaccctagtcaccaagggcatagagacaaccacaccctccacacagagcaacaacaactatgcggccagcagctacctgagcctgacgcccgagcagtggaagtcccacagaagctacagctgccaggggcctggagctgcaggatcccagggcagaggtgttccctcccaccccaagtcatccagtccttctgccgacacccaataaaccctcaataaatgtcctccttgtcaatcagaaaacatgctgtctgctcatttttgtttatccactttccatcctaaatttttttatctccaaagatcaacagaatcctttggacttgtgacaatgcagcctgggaccatcttcgtgtttctctgagccgtactttttccatcaccttatccccatagaatgttccagaacaaggaaatagtcttcagaaggaaccagacatcttcattcttacccacgtctctgttgtgcttcctgctgccctgtgagcacgtccacctctggctgcccggggacacaccctccttacatccctatggccccgggagaacatctcagctcccttctttgttgtcctcggccctcactgtccagatgccatccctctctcaaggtgtttgtccatccccctccaaggccatgtggtcaccccacctgtatttcccctcatcaaagcctagagcatctccccttctccatgggcacactctgttcccgtcatcccagggaccctgccctcagcccccacaggccctccctataataatcactgatgggatgcttaccccctggaccctggtcactcaccccacatccccctctgggtgcctctcatcccacatgtgtcaccggatgccccagctgtattcaacattcctaggggacaagggtcggctctgctcctcactgacaccattatgaatgcctaatgtcctgctgtgcacaagttgtcaattgactgggtagaggtctcaatctctctggggtctgccaccattgccttttttcctggccccaatttcctccagcctgtcccttcttaggcacctggtggggcatgatgggaagatcccagtgacctcttaatgctccctgctcaggcctgaacctgccgctgtcactcagggggcattctcccctgggctctgggatgttctgctccctc

SEQ ID NO: 474305 - DNA, 592 bp, Homo sapiens
agtaggcagaagtactaagatgatgagtactcgggaggtctgcacggtgattcttctgctgcttgccagatgctccgtgtggcacccccagtctctccacagatactggatttcactgaatgtgccagattataaggtccaagtggaagagacacctgcactggagcttaggcttgctgcagagacttctcattgtctgttcccattcagcactggccaccttgtgtgtgacttgggagatgcccataaaggcccaccaggctttgtgttcatggctggtggtgtgacttgcagccactcatctttcacaggctgcacatctgtggccatagtgattgtccctagccattaccccgaaaggtgttacatatctttccaaatatccctggtggaaatgattggacctgaaattggaccaaggtggggagacccttacaccagaggccttggacctggttcctgctgcatctccccagagttctgccaagaagattggtatagttatgttgacatcaaattttaaaactttatggccaagaagcattacctgaaataacttgaagaagatatcagaagattagaagacttaatc

SEQ ID NO: 474306 - DNA, 1178 bp, Homo sapiens
gttactgctcactctttgggtccacactgcctttatgagctatgacactcaccgcgaaggtctgcagccagcgagaccacgaacccagccggaggaacaacaactgcagacgtgccaccttaagagctgtaacgctcaccgccaaggtctgcagcttcactcctgagccagcgagaccacgaacccaccagaaggaagaaactccaaacacatctgaacatcagaaggaacaacctgcggacacgccacttttaagaactgtaacactcgctgcgagggtccacggcttcattcttgaagtcagtgagaccaagaacccaccaattccagacacatcagacataagagctgaaacagcattggttgtaacatgcttggacgacgctactcggcccgcacagaacctgctcctagcagagaggagtgattggcggttccagcatttgttcattctggttcctgcacactctcgcttgcatgctgtctcctgtgaggagtggccaacgccgggctgagtgaaatgagccactccagtttctgcccatgaaggggatcaagggaactatcccatctcatctgaaggcttgtcctggatacgtcagacaaatgaactgggaaagaagagttttttatttatgtaactggttacagggagaaggcctggaaattatcaaaatttggactaactcaaaattacagttttctagaacttatgtgccttctaagctatatgtctacgtgtaagtgtgcatttatctaaagacataagtgctaacttttattctgtaactgagatctgagtcctgaagaccttcctctggagccttagtaaattttcttaatctaaatgggcccaggtgctggggcaattacccttatcttgtctcctgctaaatcatggaggtttgatgagttcttgcagacctccaataaacttgtttgtggagacctggggggtttcttcagacccccaatgaaacttgcttaattctaaatgggtccttttaagaattccttttttatctcatcatgcttcaaggcccaggaaaggcctggacaaaactcttggtgagcctttgttacattccagcatttgtattagagcactggctctatcagcttttaatatttaacttaaccactcagtcagtgctgaaacagttgttacagaggcctgc

SEQ ID NO: 474307 - DNA, 838 bp, Homo sapiens
gttcagttcgtgtttgtgcgaagatcatgttattgtaatcatcatgacattgacactgaatgtcatcatgactgcactcaggattggtcctgaatgcaggggccagtcgactgaggaggtatttgcagacataacacgaggcttctgcagatcgtggctcttttccaggcagatccacagggcctatcctaatgtcgtgtgcgtctgtgagcccaataaatatcctgggtgctccctgcagatccacagggcctatcctaatgtcatgtgtgtctgtgcacccaataaatatcatttgctgaatttggagaagtcgctacaaaactttcctgtgatatctttaaaaaatttagaggggttgaaatatacagtcatattttccagctcctattaaaaatagtttgcatatggctgtgaaaaataaaaattgtacaagtccagccatgccagaactgtagtttttaagtatcaattaacaaaaaagattttttcatatggccctagaagggaatgaattgtgtatgagacttactgctttacatgagaaagagattttttttaaattactaagaccatttacagagaaaattgccttgaaaacattcaataaatgcaaagtgttctttttccgtagacatgtcatttttgccatgcctaccactgattcacgtgttgttgctgtgctccccgttggctctgcatcctgatacaataatggagacttaattttcctttgaggaccgttgttgctgaggtggaggggtgtgcggcaggagggtggggtgtgcggcaggagggtggggtgtgcggcaggagggtgacgaacagcagaacattt

SEQ ID NO: 474308 - DNA, 1398 bp, Homo sapiens
ggaggcagactgagcctccctggaacagtggaccaccagtctagctgtgggtcctgggtacgatgctctgggcctgagtttcctcatccatagaagaggggtaatagtaccacggatctcacggagttactatgatgagcatgacacaaaatccaggtgcacctcctgccctcagtgcctacgacgtagcgtgctgtcacagtacacgccgttataattctgtgaggacacagcaagtgggccctcaccagacaccagatgctggtgccttgatccgtgtgaggacacagcaagagggccctcaccagacaccagatgctggcgccttgatccgtgtgagggcacagcaagagggccctcaccagacaccagattctggtgccttgatccatgtgagggcgcagcaagagggccctcaccagacaccagatgctggcgccttgatccgtgtgagggcgcagcaagaaggccctcaccagacaccagatgctagtgccttgatcctggactttccagcatccagactggtccatacatacagcggaatattattcagccctaaaaaggaaggaaattctgacccctgctacaacatgggtgaacctcgaggacatgatgctccgtgaaataagccagacacaaaaggacaaatactgtatgattccactcacagggagcccctagagtagtcagattcatagagacaggatggtggtttccaggggctgggggaaggggcatggggagttagtgtttaacgggggttgttgcagtttggaaagataagaaagttgcagggatggatgctggtgatgtttgcacatgacgtgaatgtacttaatgcaactgaactatacgtttaaaatggttaaaatggcaaattttatgtcatgtatattttaccagaactttaaaaggaaaaaagagagcactgcaaccagagccaggacactgggccaaggatggaggcgcagaggtgaggcaaggctggcactgggcccatcagtgttccctacctgttgctgccagcgtgggttgggaaatgtcgggccagagcctggccctcctgtcattagtcctaagactggtcatgcaatgcaggagggatggatgggtacaggaggctagaggttctgaccccagctgtcccctccagaagcctcagttccgccgcagccctgagcgtgaggtgggggtggagggcagttagggcaggactgtaggcaaggcaaaagcaaggactgcagcagaatggggaagctcagttgaacatgaaccacccaaccaatccaggtgcttctcaggtgacatttggaatcctgacagcaatgtcacctgttttacaacaccaccagtcattctgcagttgaggacactgagccacaaagagggcagagg

SEQ ID NO: 474309 - DNA, 938 bp, Homo sapiens
ctccataggaccgacaatcctctctccaacagaagattatggcagtggatgcccttctgaagagggaagtgtccagaatggttgaatggagggtgtccccatttccgcagcgactgtccctgcacctggacatcgactatctgcctgaccgctgcacctggctgtctaagaggcgtctccagctcggtgtagccaagcagaacattaatgtgaggacacagcaagtgggccctcaccagacaccagatgctggtgccttgatccgtgtgaggacacagcaagagggccctcaccagacaccagatgctggcgccttgatccgtgtgagggcacagcaagagggccctcaccagacaccagattctggtgccttgatccatgtgagggcgcagcaagagggccctcaccagacaccagatgctggcgccttgatccgtgtgagggcgcagcaagaaggccctcaccagacaccagatgctagtgccttgatcctggactttccagcatccagacttggggagggcccccagctgctgtctacatgcagtgacgaagagggggtgagtcctcagccctgctcctgtcctgcccacatctgggtcacactggggatgacagatgtccagtgtggctggccaagaatgaatgccggtggacaggaagagaatatgaatgcctgtggctggtggcagggtgactcatctcgggccttcggtcacagcctcaaattcctgtgccagagcctggccctcctgtcattagtcctaagactggtcatgcaatgcaggagggatggatgggtacaggaggctagaggttctgaccccagctgtcccctccagaagcctcagttccgccgcagccctgagcgtgaggtgggggtggagggcagttagggcaggactgtaggtaatgcccctctccagcaaagccaacac

SEQ ID NO: 474310 - DNA, 592 bp, Homo sapiens
atctgaggtgcacacattcatggccagcatggtcatcttggttatgtgttttactctatccacgcttattgctctgatgtttaggctacatgattggatattgcaacacaatgtagcaacaaagaagcaggatgatgaattttcacaaattgaacataatcataaaactaaaatccagattaagaaacagaatactgccagcatttcagaatccaactttatccacttttggtcacttgcaaaaatcaaacaatgcttctgtgcaaggtgcaagttgtcagtggatccaccattctgggatctggagaaaggtgtctctcttctcacggccccactaagaagtgccccagtggggaatctgtgtggaggctcagaccccacaattcccttctgcactgccctagcagaggttctcccaaacatattgggcacttatattggtcacatattccaggagaagggagttgaaaaatagaaaacttatatttaaattttatttaatatttcttgaaattgttttcattggaatgatgtgcatcacatatagaaggaaaaaaaaccaacgaagttatatttaaagatgtgtaaagac

SEQ ID NO: 474311 - DNA, 5277 bp, Homo sapiens
tgcagtgacatgagacagagctttctaatgggcaagaatggcatccatggccttagaggcagtgagtccccatccagaggggtgtcagcagagggaggaaccgccttttgaggagtctgcacagggttctggcctccagtgtgcagggcagaatggggtgctcctaatgggttgggttccacaccctggaccagtgccttgttcaggccaccctgggcacagaccctatgccctgtcctgtctgctctggctatcaaaatctgggctgtggtggtcagacagggcccaccagctgatgtccattcaccatttaggagaccctggggaccggcaggatgtcattgggaccaaggattatgctgctcctctgcccaaaccttgccgaggctcctccttttcacctgaaatgcaagccagcgtccttcccggactctgcaaagccccagataatttgactggctccctgcaccttctctaacatccccttctattacccctcctgcattccaccccccttcactttctcctgttcactgggctccagccacactgccctccttcccattcctccaacctgccaggcatacacctgccccagggcctttgcacttgtggttccttctgctcagatgctcttgtctcagatattcgctgggctcacaccctcacctcctttacctctgtgcttaccttctccatgcaacctctctcaaccaacatttttaataattcaaacacctcacctgtccctgctccacaatgcaatagctacagatgtgacacactttaaagttgaatttgcatcattaacattttctccatcacttgcttaagtctagacaatcaacagaacaatcagtcaggccctgatgtgcattgtttgccaattcccatggtgtatatagttccaccaaggccaattctaaactacctatgtgacgcccctgaacacagtcttggagagggatgcacagaagcacgccattatatagtattttgtaataaatataagtcaccctaggagcatcaataatagtaaaatgaggtaagataattaggacgtgattactctgagtatgcattacctttgtttttaataaaatgtacttaattggaagtttgtgtaatttaatttttttattggctacatttaacaactgactcgcaaaaattcctgaaaaattaacagtagactttcaccagccagtatatgctggctccagcatacccctgagaatggttgattaatatggaatggccatgctgtggaattttatgcaactatttaaaataatgaattggagctctataggggatttggaggaattttcacaaagaattgtcaaataagaaagcaaaatatatagaaccacagagtcatttttataacacagtgatcctctcctcaataaaaccctctctatatgtgtctgtacacattaataaataattgcataagtatccagaatcaacttgatttgggggcataggatgtgatgtgtgggaaggagaaaaggaagccaaccaaaataggaaaacagaaccaaaaagactgccaggaaagcaaattatacagatggtaacacattttggcatttaagcataatatatgtatttgttcctatcattaaaatacatttttaaaccaagtcctcatttggacagttgttcaggttatctattgccttataacaaaccaccctaaaactcagtaactcagtagttcaaattgccaacaaccatttattatgacaagccttgttaataaattttataataaaagtagacgtgtgtatatatgatatatatgtgtatatgcatttttcccctgtagcacacctctaagtcttcctctgctgataagcatcattttgtttctattctaccatggaattccattttactcatgctgggttcaaagggaagtctgaaggtcttttcttatgttgggtgacatttggcttccttctgtgacttgcctcttggtttttctgtttttctattgggttgtttattccttccctgtcaatttgtgcatgttctctgtatattaaatttcagccttacaagtggctctgtgttccaaatctcaattatatattgactttacatcatcttttgtcatacaaaaattaatttttgcattaccaaatgtttatcattccttctatagctcctgggtatctggtcttggttaggaacctgtccctttgttgagagtgttgatataacctttcagaatttcttgctgaatttttattgttctgtttaagcctttaatataaatcttattttcatatatggctaaaacaggagtccaattttattttttttctggataagtagcctgttatgccagttaaatctttgtggtttagtgaaaaacaaaataattatgtattaaataataattccccactgcattgaaatgctacttttgttatattaagttattatatatactcacatatattttatattctaatctgtcattcttatgccaatgacatattggtttggtcatagtatttttgtagtatgttttaatttgggggattttaggcaggcaatatataacactatttctgggataaaaacaataattatgtattaaataataattccccactgtattgaaatgctacttttgttaaattattatctatactcacatatattttatattctaatctgtcattcttatgccaatgacatatcgatctggtcatagtgtttttgtagtatgttttaatttgggcggttttaggcaggcaatatataacactatttctgggatgaggtcatgaagagtgcctcttttattctgtttccctttccatgacattcactgctgggaggctctgtgttgaaattgtggagacacaagatgaaagcaattggatccctgcgtcactttatggaggagagtttcttccctggagctttgcctgattacatcatctttgtgtgagtgataaacaaccctttgttttttacttcagcatagcctatcctgtcccaactaatcattggtgctgctgtgtcaaaaagccaaaatatacagcattagcttagtggctggtggtgtgtgccaaggacactgctactggaggctggggcatgacaatctgtactattaatggtaacacacttgttaaatggcacacttgcattaagaaggctaagaaagaaggctattgtaagcgtatcttggctgttgattttattcaacaaagtcttacaagaaataagtgtctagtttgtgagcagcaataaaggaaatagagaaattccagaaagttagggctttgcaaaattaaaaagccgactgcttccagatgccaactaacttgaaacaggattgacaacaccattgagcaacaaaggcccaaactacctcagggcaaaaggcagattaaaaagatccagatagactcaagaccccacatctgccagtgccttgatcttggacttcccagccttcagaactgtgagaaatatagtagaaaattcctatatatatctattttatagaattctatcttaatggcattgtggtcaaataatgtcctctgaagttcactgatacttgcttaattatacagtataaggtaactttttgtaaaagttctgtgtctgcatgaggaaaatgtgtattggcatgtgtcgaatgcattgttctagatatctccattaggtagatttcttaatcacattcagttcttcatattcttacttgtctttcatctgattgtttgacctgttatagagagaagtatgctaaaatttcccagtataattgtgattttgtctacttcttatagttctatcagttttggtacatgtattttgaggttatgtgtcagcaggtgcctaccaatttaagatagttatattttcttgtagaattggcttttatcattatgaaatgttatcctatatctttgtaatacttctcatctttaagtatactttatctaatattattacagatacaccagtttttctgtttattgtttgtttgagttggtgcttgcacagtatatcttttcccatccttttacttgcacttactttctgtgacctaatgttgtaaatgtcttttataaataacatatagttggtgttttttggtttttttaaaaatccaatctgatagtgtttgtgttttaaatggtgcatttcattcccctatatttgatgtaattactaaaatatttggttttaaatattttaattatgtgattttttttttggtctcacctgttttatattctttcttctcaattgttattttcttcttttggataagtgcattttgtcattccatgttttcctttatattagcttggaagttatattttcttttactgttattgcaacggttaccctggagattacaaaatgcatccttaacataatattgtaaatattgtttggtattcctggacaatccgaggacctaacagtactttaacttataccccttctgtgttctttgcagttgttgtgtattttatgtctgtatattttaaaactcacgagacatttttacaaccatcaaatcagccattctttatttagatttgccccagatatatccttcctgttgctctttattcctttctgtgtcatcaacctctgcctgggatcatttgttttactgcctaaagaatacactttggtatgttttttaaagttagggtctattagttattagttatatattttaaaaattttaatcttttctaagaagtcttattttatcttcactcttgaaagatatttttgctaggtttagaattctagtttggcactttcttttaacatatatgctgtttgatataatagtataaaataatattatattgtcctttagtttccagtacttttattgtagtttgcaagtctaattgtgcttcttggaagttaatctccactcccacccccaccccttttctgactgcttttaaggttttctctttgtcttctacttcagtttagtagagcttcttgaacttgtggcttgatgtctttcagtagttgcagaaaattcttagccttttatctcttcaaatagtatttctcctccaatccctttcaccttgcctactggaacaattatatctcagttatatatctcctttcagtatatatatcatatacatatatatacatatatatatgtgtatatatatgactgctaagtacttttctgtgtttttcatccttttatcccctgatcttcattctggatgttttcttgtgacatatctt

SEQ ID NO: 474312 - DNA, 584 bp, Homo sapiens
accacagacaggaaaacagtcagttggcataataaataaactgtgtatagatggatggaaggaaggaaggaaagaataaaggggggaggggtgagcaggaagagaagggaggaaatgaagaagggaaaagaaagagatgaaaaaaaggaaaggagaggagaggagaagaaaggagaagaggagaggagaggagaggacaggacaggaaaggaaaggaaaggaaaggaaaggaaaggaaaaagggagggaaggaaaggaggaaagggaaagaagaaggaaagaaagaaaatgaaagaaagaaaagaaagaaagaaagaaagaaagaaaaagaaaaagaaagaaagaaaaagaaagaaagaaagaaaaagaatttctatctcagattcttatattactcccagcccaagggaaagtataaatggttcttccttaaaaaagaaattaattatgatatgcgacttggctgaaacagcttagtaacgtctatttcatcctgcactgtgaagactttgatgtcactcttcaaagggagcagtctagctccctttgaagcaacctgggatgacaattgttttgtcagggct

SEQ ID NO: 474313 - DNA, 611 bp, Homo sapiens
gtgttctcattgttcaactcccacttatgagcctgcgccccagccagaccacattccacagccttgaagtccaggcagataattgtgaacacagccttcaggtcttcactagcataagagtggcacccacaaatcccagttccagatttccccgtgcagccctagataccacacatgccccagcttccagattgccctctacaccctcacatcagtaccaggccagccttcccaaggatttcagcaacaagcctgcctgcaaaccctaccagacaggccacagacaatcacttgatgagctgactggtgaagagctttgctgcagagaccattctgtaaacgctggaatagtacctgctacttcaaatgcacagacactaataaatggccacaaggattatgaataattagggaagcataataacatcaaaagaacaaaataaataccagtaactgattccaaaaatggagatttatgaactgtctgacaaagaactcaaaagaaatgtcttgaagctcagtgagctacagagacacagacacagaacacagaacagagatgaaataaaatcaggaaactaatatatgaacaaaacgagaagttcaacaaa

SEQ ID NO: 474314 - DNA, 1444 bp, Homo sapiens
gtcagcctggtgttcacatgcatggcacagctccccccagcccacctgcccaggggccccaaaggtctcagcctcgcacgagatcccccgactttccaaacttgtcagctttccaggtttgtcttcctggacgtgtttctgcccaggggtttctgctgtgcctgagaggtggcccagggtcatgtgacgggggtagaaactagcccagcaggcctgggtttgcctgccactgtgcttctcacttgctgtgtgacctgaggagtaggcccagggctggtaccccctcacgatggccccacacccagtcacagccagtggagaccacagtagaggggaggggactcctctgggcttggtcctcattggtcactacctgtggcccaggtgccctgggtacttgggcctcaggagaggaccgctttggccaccacgtccaccgcactgccacagctcccctcactgtcctcacccccctcctcagtttcctcttgatggtcagctggcccgccccctcctttcttgcagaagaggaaacacaacacagccctgtgactcttcagggctcccagttttctctgtctccgccaggctggtggggcttgctgctgggcccattggggtgagatgtgtgggccccacagccttcttcctgcctgccccgggctctgaggctcagggacctggagacccctcttttctatccgcctctaacaggatgagttgagcatggaggtttctagactgggcctcctggcagtgtctcttcccagccccagggtgctattgaagggatgcgaggcaaggagaaggattcgagccaggagccccgaggagggagctgcttgagggacctattgcttgcagagagttctgctgtccccagagatgcccgtggctgcctcgccttcctccatgcctctgctgacaggtcgttttccaagcatcctcacctcctgatgcttcccactccccttctcagctcttcccctgaggcattcattgccatctgttagattatacacgtgcttgcttatgtgcaaggagtgaacggattctgttctttagaagatggggagggaggctcgaatctgcaggccaaggaatgcagaggggcaaggacatcctaggtttctgatttgaggatctagctgggggtggagccatttgcttcaatggggcactgaggcgacacttccctgagaagcttctggtctccccacttgcattgctgcccacagtggcccccatcggccccctctgtagcagctaacccattgccagtaccaagcagtgcttggccgggccccactgattctgtggctggctcagctcacttgcagccccctggatactgccctgaacttactattaggggctgaactgtgcccccacccttcatatgttgatgttctaaacccccatccctcagaatgtgactttattt

SEQ ID NO: 474315 - DNA, 715 bp, Homo sapiens
tgtgtgactgcagaggaagttggggcagcttatggaggctgtgaagggcgtgataaagagtgtagacttaagcccgtgggtgatgggggcctgaggaactcaaaaatccaggcacaggctggaccctcagaattctccttcgcggtttgggagtcggagcagcacactgcaaggccggctgcatgagctcaccttgctctggtgaactcagtgaccaggtgtgggtggccccttgtgcaagcttactccagggccacagaacactcatgggtcccactgggccactgccacctgctgagggactggctgaggaccctgtgacccctctctgcctgtgtgatgggggacaaggacgtgagctggacaccaggctggccgccttcaaggccagctgtgctatacgttgcaggtggctttggacttgtgccctggcctcccagagcctcactgtcctcttagagagtggcaatgccagtgccctaccaggctgctgcagggaagggggagatgggctctgcagaggcccagagctcagagggactggtaccaccatcagctgcattcccatcacctgggtgatgagaccccccaggaccccaggggatggcagtgggagggacagttgctgcccagtcccgctgaggcctgggggacccaaagtgcaggtgtaggtgcctccagcacagagtggattggattagtgtgaatggtggca

SEQ ID NO: 474316 - DNA, 1673 bp, Homo sapiens
gccctccgttcctgcttcctggtcacaggaatgaatctcctaaaaagggttaagcgaatcgtggctgtcacacgatgccatgcctcctagaatcagcatttctccaaggagtccttgtttctttatttgagaaggatattaggaactcagacttcagtattcagtgtgctcatttccactggggtattatcacctccaggacctctaagctgacggggattggtgatgaatttttaaatacaacaccttgctctggcaagaatacagagcaacaggtgttcacattccttgctggtgggaatgcaaaatggcacagccacttgggaagacagtttggcagtttcttacaaagccaaacacaagcttaccataccatccagcaattgccctcctgggcacactcaagggatttgaaaacttatgtcaatgtaaaaacctgcatgcaacaatttatagcagcattattgataattgtcaaaaacatgaaacaataggcaaatggctaaactgtggcatgtccttacaatggaatattattcagcaatagaaagaaatgaattatcaagttataaaaaaacatggtgaatgtctttgacatggacagagcaaagagatatatttgtatatactgacctatgtatatacgtatagctatagtttgaataatttttatggatcttttctcatggtccctgtcttttttgtttctgtcatctctaatatattgtgaagcccatcgagtgaatttttcatcaaaattattgtactttttagttctagaatttgcatttttaatagtttttattcttctgctgagtttcctacttgttcattcattaatacaatatcctttagtttctcaaagactttttttctttaattctttggacatatttataatggttattttagagtctttgtctactaagcacaatatcagagccatctcaagtttagtttctattgactgcttttttccttgactgtcaatcacatgtttctgtttctttttgttccacgtgattttgttccaagtgattttttttattgagtggttggcattgtgtataacctattgtagagatcctggattttgttatcttcctctaaaaagtgtttcttattttatcaggcagttaaattactagctgaccactttgaacttatataggcttgtcttcacactttggtcgtgtggatggtagaaagactatgtgtttccttgacccctttggtttggcaggagttctctcttaattctgttttccctgcagatcttttcaaaaagccccttaggttttgctgggggaggtttagtataaataagtatactaggctgttgtccttactcctaaggcatagccttttttttctaacattagaataccatttattatgatgctggcttgctatactatttatgtttttttaaatttttttatttctgtaggatggttggaatgacaggcccagctatgaggccatgcttttggcccctgacagcttcaggaaataggtggatgccctcccctctactctacctaaaatctgcccactaggcagaagcaggacatacccttgcttttgtggctatggagctttctttattttcctgtccttgtcatctggttcttggatgatggggagagcagtgagaaggagtcgccttgtga

SEQ ID NO: 474317 - DNA, 1091 bp, Homo sapiens
tctgcagctgagggtcctgactattaggaggaaaactaacaaacagaaaggacatccacaccaaaaccccatctgtacatcaccatcatcaaagaccaaaggtagataaaaccacaaagatggggagaaaccagagaagaaaagctgaaaatttgaaaaaccagagctcctcttctcctccaaaggaatgcagctcctcaccagcaacagaacaaagctggaaggagaatgactttgatgagttgagagaagaaggcttcagacgattggtaataacaaacttctctgtgctaaaggacgatgtacgaacccatcacaaagaagctaaaaaccttgaagaaagattagatgaatggctaactagaataaatagcgtagagaagcccttaaatgacctgatggagctgaaaaccatggtacaagaactgcatgatgcatgcacaagcttcagtagcccatttgatcaagtggaagaaagggtatcagtgattgaagatcaaatgaatgaaatgaagcaagaagagaagtttagagaaaaaagagtaaaaagaaatgaacaaagcctccaagaaatatgcgactatgtgaaaagaccaaatctacatctgattggtgtacctgaaagtgacggggtgaatggaaccaagctggaaaacactcttcaggatattatccaggagaatttccccaacctagcaaggcaggccagcattcaaattcagaaaatacagagaatgccacaaagatactcctcaagaagagcaactccaagatacataattttcagattcaccaaagttgaaatgaaggaaaaatatccagggcagccagagagaaaggtcaggttacctaaaaagggaagcccatcagacctacagtggatctctcggcagaaattctacaagccagcagagagtgggggccaatattcaacattcttaagagaaagagaattttcaacccagaatttcatatccacccaaactaagcttcataagtgaaggagaaataaaatactttacagacaagcaaatgctgagagattttgtcaccaccaggcctgcctcacaagagctcctgaaggaagcact

SEQ ID NO: 474318 - DNA, 1696 bp, Homo sapiens
cctgcataatggctggtctatttttaaagccaccaaagggatgaattgcaccctgaagttctccttcaacacagcatgctccttgattctgggacattcctagagaaagggacagtttcatatggagggaaaactgggctggaaaaaggtctatgcctgggccaccacccacctgggcccctgcgtgtggagccctggaggcagacagaagctgccccaagaagctcagagagtatcagactgggatgggacgccaattctgtgccccttcagcctgtagaaaacaaagccattcacatcttcctgaacactaatgacagctgcagaaactccaagatgaaaaatgtttgtgcttcaaaggacaccatcaagaaagtggaaagacaactcacagaatcggagaaaatttttgcacaccatctatatgataagagatttgtatctagaacatataaaaaaactcttgcaactcaataatacaaagacaaaccaactaaaaaagaggttgtgtattagaagtgttatttgcagggcaggattctctggtgaagccatctggacttggagttttctttgtgggaaggtttttagttaaaagtcaatggttataagattatccagattttctttttcttgtgccaattttggagcatgtgtttttctagaagtttatccattttatgtaaagtttcaattaaattgctacagtttttcctgatagcctctatttagtttcctatagctgctacaaccatttatcaccaacttggtggcttaaaacaacacatatttattattttacaatctggaggccagaagaccaaaatgggttacactgggctgaatcagggtgtcagcggggccatgctccctccagaggctctagaaatgcacccatttctttgcttttcacagcttccagaggccacctatactccttagcttgtgcgtagccacttctcttatcttcaaagatgccatttaaatactatgaacaatcatatgccaataaattagatgacttagatgaaatggataatttcttagaaagacacaaactaccaaaactgactcaaggaaaaatagaaaatctgagcaaataaataaagagattaaattgactgactttgttctggttagtgtttgcagggtatgtgtttttccatccttttacttttcacttttccgcattcttaagttttacatgtatctcctgaaaacagcatgtagagttttgaaaacccatcctgacaagctttgtctttcaactggagaaactgcccatgtagtttcagtctaattgctgataaatttccctttttcaatcctactttgtatatctatctaacctcttctatgttatttttcactctgttcttgccctttgggattgattatatattttattattccatttttgtcctgtcttagtttgacaattctattgcggcttacctagaaatttcaatacccttccttttcttgttagcatgaaatattaattgctacttttccacttccccaggaaatgcaaggatctacgatctgtctaattccattaccccctttccaagttatacgctcttgtgtttctatatgttccatatattttaatataatatactccatatattttaagctccataagaatgtatatacagtttgttctcatttcggttttttaaacaactttatc

SEQ ID NO: 474319 - DNA, 790 bp, Homo sapiens
ttaagaacaagtttgtcttgatatggggaaaaaaacccccacacagcttttggagtcagaaaggactggcgaaagcagaggaggtgaagtggctgctgaggaggtagtgaaagcaacccccaaattagtgccaaatgtgatgctcggggagaaaactaaaggaccagcagaatcctctatcaagtggcactctggcatattgtctgacagcacggacgtagaatgtggaagagcaattcctggatatgtgcctgtcagcggtcacttctctttacccaggaaaacgtctgctgcaaagagggtgaatcaggtcctgacagctccaagtctgggttatatgatgcaaaagaaaactcgaggaactcaccacagtgttattccttaggtcctgaggtgccttctctccacctactgcatcttgtggtttttttttttcaaagctgtttttcgatacgttttctgcaaagaataggcatgagtgcatctactccatctcactggaaatggaaatcaactacattttcttttaaaaggtactttttcacagggccacactttcacataaactgtcacaccccacccccatgaaatgactgaatccaatttttcagactttttttctgacacaggggtgactcctctctcctccatcccctggattcaaataggaagcctggctgtgttcccagccttgggtccctattatgtctcaggtccagagcccggcaggcccacgtcaatactcagaagtttgtgtttctggaccattgtgaagtttatcttgtttatc

SEQ ID NO: 474320 - DNA, 667 bp, Homo sapiens
tattatttacaaatggctttttaatcatgcctgaaagtctcactcttttattgggtagagatattcttgttcacacaggggcaagcatccttatagccccaggacaaactctttgtcccctcctgatggaagctaatattaatccagaaatgtgggcaactcaaggaagaataggtcaagctataactgctagaccagtccagatccatcttaagaatcctacttcttttcctaatcagaggcagtatccccttaagccagagctaggaaaggacactttcctccgcaaggaaactcgggaacctgaatatgattgtgaacaagtcataatacggacctatgcagccagggaagatctcagagaaactcccctggagaacccagactggaccctcttcacagatgagagctcttttgtagaacaaggaatccataaggcaggatatgcagttctctaaatgacgtcattgaaagtacatctctccctccaagcacaagcactcaattagttgagctaatagctctgacaataacacttaaattaaacaatggaaaggtagctaacatttacactgactccaagtatgctttcctggttttccatgctcatgctgtcatctggaagggaagacattttcttaccactaatggatctcctgtaaaatat

SEQ ID NO: 474321 - DNA, 637 bp, Homo sapiens
ataacatcccatgaggttggttttagtatcttcacttacagaggaagaaaccaaagcacagagaaatcgagtgatttctggaaggcggaggttctcatgggggatttggcaatgtctggggaacactttgggttgtctctgggtgaaggccagagatgctactgcacatcctgcagtacacaggacagtccctgccaccaagagtgatgtggctccaaatgtccacagtgccgtcctaggaaaccctggcccaagatctcaccgcctttcctcgcagagtttggacttgaatcttgagctctcagccactctgttctgcgatcactatcctcgtttcacgtgtgagagaaaacggaggctccaacaggcacccatccccccagacaaggcagagtactgggggtcattctagaccgttccctctcacccctcatcctgtcaatcactgcatcccatcgtttctgctttttgaccaccttgatccgaatccatctgtttccacccctgctgtcatggcccatctgggataccctaatctcctgcgtgggcagtcaccctagaaattaatcttttatttcagtaaagtggcccatgggtgggacaacctggccgcccaggggaacgggtgctggccgcc

SEQ ID NO: 474322 - DNA, 763 bp, Homo sapiens
gcttaatagatagagggcctgtctcagccactagaaatgcctgctgaccatggggaagcactcgcctctgcgagcgtgggcagccatcatcagaagggcaagcccttgaagaaggtccccacgttctgcaggatctgtgaccttctcaggttcaggcctgagacggagcctccacagctgacccacatcagcagaggaatcaagggctgggccctgggaatcagactgtccaaggacaatgaacatagtccccggctggtggcgtctttcagtttggtggcctggggctgcttacaagtcaacctggagcctgacattcagcccagctctgcacctcggtggcccaggcgcctccacacagagctcgctgtgctgacggggagttgggaccctgtgctggacacctgctggtggtccaggcattgcgcctgggatgtacgagggcagcaacccaggacttctggctcctgcaggctggcaggagagggttgggggcattttgatgaagtgaaatgtgaaatggataagatgctgaggcgcatgagagagcagccccgatgcccccaggctgtcgggcaccctgctggaatccggaggtcacccaagcaggaacctgctgtttctgggttcatgcccccatgtgagagccacaccgtgcagggaccaggaagagcctggaagttgtctgacctggctacctctggccagacccatctgggccccccgcatgcatgagcacatctggaaggggagcaacaaaaac

SEQ ID NO: 474323 - DNA, 2048 bp, Homo sapiens
ttgaacttggggctttcagaattcattctcttctccttcctgccctcacagatgtgaggtttccccatttgagaactccgtgtaaatgaaattatccagcatttgtcctttggtatctggcgtctgtcgttccacatcatgtttgtgagaagccagtgtctggaattcctcatcgtccacaccctcgcatttgctgctgtcagctatcttaattttggtctttccaagtgggtctttccaagtgggtatgaagtgatggtcatcgccatttttgtaggcatctgcctgacacttactgatcaaggcttgcaagcttatcaacctaatgcttccacactcatcaacctaatgcttccatatcactcactttccgcctgtgaccctcttcatcgtgtgttcgacgtgctggctgcgtgtgaatttcttggatggcagttggcctttggcatgtggacgtcctgtctgtttctttgggctttctcatctctggagagaattagtgatatgagtggaagcaacaatgctatttatgacccagactcagaagctatatcctgtcatttccacaacatccagttggccacatgtgccatcactcttgctatgggaggtgggtccacagaggacaccagtgataatggcttaggacccaccctactccattctgacctcgtcttaactaatgacactgtcagcagtgaccagtttctcacgtggttggtgtttgcggccaagaacttccacagggacagttcagtcggctgcctcactggggacttccatcctggcagtgcctgggctcctcaggaagacagtgagatccataataataaactctcaggaatatggcctggtcccgatgttggcagctggctgacttccccggactctggctttacatgggttggggaagggcgagcccctggaaatgcagagatggtggccactgaagtgaaggccccctgggtcatccctggacctcctccaggcatttgtaaagactccagaccactgtggctttcagggcccttgttacttccttagacttcagtgttaaaatctttcacttccaagaagctgagtaagccctgacttgacttatttagttggctaatctatgttaaagccaccagaaatgatttatcgatttgtttaaaagagaaatcccagaaggaagataactttcacatttttttcggcagatcccacattcagcctgataatgcagactctttcaagaagcaactctacttgcagtttcttatggatcttggaaagtgaaccctgcacaaacaagcttatttatacatggttaattttagcttttacacaagtaaatgcttttcctaagaatggtaacatgtacatactgttttgctttattcacttgacaatatatcttagaaatgggaccatagctgacatacagaactgcctcattgttttcagtgcatgcctagcattccattatatgcatgcatcgtaactgactttgccagtcctatattaatggacatttatggggtcagagcctggaaacaatgttccttcaatcctttgccagcagggatcttctttagtttctgccaataagggccactggtgtaaaatttggaaaccagacaaagagaagctgacttttggcaatggcgtgagacatgggcatcaataaaggctgggtcgtcactgaattcacaatgcagcctctctcctctgtgtgaccccttataaaactgcttcctgcaaatatggctcctctgtagctcctggttcagccccacctttcctctctggacgctgcagactcggtccatggttgcttttgtcgcacatctgtgtaccatttctctggtcttaatcagagattgtcagttttcattctggttttgtctctttccccttgacgtctgcaccacgggcatggtcccgtggcccctttcacacctttttctggcttttattttgtatggtagccattcctcatacattgatgttcagggctatggatacctttcttgttattttcttttctgcttttagttaatgtc

SEQ ID NO: 474324 - DNA, 1478 bp, Homo sapiens
cctggaatgtgatgttagagggacacaaggtgcttgtagatgtaattgagatggtgaagcctctgcaggcaccgtggcttcagccttctggcctctagaacagtgagataatgcgtctctgttgttttacaccacccagttggtggtcattgggagtgggagaaaagatacatccacagatcacactgagcttcaattattttaaatttcagaatgagtttgtattccttttggaaatttttgaaactacaaacatccagttttcaccaaatatcccaacaagtttctctatagcaaaagcaagcccagccatgtgccgcacttcagtctctcctaatctggaaaagtatctcagtctgtgtttgtctttcatgacactgactttttcattagaattttgtagaatgcctctctttttaagtttatttgatgtttcctcagtattcaattcggattatgcgattttggtagagatacccaaaagtcatgctgtgttcttctcagtgcctcatgggaggaggcccatggcgtccacttgccccgttgtgaagctactgcggatcactcggtgaagggggtgtcttctaggtttccgcactgtgaagctacaatttccactctataactatcaaatatcacatgaaggaggtaatttcagtttatggaaaaggtctgtcattcctcaaactttccgccattagttttagcatcctttgatgactcttgcctgaatcagttattataatggttaccaaatggtaattttctaattccatacatattccttctacatttattagttggctttctactgtttggagccttcttgtgcatgtatgagtgtgtatgcatgtgtgtgtatgtgtgtatgcatgcatgtgatatgcttatgtatgcatgtatgtatatatgtgtatggatgtatgtatatatgtgtgtacacatgtttatgtatgtttatacgtgtatgtgtgtatgcatgtatgtgcatatgcatatgtgtgtatgtatgtatatatgtgtgtatggatgtgtatgtatgcctttatatgtatatgtgtacatattcctgtatatgtatgtgtgtgtatgtgtgtatgtgtgttcgtgtatgtatgtgcatatgtgtgtttgtatgtgtgtatgtaggtgtatgtgtatgtatgtatgtgtatgtgtatgtattgatgtgtgtatgtgtgtatgcatgtatgtgcatatgtgtatgtatgtgttcgtgtgtgtgtatgtatgcatgtgaatgtatgtatatatgtgtatgtgtgtatggatgcctttatatatatgtgtgtatgcatgcctgtatatgtttgtgtgtgtatgtgtgtatatgtgtgcatgtgtgtgtgtttgtgtgtgtgtgtatgtatgtatatgtgtagtgtgtgtatgaatatgtatgtatatttgtaagtgtgtatgtaggtgtgtgtatgagtgtgtatgtatgtatgtat

SEQ ID NO: 474325 - DNA, 1287 bp, Homo sapiens
ccacatgagctgccaacagcccgggctgctctctctgaagtgcggctcagagcaccctggggacggggtttgtccctgcattctccacgcgactggcacagggctccacacgctcccagaccagcagaattccaagtgattggaaggcagctgaccttgttcagcaggaatgtcctggctgccgtggcttctgctgtgtgattagcggttgtcatccaccctgcctgccccgtggagaggccaggccactctctcgtcagagaacctgaggcccctcctcaatcctccatgcatttgacaccaaacacatgctaagctcctgttatcccactgcacaccagtggcaaggttttaaaaaaggttttgctgtgtgtgtcgattagtggacaatgaggttcaacattcttcatgctctcatcaaaccggtaacttcctggttcttgccatgcagcctacaaatgtgtctccagccctcgctgctgtgtgggtttgccatctcaatcagagaactgcagatcctcctgggtatgcagcgaaagcttgcgcagcagagtctgctccccagccctccatcctgggctgcttcccagcttgcttgggccaagagcacgtgcagaagcgactttgtccaagttccaggcctgagcctaccggtgtcttatccccattcctgccttcctcagctgctcctgccactgaagacacagagtcagcctcgctaccaaagacgtgagggtcacgggcaggacaccgtctctctccacacagtacatggattcttgtggagagacaggaagaagatgctcacacatgcgaggccattccagacagtggcgcaggctccaggcctgtgctgtcccccgcagggccacccaccatgcatggctcaagtgcctgaaatgtggccagtctgaactgagatgtgttgtcaatggaaaccacacacaggattttaaagacttgttaaaaaagtcaaatatctcattaaaatttttctatattcatcacacattgaaatggtaatatttcggacatgctggggtaaataaaatatatcattaaaattaatttcacctagttgtttttactgactaaaaaatctttttaatgttagagtagattaacagagaagttgtgaaggtgatagagtcttctgtaccccacacctgatttcccctattgctaacatattccattccagtggtagattttccacaactaacgaattaacaatattttaataataatctgtattgttaaacttaaataatattcataactttatat

SEQ ID NO: 474326 - DNA, 572 bp, Homo sapiens
actcagattttggaggccaggactctgcttctctcagtctgcgtctgccaggcacaacatcataagccaagcacctttgtgaagagacagaagttcagagagagtctaaatgcaatgtccttcctggtcgctggtggaggaggtgatcctacaggagctgcttccgcaggggacacgtcctgatgcatgcacctgcgcccacacctgctcatcagccccacaccctcctgagggaggctgcccacaagcccgtggcctacactcctgtgccgacaggccccctacatcgtgggaccggggctcctcaccaggcatctccaggcctcctgatttgacccagtccggcccacacagccccctctggcttcccaccttatgcctgcgctctgttggacctatgtgcccctccagaaccctccattcctggggctctactcacgacacttcacagccccttcagggcatctgctatgggctgagtgtgtgtgtcctgcagtttcacatgttgaaacctaatccttaatgcaatggtattaaatagtattaaaaggtggggcccttgggaggtgatt

SEQ ID NO: 474327 - DNA, 3130 bp, Homo sapiens
ttgggacaaatctctgatgggtctaagcataatttttttgaagaaaaactctttaaacaaatgaaaatcaaatttatgtactttaataagatactgaaagtagagctcttagcagactccctggcacataataaaaactcattgatattagctatcatcatcaacatcaccaacaccatcatcatcaccatcatcaccatcaccaccatcatcaccaccatgatcaccatcaccatcgtcatcaccaccatcatcaccaccaccaccatcatcatcaccaccatgatcatcaccaccatcaccatcatcaccatcaccatcatcattaccaaaatcatcatcaccatcatcgctatcatcactatcaccatcatcatcatcaccaccatcattgtcgccatcatcaccaccatcaccatcatcatcaccaccatcattgtcaccatcatcaccaacatcaccatcattgtcaccatcatcacaatcatcactatcaccatcatcatcaccatcaccaccatcaccatcatcattataatcactatcatcaccaccatcatgatcaccatcatcatcaccaacatcatgatcatcaccaccctcactatcatcactatcatcagctgaagggaatcgttagctgatgcacacagcacagaaacgcccagaatggctggaaaggtgccctgtggaaaacactcatgaatgcttattctcagcttgtgctagagctgagtgtaattttttgtgcgtgctggaccctttgctctgtcctctcttcgtgaacatcctgaaattgaggacagagtgtgcagccacgactctgagatgggacatccagtgagggtgtggtgaccaccccagttagggtaggctgtaggcagttagaagttttacaaaagtagtgattggaaatgaactcttctcttaatcccctgccttcttcatcaccttcatctcttcctcatctatatcttcatttttctcctcttcctccttcttcttcatcaccatctcttcctccccttaatcttcatcttcaccttcttcatcgccttcatctcctcctcctcctccttcatcttcatcacttttatctcctcattgttatcaccttcatcaccttcatctcctcctcttctttcctcttcctccttcttcatcttcatcaccttcatttccttctactcttcctccttcatcttcttcatcactttcatcacttctattattcatcttctttatcaccttaatctccttgtcctccttcctcttcaacttcaccaccttcaactcctcctcctcttccttcttcaacttcattgccatcatctcctcctcctctttctcttcttcaccttcatcacaatcatctccccctcctcttcctccttcttcattaccttcatctcttcctcttcctcctttttcatcttcttcttcatccccttcaactcctcctcttcctcctgcttcctcaccctcatcttctttattgccttaattttctgcttcttcatatcttttccctcctctctctggcaatacacactagaatatttcagtaagatagcttttagttcatttgattaaactggcaaaataattattatgaggaagatgctgagatctggtggcagtggttgagagtcagagccccactttccctcttgtgcagccccagccgcatcctaagggcacttccattcttgcaagtttctccacctggcctgacctgtatctttctgttaagaacggaacaaatctatcaactcccattcatcaagggcaaactattttacaataaatagaagctagactaacaggcacaggaaggggtgaggccttttgtctttagattagagttttattttatttcagaaaaattttcttgaatcaggtctgtgtactatttctctcctttctttaggaacacaattatgctctggcctggtccttttttgtttttattatctattatttcctccctaatcatcttaaattcttggcttagtgcagtttcacttcatgttgctttctcggccatatccactgtgtgcctcaaacctattcccgggagtgtctgtttgtttttgtgctgcgtccaaattggcattcattttggtgatggaaacattttccccctcaactacctctctgagttctacgagccacagtttcattcaccttttcgtgctcctccatgggtttcctgagcaacctgagctctgacttagctctttattcatcacgttctctgaattcatggtcattggtcaggtaatgattctcaggccctcggcaacacttctgtgacagcatttcatcttccatttgcttcccttattccctccttttttcttcttcttctgctctgtctacaccctgctcaattcccgttgtgaaaaacgaatcatctttttatgaggagttagtcagattccatggacagctctgcctatagctttgtgtggttacctgccagagccaggatggccgggctccccacagttggctgcttttcttggattgaatgtactgatctccctcttgttctgagtctcagttgacatccaggcagtgtctccacccagccgaattgtctcatcagcaaatgaacaccctggtagggtttgcatccggcaacctctgagcaggcctcactctccctatgggttggtccctcactgtgtcgtacctgtgtattcacccaagattcagtgagaacttgggcccagtactctgcgttcctgaccttcaagggccttctgttacttcagataacgggaagctgccgtttctgtgaaaactccttatcacttaagagagcatttttctgttttcctagaagagtcttcaaaacccagtttccatctcccactcacttctctttctctaagagactttgacacacaggagctttgaagaagaaagctgcctgtttctcagggatggaatttcttaatctgagctccatgtacatcttctgtgagatattcttacacattttttatcactgcagtgatgttaagtattcagtctagtgaaccctctgatttttattaacttttcttctttttattttgaagtaggtgtcagattgggcatggagtaggaggggggtgctttt

SEQ ID NO: 474328 - DNA, 804 bp, Homo sapiens
tggggtctttgcagaagtcgggagagcctctgaagggttccaagtcgacagaaggactgggtttgagagagagcatgcctgaaggggagaatgcagggagaagggaggccaggaagaggctcttctccacgtgggatggtgagggccggtctagcagcacgaggctgcgtgagggacacaggtggcccaatggatccccgagaagccacatcagctgtcaggagctttgtggacgaggtagaatgctttctgaatcctgagcactgtgcaggacatgggtcctttgtcaactaccatcgaagaataagtggtaattttcggagatgcaaaatgttgggtgcagaatgcgagtccccctcccctgcgggccgtgggctgcttggctgcgggaaattcatcgccaggaaaaatgacctggtcaaagtaggatctgggcattcagggcaccttggacataatgctgttgcggctgcgtttggggagtcttatgacccacggtgggtctcctgtcctactgcgtggcatgccgggtcccaagggtttgcagagggactgaggagagcgtgactacataattgtacaataaaattgttatagacaccgaggagtagtgaaagtaaaacagaacaaaacattgactcagaagtcagaagacgggtgacaaagctgtgtcacctcccacctcttgagttcttggaaacttttctgccagaggctcagttttcatgtccgcacaaagtggagattgtgggaggtagtttttcaggcctggtgtgacattcctttagaacggatgctggggcc

SEQ ID NO: 474329 - DNA, 4222 bp, Homo sapiens
cctccagctgctttctgctaagatctgggcttatgtcctctgtaccaagactttcccaccactgtcatcctgaaaagggagaccacagcactgatgtaaagcagagagagatgccctgcgtggggaagaaggcacagtgggcagaagctgggaggtgggtgcggggcagcgagtgtcatgggggcagcgagggtcacaggggcatcctgtcccagcgagggcaggccaggagccacggccttgaagcgtttcggggacagccacttccagtggtcctgctcgccgggggccatgccctggggctgtccttccaaattctcatacctgccaaggacccctggctgctgctaattgaagagcaccaaagcgtgggtatttatcagttcacctacaagtggggggcaggggtgacttacttcaaccctgtgaactggctttccccgacagccactgctgtaacgacgatgaagttgccctggaacgcgcgtgcgtccacattcattgcaccccttcccagtaaagtggatgaacagtactctgactgcggccctgaccacccccaggctcctctccatctgtctgcacatgccagggccttgtcctccttcagccccggtcacctccagaagcctcagctagcacagccctcccctgcacacggctatcacagccccgtgtgcctgcctcacaacatctccccaaaccccagaggccttttcctggttgtcctggcttccttgaatgtcagttctgctggagctgccagaggcggctggagccctgacttgtctccctgtctcgccactgtgcccgggccctggaagagtccctggtgattccaggcaggcagtctttatctccccaggaacaaggatgaagggatgagcgtggatgtggtagcgtgcacctgctttctgctttattccgggacaatgggaagtggatggcaacctcctcataatggatgcctgtgagcccattgggggccggatggaatctcttccttagatgtgtgccttgggaatgtttgccccaactctgcatgtgtgagacagagagaaggaggggtgggtttaaaatgaaaaattatatatcctacctattaggtcacgagaatatgacaaagaaaagtaaagcagactcaggcatagtgacaggagtactgttttgaatttactgggaaggtgatattttatcaagggttcagttgaggacaggagtgtgacatgaaggtatcttggagatgaagagtccaggtcaggggagtgactcatgcaaaggccctggggtgggagtgtagcagagagatgggagcagagagaggagggctgagtggctgcaagtggctaaaggggcgacagcaaggggatggatgggagaggggctgtggccatggcaagaatggggactctattctgggtgaggggcagccatgaggggccaagccagtgaggcagggtgggacacactttgcaggggttcccctggctgccggctgcatggagagcagtccatgaggcaccatgttgctggcctggccatgggttgctctaacagaggcatgcctgagtgactgcccagatattttacctcttttgattcgatgtgttaatttatattttcttactaaactgttgaatcacacagagtctattaaagatgtctcttacatcctttttactttcccttcatctattgtcataaccctcttctgtgactttttctctttttctgagttaggctggagagttgttgattaaaaaatatcagtctatagatttgcttcatttcagtgttattgttttgctattatctatttagttttgctctgacctgtgttaatttggttttgtttatgctacacttctttgtttctcttttattaatttgttgagttgaatctttattttttatttattcctgaaatggagtcatttctcagagctctatcgacgtatttactttgtctggtatgtgagattccttcccacttgccaaggtcaagcagatttcctcttattgagcttctttacagggttcctgctgccattgatatgttgcctcttcaaccccatcagtttcctgcccctgagaatcacactgtcccctctttgttttcgtgttcttcctgaggtctttcttcattgtgccctttcctcttcattctgtgaaatgttctcgaatctgcctttgatagcattatttttattttcttcaggatcagttctcatcttattaaacttgaatggatattatgtctgtgaattaccttttttaaaaatgtcttaatcattaattcatctcagaatatcctttgaccatgataacatttgtcttatttgatagacactgtattttctttcatatcctaggaggtcaactgcagaggctgctcacagttacatgcgtgtgtgctgtcagtcagcagcaacagactcagggcctcccgtgggttcaggggacacagcagagaaaagagaggctggccctgctctcctggagcccccttctcaggaagagacagacatgcatgcacaagggagatgtgatttaagatttaaggtggaaataaatgcaaccaggggaggtggaccgtgtgacaggggcctcgctggcttctgtgctggtcagggcagacttcctggaagtgtcaggggtgcagaacatgaaccacacaaaagatccaccctgaaaaccagctgaggaggaggattctgggcaaagggatagatgggtaagctcccaggcttgtgggaaaaagcatagccagtgtgaaagtctgagaaatacaagtagggatgatgccaaacaaaactaatattcatttaatcagttgagcacaaaattccctacctgagcaacaacactgggaggtggaagggggaaagaggtaggaggcaaaaacaggacaattctcattgtgctttgcataggaaggggccagtaaatatgattttattcttgagattgatctacaagaagagggtcaactgagtggcttactggagaggtaagcactagtagaataaaaatgagcataaagaagagtatttttcatctatctgtcgtatggaattcacttaagctgcatcatattttcatgtttttagttttctcctctgttcacttatccttgaatgagggccagatctactgaggcctgcagctggctgtgaacactgtgtgtgaatcctctgggggcctctctttgttcaaaatattcatagtacttaacatttcaaattcaatattcaggagcccaagcagagaggagggaaccaggtctgtgtgcctgggctgcagagccagctctccacctgttttccatttggtgtgggttcccagcatgcatgaaacataacgtggtgacattccgccttcttaatggagtcctgtcattagtcagtgctttttcaatttcagagagcgttttctaacgtatggtccaatatgctacttggagagagctgggtcaccagcaaacaagcaaacatcaaaaacactttcctcttgggttttcattcaattgaattacatttagtgaatatttactgagtttctgcttatgtgtctggaagtgacccaatctcagatctctttaagttgaaaaagagtcttagtgctaagctcttgatggtagggcgggcagccccgggggcctggcatcgtgaggcactctgcaagtcaaaatgggggagcagaaaagccagtggcaaagggagaagctctgtctacagcaaagcggaagaacggacaggagtcctggagggaagaaaaccaaggagacgatttctccttcagacagaggtcattgcctttatctatgtgtgtgccatgtcagtctggctcagctgctgcagtgcgtggtcccggaaacgtgctttcagaatcaagagggactggtcatcgtgatgaagtatgggttgtgtgggatgtctgggatgagtgcgtctaggcaccctgaatgctgctgcctctggatggtccaggcagtcactgcaaagaacaaaatactcatgacatgcttaagggcttcgatgctaagtgcatcacttacatcatccccttatcacatttcttcctgataatatgcctatgaatcacatttattaccgcattccggggaggcacctctggcttgagagctctggcgggtcttggttgtgtggctctgaaggctgccccactttaagactccaggtctttcccatgtcgataactc

SEQ ID NO: 474330 - DNA, 3102 bp, Homo sapiens
gaggtgagtgtagggacagggtcatgaatgtagggctgagtttaatgcacacatcctcgcccttgaagaaacaagtctcagaagaagcctgttccagtccagctgcaaatgaaagccaagctgggtgccagccccagaggtgaaggagtgggtgttgacttcagcttggtgcaggtgcagctctctggattccccccgccaagctgggtgccgaccgcagaggtgaaggaggtggctgttgacttcagctgggtgcaggtgcagctctctggattcccccctgccaagctgggtaccagccccagaggtgaaggaggcagctgggtgctgaccccagaggcgaaggaggcaggttttgacctcagctgggtgcaggtgcagctctccggggccctacctgcccccaggacactcacaggccagcccgctgtgagcttctcatccgtgtcctgtgtgccgacttccccaggagactcccatctctttgggaatgcccgtccactaattagtcatgtctttgtgcttgggtgccagtacacactgattaaacactcacggagggctgccggcatccaggagccacctctccctataccttgtgcaaggaccgtccctacctcctgtgaacagaggtgggtaactgaggcttccctgcatgactttcagcctcgcttcttcatctgcaatgtggtaacagtgccaggcagtgtcatcatccatgcaggtgctcggagaactgtgagacaacaaaagaaaggctcaaggtatcatcaacagccatctgagcaggtcctgaagaggtcgggcactctgacctctctcagcaaggatgcagacatgttttcataactttaactggccacccagttgcttcaacggccgaccggctttaagaaaagtttttggtggttgtaaatatggctgcagtaaacacttgcatgagtatttcttgtttgtttgtttgtagaaataaattttcaaatcagttgggtaaatatcaggagcatatttgctggatcagacggtaagattgtgtttagttttggaagaaacttccaaactgtcttccaaagtggctcgaagaaacttccaaactgtcttccaaagtggctccatcattttacattgtaactagcacaattactcacattaatgtgtgagtttgtgttactcccatctttgcccgcaatgggtattgtcctttttttaaaattttagccattctgatataaatgtgtcgtggttcacattgttgttttagtttgcagctttctaatgatagatggtctagggcatctttttctttgcttatttgccgtggcccaatttatttcatgatgtgtctgcttagatgttttaccgatttttgaattgggtttcttgttttcttattgctgagttcgaagcatattttatacaaattttggtacacatcctttatcaaattgtgttttgcaaatattttctcctagtctgtggcttctcttaacattgggtttaataaagtagaagttttccgttttaataagatccaacttattatttttttctaaattgtgttttttggtgttgtatctaaaaacacatcaccaaacgcaaggtctcatataattttcctaggcccgtttctcctcctcctcctcttccatgtctttctatgtatttttcttcttcctatgtctagagttttgaattttacacttagatctatcatccttttttagttaatttttgtgaaagttttaaagtctgtgtctaagtttattttattttaatatggacttccaattgttacagcacaattagttgaagagatgatcttttctatattaaattgcctttgctcttttgtcaaagatcaattgactatatttctgtgaactctttgttctattccattgatcgaggagtctattcttttgccaataaaacacttttttttgattattgtagctttaaagtaagttttgaaatcaagtagaagccctccaactttgttcttcagtattgtattgacgattttatccctttttcctttccatataaactttatcagtttgtcaacatctacaaaataatttcctgggattttgataaggattgtgttgaatctttaggtcaatttgagaaaaattgttatcttaacaacattgagtcttgcaatccacgaacacaaagtatttattcctttatttagataattgatttattcatctgtgttatgtagtttttctcatacagatcctatatatattttgtgagttatatacttatatatttctatttaactatatattgggctattgtaaatgctattattttaaaatttcaaattacagctgtttattgttggtatattggaaagcaactgacttttgtgtattagtcttttatcctgtggccttgctataattgcttattagttccaagagtatttttgtttattctttcggattttctacatgaataatgtcatgtcatctgtgaataaaggcagttttatgttttcctttcaaatgtatatactcactttttatttccttttctcatcttactgcactagctaggattttcaggatgatgttgaataagagtgtaaagagaagacattctcttatttttgccttatttccaatcatatggagaaagcattcaatttctcaccactgtgtcatattagccaaaatttttaaaaaatatgttctttattaagttgaggaagttctctctattcctagtttgctgagagtttttgtcatgaaaggatgtgggaatttgtcaagtttagcactaataaatatcacatgaattttcttgtatagacagttgatataatcagttgcactgactgatttttaaatgttgacacagtcttgcatacctgggataaatcccactcagtcacattgcacaattattttatgcattgttgaatttgccttgctactattttgttaagtagtttggttataagagattttgctctgcagtttttcttgttacatctttttctggttttgatattactgtaagactggcctcagagaattaattaagagttcttccctctgttctggaagagtaatattttgtagccatatt

SEQ ID NO: 474331 - DNA, 1666 bp, Homo sapiens
ttgatttgagcagtttgtcgaaatgtccgttgaggtacccccaccagtgtgtagctgctgtggcgtctgttccaacggaactctccaggatacgtctgatttatatgatgccctctctgggtcagcagcttcagtcatgaaaacctgcaaaactgaagcgccctttggccagctgctggttctgcgacatcacagggagtctggcatccacacaccaattctaggcaaggaagcaaaggagcttgctcttcagcttctgtgggcccatttgtcatttcgcaggaataatgcctgtgtggaatcctctttgaaaaacactggcttcaattcctgggataccatggcgaagttcaatgacctgctgatattggacatgatggtgaggggagaaggcagagaaggaccaggacctgctgatattggaggtgatggaatcaaaggtcagagtatttggttacactggaggctcttcgaagagattaggcatgtgactcccggattcccctcagccatctcagccaaagccagaaatagagatgattatctggggaagatctgcagaggagcccattgtctaatggagttaatccccatggagagctacaagggccttaaaaatattctactggcaggaaagctgcctgccagcttgtaccaaagggtcaaaagaaagaaggctattggaccccagagattccacaggcataaaactagctctaagtgctacccggctgcaaacatatgcttccttttgtttaaaaagaaggatggtttctgagggtgaagctgcatgcccagaggacaaagttgtgagtcacggaaatcattcccatgccgtttgaaactcaaatggagttcttggattgcaaaattgcttgggaccagggacttctgtcttcctttccatttttttttcctttttgaatggaaatatctatagctgtgactctatccttgtctcactattttatttagagcacaagaacatgtttcttgactttcacagatcaggaataattttgacacaagatgggtgtatgcagaccttcatcttaaatgttaaattttttatatgcaaggatttaggacttgtgcactgatgagatttagatacaattttgaactttgagttaatgctgtaatgagatgaggctttggtgatcctaagatagaatagacgtgttttcccggtggaacacatgtgaatctttagaggccagagggcagattgtgtcaggcaggacagtgcctccctcctgcaaaagatgcccacattcaatccatgaatatgtgatgttacatttaaaaaatcatatgataataaatttgtgttgttttaaaccactgagtttgtcgtaatttattacaacagcaatcggaaactattaaaaatggaaattgttaaattgtagaattaacaactgaaattaagaactcagtaagttagcttaacagccaattcttctcagtagaagaaagggttagtgagctggatcatagctcagtagaaaatatccagactaaagcacagagagcaagaagaatgaaacatacagaagagcattgctgccagatattaaaaggtaagaaagaagatattattaattattttataataaaagtgataaattaggtagtatggatacttcttagaaaaatatgaatt

SEQ ID NO: 474332 - DNA, 1077 bp, Homo sapiens
ctgacgttcaaagcccgcgttctccaggtttctgatgtcctgttctccttctcttcatgtgtttgcttttcaagctggcttgatgctgccttcaaagcggcaggcgtcccttgccatttcttctgccccaggtccaggccagccataggcaggtctttctgggtgttcccaggcaagagcccacctgaggctgtccatggttccccacacgctagcccaggatgaggctccctcacccaattctcagatgtccagatccctttcaaataagtctactcccaattctctgctcttacagatcctgcatctggcttttgcctcagtccaccaaagtgaggacctccacatgaccatcatgaggcattctcatgaagaagatccaggcaaattctgggagagaccaagagacgtaattagatctgcagaggagcgcttctgtgtcagtggggttaggacctccaaaaacctacacctccataaaagcaatgagaacactggaaaaatctgccaaaatcaactttgttttcagaactctacacatgaaacaaagccccaaagcaacccaagaagcatctttgtgtttttttcagaaaaaaaatggctgactctcagtaataacagggagctctgtggtgttttgactcacactatttccacctccccctctgcatttccaccaacagctttaattgtgaggctttaaaaaccaacagcctcacatcaaggtgcattaatcagggttttccagaggaacagaaacaatagaaacaacatttcctattgtttatgtatgtacataaatatatatctcctatttataaatattttatacctataaatatatatctcctatatattaacaatctcctatatatctcttatttatttatattataaatgtagattaatgtatatctcttatttatatttatatactaaatatataaatatattttaaaaaatatatacatatatatttcctatttatatatttatatataatttataatattttataccattaaatatatttatagtattacatacataatattatatgtatattgtacatatgta

SEQ ID NO: 474333 - DNA, 915 bp, Homo sapiens
gtgcaggtttgttacatagtgtccagcagctctcagaagctcccctgtgtcctctgacaggggtacaggccaggaccccacataccatgcacagtgaataagtaaatgaacgcacaaggagggggttgtaatgtggagctgtgttcctccatatctcaagccagagtggatttgatgaatggttttgaaaagatgcagaatttcctgtacgagagtacttacatccttacaccttttgcacagcctgatgtgccagtgagaactcaatttggaaagcccacactcaggcattcaggcctaggaggactcatcgactcctgtcacaacctcttccctggagcctccctgtccttgcagcccttagagttgtcagggatgctcaaggtttacaaccctggggaggtcatccctaagcagtggatggtgcacaaatccagggcaccatccatgcacactagtgggagaggcaagagggctcagtcatcctaccattggacaaatatgatggcctgactgcttttgggatactcttatttattggtttgtcactggagaaaggttttatcttctcgcccaaaccatgctatctcacatttctgagttgctttgcctcaagtattaatataagatgctttattcattcacataacattcctgagaaagcattttatggcaaatcctaatcaatatatattttgggggatggagaggacagtgttccttggcatcaaagaaatacaatactagttggccacagagacctttgggatctggaggactctggggcaggcacttgttccggggatgaacctggattgacagtggtcctggtggggctggactttactggcaagttgttgagaactggaaatgtggactgaaatggaggttggagagacctggcagaagagtgga

SEQ ID NO: 474334 - DNA, 2051 bp, Homo sapiens
ggggttgccatttcaaagggagccaaaaaggcaatatgcatttggacatcaaagaagcgtcagaagccaaacttctaagttttcacttaatcgacaacagtcatcgtgctggaattatcccaggccttgccttgtttttgaatctaatatcgtctccatccttaacctcaacggcttacgtgcatgtgcttggacagccttcctctaccaagcagcaccctccctctatttggaatttgatgaaagtggcagctcacagctttgcagtgcttaagaaccacctaggagcacctgacaaaacctttacgctgtgggcactcactggaaccatgggatgtgagcccgaaagcacaagccctcagaggaaaaatgatccactgaacctcatcaaaattaaaaatgtttgctttatgaacaaaactgttaatggtgataaaacaagctgaagcattggacgaaatatttgcaaatcacatatacaacaaaggactggcatcctaaatgtattttagctggaggtgccctgttgacgtccagcccacgagccaggacacacttaacttggtcgtggtatattatacgtgtttatttatctctatgtaaatatagcttatatgtatataatacaaatatataacataaatgtatatttatatgtatatatttttatatacaacattcatatatttgcattttatatatattgccgggtttatttagttcctattttgtggaatatgtctgtgttcatgcattttgttcctgagggatgttctgtattaatgtttgtctgtttttttccactgtctttgcctagtttcagtgtcatggaaatgccaacctcataaaatgagttgggaaatgtttccttttctgttttctagaatagattgtgcggtgtctcctttaactgtttcagagattttatcatgaaaattctttcacctggagatttatttgctaaggggatttaattgggaatctatactgtattaggtatagcatgtgtttggttacctatttcatattcaatgtaacttggtactttgtggttttcaagggaattagacatttcatctgcttgtcaagtgtgtgtgtaaagtatttgcagtattctcttgttagccctttaatgtctgtgaggtctgtagtgatttctcttattagccttttaatgtctgtgagttaatactttttaattttagtttaagtttattttttatttttagttattatagttagttaataaaccacaaagataatttgtggtttcaagttgttgaaagtcacaagacatacctatatattattttatcaataagtgactctaaaaattgttcaaaatccttttttgtagttgagaaaactgttaactggtctgtcctatttctcagaagttcatatgaatgcagtgaaatctgagaagccaaaccgtaaaatccaaggaagcatgtctacacagagttcatagatatgtgtttacaggatgttatatgaaaaaacaattttgaacaaaaaattagtagtaataatttaaaattatgcttgtgtgctgattttaatggtaataacattgctaattttacttttctaaaatgaggtgaaaacttaaattattgatttttgcccattcttatgtaatgtcagctttcagtgctatacattttactctaagccactgctttggctgcttcccacacagttttatgtgttgcattttaattcatgtgttgcatttaatttttttatgtgttgcattttaattttcattcagttcacaatttttttaatttctcaaaagttttcctctgtgactcatggtttctttaataatacgtgctttaatttttatgtgtttgatgagtttcatattaccttacgttattcatttctagcctaattccattatggatacagaagatgctttgtgataaataaaatctattttgtgataaattaaaaatacatttattttttctgatccaggatttggcttattttgcaccttgtgccctttaaagtatgtttattctgccaccagtagtgaagta

SEQ ID NO: 474335 - DNA, 611 bp, Homo sapiens
gctagctttgtccggtttgagtatcaagattagaataggcttgtaggatgagttggagatattgcctcttttcttcgtgtctgacaaatgtgtataggacatctgccacggggtttagagcccatcagaaacctcggaggccttcactcaattacatctgccaagacccctttccagataaggacactcgccatgaacagatctgtctcaccagacccaccttgatgcggatccccggctcctgctctgggaaggctgaattggatctgctggagccagggctggcccctgaggaggtggagaggtgcgtgtgctcccacactgagcccaacttatcagagcccagaaaatgggcagaggaacaggaaaggaggttcttcaagccaacaatccctaaacctctgagccacggatacttctccagggcagcccctcctgaagcccatggggctggcgatgaagtgctaactccttccaagaagctcatgaaggttgcaggagagtcgtctggagccaagagctaaaagaggttggctggccagatgaggacaccaagaccctgggatagtagagtcacaagaagagagacacctggatcctcgagtgtcttc

SEQ ID NO: 474336 - DNA, 1264 bp, Homo sapiens
tgcccaggcactgtcccaggcaaggaggacatggctgctgatgcccaggcactgtcccaggcaagggggacatggctgctgatggaacgggtctctgcccaggcactgtcccaggcaaagaggacatggctgctgatggagcgggtctctgctcaggcactgtcccaggcaaggaggacgcagctgctgatggagcgggtctctgcccaggcactgtcccaggcaaggaggacatggctgctgatggagcaggtctctgcccaggcactgtcccaggcaaggaggacatggctgctgatggagcgggtctctgctcaggcaagggggacatggctgctgatggaacgggtctctgcccaggcactgtcccaggcaaagaggacatggctgctgatggagcgggtctctgctcaggcactgtcccaggcaaggaggacgcagctgctgatggagcgggtctctgcccaggcactgtcccaggcaaggaggacatggctgctgatggagcaggtctctgctcaggtgctgtcccaggcaaggaggacatggctgctgatgcccaggcactgtcccaggcaaggaggacgcagctgctgatggagcaggtctctgccctcctgggtggagtacacatccccacgaggggtccggtgtcaattatcaacaaggaagacacaaatcagattgatctccctgcttgcaacaagagccagagaatgggttttcacttggtaaatgtaggtggggagtgggaaaggagaaccatctggatcacagccttcccttcagccttggtgaggaagggcattttgagtacagcatttggaaataagcacacctgtcacctccaggtgaaatcagccacagatgtggtctttcctgggtctggaggggaagaagacttggacagtggatttattctgtggacaacggagttctgcaagtttgttgactgggaggaactgggtcatatttgctttgcaaaggacagaggagggaggctgggcgagaagcagctgtctgtggactggccgggcagtgtcggcggctggaggcaggggtgccagcggccgtgtcggttcccgtgggaaatatgcatggccctcgccctgctccctgttcctctgattcccccttgaagagaaattaggggtcttttggggagcacagaaggggcacctgatgtagcctggggggtggctcttggtaaatgccacttaagatgcaacgtgaagtgggcagagaaggctgcgtgggggacatc

SEQ ID NO: 474337 - DNA, 796 bp, Homo sapiens
atcccttgatgtgactgggaacatgtcagcaggcaggggaggaagagaggacagacagccttggagagggtcttccacacttgaggacaaccatgaggatgatgatggtgatgaagatgaagatgatggtggtgatggagaggatgataataatgatgacgatgatgatgattatgataatgatggggaggaggacgaggagaatgatggtgatagtggtgatgatgaaaatgataatgaggagaatgaggatgatatggtggtaatggatggtgatggtaatgatggtgatgatgatgatggtgatgaaaatgatgatgacggtgatgatggagaggatgataatgatgatgacaatgatgatgattatgataatgatgatgaggaggatgaggagaatgaggatgatatggtgacaatggatggcgatgatggtgatgaagatgatgatgttggcgatgaagatgacgatgatgaagaggaggttggtgatggtgatgatggtgttaatggtgatggtagtgatggtgatgaagatgatgatgttggcgatgaagatgacgatgatgaagaggaggttggcgatggtgatgatggtgataatggcgatggtagtgatggtaatgatgataacgaggaagaggatggtgatgatggtgatgatgaggaggttgactctctctatgttactgggtctgaaaacatttctgaaaatgcagacaagatggtccatggctgcccctgaacagcagcccagtgcatccatcctgacaaagcattttggattttcatgagc

SEQ ID NO: 474338 - DNA, 668 bp, Homo sapiens
gcagctaccaccttcacagcagccatcctgctcccagcctagctgtgggtctccaggacctcagaagcctggctgcagggagacgtgcacacactcagcatctgccctgcagcctgcagcacccacaggccagagcccgcacagtgcatgctgctatgctgcaggtgttggggctgtggggcacagcggggtgcctaatcctgccgggaaagtcagagaggagactggaaagctcttggaacttggaaaaacattttccattttcatctatagtacatctcccccgggtatcagaagaaccattactatttgttctaagtggcaagcgaatcttcttccacatccacgttcattttattaccgtcttgggaacactcaagggtgataagggacactgggacattgagaccagtatctgggaagtgaaattaaaaggattcaatgaaaccattgaatatccatatccaaccattaaatatccatatctaaccattaaatatccatatccaactgtcgaatatccatattcaaccattgattatgtatgtcctggggacatccacaacagcagtgaccagttgaattcttgccaggtgtcattcatgagaatttcatgttgactttgcaataaggctgtggggtgggtactaatgtctcctttatgtaga

SEQ ID NO: 474339 - DNA, 949 bp, Homo sapiens
cacactggagcctcgcagtagccaaggagagacgccaatgagggaatcatttttccacttggtgaaatacatttttgccccgtgaaagcacgaggagggcctgtcttggataggtggagtggtcctaggtcctactagatggaaacctcaggactcggaagaggttcaccttcggagcgagtccccctaaggccagccgtaggatctgcattgagttcagcaagcggaggcgacttccccagggccacacagccatggagggctgcggctcagttgctgactgctccagctcaccctcacgtccatgaggtttctgctccaaaatgctattgctaagaaaaatgttccaaacacgacccattggctgaccacagggttcagggctcgtggtgggctcagcgggatcacaaacattggcatggccagcccagtctggggaagctgcaagggcctggggggttgtggccttgggcatcacagcatcagacttggggagcctggtgacgagagcctgtctgagaaatgtgacttgtttccaggagcagtgggagccccttccctccctgatgaagggggagacagacaggaggagcaggacggacaggaggagcaggacagacagaaggagcaggatggacagaaggagcaggatggacagaaggagcaggatggacagaaggagcaggacggacgggaggagcaggacagacagaaggagcaggaccaacaggaggagcaggacagagagaaggagcaggacagccagacaggaggagcagccttctgggacccaaacaaacagtcatgccccaaatacccccagggctcttgaaagggacagcggaaggcacaggccagcttcctctccaagcagacccatgtccatgaaccctgcaatcccaggccaggagacaatcttgaaacatgctgtgaccctctcttccctggc

SEQ ID NO: 474340 - DNA, 542 bp, Homo sapiens
gtttgtggccagcaccatgggaacctccctttggcggatctttgagaacaatttatctaagatttcaggatgtgagcacacggctgagacacccttcgacctcaccttctgcaactgtggcacaaccttgggctcccaacaagagtggccctcggatccctggggtcagtgtgagctcttccctcggcaggttttctacagacccctccagctggccctggagacttccggctgtgcgcgaaggaataaaaaacacaatcgaccccagctcctcggtggttctggccaaatccatgaaaaaccagcagggaagacctggctttctgtggcactgcggctgccggcgggcagcccacagcggcttctccagcaccgtcctccagccattcccatcttagccaatttttcactgtgtccttcggtatcagcctgcaattaggaggacagcttctcgttgcttcctgtaatcattaaggtgatgccttgaccgaaatagttatcctttctgagcctcattttcctcactaaaaaaagtaataatc

SEQ ID NO: 474341 - DNA, 1050 bp, Homo sapiens
gcaggcagcgttgtctgagaagctcccaacacatctggggtggggcaagtccagctggctgagggtgtcatgcaccaactacgcaggaatgctcgctgtggcgagggacaaaacaagccccagacagagctgaccaatagaagcggcatggcccgtgccgctgaaaaggccggaggcggccgtgtccttcctggtgtgctcagctctctagctgggctctgctctcccttgaagggggagccgctgcaggctgagaaggagcagctgccgccggcccctgcagtgagtctgcagggctggccaaggctttacagggactgtcagagcctggctgctgctaactcgaggccagggagctcctggagcccagaagatgccctgaaaaccgtggcactggctccagtcctcagaggcttaggctccaaagccaactgtgccctgtactgcccgcaaggtacagtgcagcccctataccccatctcttgatccacaggctgtgtgtatatctgtgtgtatatccgtttgctcctattataaatccaggtttcagtgagagaatgtgttctgcgcaattttgcttttgaaaatttgtggagatttgtgtagcatagatgcagatagagtgtaatgtttatgaattactgaaaatgataaagactttctctctttctggtattattttatttagtaattgaattatttcaattgttttaagctttgtcactgttcttatttctatacccataagattgtgaggtatccaaaaatcgtttattaagcatccaatgtgtttctttcgttttcttcatatatttccaggcgttttggacttgtattttcatgttaccttggtcagcgcacgtgggattctactttatcttcattgtagaattaagatattaacaacatacattggcattttattccatttaattccatttatattgaaatacacaatgttagaaattaacattgtcaagtctgtttttagtttgcttttgtccaatagctcttgggtgatactttaattttaacattccaacattgttt

SEQ ID NO: 474342 - DNA, 1176 bp, Homo sapiens
caccgggtctatggagcgtcctggatctgtggtacttcccgggggcttgggccccttcttctctgagtctgttggattccggccttattttccttccttccagatttgtctccatttggtattccatgcagtcagtgccctccaaggctggaaggccagtggaagtcttcctgtaggatctaataggtacatagagggccaaagccacagtgggcggaggcctttccagttaagtggcaagagagccaagctgccccactacatcctcaaggcagagtgctgtgctgctgccactgactttatgctaaacgctggaatgcggaggccttcacaagggacccccagtcttttaccagctcctctttcgagtgtgtgctttggagagctgctcttcaccaacaccacttggcttctgggacccgggaggctgatcccgctgttctgggacttcaggatggccaacggcagcctggatgggtgcaaaacagaggggccaggtgggaggcctctcctgcatcgaaagccctccaaatataatgagccaagggttgcatcagtgaaacataacgctggcatcttaggagctaacagcctggtgctcggcggtggcccacacatgctggctgaaggaatgaatgagcagatgaatgagtgagtgagaggttacgacatgtgagatggggcctgggcaaaagaagaagcgtctgtgcaggtaaaatgagactgagtctggggagagatacaggaaagggatatcggtcctgttccaggaatgttttcctgtcctggcattagtagctttatttctatagttttgggatacggtttggtatctgataaacttagggatgatttttaccacattttaagaacaatcttcatgaaaatcttgattggaattaaattaaatagcaaattaatttagcaaaaacaatattcaatattttctttttattcagcaaaaagtactgtgctccatttattcaaattatcttttattcctttcaatgaagatttattctttctttcagttaagaaccatatgtttcttattagtgtatgtttctcattgcttttttgaatatttcgttttttctggccttgatctaacttcattagaatgctcgctgtggcgagggacaaaacaagccccagacagagctgaccaatagaagc

SEQ ID NO: 474343 - DNA, 1228 bp, Homo sapiens
agagccagccgtcctgggtttgcaccctggctctgctcctgaccaggcttagtgcccccgtgttcccagtgcaaggctgttggatggacaggagaggatcgacccaggggacaatcgacccaggggacaatcgacccagggtacagcagactcaggatgcaatagacccagggtacaacagacccaggacacaagagacccaggggacaaccaacccaggagacaatcgacccagggtacaacagactcaggatgcgatagacccagggtacaacagacccaggacacaagagacccaggggacaaccaacccaggagacaatcgacccagggtacaacacactcaggatgcgatagacccagggtacaacagacccaggacacaagagacccaggggacaaccaacccaggagacaatcgacccacggtacaacagactcaggatgcaatagacccagggtacaacagacccaggacacaagagacccaggggacaaccaacccaggagacaatcaacccagggtaccacagacccaggagacaacagacctgggacacagcagaaccaggatgcaatagacccaaggttcaacagacctaggaggccaccaacccaggactcaattgacccaggtgtccttagattttcaaggacccaaaaatacaaccatgttacatcaaactgttctccagcctcagagaaacaaggcatcaaccacaagtccagaaatagaccaaagagctaaagccattgaatttgggttaaaatcctgaagaatgctgcaaggtgggcaaacaagttattcataatgttgcctaatcttcaacatgtgaaagaaggagactctggtttggaatggtgctgatgcagatggggtgggaaagatgtgaagggcaagggagcggctcgcaaaactcccctttcagctgcctgcaggcccttcacagccctcaacctgcgcccccctcgcctttgggatgccatttgatcattgatcatttcctttatttacgaatgtttttgttaattgaaaactatgactgagcatccactgggactcatcgcaggatctgaggaatacttagccctaaattgagccctgttctggacctgcctaacaaaagcaagaaccaaaaggaataaatagcttccaactaactgaactgaacctcaaacaaatttaagaatatttatagcaatacaatatatccagaaccttaggaga

SEQ ID NO: 474344 - DNA, 1439 bp, Homo sapiens
cgcctggaaagcaagctcccagcaacaaggaacaatcacacagcctccgttcctatggtgtccgcgcatcactgtcggcaacaatatgcatgcgcgggactgatggaccgtgaaggagaggcgtggaaggcagagccaggatctggagcctggaggctgggagatgatattaatgggcaatggaagatgcggctggagaaagacgacattcggggcaagataacaaccctgcgctggagccagggtccacagggagaaggggaagcacagggcaccccaagcatgtcgctggatactcaggcttcagagccctctaactttctcagagacaggaaatgggactcggagaagtcccagtgccacctttggccacctccccggcagctgtacagcttcttcgttctccagttggagagcacaagggcatgctcagacatgcacacgtctatgccatctatgccgaacaccttgatcatttccgaaaatcatctacagtcctctccatatttgatagttctaccctctctcacactcgttattttacagacagttggttcaccaaacccagatgaggttcacacatttggtttctatgcctcttaagttctttcgatctgcagaggacatcttctgtgtgtgtgtggttttgtttgttttttagtttttgttgaagaaagttcatttgtcctatagacattcccacacactctcaagattctgccaaattttacccctgtggaagggtatcagaaataaccagccgttggcctgatgtgcctatcacacagttccctctgcctctcactgggtcattttagcagctgttgttgaaaattgtgtagatgtgtcatttcattaaagagagtgggtgtgtgtgagagtgacagagagagaggaggaaggaagagaccggctgggctctgtcttcccagctgggtcatggtctcgttttttgggatatcatcctcctttgctcagtgtccagagcccaatggtggctccatgaacgtcccctgaagaaggaacaaaggcgtctgataagggctcaaagaaaaccaaacacacaatgaatcctctctaaatcacaaatagtcacttaaaatgccatctgcagtgttttgccatttatttatgagtattcaaattctgcctcttggacgacattgacagaaagcacatttcatctttgtccagtgaggagaaacagcagtgaatctctttaagaatccagtgtgaggagtaaaaactgggggcagcgaagggtggcattcagtgcttctgtgtcctggaaaagcacaattccaccattcaagaggggctggggcctgtggcctccgtaggtacctctgaaacctcaagcagagttgtcttcgagagcccctagcaggaattgataacataaacaatttgcatgaaattcccttgggatcagaaaataa

SEQ ID NO: 474345 - DNA, 1358 bp, Homo sapiens
tcccaagaggcccctgaagccccaagagctcccctgattgttccaaagcaacattcccctccatgaacaactcagggaccccctcgatccacggcgtgaggcccaccagcagaggaagaggagcttccagtcctgactcccactaggcgcaggggagccgaggtgagctcccaggcccgccgcatcttcccctcctctttgggtggattaaaacagacttggacagagtctggaaaaacaaactcttttaaaacaagacaaagattgagtctggccaactggctattttcaatccttgctgaacggagtcaagacagtcggtagtaacagcttgtggccatccgcaatcgtcctccccgcacgagagggtggagcctcctggaagtgaccagagccggtgacttcgggaatcaaccctcctgaaacagcggatggcctagtgagcctttccagaactgcagaggggcatttgagtgtggaacatgagtgctgggcacctggaggaatggaggattccccaaagctcgctggatgcacatcccttgctcagcagtccacatcatccgtatctctcatcccacagccgcgggctgcccagccagggccttgcggcaggaggtgggacagatgcagacttcagccccgagtctggcttacttcaggatccctcagggctctctcacctcagaggcagcgtgggaccccaggccacaccttgtttgcaggcctcgcctagatcgtggtaacagccagaactcaacaatttctccaagtcagcctccccgcagcccggagtggggactgagaccaacatgcaccctcatctgcgggcacgcagggacacagcaagtccagagtccacagctctgcagaggtcctggaccccactctgccagtgtggcgggtatcagagctgggtggggctctgtgaagttagggtcatggagatgactgcggtcagcagcgggcctgaggtgtcctgctctgtcatggcgggagggttccatgagcagcagcgagggtccccccagatcctcattttcaacagggctggaggagacaaacgacccccggctccccaggagatgttcagagacgcagatgccaggggaggacgtggagggctccaggtgggctggggaatgtgcctgggctcctcacacctgggacaaggaaaacagcagccggccgaggctgaactaggttttccaggcttccacccaggggatccacctccccccaccgccctggtcctggggagcaggcttcagcccacgggtcccttctatttcccacctgcaccggtgctgcagtgggaaatgaattcaaacacacctttgtgacctacacgggtctaa

SEQ ID NO: 474346 - DNA, 1132 bp, Homo sapiens
gagcctcttcaagctgtgtcctcgggagtccctgggcgggggcccagggtggcaatgtagcccctgaggctggggctctgagatctccgatggtggagacaagagaaggctgttccagtggctgtcatggcagcaggagaccgtgtcctgcgagggatttccggggagggcggctgctccctgatggaggacgtgggctcccagctcattcctgtggcttttcctgactctcactctgacaacgtagtggacttggaggctgccaaggacatggggagtgtggccgctacaatcaaggcccacggggtgcatagcattcctgtgagcaccatggtccctcctcaccagagcaacctcagcgctcccgaccttggctgtgtgcatggtgcccgtggaagccactgtgcgttgccatgggcccagtctgctgtcgttgcattgctgatcctggctgacacgggggccgggctcgtcaagtgggccctcccatgctgcatctgccctgccttccggtccacactggatggattctgcctattggtcaaggccaacatcatgacctcctccctgcctcgtggtctgtgattgttagaggcacagaacttctaataaatgaaagttggatgtttaatgtttaggatataccctctaggtctcaaattttccatactttttcacctttctatgtgctctccactcttataaacatatttgattttactttccacagcccagtcttcattcattcccattttaccattcagtgtataccctagaccttaaaatggtccactcacattaatttccaggagtttttttccttgttctcttgtttgccttttctcccccttgggagcctggttttctcttattgataccatattatttcaaattttttgagaatgatactatttagaataatcacaattacggttatgattattttccctgaattatttctgtcccctaaggttcaagtgtagagtatgcacagctgagcctgacttctctttcatgcctctagctttctgcaaacacctagtgatctctgcctgctaggtcctgtctgtataggaataaaggttgaagtgtgtgtagtgaccggtcagtgtgaatcacctctaccctgtgt

SEQ ID NO: 474347 - DNA, 1547 bp, Homo sapiens
gtgacacagccctgcccccccaggtgggatgccaggtctgctaaggagggcatagacgggtttgctccctgtgcagccccaggggccttcgccaccccctccaggagaggcgatgcttggacctgggtgtttctccttaagacaaatagccactgctgcaaacagctccgcggccaccaacagttatgggaagtatcagacacatcggcgtgtttgccaatccttacgtgtgccagcctcctgcaaggtggaagacctgagtaaagaggagaggagtaaagaggagtgtgagggccacagcacactcgcagctgccgggcagaggggaagccctggcccctccgcaggccctgccggcggcctcctgaaggaagggacccaccagacgggtgctctggggccccagcggctcccctcgagtttcacccaaaataaaagcggtaataatagtaacatcctaattgatgtgcggagccagcgttatcggcagcaaagtgcctttacccctgtggtcatgaggcggccttgccagcctgagctctgccgttatccctgctggtctcgtatctgtaatgaaatcccgcaccctcgctcaggtcagctggccgccggcacctgtgagattgtgaccttggaccgggacagcagccagcctcggaggacgatcgcccggcagaccgcccgctgtgcgtgtagaaaggggcagatcgccggcaccacgagagcccggcccgcctgtgtggacggggcatggacatgtcggcttccttctgggggctcagggagatcccagcatttctggaggcttcccgaggccatgggcgactgggtgtacagccacatcctcagccaggttgtgggtcctggccaccctggacccctcatggcttgggggagcacagctcagggtgaaggagaggagaccccagcattcacgggcactacccctgcccagaccccctggctgctcctggagcaaaccgtgtctgaaggggctggcaggatgcagagtggacagcagccctcactcttctgcgggaaaagcttttgtgtgcttcagtcattagaaaagtgaatgtaagtccttaagtacttggatatttctgtcttggtccactttgtgatgttgagactgggtaatttgtaaagaaaagaaatttattttacactgttctgggggctgggaagtccaaaatcaaggcactagcgtgttcagttgtgtggtgagggctgcattctccagagaggcagaacgctccatcctcacgtggtggaaggtggaagggcagaagggggccaggctcccgcagtcaagtccttttacagcattatctctccaggatggtggagctttcatgacctgaacatcggtcaaagtgcccatctcccaacactgctgcattgggggttaagtttccaacacgtgaatttagggaacacttttagaccacggcaatttagaaatacgtgaatgttcttaacgcagctgtggcctcaagcaggtcccctgagcgctctgagctgtgggcagagaagcagaggaggga

SEQ ID NO: 474348 - DNA, 805 bp, Homo sapiens
acacggacccgtctatgccacacatcttcctcagaaggaaaatgaaggaggctggcgaacgacggccaggggagaaaaaccagaattgtcgcttattcctcggccctgccggccccgcctgcgcctctgcccggcgcgactttctggacctagtgacacgaagacagaggacttctcagaacgcggggacacaggcgtggggagaagggccgtcaactggcctcaagtctggggcacgggaggaggccgcttctgtgcctgacagtcccctggggcaggcgtcgtgtctcaggcgggctgggctgcagccttctgtggctgccggagctgcctcctcctcctcctcctctgaggacagcagggccaacgccacggtcggcgggggctgggcgcggccgggctcccacagactgcgtattgctgatgccaggtgccgccccccgcctatgtgtctgagtccggcctcctcgggtcggctggacagaccgaagctcaggatgccaaggcctgaggccgtccttcacggaccacagggaaacggagtgggcgggcggcagagaacgggtgaagtccgaggcgagtggagaactgtggctgagacgtgggctctccagggagccaaggccactcccggggcccctcaggggctgtgtttgtcaggagacctgaggagcaaagagagagagaggcctcgtctacccaacggggctgtgggattagaacccacactcaacaggacctgaggctcagggccagccctctctgcctgtggacacttgtggcctgggtcacagctggtgtgtct

SEQ ID NO: 474349 - DNA, 1113 bp, Homo sapiens
ccgtcgagtgtgggttaaattccatcccccaaaagatacatgtgatgaagtgaagatgcattcattctggattagggtggttcctaaatccaaggactggtgtcgttacacgaagaggaaaatttggaaaatcagcctcctagaaggaggcgtgatgacggagacagagattggagtggtgcagccacatgccaagaaaggcctgcagccaccaggagctgtgagaggaagaaagatcctgcccacagccttcagcgagagcaaggccctgcccgtcgccggacacaggacctctggtgtcaggtcttccggtctgtggaaagcggaagcttttgacaagcccaccagctggagaggagagtgcccaactattcccacactggtacccaaatcagggattatcgttctttttaatctttgccaatttgctaaacagagaaagacaggcctccctctggggtacacagtcctcaggatgcaggatggcggctcggcaagatctcagctccaggaaatttgcatttcaaaagggaactctgctccagatcaaataattaaagactgcaacctgaacagctgggagctcagcgccggagcctttaaagctaagccaaccatcaacaaatacggtggccaacagcttggctaaatcattctactttatacgttttattttctgattagtcacacagagctcattaaatggaagacagagcttttcataaaatatgtagaggaatcttggattcttaatttcaaaattaaaaaaataataatcccggcaatgaaatgcactgtctgttcataaaactcgccaagtgtccaaggatgaaaggtttgaaacagaggggacccagaggacaagtctctctggaactgacagcggccgtcttgctgagcccttgggccgtcctggggctggggcgtggccggcttgtggaccttgctccagataagggaacttgaaggttccagaagccttatagtttgatataatcccatttgtctatttttgttgttgttatgttttgttttggcagcattatttacaatagacaagttatggagtcaacctaagagtttctcaatgaatgaatggattaagaaacgttt

SEQ ID NO: 474350 - DNA, 1133 bp, Homo sapiens
cattgtgaggatcacagggagcaggggtggaaggacccaggacagcaccaggtacatcagcccaggcggctttgtcttcaagggtgccattgcggctcagacaggtgggacccagctggcggctgaccacggagccccagcagactgaggcagcggcccagggctccgtctggagggggcaggtctgagcaggtggagcagggacaggaggccgagggctgcatcagaatctccgggagcgtgggggcttccactgctctttccggtcctgggggcttggatggggcccagagctgggtccttctctgacttccccggtgacgctgcctcataaccagtgccgctgccagaggctcctgacctgtgtctggatgctccttctgccctgtctgccccgtatgagggatggttgtccctaagatcctcctgacagccctcgggccgagtcagcacccccatcctaagggagaaaccaaagccactcatcctgttccttgtgtagccccctcaccaggctccccaccatggccatctccctcaaaggggaaaagtctggaggtgggtagaccagatgaacaagtgttggcaaaggcctgggaagagatggtgtccccagattatgaccagaacctccaggtgggtggaactgccagacaattgatcattgcactgacctgcagagatgaggaggaggggagagctgctgggtacaagttgatctccttcgcccctcaacagctccaaataatacctggagcctcagcacagatcccaagcctgggcctcatgatgccggtgttagatacccaggtccctgttgccacttgtggaacccgccacaaagagtggaccctgaatcacaatgaatgcaaggggcaacggcacctgacgctgcacccagctaggatcctctggtggccttgggtgctccttggcttgtagatggttgtcttctccctgtgtctcttctcatcactgttcctccatgcacgtctgtctgttttgccaaagttttaatgaggataacagtaactggcttaggacccacctgctgacctcgtccaaacctgatcatctgcagagacgctcctcccaaatgaggtcacactcacaggccctggggttctgccttt

SEQ ID NO: 474351 - DNA, 1583 bp, Homo sapiens
gcagggacaggaggtccaagatgagacagctgagtgggctcaaggacgtgaacatcccaaatcaggtctgcagggaggggctccggactccaggctccagggacagtaggtccgagaagacacaggtgagtgggctcggggacgtgaacaacccaaatcaggtctgcagggaggggctctggactcctggcgcagggacaggaggtctaagaagagacagggaggggctccggactccaggccccagggacaggaggtccgagaagagacaggtgagtgggctcggggatgtgaacatcccaaatcaggtctgcagtcaggggctccggactccagaccacagggacaggaggtctgagatgggacaggtgagtgggcttaaggacgtgaacatcccaaatcaggtctgcagggaggggctccggactccagaccccagggacaggaggtccgagcagagacacgtgcgtgggctcaaggacgtgaacatcccaaatcaggtctgcagggaggggctccggactccaggccccagggacaggaggtccgagaagagacaggtgagtgggctcggggacgtgaacatcccaaatcaggtctgcagggaggggctgcggactcctggccccagggacaggagttccgagaagagacaggtgagtgggctcggggacgtgaacatcccaaatcaggtctgcagggaggggctccggactccaggccccagggacaggaggtccaagatgagacaggtgagtgggcttggggacgtgaacatcccaaatcaggtctgcagggaggggctccagactccagaccgcagggacaggaggtctgagaagagacaggccccaggctccagggacaccaggtccgagaagagagaggtgagtgggcttaaggacgtgaacatcccaaatcaggtctgcagggaggggctctggactccaggccccagggacaggaggttcaataagagacaggcctgtccctgcggctcccgctttctggatctcatggcacggctgcttcttgcggaccttgtgttgggaactcctgaggttcaggaggcggccaggcaccgtgggggatgctcctcgcacggggctggctggagggcctggggctgggctgtgtccacaggtgcagagctgcacacaggtggcccggagcctcacctgtgggtttccttctgcgtgtccctgggcagcactgactctgcagtctcaccaagagacattggcaaaggcagtatttccagctggggtcccattcacaggttccaggcaacggtcatgggcataggcagccggcatggaggaatggccccaacattagcagtgtctccctgagaacctgctcttgacgctccctgggaggaccagttacaggatgttctgtgaaatgcatttcaaggaaaggtcagactttacacacgaataccctgaatttgtgtttcaaattcatgtgctgtgttccctgcagtaaaactttcagctgagcagaaaatatttttccaatgaaccatttcctaaaacaagcccgtaagtgtagtctaaatgcctctgcaacggccactgtgg

SEQ ID NO: 474352 - DNA, 944 bp, Homo sapiens
gaaggaagcagcttgctgacggtgcaggtgccacttgacctgtgcgtagcataaaccccgcaaatggcagctgcaagtttaaataaatgcctcctgctgtctggaaatgcctcctccttctgggactgtggtcctctctggtgcttttacggcagagtccccaaccattttggctctagggattggtttcctggaagacgatatttccacggacggaagacccaggttatgctgtgcccatgagtttcccggggatgccacgaccaagtacaacaaactggggtgggcacaggcaggagtgaaatccattctctccctgtcctggggcctgaagcctgagaccaaggtgggctgcactccctgcaggggctctagggaggacctttcctgccccctcgctcttctggcggtggccgtgacccttggtgccaacctctctacctccatcttcactgtccctcgctgccttcttctctgtgtccacaggtcttctaaagacaccagtcattggacttagggcacatctgattaatccaggatgacctcatctcaagatccgtaacttgattacatttgcaaagacccttgttccaagaaaggcacagtcccaggttcacagtgagcctgttgtgggggcccccattcagcccattacacagcttgtgggctgtgctaagagtgaatcaggcctgccttcccagtctcccctgcttccttctctggaaattggcatgaaccgtgtgccaggccggcttgtaggcttgcagggagggtgggtggattcgcgcctggttgccagcagcccccggcaagggactggtgaattcttgaactgtgggtcattcccagaggcttttgtactccatcctgtgtaccccatcctgcttggaatgtcccttgtccccagcaagatttggggttcggttaggagggacatttgtgct

SEQ ID NO: 474353 - DNA, 1017 bp, Homo sapiens
tttcaaaatgttattgcagccggagactgaggccagaggcaacgtgtttgctcatctcccgcagctgcctggggctgatctccgccaaagctcgaggctcctggtggcagatggagaccaagtgtcggccctgtcactgagagacttgctgagtacatgcgaggcccgcacaggcaacctgggagtgccggtcattttccgctttgaacctgagtcccagctggcagagcagagccccaggcccacctatcagcagcaaagccaggttggtgggaaggccaaggccaaggctgcagacccagaggcactggtaccaagcatccacgctgtcaacaggcagccagcctctggggcacccacgctgtcaacaggcagccagcctctggggcacccacactgtcaacaggcagccagcctctggggcactggccgagaggcagtgggagcacctgcctgtgctccaccgtggcaggccccagaggggacacattgcaccccaggttggaggaagggcaccctgggaaagccaatgtccccagctgtgtctgggtctctgagccccgtgtacttccccatcctctgtggagctcagagaaagacacaagtaaaagcctcagcgacctggcaggacacagctgagctggtgccgacagtcggccgggattggcacaacacgtcccccctgtgccgagtccctatggagcaccctcaccatcgtagaaaatctcctttgttcagccctcggggcaaggtggaaaacagcagcagccccaccggcctctccctgtctgggcaactccagcacccccaatctgggagggctcagctcttccctgcacatcgcctgcaccccaccgtctgccagcagacgccctcgtgctgaaggctgccctttggagcctgcagaattccctggaagattctaaaaagcctccctaacaatttctaagctcagtcgcagaagcagccacaggaagatggcattcgccaaagccttcggaatctagaagcccctcc

SEQ ID NO: 474354 - DNA, 2063 bp, Homo sapiens
gggaaacgtcaagcaagcagcactctgagcccatgcatccctctgttgaagccctaatcgcagtgtaacgctatttgtggatggggcctttggaaggtgatgagctccctattcttgcatactttttcctggggaacccaaggacccagcaggttagaaacacagggtggtcagcttgatgctccaggaggcagcctccaggggggctgctgtgggcagttcctccacagctcacactctgcagaagccgggattgggtgagtgctcctcgtcaacgctccagaatagggcgctcctgcccctgactatggcatcatggccctaggatcagcctttcactcaatcttggacaacgagtttttcttccaatgtggtttagccttggtggtgaatgttgttgctccagcagccaaaactgaaggtgcaaatgcaggaacaaggaagcagggtggccgtcctgggagccggccaccgtcctgtgagtcatctgaggacagccgtttctttccactccatatttctcaggacctggccaagggcagtgagtggaaaacagggaaatgccacattggtcgaatgagtgatatgggaataagtccttctttgggtaaagtcgccaacgtcacaatcctgcacataggggaaaaatgcaggttctgtggagctgacggtgccgtaaacagcggcaggtgcagagtgaccacagaattccgcaacacagatggtgacggggtgagggccatggagaaccagctcatgggagctcgtctttcagtgacctctgcaggcaatgggaagtgggaaaagggctccgccttccacctggccccaggtgcagatggcagctgtggttctccagcacccagctgtggagggagaatccttcctggaaataataaaatgcagccagatctgattccccagcccaacattaaggctccagcgaggaagcactaccaagaaatccggggggaaactctgggctctggacacttctccttccagggtacctgaaaaggctgctctcagggaagggtgtgcagagcccctggggtggggaactgctgtcagggaggggagttcagagcacctggggagggagctgctctcaggccagggtgtgcagagcccctggggagggagctgctctcagggcggggtgtgcagagcccctggggagggagctgctctcagggaggggtgtgcagagcccgtggggagggagctgctctcagggaggggtgtgccgggcacctggggaggagagctgggatgcaatcctgcatctcgtaacatgaccaacactgagacacaggaccaaggaagggaaaggtggaggaaagaaccaggggggagcattgctgatatttttctgtgttcatttgtaacttttcttctgttggatttatttgtctctgatagtaacgcccaggaggggtgcagacagggtggactctgtccagaggggctcccaggccaaggcacctcctctgtcccaggtaaaccaccaaggaatgcgatgtctgatcataaatcagagtgtacatctatgagacataagacgcaacaactgtgccatgtgcttgggcagtttaatgcaaataaaacatttaaaaaagagagccttaacattaaataaatcaatcccaggtatagttaataatgagagaagcgtgtgagtaatacaaaactcaaaattccttaacttacctagggatgttacaataaataccaccttatttgtgaatttacaaagggaaacattacctgcagattccagaaccataaatgtggccccaaacagaaattttaaattgattgtaaataatcaaaatcattgcagtagattaaaataaaactttttatgtataaaatggagaaaacaaaagaagaaagtcaaaagccataaaaacgtaagagcagttgtcagcaggagtgtgaaagacagcagttatgcccaaaatataatgctccaaccacacccctcccactgagaaatattgatgctgacagatttttttaaagaaagcctttttggagtagagtttagaaaagataacatt

SEQ ID NO: 474355 - DNA, 1087 bp, Homo sapiens
cagacacaaggaaggacttgatgaagattgagctgtctatggctattaaaggctggctcagtactattactgctatactatcattaccatcatcatcaccatcatcatcgtcattaccaccaccgtcattaccatcaccgtgattactaacaccaccatcaccatgctcaccatcaccatcaccattatcatcaccatccctaccataatcaccaccatcatcaccatgattaccattatcatcgccatcattaccatcaccattatcaccatatcattaccatcaccatcatcaccattgccatcattaccatcaccattatcaccatcaacaccaccatcaacaccgtgatcaccattatcatcaccaccatcatcaccgttatcactatcaacatcaacatcaacatgatctccatcatcatcaccatcatcatcatcaccaccactatcatcattaccgtcaccatgattactatcaccaccaccatcatcaccatgattaccattaccatcaccattatcatcaccatcatcatccttaccatgatcatcaccatcatcaccgtgatcaccatcatcatcaccatcaccatcaccatgatcactatcactatcaccatcatcattaccaccatcagcagcagcaccatcatcaccatgatcaccatcattatcactataatcaccgtcatcattaccatcaccatcacctttatcactgtcaccaccaccatcatcaccatcaccatcaacaccaacaacatcattattgtctttcaactaggtagcagtgaccattaattttatgtgtcaacttgactgggccctggagtgctcagatgactggtgaaacatcatttctgggtgtgtctgtgagcgggtttctgatgagattaatgtttgattagatggacttagtaaagcaatggcagtccccagtgtggggaggcatcgcctaatactttgggggcctgaatagaatacaaagcataggaggagagattttgctcctctgcctgactgcttgacctgggacatcagtctcttcctgccctcagactagaactcacaccaccagctcccc

SEQ ID NO: 474356 - DNA, 1542 bp, Homo sapiens
gaggctggcgtatgcacgggatgaaggggaggtacgcagcccggcccccgccagcactgtcctccctacatctatttcagaggacaatgtgctcagctgtgtgccagagctggcaaaggactctcctgttatgcaaaccccccaacccagagcccacagtccacctgcctcctgtagcagagcctacaccaggtccctgccctcatcaccagggccaggaagccacaggaaaggttctgccgcagctcccccagctccctctgcccgtggccaccccggagcctcccgacgtggccctgcctggtgtgggtgcctcattctctggatctggctctgtaggacgaggcttccctggactgctcacctctggttccagcgtggtggatattacatgggggctcaggcccagatgtgcggtgatgctggcactgccaggggacacagggatgtccctgcccctccaggcttcacctccaggcagcgttcttcttggctgtggcccagacaccccccaccccgcccctgagctgagtgggaagcctggcggtctaagaacagggtccgctgtggccgaacatcgccaagtgtccaaactacccgtgggactcacccggacactgcctggctcaggtccacacgtggctccctgtgctccgtccttgggcagcaaagcctggacaaccgacgcagaacagttcgactgcctgatcatgccacgggcctccatttccccagcagcggacatgaccacctctgctcagtatttctctgagaaggggaaactgaagccaaaacctggctttgtggtaagcctgacgcaccccactcgagggctgcctggtaagcctgatgccttcgtcagtctggggagaggggaagatttctcctcaatggtgactgaagatgagtgtctttgctacgaggtgctgggcacctgcacgaacagtggcagtgaactctcccctcctggtcctcacggccaggctggcccttggtgaccatcactggtgccccttgatgaccatcacacactgctgtccccacggccaggctgacccttggtgaccatcagtgctgcccctcggtgaccatcacgcactgctgtccccacggccaggctgcccctcggtaaccatcacacactgctgtccccacggccaggctgcccctcggtgaccaccacacactgctgtccccacggccaggctgaccctcggtgaccatcagtgctgcccctcagtgaccatcacacgctgccatccccatcatcactccgtccactccagggtctgccccagcagaggctcctatgatgtcacactcctgggtctggcaccaaggcctccacaccctcgaccccacctgtctgtgcaaagagagcccctgtgcctctgcccaggccccggactcccccagggtgggcccagcacagccctctgtgaccaccatgctgctgtgaaggggcctccttgggctgcatcacgtctggcctggataaggtgcagcctgggacgtgggcttgctcggagcctccctgcgcgg

SEQ ID NO: 474357 - DNA, 555 bp, Homo sapiens
tgggggtgcccaacacgaagtgcatgtgggtgccacagcccatctggtcctcagagcgaggccggcgccgggatgtgtgcagtcgtctgcgtgaaaaaggcaagacacaagcaggggcttctggaaactgtgacacccctgcccgggcctgtgggcggccctgcacggatgctgttagtgtgaagtttgagtgtgagtcctggggaccacctcaccaggccagcatccgggtggcgggggctgcggccctgcgaggcatcgtccgagtggacagagggaagcagcactccctgcgtggtccctctaggctggaggacgccaaggtgacaaccacatcaggggagacagctacagcagtgggagctgcaaagagaggggctggtgaccgccgggtgccctgagccccagcaccccaggctggtctgctctcgggcaccccagcctcactctgcagcacctcatgcagccagcctcattctgcagcaccttcatccccagcctcactctgcagcaccttcatgcagagatgcccagtgcccagtggacttggccacc

SEQ ID NO: 474358 - DNA, 798 bp, Homo sapiens
gagaatggattagggagcgaggagggcgtaactatgaagggtgatgtcagggagacgttcgtggcgacggaagggcttccctgcatcctgatggtctggttgcttaagactcataaccgtacatacatgaaaaaagcagcagcttgtgaccatggagggaaaaagtgctgggaaaagccctcatctgtggccaggggaggcacggggatggaatggatggcactgaagggtggacaggatgcctggtactgtagtatggacgggatggatggcactggggtgtgtatgggatggatggaactggggtgtggacgggatggattgcactggggtgtggatgggatggatggaactggagtgtggacgagatggatggaactggagtgtggacgagaaggatggaactggaatgtggacgaagggatggaactggagtgtgggcgggatggattgcactggggtgtggacggaatggacagaactggattgtggaagggatggattgcactggagtgtggacggaatggatggaactggagtgcagatgggatggatggaactggaatgtggacgaatggatggaactggagtgtggacaggatggattgcactggggtgtggatgggatggatggaactggggtgtggacgggatggatggaactggagtgtggacagcatggatggcactggagccttaccctggatgatgaggaacctgagcagatacagagggtgaacggatattgaaggtgggggatacactcattgagcagggctcttgctaaacctggatttc

SEQ ID NO: 474359 - DNA, 667 bp, Homo sapiens
cccagctctggtgtgtgacgtcagctgtccctcagcagccatgaagatatccttcaagttcaacaagaacttgtcatcccccagtgaaagcgtgcaggaggtgtggatgcccacactccatggactcccatgtgtaaggtcacaggcgggactatggctgcagggccccctgctcatcacccagatgtctccaaaccagttctctgtggctcctcagatggggccttggagtccagctttgtccagaggcccagcaagcccgaccctcagccctgcaaggcaccaggagtcctggaaagccactcatccccaaatcatggcagccacagccatgagagccgtgggtttccctggtcttgaagagacaatgcccctccaggctctggctcacaagccacagtcagaggaggagcccatggatttcacgacatccggctccccgggcctcatgtccaccaccaccgacactgaatggcagatggcgtccatggaagctcagccacaggacccaactggcgacagctggactctggtgtgagggcttgcccagctgtcattcatgtcgggactggcattccattccaggcctggggagctgcatagtgtttctattcttgactctcacggatgacaggagttaggatactgtggccctcccctccattgg

SEQ ID NO: 474360 - DNA, 1844 bp, Homo sapiens
tgagcagcgaaaatagcagtattttttaagaaggaagagagggattcctgttcatctcgggagctgtccaaggccagggtgctgaagaggtgaatgtaatgggccagggctgccttctgcctagagccccttcctggaatcctgccctggcttccccgaggtggagcattgctgcaccactttggccacccctcactctcattggacacccccaccctgccatcctccttccaaggtgtcttgccaggataggggacctataccagaacctggacaagagggtcctatggtccttgctcccgtggccctggggtctcactcacacatccatcctcctcactcaaagatgctgctctcttaactcctcctactgcatgccaggtgctgcctggctgttgaacaaagcaacgaacaggagggatgaggagtggaattgctggtcacattttaatgctatgtttaacattttgaagacttgcaggattgttttccaaagtggcttcacccttttacacctcaccaacagtgtccgagggttcccatttctctacatcctcaccaagaggtattaacatcagtgtttattatgtcagccatcctcatggaaatgatgcacttgcttattctggccttaatttgcatttctctggtggcaaaagatgttgagcatcgtctcgtgtcattggacatttgcacatcttctgtgaagaagtttctattcgaatcacttgcccatttttaatttgtgttgtcttttttattcttgagttgcaagggtccttttaatattctagacagaagttcactaccagatatgtaacttttcaaaacttatctgccaatctctggctcacctttttaattcatggaatggcaataaaatgccatttagtgcttcaaaagacactttctcgatggtgttttctggagcacaaaggtttgaagtttgaagatgtcaaattcatctactctttttttgttattgcttatgattttggtgtgtcacatctcagaaatgactacctaatcaaggtcgtaacaacttacggctgtttcttctgagagttttatcatgttgtctctacatttaactatttgttccattttgagttaactttgtgtatcatgtgaggtgggggttcagatgaattcttttgtaccatttgtggaaaagactctgatttcccacattgaattgtcttggcatcagcatcaaaattcaattgaccgtgaacgtctgggtttatttcaacatttccaattttatctcgctgatctgggtgtttctccttatgtctgcgccacattgtcttgaatactgtagctttggcacaagtttcgaagtggggaactgtgagccccctaattttgctcttctttttcaagattatcttggctattttagatcccttgatttttccacttaaagtttaggatcagtttatgaatttctgcaaagaagtcagcttggcttttgttaggtatcacattcaatctatacctcagtgtggggattattgccatctaaccaattttaagttttaattcttatccataaatataggaaagctttacattcatttagatcgttttgaatttttaagcaatattttgtagttttcagagtatcagtttatacatcttttgttaaatttattcctaaatatgctattctttttgacggtattgcaaatgaaattgtttttctaaatttcagttttggattctttattataagagtatagaaatacagttatttttcataatgagtgtgtttcccaaaacttgctgaatttgttacttctaatagttattttgtggattgtttaggaatttttgtatat

SEQ ID NO: 474361 - DNA, 1915 bp, Homo sapiens
ttcttcattgacgttctgctttctttcagctgatcattgggccatagcgtcgtgtactggagacaaccactccgtgttgatggagaagtcgcccaggtcttgcctggtggtgtcccatgttccctgtgctcaggcctcaaggatattcgtcctcatggtctcctgtcagcttaacgttatgccttgtgcattcaggcctgaatccacctgggatccatgttaacgtgttggatcagttggcttttacacccatcccccagccccagctgaagtgtgtgcatcagatccctgggaaagcctggctggactgggctcagagcggcactgagccggggggactgcagacggggctggcgccctgcacacattatatccacccatccagggtcttccttcaggtcccaggatatatatgtgctgctgccgtctcgggaccacccccatcctgcctggcatcacccctgtgtgcctgtgcccatggcctgagccgagaccgggattcacagcctgacttcctggagtccacgtccctcctggatttcctggagggccaggtgttggcccttgtagcctgtatgctgcctggcccaggatcttctgaagctggggagcagttggagtacaagctgaacccagagtgttcaggaaaccgaggggaattccaagcagccgtgaccctccagcccaggctcctctgtgtgagcaggacctttcacacaagctgtgtccttggctgccacctgcgctgggaaccccggaaacctgggagcgtgtaccgctgccccttccatggggccctgagctgccgcagggttcgagttaaacagccacaatccatcactgtttatgagattgaatagtctcaattgtcccaccttcaagtttgtaaggtctttctcctgcctattccaacccactgttgagttcctctagtgaattttcacttgaggcattgtatttttcaactccagaaatttatttttttatagcttctatgtctttactgatattgcctcactggtgagacatggttctcatacttttctttagtttttagacatggtttccttttgttaaatcaccatatttaaaattaggtgattttaagtctttgtcctctaagtccaatgcctgggctttctcagggatagttttaactgactgcttctcttatatgtataaaaccataactttctgttgctttatatgccaccgatattttgttgaaaactggacattttaaatactatgatgtggcatctctggaaatcagattcctaccctcagattccaaatcagattccaaaccggggtttgttgctcttgctttttgtttttgcttttgttgtcatcgttgtttggtgactcttgttaactagttctgtaaagtatgtcttctctgtcatgtttggccactaacatctctgcttgattagctctgtggccagccagtgattggatggagacgtcttaaacacctgcaatctgtccgtcccccagactgtttggaagggatattctgtgtgcatgaggggtgtgcccgccacactcagcaagtgtacaattctgcatagctttacttcctgtgtgtgcataagctcaaagtcatctagggtggaagctcaggaacaacttctcagatctttcctgagcattcacatagctctatgcacacaggtagctttctagattcccaagaatatgtcagagattttccgaactgcagaggatatctcattccccagattttcctttgaaatattttgtgagcctaatgtttgtgtcaactctcatccaccacctcaggtaggtgcaaagttcaacaatttcctccagtaattttcaacaaacacctccagggagaaggctttttgtattgtgcgagttctgagtcaggtcaaataaaaacaccctc

SEQ ID NO: 474362 - DNA, 569 bp, Homo sapiens
caccaacatgaacagctgtgctgatggctatccccactctgcagggcattggccatcacagcaaccatggccttttctgccacttccctggtagaggtattgccaaaggcagcttctgtgtcagacttctggaatgggggatacctggaaagaaaatccactgtgttacagcaccaggaggagcagaaatccagtttaatcatcatgtcatggagactgaatatgaaacttgatgaaaatcagtcctggggagtggtggtctcctctaatacagagaggggaaaacactccaggggaaaaagcctgctccagctgagaaaagccagcgtggtagagacgtgccttctcatgaggaaactcataccagaagaagcccagtgcagagcacctagacacagaggaacccagactgacaagcagatggttagagacaaacctggaggaaacagctggatcaaggagatgctggcccctgggggctcgtgagtttgtggtaaatccagagtcaatgcaagaggttccaccccatgtcctgtcctccccatcaggcctgttctacagaaggaggg

SEQ ID NO: 474363 - DNA, 577 bp, Homo sapiens
acctgttcttggatgtgttcaggcctgacccagggagctagccccactgttccacccttgctcatatcctgggcttctttctggttctttggaacctggactttagcgtctctacctgtttccaccctgcagccgcagtcccagccctgctccctgcctctcgcctctctctgccttcatcgaagtcccatggattggttctgcttcctgtgtgcttcccccagcgtaggcaagggtgtcctgccacaaagggagctgggaaccaagtggacatggagaaggacctcgttcacagaggccactttcctgtccccagaaggagcccaacacaggcattctgggtcttatatcttgggggttggatccaaggactttacggataggacaccactgagtaaccaagcgaggatgctcaggtggtcccatgccatcaccctcacaccatatttgtatttttaaacttttatgttagggttaaaaaacatttatgtaccatcattagagtgctacattattctgtgtttgtatgtatagttactttgaccagtgagatttatgcttttatatgtgttcacat

SEQ ID NO: 474364 - DNA, 983 bp, Homo sapiens
acaccagcgtttcctggaattgttcttagccttgagtgacaatgtcagcagtgctggaaaagtgggctgagcaggcaaaggggacaggagagggagactcagggtcagcagatgcctccagggtgcagagagggccctgtgagctcctccattataccgatgcctccagggttcagagagggccctgtgaactcctccattatactgatgcctccagggtacagagagcgccctgcaagctcctccattataccaatgcctccagggtgcagagagcgccctgtgagatcctccattatatcaatgcctccagggtacagagaaggccctgcgagctcctccattataccgatgcctccagggtgcagagagggccctgtgagatcctctatgataccaatgcctccagggtacagagagggctctgtgagatcctccattacaccaatgcctccagggtgcagagagagccctgtgagatcctccattataccggatgcagacaggttccctgtgagctcctctatgataccaatgcctccagggtgcagagagggctctgtgagatcctccattacaccaatgcctccaggatgcagagaaggccctggagcttctccattatactgatgcctccagggcccagagagggccctgcaatttcctccataataccaatgcctccaggagtgtcgctcagcatgtggtctggagaggactcgaggggacgcattgctgaaaccctttatcattcctgacagccacccctccctgcgttgctgcttgtagcccctggtcttgttcaacttgtccacccccctcaccttcatcagctcatccccagctccagccccacccacctctcttgaactggaggcctgggctcctcctccctctgccagccaggccccaccagccacccccgcctgtgggcccccacccagagctgcattctcaactctctgaccacggctcccagaaac

SEQ ID NO: 474365 - DNA, 515 bp, Homo sapiens
gtctttatgctctgctgaggatgtggcagatgctgcaccagatacatcgctggtgggtctgcgccggcttcacagccagcgccatcggccgagtttttctcttgctggtgtctctctgcttccacgggaaacaggccaaagaggcagcaataacgtggccaggagggtccgagtgccaggaaggggagggaggagagggtctgatgacgtggccaggagggtccgagagccaggaaggggagggaggagagggtcggaacagagcattgtccccaaaccatccctttgaggaacaggttgtggaaagcaccaaggtgcgtgtggactctgctccccccaaaaccttcaggctttggcacttgagtcctgcccacgactcacaggtccccgttcacgggctgaggcctcttcgggaagctcctctgcagcaggcttcagacgtgcccctttcttgagcagggctatcctcagacctggatgagaagctgagagcactgacacagctgcctctgccc

SEQ ID NO: 474366 - DNA, 1635 bp, Homo sapiens
ggctcttgggttgggtccttcttccctgcgcactccgaggtcctccctgcagccttccagtcagcaggacctggctggggggacagcatcaggggcactggctgagggaggtgaatgagcctctccctggaatgaccagccattgggtggccctgctggaggccgcccccgcctatgaccagacagcctctgctctggagggctcctgtcctgagtgccgactgccaggccgtcctcgggctggaaagggcagagctgtggggagggtgcagaagagccagacccagcccaaggagggaggcccagagtgcctcagtgatgaccacgtgggcatagccaggaggaacacccagggcggcggaagctggcaagtgggctctggagacggcagttttatctgcaggcagagggagcgaccaggtgcccgaagcccctccaccccgggactgcagcgtcctgggaccctcaagacaggatcccacgaggagggttaccagctccccggccgaggcgttctctttccctacggcctgcctttttcataagatcaatgccgtggaatcctacggtgggaggtcttttgtccatttcctcaatataaaactaacaggcaaaaagttactcttaatatcctctttgtgccctgttaatatctattgacctttaatgaatattcctattttattgctaacagtcataacttgtgttttctttctggttttttaaaatattattcctaggaaatgaattattagctaatacttccaaagaacgaacctgtcaaaggtaaatctgctttctatttcattgatttttggtcttatctttattttccttcttcagtttttgggggttttatatactgttcttttcatagttccttgaattgaaagtttacatcattgattttcaaattttgttctttttaacataggcatttaaagctataatctccctctaagttttgctttggctgtttcccacaagtttagatctgttctatatatgtcacatattatatgttatatacatatatatatatatatatatatatatatatatatatatatatacacacatacacatctagttcttattttattcagtttaaatattttctaattttgctatgatttcttcttcaattcatgggaaatctaaaatgtgtttcacaatttctaaatatttggggcttttttcataatctttttgtaactgacttccagtttaattacattatgataagaatatataatgtgcatgattccaataatttgaaatgtattaagccttgttttttggcctagcatatggtctattttcataaatcttgcactaaaacttaaaaacttggaaagcatgtgtgttctgtaggttttagatgtggttgcagtgatcaagtatttttattattttatatcctttatattatcagttatgcatgttagtgttattttcttcctgaacgcatgaaggtttaaatgtgtatccttaatttacagtttatcttacttatccttacagtttatcttacttatccttacagtttatcttaaattaattttttatcacttattaaagaatgcaagaatctatcattatttaagtatatttacttctcatctgtcctttggc

SEQ ID NO: 474367 - DNA, 3246 bp, Homo sapiens
gccttgtaagggatccgatgagctccactcctgcatctgcacacctcccctcagtatgcaaatatccctgcaagcaacacacacaggatgcacctgaccttctccactcagtatgcaaagatccctgcaagcgacatgcacaggatgcacctgaccttctccattcggtatgcaaagatccctgcaagcgacatgcacaggatgcacctgaccttctccattcggtatgcaaagatccctgcaagcaacacacacaggatgcacctgaccttctccactcagtatgcaaagattcttgcaagcaacacgcacaggatgcacctggcctttgcctcctcagagagccttggcgtgtcttccccatccctggaaagctccctgcacctggtgaaatctgagtcacctttgacacccccaccttcaacctcactttatccaacctggagtcagagcaagatctgcagccacttcaggaagcccaatcatctggacacttggggagtggatggtgatgatctgcaaggtgttgactcgccaggcaggctgagggcagtcctcagtcaacaccaaatgcagcaggctccaaggtctgagcttggttatggttctgctctgtaattaaaagatcatgtgtcctacttagcacacaaaattctataaaaattgcatgaaacagagccactcagtctagaaagcagctgatatttactcaggattcctctgaccactccattccaggaagcagtggggctctggactggcactctccttgtacctcacatgtaattaaatacatccctgaaagcccctgctgtactggtcgccttccgtaaatgcctgcgagtgaaattgctaagtcacgagacagaggtggacccgtgatcacctcgctagtgtaattcatcacgtctaagagattttctatgtgcacagtcatactgactcacatctaagagactttctgtgtgcacagtcatactgactcacgtctaagagattttctatgtccagtcatactgactcatatctaagagattttctgtgtgcacagtcatactgactcacgtctaagagattttttctatgtacacagtcatactgactcatgtctaagagattttctatgtccagtcatactgactcatatctaagagattttctatgtgcacagtcatactgactcacgtctaagagattttctatgtccagtcatactgactcatatctgagattttctgtgtgcacagtcatactgactcacgtctaagagattttctgtgtgcacagtcatactgactcacgtctaagagattttctgtgtgcacagtcatactgactcacatctaagagattttttctatgtgcagagtcatactaactcacgtctaagagattttctatgtgcacagtcatactgactcatgtctaagagattttctgtgtgcacagtcatactgactcacgtctaagagattttctgtgtgcacagtcatactgactcacgtctaagagattttctgtgtgcacagtcatactgactcacatctaagagattttttctatgtgcacagtcatactgactcacatctaagatattttttctctgtgtacagtcatactgactcacgtctaagagattttttctatgtgcacagtcatactgactcacatctaagagattttctatgtgcagtcatactgactcacgtctaagagattttctgtgtgcacagtcatactgactcacgtctaagagattttttctatgtgcacagtcatactgacttacgtctaagagattttttctgtgtgcacagtcatactgactcacgtctaagagattttttctatgtacacagtcatactgactcatgtctaagagattttctgtgtgcacagtcatactgattcacatctaagagattttctgtgtgcacagtcatactgattcacgtctaagagattttctgtgtgcacagtcatactgattcacgtctaagagattttctgtgtgcacagtcatactgattcatgtctaagagattttctgtgtgcagagtcatattgactcacgtctaagagattttctgtgtgcacagtcatactgactcacatctaagagattttttctatgtgcacagtcatactgacttacgtctaagagatttttttctgtgtgcacagtcatactgactcacgtctaagagattttttctatgtgcagagtcatactgactcacgtctaagagattttctatgtccagtcatactgactcatatctaagagattttctgtgtgcacagtcatactgactcacgtctaagagatttttttctatgtgcacagtcatactgactcacgtctaagagattttctgtgtccagtcatactgactcacgtctaagagattttctgtgtgcacagtcatactgactcacgtctaagagattttctgtgtgcacagtcatactgactcacatctaagagattttctgtgtgcacagtcatactgactcacgtctaagagattttctgtgtgcacagtcatactgactcacgtctaagagattttctgtgtgcacagtcatactgactcatatctaagagattttctgtgtgcacagtcatactgactcacgtctaagagatttttttctatgtgcacagtcatactgactcacgtctaagagattttctgtgtccagtcatactgactcacgtctaagagattttctgtgtgcacagtcatactgactcacgtctaagagattttctgtgtgcacagtcatactgactcacatctaagagattttctgtgtgcacagtcatactgactcacgtctaagagattttctgtgtgcacagtcatactgactcacgtctaagagattttctgtgtgcacagtcatactgactcatatctaagagattttctgtgtgcacagtcatactgactcacgtctaagagatttttttctatgtgcacagtcatactgactcacgtctaagagattttctgtgtgcacagtcatactgactcatatctaagagattttctgtgtgcacagtcatactgactcacgtctaagagattttctgtgtccagtcatactgactcacgtctaagagattttctgtgtgcacagtcatactgactcacgtctaagagattttctgtgtgcacagtcatactgactcacgtctaagagattttctatgtgcagagtcatactgactctgcagct

SEQ ID NO: 474368 - DNA, 877 bp, Homo sapiens
ggcagctgtttgtagctcaggatgatacacagctgtgaagacgctatactcgatccacctttcctaccactgctgcccatttcagtgggaacatttttaggtttagctgttaggcatgttgcatctattggcaccgggcaccgtctgctctcacacgctggcctctctggggagtgcgacacggttttcactcccatgaccgtgaagactagtggggctgaagatctcttctgtgctcggtgcacatcagacaccctttctgtgaagtgcctatttcagatttcacagttttcagtcgacccgtctttctttgtctcactggtttgtatgtctcttctgtgtgttggctgcaatcttttggatgaacaagtacttttcattattctgttttcctccacttcaaccgttggttataaatggcatagggaggaccgattcagcagaggctttgtccctggcaggtgccacgggtcggagacagcacggaaggagagacaagccttacagagacaacgtccagcgccggacaggacgtgggaggaaggagcgcagacgcggtgctggtgggagaaggagacggtactagcacggtggaaaacctgtggaagttacccagcgacgttgacatacgtgctctacgattccgcccaatcatggggagcacagcccacagaaaggcctgcacactccctgaaagatgctcacagggatgtcacggctctgctcttcctcacgacggaaaagggaaacggccgcaatacccgtctatggtaaaaaagatcgataacttggaaacgggtaagtattcaggatgaaatgttatctggcaacccaaatgaaccctctgcaactactctcaacaatgcagatgaacctc

SEQ ID NO: 474369 - DNA, 805 bp, Homo sapiens
gaatgccctgtttctcctccaaggcccctgcccttcggaggccggggtgccaggaatcgcacatgtgttctctgcactggatgtggcactccacccctgctcctccgtgtgctggggtgggtgggagttctctgcacctgggcatgacgctcccaccttactccgtgtgctgcggcagtgagaggtggaaggagccccggcttctcctggccagcattcttgctgtggcctcagcagttcccatatcagcctctggctttgggcgtgtccagggccagggctcggcccaccatgtcctggctggtctgggtcttccctggcgcagtgaggggatggagcttgcagctgtggtcagtagcctcgcctcagagcctctgctccccgaaccagtgaaggcaacgtggcttctgcagccagcaaattcacaaggggcttccagtgtgccacgcttcctgactggtgggccactctggattgttctggaaatcactggcagagggcttggagccccctcttccagcccctgtgcttttgtcatccttggacactctgttttacgttctgtccccatggaaataacaagtggtttctgttgcctgtggctgaatcctggctgatacagtcacgggtggaactacgggctccagagtttaatgtcctcggttgtggggcggtttcacaagacagaacagcctctgcttttctgcagcttagcagaagctcagcagaaagcctgcttttgccagcaggcagaggggcctacagtttcaaagctgtattctgttatttcgtgattaactcatgc

SEQ ID NO: 474370 - DNA, 646 bp, Homo sapiens
gaatgggggaatcagggcactgagaaccagaacctagtctatgaggtctgatttgtgataagaatggtgtccaattcgggggaagggaccggttcccctccctctcccgcgtggcaggtttgcaggcgagcacgtgcacacatttccctctggtgtcctgggcgcctttcctcggcgtcacctgcatttcctcttcgtccaccttctcttttgaatctcagccggagacacatagaactgagaggcccatggaagctgctcggtttatgttctgtttgctactaccttgaaacatttcacaaccggcttctcctgaataagcaggaggacttggccatcttccacccacattctcacagggacacagggctgaagctgagctgcagccgctcctctggacaggggcacgcagaggaaaacgtctttcaagtaccaagcacatcttacaaataaacctagggcatgactcatgtggtttataggtggaattacacagatgatcgggaagttgccttagaaacaaaatgttaaaaacaatgaaaaataaaatagaaacactatgttgcatttggagtttggagatttgcatatttatgaagttctgcaatttgaaaaaatatttctcttctttcctgggtgtctattc

SEQ ID NO: 474371 - DNA, 996 bp, Homo sapiens
gtgggtgctgtggggacggactaaatcaccatcaccataataatcaccaccatcatcatcaccatcaccttaatcaccatcaccatcatcatcaccatcatcactctcattatcactaccatcaccattatcattattccctcattatcatcaacaccatcaccattgttatcaccatcatcatcactatcatcactaccatcactatcactatcactatcaccatgatcactatcatcatcaccatcatcacccatcatcactattatcaccatcactatcaccaaaaccatgatcatcaccaccatcatgaccatcaccaccatcatcttcaccattaccaccatcatcatcaccatcatcactctcattatcactaccatcaccattattatccccatcaccatcatcaccaccatcgccagtgttatcaccatcatcatcatcactatcatcactagtatcatcactctcaccatcatcactatcatcatcaccaccatcactatcatcaccatcactatcaccatcaccatgattatcaccatcactatcaccataaccacaatgaaccaccatcaccatgaccatcaccataatcatatcaccatcatcatcaccattatcaccatcaccatcatcaccatcattatcactatcatcaccattatcatcatcaccttcattatcatcatcactgttatcatcactaccatcacgatcaccattatcattatccccatcatcatcaccaccatcaccattgttatcatcatcactatcactataattatcactatcaccatcatcatcatcaccatcaccatgactatcatcactgtcatgatcatcaccatcatctatcatcactatcatcagataatgaattatcttttactgtctgtggacaattatcataggacaagatttctctatcttggcactattgacatctgaggtctggataattctttgttgtgggaagttgccctgtgc

SEQ ID NO: 474372 - DNA, 904 bp, Homo sapiens
ccacagcagacaacagcagcctatgtcacgcatccttgggctgcagagacttcaattatggggacagtgtcagccaccttatgtggctgcacacatcggccacagcagaggcatcatatttgtaacacatctacaggcagagatccacgtggctgttctgaagagcagaacatcctgaatggtgaagcaaaggcctgagaaaactctccacaaaagcaatgagaacattgacaaaatatgcccaagccagctttttcagaacattggaggctcaccaaaggcttgcagctgttcagggagtattcaggaaaaacagctgaatcttgagaactgtcacagcgtgacatgtccagcagctctgtgggagggccttgctggcagggcctgtcctgactccatctgctcagagctcgttgtccccagggcctgtgctgacgatgggatgaggccacactgggaactgctgggcattggcggcgtgcccattcacaaccacacatcgatagggcctagtatccagaatatgtcaagagccctcatagaccctgtcatgtatgtggaatctacatccaggaagctgttttgcaaatatgattcctctgctgtggccgatgtgtgcagccacatggggtggctgacactgtccccataattgaaaagctctcttcacccgatcattggcagccctgggtgactgcatgcccgtgtgggaagctgccctgtaaacccttctgtgaggaggagctgtgcaggcctacaccacacgcaccagggtgggctccccagtcctcacaaggctgggtctgtgggtgccccatgcatgcccactctccttcagggctttccccgcatcgcagtggagggacggcaatcctggttatcatggagtgattcataataaaaa

SEQ ID NO: 474373 - DNA, 655 bp, Homo sapiens
atatctacacattattacattatgaccaagtggggtttctctcaggaaaacgaggctcccaggacgtgtcgggtggggtacatgttcctgcaggcaggtctcccccaaagctgctccgtggggtacatgttcctgcaggcaggtctcccccaaagctgctccgtgaggtacatgttcctgcaggcaggtctcccccaaagctgctccgtggggtacatgttcctgcaggcaggtctcccccaaagctgctccgtggggtacatgttcctgcaggcaggtctcccccaaagctgctccgtggggtacatgttcctgcaggcaggtctcccccaaagctgctccgtggggtacatgttcctgcaggcaggtctcccccaaagctgctccgtggagcccttgcagggcttggtaccaaacgcagttgtcgaaactgagagcctgcaccccgtgaggtgatactgcagcctctgccagcagggggagtcactctccctaccccttgggactgggggcctgtggccactttggccaacagcaaagaggaaggacagggtgcacattggaggtctcatccctctgcttctctctgccttgtgtatggggataaccagctgggggtgcaagtccgtgtgaaccacagcaaaggccagaagaa

SEQ ID NO: 474374 - DNA, 659 bp, Homo sapiens
gtggagagggagagaccgcggtttcgccctggaacggggccggcggtcggcaggtgcagggcacggactcccgtcatttctgacggtctcaactcccgcttctccttctccaaaatgccctgcatgtttttctgttctggagttcctctggaaaatgctggttctgtttatgtccaagtctcctttttcctggtcaccggggtcccgaggttgcggcgcctgacgacatgcgtgttgcagaagctgctctgtggggacagtgaccaacggcgttgccacagtgacccggccatgatgcttcaggacaggacgcacggggcaaacgcctgggcaccggggacggggcagcgccctcaggcagggtgtccacggggtgccccagggctgccggaacaaagaccccagtgtcctcagcagccgctgcatcgctccggtctctgcatctgtctgcacaaggccatcttcccgggcacctgtttcctttctgtgtcccctccgcttcctatatggacacgagtcataggactgagggcctaccctgctcctgtgtgacctcatctaaacttaatcactcatatctgccaagaatctatgtccagctacagtcacagtctgaggttctggatgaacattttggaaactattcaacccactgcatt

SEQ ID NO: 474375 - DNA, 1073 bp, Homo sapiens
cctgtggcagttgggttaaaaagaatgaggaggaacttatgctcccccttctgagggatggctctgagagggactcagagtgtcttcctgtctacctggagatgagagccggtgaggacagccaggttctggggctcagcaaccggcctcccatggcgcccccacgggcgagccagtgtcctgagccccagcagtgccccagtgactcccgcctggtggcctgtccccacctgggtgggggcctgccagggctccctcgggcaccacccatggagcagctccggcatccggcctgtgacccccgaagctcggccttcctcgagctttccgtcgggccccggggctggagactgcggccggctgcccccacgttgctcacagccctgcacggagagccccttgcatacctgggagatgcccagccctcaggcccaggggtgcgcacggcagcgctcactgagaagtggatcccggaagaggcctgcaagggtccttggggtgttggggtccagcccctggcaacactgattggctttgagtgtgtggagctgcccgttctggacatttcctgtgagtggaatcataccgtaccggtcctcttgtacctgacttcccacacctggtgcaatggtttacagcgcgttggctgtatcaggtgtcagagcttcacgtctccccgtggctgaacgacactgcgttgcatggggcttccacagtttgcttgtccattcatcagcattgcttatgcccgtatagagggggatatgatagtctgtgtagcatatgcacacgaactgccaaaatatagtgtgaaggttggcctgacaaatgacactgcagtgtattgtcctggcctgctgctggcccgcaggcttctcaataggtttggcctggacaagatctaagaaggccaagtggaggtgactggcgatgaatacagtgtggagagcatagatggtcagctgggtgcctttgtctactctttggatgcagagcttgccagaactgccgctggcaataaagtttttggtgccctaaagggagctgtggatggaggctggtctgtccctcac

SEQ ID NO: 474376 - DNA, 621 bp, Homo sapiens
aaagtttgtttacaccagcatcgctgcaaacaaaaagatagtgcagcaggatgcagcggaacccccctgacttgctgacaagcgcagaccagtctagaagtggccctgtacatgtttctgcggaaccctgacactgaagctgttctggttgccatgtcctgtttccgccacctctgtgaggaagcagatacccggtgtggggtggacgaagtgtcgaggcgaatgtcccatgtgagtggaggaggacccatagatttgtctgacacagactccctacaggcatggatcaacatgactagcttcctttgtgcccttgggggagtgtgcctccagcagagaaggaattctggcctggcaacctatagcccacccatgggtccggtcagtgaacataagggttccatgatttcagtgatgtcctcagagggaaacgcagatacacctgtcagcaaatatatggatcagctgttgtcgttaatggtgtgtaagcttgagaaagtgggacttcaaatacggaccaatggtaaggacctggtgggtctagaattgagtcctgctctttatctgatgctatttaacaaattgaagagacgcatcagcaagttttttgactcctaagga

SEQ ID NO: 474377 - DNA, 543 bp, Homo sapiens
tctaaatctttttaaagccttcaaggagattatgatgcctacggacttctccaagctctgtctgggttctgctgtcaatggtgttgtccacttttggactcttggacctacaccaggggtttgccaggggctctcaggcctttggcctcagactgaaggctgcccgtataatgggttcatatttgattggctgcacttagctataaatcctgaggaggaggaagaggaggaagaggaggaggaggaggaggaagaggggaaggggaagaggaagaagatgaagaaagaagaaggagaaggaggacaagggggagaaacgacatcagaaagtaattgggctagaagaactttaatttggaagcaaaacacagaatccagcttgggtgtgatctcgtcaataacagcgtcgtctaaccacgtaaaaagtagtcagagtgaaaagaattctagcagcatatgttagacaatagaccaaaaggaaaatgtgacacgcaaatagtcaaacaaaacttccaccttttagccttggttctggaatttagt

SEQ ID NO: 474378 - DNA, 9075 bp, Homo sapiens
ctttaggaaaagatactcggaaacaattgaaagtgggagaaaggctatttatttgtaataatgctggaactgcaggcatgaaacagacggtcctggacataccctactcaaaaggctccaaactaactcagcagccgtgttctggaatccgatgtgagggacaaacactcagaaatcagcagcagcgttctggaatactagaaaatagcagcagtgttatggaatcctctgtgcgggacaaacactcagaacccagcagcagtgttctagaatcctttgtgatagacaaacattcagagactcgtagcagtgttgtggaatcgtatgtgagggacagacagaatgtggcagcagtgttctccaatcccattagcagtgatctggaatcgtatatgaaggacaaacactctgaaaccagcagcacagttttggaatcccacgtgagggaaaaacattcacaatccagcagcagtgttctggaatcctatgtgagggacaaacactcagaacccatcagcagtgttctagaatcctttctgaggcacaaacattcagaaattagtagcagtgttgtggaatcgtacgtgagggacaaacactctgaacccagcagcagtgttttggaatcccatgtgaggaacaaacactcagaagccagaagcagtgttctggaatcctatgtgagtgacaaacactcagaacccagcagcagtgttctagaatcctttgtgaggcacaaacattcagaaactagtagcagtgttctggaatcgtatgtgagggacaaacactctgaacccagcagcagtgttttggaatcccatgtaaggaacaaacactctgaacccagcagcagtgttttggaatcccatgtgagggacaaacactcagaagccagaagcagtgttgcggaatcctatgtgagtgacaaacactcaaaatccaaaagcagtgttctagaatcctttgtgagggacaaaccttcagaccctcaaagcactgttctggaatactatgtgagggaaaaacactcagaaaccagcgggaaacccagcagcagtgttttggaataccatgtgaggtacaaacacgcagaacccagcagcagggttcgcgaatcctttgtgagggacaaaccttctgaccctcaaagaagtgatctggaatcgcatatgagggccaaacacttcgaacccagtcgcagggttctgcaatgcattgtgatggagaaacattcagaccaatcctttgtgagggacaaagactcagaacccatcagcagtgttctggaatcctgtgtgcgggacaaacactcagaacccagccactgtgttctggaatcccatctgagggacaagcattcagacactcgtagaagtgttctcgaatactacgtgagggacaaacatacagaacacagtagcagtcttctggaatcccatgtgagggacaaacacgcagaacccagcagcagggttctcaaatcctatgtgagtgaaaaacaatcagaacccagaagcagttttctagaatcctttgagagggacaaaccttctgaccctcgaagaagtgatctggaatctgagggacaaaacctcagaacccagcagcagtgttctggaatcccacgtgagagaaaaacactcacaacccagcaacagtgttctggaagcctatatgagggacaaatactcaaactcaccaaaagtgttctcgaatactatgtcatggaaaagcactcagaatccagcaacagtgttctggaatcccttgtgatgggcagacattcagaccctcgtagcagagttctggattcctatgagcagtgttgtggagtcctatgtgaggacaaacattcagaacccagtggcagtgatctggaaatctatgtgagggacaaacactcagaaaccagccactgtgttctggtttcctatatgagggacaaacattcagacactcgtagaggtgttctggaatcctatgtgagggacaaagactcagaaaccaatagctgtgctctggaaacctttgtgagggacaaacacacagacctcagcagcagtattctggaatcctttgtgagggaaaaacattgcgaccctcctagcagtgttctggaatcctacgtgagggacaaaaactcaggacccagcagcagtgttccggactcctatgtgagggataaacactcagaaaccagcagcagtgctcaggaatcctttgtgaggaacaaacatacagaactgagcagcagtgttttggaatcctacgtgagggacaaacattcagtacatcttaagagtattctgaaatcgtatgtgagggacaaacactcgcaacccagcaacagttttctggaatcctatgtgagtgacatacactcagaccccagcagctctgttctagaatcctatgtgaggaacaaacactcagaacccagcagtagtgttctagaatactttgtgagggacaaatgctcagaacccagcagcagtgttctagaatcctttgtgagggacaaacgctcagaacccagcagcagtgttctagaatcctttgtgagagacaaacacacagaagccatcagcagtgttctagaatcctttgtgagggacaaacactctgaacccagcagcagtgttttggaatctcatgtgagggacaaacactcagaacccagcagcagagttctggaatcttatgtgggtgaaaaacaatcagatcccaaacccaacagcagggttctggaatcctatgtgagggacaaacactcagaacccaggaatagtgttccggaatcctctgtgagggaaaaacattcagaacccagcagcagtgttctggaaacctatgtgagtgacaagaatttggaacacagcagtagtgttctagaatcctttggaaaaacactaagacccagcaacagtgttttggaatcctgtgtgagggacaaacactcagaaccctgcagcagtgttctggaaacccatgtgacggacaaacactcaggacccagcagcagtgttccagaatcctttgtgaggaacaaacacacagaaaccagcagcagtgttctggaaccctgggtaagggacaaacactcagaacgtaggagcagtgttctagaatccttcgtgagggaaaaactctcagaatccagcagcagtgtcctagaatactttttgagggacaaacactcagaagtccgcagcagtgttctggaatcctataagtgttgcggaatcgtatgtgagggacaacactcagaacccagcagcagtgttctggaaacctatgtgagtgacaagcatttggaacacagcagtagtgttctagaatccttttttgagggacaaacattcgtaccctcgaagcagtgttctggaatcctaagtgagggacacacactgagaaacgaggagcagtcttctggaatcccatgtgagggacaaacactcagaacccagcagaagcaggtttctggaatcctatgtgagggacaaacaccaagacccagcagcagtgttttggaatcctatgtgagggacaaacactcagaacccagcagcagtgccctggaatcctatgtgagtgacaaacactcagaacccagcagcagtgttctaaaatcctttgtgagggacaaacactcagaacccaacatcagcgttctggaatcctatgtgagggagaaacactcagaacccagcagcagtgttctagaatcctttgtgagggacaaacactcagaactcagcagcagtgttctagaatcctttgtgagggacaaacactcagaacccaacagcagtattctggaatcctatggacaacactcagaacccaacagcagtgttctagaatccttagtgagggacaaacattcagaacctcggagctttgttctggtatcccaagtgagggacaaacactcacatcccagtagcagtgttctggaatccttggtgatggacaaacattcagaacctcgaaggagtgttctggagtcctatgtgcgatacaaaccttcagacccccgtagcagtgttctcgaatgctatgtgacggacaaacaatcagaacccagcagtcgtgttctgtatgttatggaatcctatgtgagggaccaaccctcagaacccagcagcagtgtgctggattcctttctgaggcacaaacattcagagcctcgtagcagtgttctcgaatcctatatgagggacaaacaccccgaacccagcagcggtgttttggaatcctttgtgagagaaaaactttctgaccctcaaagcagtgttctggaatcctatgtgacagagaaacactcaaaacccagcagccgtgttctggtatcctacatgaggggcaagcattcagaccatcatagcagtgttctggaatcatatgtgagagacaaacattcagaccctcgtagctgtgttctgcaatcctatgagagggaaaaacattcagaacccagcagcagtgttctggagtcctttgtgacggacaagcattcagacccttgtagcagtgttctggaatcctatgtgagagacaaatattcaaaccttcatatcagtgttctggatttctatgtgagggtcatacactcagaacccagcagcagtgttctggaatcctatctgagggatgttctggaatcctatgagagggacaaacaatcagaacccagtagcagtattccggaatactttttgagggacaaacactcggaacccagcagcagtgttctggaatcctatgtgtgggacaaactctcatatcccagcagcagtgttccagattgctatcagtgttctggaataagatgtgaggctcactcagaacccagaaaaattgtcctagaatcctatgtgagtgacagaaactcagaacccagcagcagtgttctggaatcctttgtgagggacaaacattcagaaccacggagaagttttctggaatactatgtgagggtaaacaccaagaacccaggagcagacaaacactcagaacccagcagcagtgttctggaatcctatttgattggcaaagacacagaacccatcagcagtgttctggaaaaccagcagcagagttctggaatcctatgtgagggagaaatcctcagaatccaccagtgtgttttggaatccattgtgaaggacacacattcagaccctcctagaagtgttctggaatcctatggacaaacagaaaccaaccgaagtgttctagaatcctttgtgaaggacaaacatgcagaacctcgtagcagtgttctggaattctatgtgagggacaaacactcagtatccagccacagtgtactggaatcctatctgagagcaaacattccgaacctcgtcacagtgttctggaatcctatagaaaaacattcagaacctcgtagcagtgttctggaatcctatgtgagggaaaaacattcagaccctcgaagctgtgatctggaatcctatctcagggacaaacactcagaacccagcagcagtgttctggaatcctttaggagggaaaatattcacaccctcataacagtgttctggaatcctatggacaaacactcagaacccagcagcagtgttctggaatcctatgagagtgacaaacactcagaacccatcagcagtgttctagaatcctttgtgagggacaaacactcagaacccagcatcattgttctagaatcctttgtgagagtcaaacattcagaacctggtaacagtgttctggaatcctataacgctgcagcagtgttctggaatcctatgtgtgtgacaaactttcagaacatcgtagcagtgttgtggatttctatgtcatggacaaacactcagatggcagtgagggacaaacactcagaaaccaacagcagtgttctggaatcctatgtgatggacaaacacacagaatccagcagcagtgttctagaatcctttgtgagggacaaacactcagaactcagcagaagtgttctagaatactttgtgagggacaaacattcagaacctcgtaacactgttctggaatcctatgtgaggggcaaacactcaaaatccaaccactgtgtactggaatgctatctgaggctaaacattcagaacctcggagaagtgttctggaatcctaatgttctacaatgctttgtgagggaaaaacattcagactctcgtagcagtgttctggaatcctttttgaggaacaaacactcacaacctagcagcagtgttccggtatcctttggttgggaaaaacattcacaagctcataacagtgttctggaatcctatttgaggaacaaaaactcagaacccagcagcagtgctctggaatcctatatgggggacagacactcagaatccaacagcagtttggtggaatctcatgtgagagacaaactttcagaacttcatagcagtgttctggaattctatgtgaccgacaaacactcagaatccagcagcagtgttctggagtccaatgtgagggacaaacactcagaacccagcagcagtgttctagaatcctttaagcagtgttctggagtcatttggaaaggaaaaatttcacaccctcgtaaccatgttctggaatcacatgcgagggaaaaacattcagaccctcgtagtattgttctggaatccaatatgagggagaaacactcagaacccagcagcagtgttctggaagcctttgtgagggataaactctcagaccctcgtagcactgttctggaatcccatgtaagggacaaacactcagaacccagcagcagtgatctggaatcctatatgagggaaaaccactcagaacacagcagcagtgttctggaatcttatgtcagcgacaaactttcagaacttcgtagcagtattctggaattctatgtgagggacaaacactcagaagccagcagcaaacacagcagcagtgttctggaatcttatgtcagcgacaaactttcagaacttcgtagcagtattctggaattctatgtgagggacaaacactcagaagccagcagcagtgttctagaatactatgtgtgttataaacactcagaacccaccagcagtgttctggaatcctatatgagggacacaccctcagaacccagcagcagtattctagaatcctttgtgagggacaagcactcagaacccagcagcagcgttctggaatccttttgttctggaatcccatgtgagggacaagtgctcagaacccagcagcagtgttctggaatcctatgtgaggtacaacagtcagaacccagcagctgtgctctggaatcctatgtgagggacaaacactcaaaacccagcagcagggttctggtatcccatgtgcgggacaaacactcagaatccagcagtagtgttctggaatcctttgtgatagacaaacattcagactctcgtaggtgtgttctggactcgtatgtgagggacaaaccctcagaaaccagcagcagtgttctggaatcctatgtgagtgaaaaacaatcagaacccagcagcagtgttctagtttcctttatgaggaacaaaatttcagaccctcgaagaagtgttctggaatcatatgtgagggagaaacactcagatcccagcagcagtgttctacaatccttttgggttctggaatgctatctgagggacaaactttcagataatcgtagacgtgttctggaatcctatgtgtgggacaaaaactcagaacccaacagcagtgctcgggaatcctttgtgagagacaaacatacagaaccgagaagcaggcttttggaatcctatgtgagtgacaaactctcagaaaccagcaacagtgttctggaatgctatgtgacggacaaacactcagacccagcagctgtgttttggaatcctgtggacaaacctgcagaccctcgaagcagtgttctggaatcatatgtgagggacaatcactcagaacacagtggctgggttcgggaatccaatgttagggacaaatcctcaaaacccagcagtagtgttccggaatcctgtgtgagggacaaacattcagaacccagccactgtgttctggaatactacctgaggaacaaatttcagacactcgtagaagtgttttggaatcctataagtgttctgaaatcctatgtgagggacaaacactcagaacccagcagcagtgttctggaatcctttgtgatggacaaacattcagaccgtcctagaagtgttctgaaatcctatgtgagggacaaacactcagaacccagcagcagtgttctggaatcctttgtgatggacaaacattcagaccgtcctagaagtgttctggaatcatatgtgagggacaaactctcagaacccagcagcagtgttctggaatcctatgtgagggacaaacactcagaaaatggcagcagtgttttggaatcctgtgtgatcgagaaagattcagaaattcgtaacagtgttctggaatcccatgtgagggctaaacactcagaaccctgcagcagtgttctggaatcctatgtgagggaaaaacactcacaacccagcagcagtgttctcaaatccagtgttctggattcgtatgtgagggagaaacactccgaacccaacatcagtattttggaattccatgtgagtgacaaacactcagaacccagcatctctgttctggaatcctatgtcggggacaaacactcagaacccagcagcagtgttctggaaccctatatgagaattcgtagcagtgttctggaatcccatgtgagggacaaacactcagaacccagccgcagtgttctggaatcctatgtgagggacaaacaatcagaaaccagcagcagtgttctggaatcctatgtgagagacaaacattcagacactcatagaattgttctggaatcctacgtgattgaaaaacacgcagaagccagcagctgtgctctggaatcatttcagcggaaaaacaaacagaaccagccgcagtgttgtgcaatcatttgtgtgggaaaaacattcagacactcgtagcaatgttctggaa

SEQ ID NO: 474379 - DNA, 10878 bp, Homo sapiens
cccagcagcagcgttccggaatcctatgtgatggacaaacactctgaaccaaccagcagtgttctggaatcccatgtgagggacaaacactcagaacccagcagccgtggtctggaatcctatgtcagggacaaacactcagaacccagcagcagtgttttggaatcctgtgtgagcgacaaagattcagaacttagtagcagtgttctggaatctcaggtgcgggacaaacactcagaacccagtggcagtgttgtggaatcctatgttggggacaaacactcagaacccagcagaagtgttctggaatcttataggagggacaaacagtcagaacccagccgctgttttctggaatcctatcagagagacaaacattcaggcactcatataagtgttccggaatcctatgtgttggaaaaacacccagaaaccagcagctgtgttttggaatcctttgtgaggataaacaaacaaagccagcagcagtgttctggaatcgtttatccccgtagtagtgttctggaatcctatgtgagggacaaactctcaaaacccagcaacagtgttctggaatcctatgtgaggaataaaagcacagaacacagcagcagtgttcttcaatcctatgtgagtgacaaatattcaaaacttaatagcagtgttctggaatcttatgtaaaagacaagcactcaaagcacagccactgtgttctggaatcttatctgagggacaaacattcagacactcgtcgaagtgttctggaatcctatccgtgttctggatcctatgtgagtgacaaacactcagaacccaacagcagtgttctggaatcctatgtgagtgacaaacactcagaacccagcagcagtcttctggaataccatgtgagggacaaacactcagaaaccagcagcagttttccggaatcctatgtgagtgacaaacactcagaaggcagcagcagttgtctagaatcctttgaatcctttgtgagggagaaacatacagaatccagcagctgtgttttggaaacctatgtgagggaaaaacattcagtacctcctaggagtgttcgggaatcgtatgtgagggacagacagtcagaacccagcagcagagttctggaattctatatgagggacaaacactcagaatgcaacagcagtgttctggaatcctatgtgttggacaaatactcagaagacagcaccatttttctggaatcctatgtcagatacaaacactcagaacacagcagcattcttccggaatactatgtgggtgacaaacactcagaacccatcagtaggattctggaatcctatgtgagggacaacactcagaacccagcagcagtgttctggaattctaagacccagagcagtgttccagaatcctacgtgagggacacaccttcagaacccagcaacagtgttctgaaatcctatgtgagagacaagcattcagaacgtcgtagcagtatttgggaatcccatgtggagaacaaacactcagaacccagccactgtgttcaggaatcctttctgagggacaaacagtcagaaaccagcagcagtgctcaggaatcctttgtgaggtacaaacatacggaacccagcagcagtgttttggaatcctatgtgagggacaaacatacggaacctcctagcagtgttctggaatcctatgttgttctggaatcgtatgtgagtgacaaacactcagaacccagcagcagtgttctggaatcccatgtgagggacaaccacgcagatcccagcagcagttttctggaatcctatgtgagagtaaaacactcagaagccagcagcagtgctctagaatcttttgtgagggacaaacaaactggcagcagtgttctagaatcctctatgaggaacaaatattcggaacatggaagcaagattgtggaatcctatgtgagggagaaacactcagataccagcagcagtgttgtggaatcctttgggatggacaaacattcagactctcatattcacagcagtattctggaatcctacgtgggggacaagcacgcagaacccagccactgtgttctggaatcctatccgagggacatacattcagaaacttgtagaagtgttctggaatccaacgtgagggacaaacactcagaacccagcagtagatttctggaatcctatgagagtgacaaacacaagccagcagtagtactccagaaatctttggacaaaaactcagaacccaacagcactgttctggaatcctttggaatggacaaacattcagagcgtcgttgcagtgttctggaatcctatgtgagggacaaacactcagaacccagcagcagtgttctggaatactttatgatggacaaacattcagaccctcgcagccgtgttctggaatcatatgtgagggacaaacactcagaacccagcagcagtgttctggaaaaacactcagaacccagtaaaagtgttctggaatcttatgagaaggaaaaacactcagaacccaacagcaatgttttggaatcctatgtgatcaacaaagattcagaagttcatagcagtgttctggaatcacatgtgaggaagaaacactcagaaaccagcagtagtgttctggaatcctatgtgagtgacaaacactcagaaaccagcagtagtgttctagaatcctttgtgaggcacagacgttcagacgctcgaagcagtgttctggaatcctataaacattcagaacctctcagcagtgttctggaatcttatgtgagggacaaatactctgaacccagcagcagtgttctggaatcccatgtgaggggcaaacactcagaacccagcagcagtgttctggaatcctatgttagaggcaaagactcagaacccagcagctgttttcttgaattccttgtgagggacaaactttcagaacctcgaagcagtgttctggagtcccacgtgagggacaaacactcagatcccagtagcagtgttctggaatcctttggaatggacaaacattcagatgctcgtagcattgttctggaatcctacaagctttctgtaatcctatctgagggacaaacactcagaaaccagcagcagttctctggaatcctttgtgagggacactcagaaaccagcggcagttctctggaatcctttgtgagggacaaacactcagaaaccagcggcagttctctggaatcctttgtgagggacaaacactcagaaccccacagaagtgttctggaatcctttgtgatgggcaaacattcagaacctcgtagcagtgttctggaatcctatgtgaggaacaaacactcagaacccagcagcaatcttctggaatacaatgtgagggacaaacgctcagaacccagcagcagtgttttggaatccggtatgatcgacatagactcagaacttcttagcattgttctggaatcccatgtgaggatcaaacactcagaacccagcagcagtgttctgaaatcctatgtgagggagaaacactcagaacccagtagcagtgttctggaatcctatgtgagtgacaaaccctcagaaaccagcagcagtgctctagaatcctctgtgtgggacaaatatccagaaactcgaaacagggttctggaatcctatgaaacctttgtgagggaaaaccattcagacactcgtagcagtgttctggaatcctacatgagggaaaacactcagaacacagcagcagtcttccggacacctaatgttctggaatcccatgtgagtgacaaacagtcagaactgagcagcagtgttctggagtcctatgtgagggacaaacactcagaatccagcagcagttgtctgcaatcctataagtattctggaatcctatgtgggagacaaacactaagaaacctgcagcagtgctctggaatcctttgtgagggacaaacagaacccagcaacactgttctggaatcctttgtgagggaaaaacattcagaacttagtagcagtgttctggaatccaatatgaggaaaaatcatacagacccacttagcagtgttctggcatcctatgtgagtcacaaacactcagaacacagaagcagtgttctagaatcctctttgagggacaaacatgcttaccctcaaaacagtgttctggaatcctatgtgagggacaaccactcagaaccgagcagtagtgttgggcaatcctttgtgatggacaaacattcagaccgttgtagcagtgttctggaatcctatgtgagggacaaacactcagaaccctgcagcagagttctggaatcatttatgagggacaaaacttcagaccctcgaagaagtgttctggaatcggatatgagagacaaacactcagaacacagcagcagtgttctggaatcctctgtgagggataaacactcagaacccagcagcagtgttctggaatcctttgtgatggacaaacattcagaccctcgcgacagtgttctggaatcctatgtgaagggcaaacactcagaaatcagcagcagtgttctggaatcctctatgagagacaaacactcagaacccagcagcagagttctacattcttttgtgagggacaaacactcagaacccagcagccgtgttcaggaatgctatgtgagggagaaacaatcagaacccagtagcagtgttctggtatcctatatgagggacaaacactcagaacccagcagaaatgttctggaatcctatatgagggatatacactcacaaaccagcagcagtgttctggattcctatgggagggacaaacattcagaccctcggagcagtgttctggaatcctatgtgaagggcaaacactcagaacccagtagcagtgttctggaatcctatgtgagggacaagaattcagacactcatagcagtgatacggaatcctttgtgagggacaaacatttggaccctcgtagcagtgttctggaatcctttcagtattctggaatcctacgtgagggacaacctagcagcagtgttctggaatccaatgtgagggacaaacacatacaacccagcaacaatgttctggtatcttatgtgaggaacaaacactcagaatacagcagctgtgatctcgacaaagaatccgaacttcgtagcagtgttcacgaaacgcatgtgggggacaaacgctcagaacccagcagcagtgttctgcaatcctgtgggagggacaaatactcagaacccagcagcagtgttatgggatcgtatgcgagagacaaacactccgaacccaggagcagtgtcctggaatcctatgtgagcacgaacactcagaacccaacagcagggatctcgaattctgggtgcaggacaaacactcagaacccagcagcagtgttctggaatcctataaacagcagcagtgttctggaatcctttgtgagagaaaaacattcagaccctcgcaacagtgctctggaatcctatgtgatggacaaatactcacaacccagcagcagtgttctggaatccaatgtgagagacaaacactcagaacccagcagcagtgttctagaattttttgtgagggataaacattcagacaatcgaagcagggttctggaatcctatgtgagggacaaccactcagaaaccagcagaagtgctctggacaaacactcagaaaccagcagtagtgttctggattcgtttctgagggacaaacattcaggaccttgtagcagtgttgtggaatcccatttgagggacaaatacactgaacccagcagcagtgttctggaatcccatgttagggacaaacactcagaaaccagcagcggtgttctggaatcctatgtcaaggacaaactgtcagagcccagcagcagtgttttgggatcctgtgtgagtgaaaaagattcagaatttcatagcagtgttctggaatcccatgcagtaaccagtaacagtgctctggaatcctttgtgagggaaaaacattcagaccctcgtaacagtgttctggaatcctatgtgacggaaaacctctcaacacccagcagctgtgttctggaatcctatttgagggacaaacactcaaaccccagccactgtgttctggaatactatctgagggacaaacattcagacactcatagaaattttgtggaatcctatgtgagggcaaacactcagaaaccagtagcagtgctctggagttctttggagaaacactcagaatccagcagtagagttttggaatcctgtgtgagggacaagtattcagaatttcgtggaagtgttcacgaatcagatgagtgttttggaatcctgtgtgagggacaaaaaacggaacacagaagcagtgttctggaatcctatgtgagtgacaaacattcagaacttcgtagcagtgttctggaatcttatggatattcagacactcgaaacagtgttctggaatcctatgtgagggacacacactcagttaccagcagcagtgttctggaatcctttgtgaaggaaaaagatttagaccctcgtagcagtgttctgggatcctatgtgagggacaaacactcagaacccattagcagtgttctggaatcctatgagagggacaaacactcagaaaccagtaacagtgttttggaatcctatgtgagggacaaacactcagaacccattagcagtgttctggaatcctatgagagggacaaacactcagaacccagtagcagtgttttggaatcctatgtgagggacaaacactcagaacacaggaacagtgttctggaattctatgtaagggatagacactcagaaaccagcagctgtgttctggaatggtatgtgagggacaaacactccgaatccagcagcagtgttctggaatcctatgtaattattctggaatcctatgtgagggacaaacactcagaaaccaacagcagtactgtggaatcctttgtgagggacaaacagagagatcccaacagtagtgttctggaatcctttctgaggcaaaaacattcagacacttgtagcagtgttctggaatcctatgtgagggacaaacactcagaacccagcagcagtgtcctggaatcctatgtgcgggaaaaacattcagacattcgtagcagtgtactggaatcctatgtgaggtacacacactcagatcccagcagcagtgttctggaatcatttgtgatggaaaaagatttagacactcgtagcagtgtcctgggatcctgtgtgagggacaaacactcagaaactggtatcagtgttctggaaccctatgtgagggacaaacattcagaacccagcggcagtgttctggaatcctatgtgagggacaaacactcagaacccagcagccgtgttctggaattctatggacaaacattcagacaatcgcagaagtgttctggaatcctatgtgagggacaaacactcagaaaccatcagcggcgctatggaatcctttgtgagggacaaacagaatccagcagccgtgttctggaaacatttgtgagggaaaaacattcagacactcaaagcagtgttccggaatcccatgtgaggggcaaacactcagaacccagcagcagtgttctagaatcttttgtgagggacaaaccttcagacactcgaagcagtgttctggaatcctatgtgaaggaccaacactcagaaaccagcagcagtgctctcagtgttcttgaatcctatgtgaggtacaaactctcagaacccaggagtagtgttgtggaatcgattgtgagggacaaacattcagaatcttgtaacagtgttttggaatcctatgtgagggacaaacactgtgaacccagtagcagtgttctggtatcctatgtgaggaacaaacacccagaacatagcagtcgtgttctggaatcctatgtgagggacacacactcagaatccagcagcagtgctttggaaaaacattcggaccctcgtagctgtgttctggaatcctatgtgagggacaaactctcagaacccaacagcagtgttctggaaacctatgtaagggacaaacactcagaacacagcagcagtgctgtggaatccttcatgagggaaaaacattcagaacctgaccctcgtaacagtgttctgggatcctatgtgagggacgaacactcaggaccctgcagcactgttttggaatcctgtgtgagcgaccaagattcagaaattcgtagcagtgttcacgaattccatgtcagggacaaacactcagaacccagctgcagtgttctggaatcctttgtgagggaaaaatattcagaacctcgtagcagtgttttggaatcctacgtgagtgacaaacactcagaagcctgcaacagcgttctagaatcttttgtgagggacaaacactcagaacctcatagcagtgttctggaaaaacaaacagaacccagtagcagtgctctacagtcttttgtgagggaaaaacattcagaccctagtagcagtgttctggaatcctatgtgagggaaaaacattcagaccctcgtagcagtgtcctagaatcctatatgagggacaaacactcagaacccagcagcagtattctgaaatcctttgggagggaaaaacattcacaccatcgtaacagtgttttggaatcctacgtgagagaaaaatattcagactatcgtagcgttgtgctgaaatccagtataaggaataaacactcagaacccagtagcagtgttctggaaccctttgtgatggataaacattctgaccctcgtagtagtgttctggaatcctacgtgagggacaaacactcagaacccagcagcactgttctggaatgctatgtgagggacaaacactcagaacgcagtagcagtgttccagaatcctatgtgagcaacaaactttcagaacttcgtagtagtgttctggaatcgtaagtgagggacaaacgctcagaacccagcagcagagttctggaatcccatgtgatggacaaacactcagaacccagcagcagtgttctagaatctttgtgagggacaaacattcagaatcttgtagcagtgttctagaatcctatttatgggacaaacagtcagaatacagccactgtgtactggaattctatctgagggcaaacattcagaaccttgtagaagtgttctggaatcatatgtgagggacaaacacttagaaatctctaacagtgctctggaatcctctgagggacaaacccacagaacccagtagcagtgttctacaatccttggtgaggaaaaaacattcagaccctcgtagcagtgttctggaatcctatctgagggacaaacacacagaacccagtagcagtgttctacaatccttggtgaggaaaaaacattcagaccctcgtagcagtgttctggaatcctatctgagggacaaacactcagtacccagcagcagtgttctggaatcctttgggagggaataacattcacaccgtcataacagtattctggaattctgtgtgagggaaaaacattcagaccctcgtagcattgctctggaatcccatatgagggactaacactcagaacccagcagcaatgttctggaaccctttgtgaggaaaaaacattcagaccctcgtagcagtgttctagaatcctatgtgagggacaaacactcagaacccagcagcagtgttctggaatcctaagtgagggagaagcactcagaatccagacactgtgtacaggactcctgcctgaggggaaacattcagaacctctagaagtgttctgcaatcctatgtgagggacaaacactaagaaatctgcagcagtgttctgtagtttttttgtgaggaagaaacaaacagaacccagaaagagtgttctacaatcctttctgagggaaaaacattccgatccttgtaacagttttctggaatcttatatgaggcacaaactctcagaagccagcagcagtgttctggaatcctttgggagtgaaaaacattcacaccctcgtaacagtgttctggaatcctgtgtgagcaaaaaacattcagaccgtcgtagcatttttctggaatccaacatgaggcagaaactctcagatcccagtagcagtgttctggaaacctttgtgagggataaacattcagaccctcgtagccgtgttctggaaacatatgtgagggacaaacacacacaacccagcagctgtgttcttgaatcttatgtgagggacaaacactcctgacccagcagcagtgttctggaatcctaagagagggacggacactcagaaaacagcaacagtgttcaggaatcatatgtgagtgaaaaacactcagaatccagtaactgcatactggaattctatctgagggcaaatatttagaacctcgtagaagtgttctggaatcctatgtgagggaaaaacattcagaccatcgtagcagtgttctgaaatcctatatgagggacaaacactcagaacccagcatcagtgttctggaatactttggaagggaaaacctttcacatcttcctaacagtgttctggaatcctatgtgagggaaatacatttagaatctcgtagcattgttctggaatccaatatgagggacaaacaatcagagcccagtagcagtgttctggaaccctttgtgagggataaacattcagagcctcgtaacagcgttctgaaatcgtatgtgagggacaaacactcagaacccaggagcagtgttttggaaagctatgtgagtgacaaactttcagaacttcgtagcagtgttctggaattctatgtgaggaacaaacactcagaacgcagcaacactgtcctggaa

SEQ ID NO: 474380 - DNA, 3760 bp, Homo sapiens
gaagcagtgtgctggaatcctatgtgaggggcaaacacttggaatccagcagcagtcattgttctggaatccaatatgagggacaaacagtcagaacgcaataacagtgtttcggaaccctttgtgagggataaatattcagcccctcgaagcagtgtgctggaatcctatgtgagggacaaacactcagaacccaacagcagtgttctggaatcctttgggagggaaaaacatttacagcctcgtaacagtgttctggaatcctatggacagagactgagacccagcagtagtgttttggaatcctgtgtgagggacaaaccctcagaaaccagcagcagtgttctagaatcctatgtgagtgacaaacagtctgaacccagaagcagtgttctggaatcctatgtgagggacaaacactcagaatccagcagcagtgttctggaatcctatgtgagggacaaacactcagaatccagcagcagtgttctggaatcctatgtgagggacaaacactcagaatccagcagcagtgttctggaatcctttctgagggacaagaactctgaacccagcagaagtgttctggaatcctatgtgagggaaaaacattcaaaccctcttagcattgttctggaatccaatatgagggacaaacagtcagaacgcaataacagtgtttcggaaccctttgtgagggataaatattcagcccctcgaagcagtgtgctggaatcctatgtgagggacaaacactcagaacccaacagcagtgttctggaatcctttgggaaggaaaaacatttacagcctcgtaacagtgttctggaatcctatggacagagactgagacccagcagtagtgttttggaatcctgtgtgagggacaaaccctcagaaaccagcagcagtgttctagaatcctatgtgagtgacaaacagtctgaacccagaagcagtgttctggaatcctatgtgagggacaaacactcagaatccagcagcagtgttctggaatcctatgtgagggacaaacactcagaatccagcagcagtgttctggaatcccttctgagggacaagcactccgaacccagcagaagtgttctagaatcctctgtgaggaaaaagcattcagaagctcatagcagtgttgtggaatcgtttttgagagacaaacactcagaacgcggcagcagtgttctggaatcctttgtgtcagacaaacattcagacagttgtggcagtgttctggtatcctatgtgagggacaaacactcagatccagcagcattttttctggaatcctatgtgagggacaaacactcagaacccagcagcagtgttctggaatcgtatgtgagggacaaactctcagaacccagcagccgtgttctggaatcctatgtgagagacaaactcttagaacccaggggcagtgttctagagtcctttgtatgggacaaacattcagaaactctcagcagtgttctggaagcgcacaaacactcagaacccagcagcagtgttctggaattctatgtgagtgacaaacactcagaacccagcagcactgttctagattcctttgtgagggacaaatcttcagaccctcgaaacagtgttctgaaatcctatgtgagggaacaacactcagaacccagccactgtgtgctggaatcctgtctgagggacaaacattcaaacactcgtagaagtgttctggaatcttatgtgagtgataagcaatcagaaaccagcagcggtgctctcagtgttctgggatcctatgtgagggaaaaacattcagacccgcatagcagtgttctggaatcctatatgagtgacaaacactcagaacccaccagcagtgttctgaatcttttcattgttctggaatccaatatgagggacaaacactcagaagccagcagctgtattctggaatgccatgtgagggaaaaagactcagaacccaacagcagtgttctggaatcctgtctgaggaataacccctgggaacccagacactgtgtactggaatcttatattagggacacatattcagacactcgtagaagtgttctggaatactatgtgagggacaaacacactgaacccagcagcattgttttggaatcccatgtgaggcagaaacactcagaactcagcagcagtgttctggaatcctatgtgagtgaaaaacactcagaacccagcagcagtgttctagaatcctttgtgggcaaaaaaccttcagaccctagaatcagtgttctggaatcctatgtgatgaacaaacactcagaacccagcagcagtgtttttgattcctttgttttggagaaacattcagaccattgtagcactgttccactatcctatgtgagggacaaactctcagaacccagtagcagtgctctagaatcctatgtgagggacaaacactcagaacccagcagcagggttctggaatcctatgtgagggtcaaacactcagaaggcagcagcagtgttctggaatcctatgtgagggagaaacactcagaacccagtcactgtgtgctggaatcctatgtgagggagaaacattcagaacccagtcactgtgtgctggaatcctatctcaaggacaaacattcagaccattgtagcactgttccgctatcctatgtgagggacaaactctcagaacccagtagcagtgctctagaatcctatgtgagggacaaacactcagaacccagcagcagggctctggaatcctatgtgagggtcaaacactcagaaggcagcagcagtattctggaatcctatgtgagggagaaacattcagaacccagtcactgtgtgctggaatcctatgtgagggagaaacactcacaactcagtcactgtgtgctggaatcctatctgagggacaaacattcagacatgtgtagaagtgtcctggaatcctataagtgctctgcaatcctatgtgagggacaacactctgaacccagcagcaatgttttcgaatcccatgaaagggacaaacactcagaactcggcagcatttttctggaatcctatgtgagtgacaaactctcagaacacagcagcggtgttctagaatcctttgtgggggacaaacattcagatgatcatagcagtgttctggtatctcatgtgagggacaaacactcggaaaccagcagcagtgctctggattcctttttgggggacaaacaaaccgagaaggaggattcctttgtgaggaacaaacattcagaccctcgaagcagtgttctggaatgttatgtgagggacaaaccctctgaacccagcagcagggttctggaatccgaagtgagtgacaaacactcaaaacccagcagcagtgttccggaatcctttgtgagggacaagctttcaaaccctcgaagcattgttatggaatcctatgtgaggaacacacactcagaatccagtagcagcgttctcgaatcctttgtgatggacaaacatccagacactcttagcagtgttctggaacgctatgtgatggacaaacctacagaacccaggagcagtgttctggaatcctctgtgagggacaaacactcagaacccagtagtagtgttctggaatctaatgtgagggacaaacactaagaacccaggagcagtgttctgcaatcctatatgagggacaaacactactaaccctgtagcagtgttctagaatcctttgtgagggaaaaacattcagaccatc

SEQ ID NO: 474381 - DNA, 4864 bp, Homo sapiens
cccagcagtagtgttcgggaatcctatgggagggacaaccattccgaatccagcagcagtgttgtgtaatcctatggagaaatattcaaacactcgtagaagagttctggaatcctatgtgagggaaaaaccctcagaagccagcagcagtgctctggaatcctttgtgaggggcaaacaatcagaacccagaagcagtgttcttgaatctttcgtgagggaaaaacattcagaccctcgtaatagtattttggaatcctatctgagggacaaacactcggaacccagcagctgtgttctggaatcctatgtgtgggacaaacacttagaacccagcacaatattctggaatactactgttcttgaatcccatgtgagggagaaaccttcataccctcgtagcattgttctggaatccaatatgagggacaaacactcagaacccagtagcagtgttctggaacctttattgagggataaacattcagaccgtcatagcagtgtgctggaatcctatgtgagggacaaatgctccgaacccagcagcagtggtttggagtcctatgtgagggacaaacactctgagcccagcagcagtgttctggaatcctctgtgagggacaaactttcacaacttcgtagcagtgttctggaattctacgtgaggtacaaacactcagaacccagcagcagtgttctggaatcctttgtgaggaacaaacattcggaacctcatagcaatgttcaggaatccgacaaagactcagaaaccagcagcactgttcaagaatcctttttgtgtgacaaacattctgaacctcaaagcagtgttctggaatcctacgtgagggacaaacaccacaatccctgcagcagttttctggaatcctttgtgatggacaaacattcagaccctcgtagcagtttttcagaatcctatgtgtgggacaaacactcagaacacagcaacagtggtctagaatcctttgtgtgggacaaagattcagaacccagcagcagtgttctggaatcctatgtgaggtacaaacactcagaaacagtggctgtgtactggattccactgtgtactggaatcctatctgaaggaaaaacattccgaacttcggaaaaactttcacatccttatagcagtgttctggaaacctatgtgagggaaagaaattcagaccctcgtagcagtgctctggaatcctatatgagggacaaacactcagaacccagcagcagtcttctggaatcctttgggagggaaaaacattcacaccctcgtaaaagtgttctggaatcctatgtgaaggaaaaacattcagaccctcgtagcattgttctggaatctaatatgagggacaaacagtcagaacccagttgcagtgttctggaatactatgtgagtgacaacactcagaacccaggaactgggttctggaattgtctgtgcgggccagtcattcagaacctcgtggcagtgttctggaatcctatcagccctgttctggaatcctatgtgaggtacaaactctcagaacccagcagcagtgttatggaatcctttgtgagagacaaacattcagaccctcgtagcagtgttctggaatcttatgtgaggcacaaacactcacaacccagtagcagtgttctggattcctatgtaggggagaaacactcagaacccaacagcagtgttctggaatcctttgtgatggacatacattcagaccctcaacccagcagcagtgttctagaatcctttgtggggtacaaacattcagaacctcgaagcagtgttctggaatcctatttgagggacaaactcacagaacccagcagcagtattctggaatcccaagtgagggacaaacactcagaaaccagcagcagtgtgctggaatgctttttgagggacaaacattcagaccttcgaagcagtgttctgcaatcctatgtgtgggagaaacactcagaatccagcagcagtgttgtagaatcctctgtgagggagaaacactcagaactcagcagtagtgttctggaatcctatgtgatggacaaacactcagatcactgcagcaggggtctgaaatcctatgtgaaggataagcactcagaacccagcagcagcgttctggaatcctttctgagggacaaacattcagaacctcgtagcagtgttctggaatcttatatgtgggacaaacactcagaaccaggcagtaacgttctggaatcccatgtgagggacaaacactcagaacccaacagcagtattctggaatcctatgtgagtgacaaacactcagaatccagcagcagtgttctagaattctttgtgtgggacaagcattcatgccctcaaagcagtgctctggaatcctatgtgagggaggaacagtcacaacccagcagcagtgttcaggaatcctttgtgatggacaaacattcagaccacacccgtggaggtgttctggaatcctatgtgagggacaaacactcagaaaacagcagcggtgctatggagacctttgtgagggcaacaaacacaagccagagttttattctggacaaacactcagaacccagcagcagtgttctagaatcctatgtgagagacaaaccctcagaacccaacagcagtgttctggaatcccatgtgagggacaaacactcagtacccaaccactgtgttctggaatcctatatgagggacaaacattcagacaatcgtagaagtgttctggaatcctatgtgagggacaacactcagaaaccaccagcagtgctctggaatcttttggataaaagcccagaacgcagcagcagtgttctggaatcctgcgtgagtgacaaacactccgaaccccgcaggaatgttcttgaatcctttgtgagggacaaacattcaaaccctcgaagcagtgttctggaatcctatgtgagaaaccagcagctgttttctggaatcttgtcgagtgacaaatattcagacactcgtggaagtgttctggaatcctatgtgagggataaacactcagaaactagcagcggtgatctggaatcctttgtgaagcacaagcaaacagaacccagcagctgtgttctggaatctttcagagttctggaatcctatgtgagtgacaaacactcagaaaccagcagcagtgttctagaatcctttctgtgggacaaactttcagacgctcaaagcagtgttctggaatcctatgtgatggacaaacactccgatcccatcagcaatgttctgcaatcctttgtgatgggcaaacattcagaccctcaaaccagcagcagtgttctggaatcccttgagagggaaaaacatttacaccttcataacagtgttctggaatccttactgtgggaaaaatattcagaccctcgtaacagtgttctggaatcctatatgagggacaaacactcaaaaaccagcagcagtgttctggaatcctatgtgagggaaaaacactcagaacccaactgcagtgttctggagtcctgtgggagtgacaaactttcagaaattcgtagcagtattctggaatcttatgtgagggacaaacacacagaacccagtagcagtgttctggaatcttatgtgagtgacaaacactcagaatccagcaacagtgttctggaatcctatgtgagggacaaacactcagaacccagcagcagtgttctagaatactttgtgaggaaaaacactcagaacacagcagtagtggacaaacactcagaaaactgcagcagtgttctggaatcctacgtgggggacaagcattcagatcctgatagcactgttgtggaatgctctgtgaggaacaaacaatcagaccctcgtagcagtgttctgaaatcctgtgtgaggtacaaaccctcacaactcagcagcagctttctggaattctatgtgagggacaaaccctcagaacctaacagcagtgttctggaatcatacgtaagaacacagaagcagttgtctggaatcctttgtgatggaaaacattcagaccctagtagcagtgttctggaatcctatgtgacggacaaaccttcagaatccagcaatagtgtactggaatcctctgtgagggacatacactcagaacccagcagtagtgttttggaatcctttgtgagggacaaaccctcagaatccagcagtagtgttctggaatcctctgtgagggacatacactcagaacccagcagtattgttctggaatcctatgtcagggacaaacattcagaaaccagcagcagttttctggaatcctatgtgagggacaaacactcagaaaccagcagcagtgttctgcaatcctatgtgagggacaaacactctgaacccagcagcagtgttctagaatcctatgtgagtgacaaacattcagaattttgtagcaatgttctgccattctatgtgagtgacaaacactcagaagccagcaacagccttctagaatcctatgtgagggaaaaacactcagaaaccaacagcaatgttctagcatcccttgtgagggacaaacattcagaatctcgtagaagtgctctggaatcgcaagtgagggagaaacacacagaacccagcagcaatgttttggaatcctgtttgagcgacaaagatacagaacttcgttgcaatgttctcgaatcccatgtgagggacaaacactgagaatccagcagcagtgtgctggaattctatgtgaggaacaaacactcagaacccagcagcagtgttctacaatcctatgtgagggacaaacattcagaaactcgtagcagtgttctgcaatcctgtgtgagggacaaacactcagaa

SEQ ID NO: 474382 - DNA, 4163 bp, Homo sapiens
agcagcagtgtccaggaatcctaaatgagggacaaacattcagaccttcggagcagtgttctggaatcctatgtgaaggacaaacactcagaacgcaatagcagtgttctggaatcctatgtgaaggacaaacactcaggacccagtagcagtggtagggagtgctttctgatggacaaacattcagaaccttgtagcaattttctggaatcctatgtgagggacaaacgctcagaacacagcagcagtgttctggaatactttggacaaacactcagaacccaacagcagtggtctggaatcctctatgagggacaaacactcagaacccagcagcagagttctggactcctaaaacctcgtagcagtgttctgggatcctatgtgaggtacaaaccttcagaacccagcagcattgttctggaattctacatgacggacaaaccctcagaacctagctgcagtgttctggaatcctatgtgagggacgaacactcagaacccagcagcagtgttctgcattcctatgtgagggacaagcactcagaaacctgcagcagcgtttgggaatcccatatccccgcggcaatgttccggaatccttcgggagggacaatcattcagaccctccgagcactgctctgtaatgttatggacaaaccctcagaacctagcagcagtcttctggagtcttatgtgagggacgaacacagagaacccagcagcagtgttctggattcctatgtgagggacaaacactcagaaccctgcagcagttttctggaatccaaggtgagggacaatcactcagaacccagcagctatgttccggaaacctatgtgagggacaaacattcggaccctcgtgtcagtgttctggaatcctatgcgacgatcaaacactcagaaaacggtaccagtgttccggaatcctttgtgagagacaaacactcagaaccctgcagcagtgttctggaatcctacgtgaggtgcaaacattcagaccctcatagcactgttctggaatgctacgtgagggacaaacattcagaccctagtagcagtgttctagaatcctatgtgaggtacaatccctcagaacccagcagcagtgttctagaattctacgtgaaggacacacactcggaacacagcagcagtgttctggattgttatgtgaaggacaaacactcagaaccctgcagcagtgctctggaatcctattcctatgtgagggacaaacactcagaacccagtagcagtgttcgggaattctatgtgagggacaaaccgtcagaacccagcagcagtgttctggaatcctttttgagggacaaactttcagacactcagagcagtgttttggaatcctatgtgagggacaaacactcagaaccctgcagcagggttctggaatcctatgtgtgggacaagcattcagaccctcatagcactgttctggaatgctctgtgagggacaaacattcagacccttgtagcagtgttctggaatcctgtgtgaggtacaaaccctcagaactcagaagcagtgttctggaattctatgtgaaggaaaaaccctcagaaccttgcagcagtgttctggaatcggacaaccattcagacactcgtagcagtgctctgggattatatgtgagggacaaacattcagaacccagcagcagtgttctggtatccttggtgaggaacaaactttcagaacctccgagcagtattctggaatcccgggtttggaacaagcactcagaacccagcagcagtgttcgggaattctatgtgaggaacaaaccgtcagaacccagcagcagtgttctggaatcctttttgagggacaaactttcagacactcagagcagtgttttggaatcctatgtgagggacaaacactcagagccctgcagcagggttctggaatcctatgtgtgggacaagcattcagaccctcatagcactgttctggaatgctctgtgagggacaaacattcagacccttgtagcagtgttctggaatcctgtgtgaggtacaaaccctcagaactcagaagcagtgttctgcaattctatgtgaaggacaaaccctcagaaccttgcagcagtgttctggaatctagcagtgttctggaaacctatgtgaggggccaacactcagaacccagcagcagtgttctggaatgctatgtgagggacaagcattcagaccctcatagcagtgttctggaatcttatgtgagggacaatcattcagaccgtcgtggcactgttctggaatcctatgtcatggaaaaacactcagaaccctgcagcagtgttctgaaatacgatgtggtggacaaacaaagaacacagcagcagtggagaatcactcagaaccctgcatcagtgttctggaatcctatgggattgacaaaccctcagaacccagcagcaatgttctggaatcctatgggagggacaaacactcagaaaccggcagcagtgttctggaatccttttgttatggaatcctatgtgagggaccaaccctcagaacccagcagcagtgtgctggtttccttcctgaggcacaaacattcagagcctcgtaacagtgttctcgaatcctatatgagggacaaacaccccgaacccagcagcagtgttttggaatcctttgtgagagaaaaacattcagaccctcaaagcagtgttctggaatcctatgtgacagagaaacacccaaaacccagcagctgtgttctggtatcctacatgaggggcaagcattcagaccatcatagcagtgttctggaatcatatgtgagagacaaacattcagaccctcatagctgtgttctgcaatcctgtgagagggaaaaacattcagaacccagcagcagtgttctggaatcctatgtgaaggacaaacactcagaacccagcaacagtattctggaatcccacagggacaaacaatcagaacccagtagcagtattctggaatcctttgtgagggacaaacaccaggaacccagcagcagtgttctggaatcctatgtgtgggacaaactctcagatcccagcagcagtgttccggattgctatggacaaacattcagaaccttggagaagttttctggaatactatgtgagggtaaaacaccaagaacccaggagcagtttcttgaaaacgttgtgagggaaaagctttcagacatttgtaccagtgttctggaatccgatgacaaacactcagaacccagcagcagtgttctggaatcctatttgattggcaaagacacagaacccatcagcagtgttctggaaaaccagcagcagagttctggaatcctatgtgagggagaaatcctcagaacccaccagtgtgttttgaaatccattgtgaaggacacacattcataccctcctagaagtgttctggaatcctatgacaaacattcagacccttcaagcagtgttctggaatcctatgtgagtgacaaacccttaaaacccagcagcagtgttctagaatattatgtgagggacaaaccctcagaacttggcaacagtattctggaatcctatgtgagggtaaaacactcagaacccaactgcaaggttcttgaatcctattgttctggagtccaatctgaggacaaacactcagaaaacagcagcagtgttctggaatcctttgtgagggacaaacattcagaccctcagagcagtgttgtggaatcctatgtgaggggcaaacacacagaacgtggaagcagtgtcctggtattctctctgtgggacaaacactcagaacctagccatggtgttccggaattctatatgagggacaaaccctcaaaaacgagaatcattgttgtggaatcctttgtgtgggacaaacattcagacactcatagcagtgttctggaatcctaggtgagggacaagcactcagaatccagcagcagtgttctagaattctacgtgagggacaaacccacagaacatatcagcagtattcaggaatcctatgtgagaggcaaacactcagaaccccgcagcactcttctggaatcctttgtgagggacaaactttcataccctcttaacagtgtactggaatcttatgtgaggacaagcactcagaacacagcaacagtgta

SEQ ID NO: 474383 - DNA, 1745 bp, Homo sapiens
ctgctacgagggtcggaatgtttatccctcacaaaggtttccagaacaatgctactggcatttgtccctcatattggattccagaacaatatcaagagggtccgaatgtctttccatcacataggtttccagaacactgtttcgatagtttgaatgtttttccctaccaaaggattccagaagattgctgctgggttctgagtgtttgtcccacatataggattccaaatcactgcaacgaggaacagtgctacgagtgtctgaatgtttttccctcacataggattccagaacactgttacgagggtgtgaatattttccctcctaaaggattccagaacactgctgctgggattccagaacactgctgctgtgttctgagtgtttgtccctcactttggattccagaacactgctacgagggtctgaatgtttatccctcacaaatgtttccagaacactactactggattctgagggtttgtccttcatattggattccagaacaatgctgcgaatgtctgaaagtttttccctcacgtaggattccagaactcagttacgagggtgtgaatgtttttccctcccaaaggattccagaacactgctgctcggttctgagtgtttattgcaaaacactgctacgaggttctgaatgtttatccctcataaaggtttccaggaaactgctgctgggttctgagtggttgccctcatattgtcttccaaaacaatggtacgagtgtctgaatgtttttccctcacctaggattccggaacactgttatgaggaacacagctacgaggttctgaatgtttattcctcacaaaggtttacagaacactgctatggagttctgagtgttttcccctcatattggattccagaacaatgctgcgagtttctaaatgttttcccctcatataggattcgagaacactgttacgagggtgtgaatatttttccctcccaaataattccagaacactgttgctgtgttctgagtgtttttccctcatataggattccagaacagtgctacaaggttctgaatgtttttccctcacataggattccagaagactgctatgaggaacactgctgctgggttctgagtgtttgtcccacacataggattccagaacattgctacgaggggctgaatgtttatgcccaacaaagggttccagaacactgctactgggttctgagtgttcatacttcatattggattccaaaacaatgctatcaggatctgaatctttttccctcacataggattccagaatactttaacgagggtgtgaatatttttccctcccaaatgtttccagaacactgctgctgggttcggagtgtctgtcactcatatagaactccaaaacactgctacaagggtctgaatatttttccctcacataggattccagaaccctgctacaagggtctgaatgtttttccctcacaaaggactgatcaacactgctacagggttctgtttgcttgtccctccaaaggattccagagcactgttgcagatttcttagtgtttgtccctcataggattccagaacccttctctgaggttctgaatatttgccctcagataggattccagtgcacggtggctggattctgagtgtttgtccctcacataggattccacagcactgctgctggcttctgagtgtttgcccctcacatagaattccagaacactgctacgaagttctgaaagtttttc

SEQ ID NO: 474384 - DNA, 6872 bp, Homo sapiens
cccagcagcagtattgtggaattctatatgatggacaaccactcagaacccagtggcagtgttctggaatcccatgtaagggacaaacactcagaacccagcagcagtgttctggaatcctttgtgcaggacaaacactcagaacccagccaatgtgttctggaatcctatcagagggacaaacattcagacacttgtagaagtgttctggaatcctatgtgaggaagaaacactcagaaacaagcaacggtgccctggaattatttgtgaggaaaaaacagaacccagcagcagctgttctggaatcctatgagagggccaaacattcagaacccagcagcagtgttctggaatcccatgtgagggacaaatactcagaatccagcagcagtgttctagaatcctttgtgagggacaaaccttcagacactcgaaggagtgttctggaatcccatgtgagggacaaacactcagtaaccagcagcagtgctctgggcaaacattcagaatcttgtagcagtgttctggaatcctatgtgaaggacaaacactctgaaactagcagcagtgttctggtatcctgtgtgagggacaaatactcagaacccagcaactgtgttctggaatcccatgtgagggacaagcactcaaacctagaaacactgttctggaatcctatggacaaacacacagaacccagcagcagtgttcttgaatcctttgtgagggaaaaacattcagaccttcgaagcagtgttctggagtcctatgtgagggaaaaacactcagaacccagcaacattgttctggaatcctatgtgagggacaaacactcagaacccagcagcaatgttctggaatcctatgtgagggacaaacattcagaagttcttaggagtgttctggaatccaatgtgagggacaaacactcagaacccagctgcagtgttcttcaatcctatgtgaaggacaaacactcagaacccagcagcagtgttctggaatgctatgtgagtgtcaaacactcagaacccagcagcagtgttctggaatcctttgtgagggacaagcattcagaacctcatagcagtgttcagcaatcatatgtaagggacaactgtgaaccgagcagcagcagtgtttttgagtcccatgtgagggacaaacactccgaaatccgcagctgtgttctggaatcctacgtgagggacaaacactcggaaccctgcaacagtgttctggattcatttgtcacggacaaacattcagactgtcgtagcagtgtggtggtatcctatttgaaggacaaaccctcagaaaccagaagcagtgctctggattgccttgtgaggtacaaacaagcagaacccagcagcagatttctggaatcctttgtgaaggacaatcattcaaaccctcggagcattgttgtggaatccaatgtgagggacaaaagctcagaaacctgcagcagtgttctggaatcctatgtgagggacaagctttcagaccctcatagcactgttttggaatgctctgtgaaggacagatattcagaccctcaactcagcagcagtgttcttgaattctatgtgagggacaaaccctcagaaactagcagcagtattctggaatcccatgtgagggaccaatactcagaaccctgcagcagtgttctggaatgctatgtgagggacaaacacaaaaaacccagcagcagtgttctggcttcctatatgagggacaaacattcagaacccagcagaattgttctggaatcctatgtgagggacaaacactcacaaaccagcagcagtgttttggaatcctatgtgagggacaaacattcagactctcggagcagtgttctggaatcctatgtgaaggacaaacactcagaacccagtatcagtgctctggaatcctatgtgagagacaaggattcagacactcgtagcaaaactagcagcagtattctgcaatcctatgtgagggacaaacgctctgaacacagcagcagtgttctggaactcgttgacagagacaagctctcagatccaagcaccagttttctggaatcctatgtgagggaaaatcactctgaactcagcagcaaatcctctgtgagggacaaatattcagaaaaacgaaggagggttgtggaatcctatgtgagagacaaccattcagatcccagcagcagtgttctggaatcctttgtgatggacaaacattcagaccccagtagcagtttcctagaatcctatgtgagtcgcaaaccttcagaagccagcagcagtgttctgaaatcgtatgtgagcaacaaactttcagatattagtagcagtattctggaatcctatgtgggggacaaactttcagaacccagccagtgtgttctggaatcctatctgagggacaaacattcagacagtcgtagaagtattctggaatccaaactgagggacaaacactcagaaaccagaagcagtgctcaggaatcctttgtgaggaacaaacatacaaaactcagcagctgtgttttggaattctatgtcagcctcaaacactcagaaaacagcagtattgtgagtgacaaacactcagaacccaatagcagtgtgctggaatcctatttgagggacaaacactcagaacccaacagcagtgtgctggaatcctatgtgagggacaaacactcagaaccaagcaggagtgttctagaatcctttgtgaggcacaaacactcagaacccagcagcagtgttctggaatcctttatgagggacaaatgttcagaacctcatggcagtgttttggaatcctatgtgagtgaaaaacactcagaacccagcagcagtgttctagaatccgttgaatcctttgtgatgggcaaacattcagaccctcgtagccgtgtcctcgaatcctatgttagggaaaaacaacaagaactcagcagcagtgttgtggaatcctatgtgaggaaaaaacactcagaacacagcagcagtgtcttggaataccaacccagaagcagtgttctagaatcctttatgagagacaaagtttcagaccctcgaagcagtgttctggaatcgtatctgagtgacaagcactcagaatccagcagctgggttctggaatcctatcaatgttctggaatgctgtgtgagaaacacacactcagagacgacagcagtgttccggactactatgtgagggacagaccctcaattcccagcagtagtgatgtgaaatcctatgaatcctttgtgatggacaaacatacagaactcagcagcagtgttttcgaatcctatgttagtgacaaacactcagaaacctgcagcagtgttctgtatcctattgaggggaaacattcagacactcaaagcagtgttctgcaatcctacgtgagggacaaacacagagaatccagcagcagtgttctggaatcctttgtgagggacaaacattcagaacatcataggagtgttctggaatcatatgtgagggacaaatactgtgaagccaacggcattgttctggaatctgatgtgagggataaacactcagaacccagcagcagtgttctggaatcctatgtgagtgacaaacactcagaacccagcagcaaacccagcagcagtgttctggaatcccacgtgagggaaaaacattcagaccctcgtagcattgttctggaatccaaaatgagggacaaacactcagaacccaaaagctgtattctggaatcccatgtgagggacacagactcagatcccagcagcagtgttctggaatcctatttgagggacaacccctcggaacacagtaactgtgaactggagtcgaatctgagggacaaacattcagacattcgtagaagtgttctggaatcctataagcagtgttccagaataattgtgagggaaaaacattcaaacactcgtagcagtgttctggaatcctatgtgagggacaaacactcagaacccagcagcagtgttctggaatcctatgtgagcaacaaacattcaaaactttgtagcaatgttctgatattctatgtgagggcaaacactcagaacacagcagcagtgctctggaatcaacccagcagccgtgtgctggaatcctatgtgagggacaaactctcagaatccatcagcagtgttctggtatcctacgtgagtgacaaacactccgaacacagcagcagtgttccagtatcttttgttctggaatcctatgtgtgggacaaaccctcagaacccagtagaaattttctagaatcctttgtgtcagacaaacattcagaccgttgcagcagtgttttggtatcctatgtgagggacaaacactcagaatgcaggagcagtgttctagaatcctatgtgagtgaaaaacactcagaaccgcggagcagtgttctagagtcctatgtgagtgaaaaacactcagaaccccgcagtagggttctagaatcctatgtgagggaaaaacactcagaaccccgcagtagggttctggaatcctatgagaggaacaaatactcggaatgcagcagcagtgttctggaatcctatatgagggaaaaacactcagaacccagctactctgttctggaatcctatctgaggtacaaacattcagacacgggaaaaagtgttctggaaacctgtatgagggacaaacactcagaaaacagcagcagtgctctcgaatcatttgtgagggacaaacaaacagtacacagcagcagtagtctggaatcctatgtgagggaaaacctctcaggacccagaagtagtgttatgaaatctcttggacaaacactcacccccagcagcagtgttctggaatcctatgtgagggacaaacactcagaacccagcagcagtgttctagaatcctttttgaaggacaaacattcagaacctcgtagcagtgttctggaatcttatgtgagggacaaacactctgaacccaacagcagtgttttcaaatcccatgacaaacacacggaaccctgcagcagtgttctggaatcctatgtgagggacaagcgttcagaacctcatagcactgcactggaattctatgtgagggacaaaaattcagaccctcctagcagtgttctggaatcctatgtgaggtacaaatcctcagaatggagcagcagtgttctggaattcgatgtgaaggataagcctcagaacctagcggcggagttctggaatacaaactgtgttctggaattctatatgagggacaaaccctcagaacccagcagcattgttctagaattctatatgagggacaaacactcagaacccagcagcagtgttctggaatcctatctgagggacaaacactcagaatgcagcagcagtgttctgaaatcctatgtgagaaaaaacactgagaacccagtagaagttttctggaatcctatgggagagctcagctttcagacactcataggagtgacagaatcctatgtgagggacaatgattcagaccctcattgcagtattctggaatcctatctgagggacaaacattcagaccttcgtagcagttttgtggaatcctatgtgagggacaaacactcagaatgcagcagcaatcttctggaatcctatgtgagggacaaacactcagaacacagcagcagtgttccagaatactttgtgagggacaaacattcagacaatcttaacagtgttctgaaatcctatgtgagggacaaacagtcagaacccagcagcagtgttttggaatcctatagcagtgctctggaatcctatgagacggacaaacactcagaaccctgcagtagtgttctgcattccaatgtgagggacaagcattcagaccctcatagcactgttctagaattctctgtgagggacaaacattcagaccctcgtcgcattgttctggaatactatgtgaggtacaaaccctcagaaatcagcagcagtattctgttattccttaacccagcagcaatttttctggaatcctatgtcagcgacaaacactcagaacaaagcagcagtgttctggaatcctttgtgaggaagaaacattcagaacctcataggattgttctggaatcatatatgagggacaaatactgtgaagccaatgacattgttctggaatctgatgtgagggacaaacactcagaacccagcagcagtgttctggaatcctatgtgagtgacaaacactcaaaaaccagcagcagtgttctggaatcatttgtgagggacaaacattcagaccctagaagctgtgttctggaatccaatgtgagggacaaacactcttatcacaacaggagtgttctgcaattctttctgacagacaaacattcacatcctcttagcatttctcgggaatcctatgtgaaacccagcagcagtgttctggaatcctatgtgagggacaaacattcaggaaacagtagtagtgctctagaatcctttgtgagggacaaacactcagaatgcagcagcagtgttctagaatcctttgttaggtacaaacattcagaaacttgtagaagagttctggaatgcgatgtgagggacaaacactcagaatccagccactgtgtactggaatcctattgacggcaaacattcagaacctcgtagaagtgttctggaattctatgtgagagacaaacactaagaaatctgcagcactgttctataatcctttctgagggacaaacaacagaatccggtagcagtgttctacattctctatgagggaaaaacattcagaacctcgtagcattattctttaatcccatatgagggacaaacactcagaacccagtagcagtgtt

SEQ ID NO: 474385 - DNA, 1017 bp, Homo sapiens
gtgtttgtccctcactgaggattccagaatactgctactgcttctgagtaacaattctacgagtgtatgaatgtttgtcccttagataggaatacagaacacagtggctggtttctgagtgtttgtccctctcaaaggattccagaactctgctgctgggttctgagagtttgtgcctcacataggattccacaacactgctgctggattcggagtgtttgtcccttacatagaattccagaacactgctggtgggtactgagtgtttgtccctcacataggattccagaacactgctgctgggttctgagtgtttgtcccacacaaaggattccaggatactgctactgtgttatgagtgcttgtccctcaaatagggttgcagagcactgttacgaaggtctgaatgtttgtccatcagcaaaaattacagaacactgctgctgggttctgagtgtttgtccctcacataggattccagaacactgcttcgagtgtctgaatgtttgttcctcacaaaggattctagacaactcctgctggtttctgagtgtttgccactcacataggattccgaagcactcctgctggatactgtttgtttttccttcacaacggaatccagaaaaatattgctgctttcggagtgtttgtccctcagattggattccagaacacttctttgtgtgtctgaatgtttctccctcagataggactccagaacacagaggctgggttctgattatttgtcccccacgtaggattccataacactgctaagaaattctgaacgtttattgctctcataggataccagaacaattctgctgggttctgagtgtttgtccctcacatatgattccagaacacttctatgagtgtctgaatatttgtccttcaaataggattccagaagacagtgcctaggttttgagtgtctgtccctcacataggattctagaacactgctgctgggttctgagtgtttattcctcacataggattccagaacactgc

SEQ ID NO: 474386 - DNA, 5334 bp, Homo sapiens
cccagcagcagggtcctggaatcctttgtgatgcgcaaacattcaaacccttgtagcagtgcactggaatcctatgtgagggacaaccactcagaacccaggagaagtgttctggaatcctctgtgagggagaaacactcagaacagagcagcagtgttctggaaccttatgaaaaacattcagacccttgtagcagtgttctggaatcctatttaagggacagacactcagaacccagcagcagtgttctggaatcctatgtgagggacaaacactcagaacctggcagcagtgctttggaatcctgtgcgatcgccaaagatccagaacttcatagaagtgttctggaatcctatgtgagggacaaacactcagaaaccagcagcagtgctctggaatcctatttgagggacaaacatacagaagccagcagcagtgttttggaatcctatgtgagggacaaacattcagaaactcctagctgtgttctggaatcatctgtgagtggcaaacactcagaacccagcagcagttttctggattcctatatgagtgacaaacactcagaagtcagcatcaaacccagcagcagtgttctggaatcctttgtgatggacaaacattcagaccctcgtagcaatgttctggaatcctatgtgagagacaaacactcaaaactaagcagcagtgttctggaatactatgagaggagcaaacactcagaatgcggcagcagtgttcgggaatcccatgtgagggacaaacacgcagaacccggcagctgtgttctggatttgtatgtgacggaaaaacactcagaacccagccactgtgttctggaatcctatctgagtgacaaatattcagacacccatagaagtgttctggaatcctatgtgagggacaaacacccagaaagcagcagtggtgctctggaatcctttgtgagggaaaaccattcagacgaacgtagcagtgttctggacaaacaaacagaatccagcagcagtaatctggaatcttttgtgacggaaaaacattctgaccctcgtagcagtgttctggaatcctgtgtgtggaataaacactctgaacccagcagcagtgttctggaatcctatgtgagagacaaacactcagaactcagcagcagtgttctagaatcctgtgtgagcgacaaagatgcagaacttcgtagcagtgttctggagtcccatgtgagggacaaacaatcagaacccagcatcagtgttctggaatcctatgtgagggacaaacactcagaaaccaccagcagtgtttttgaatcctatgtgagagaaaaactctcagaacccagcagcagcgttctggaatccttggtgagggaaaaacattcagaacctcgtagcagtgttctggaatccaacagtgctctggaatcctttgtgatggacaaacattcagaccctcgtgccagttttctggaatcctatgtgacggaccaacactcagaacccagcagcagtgttctggaatccaatgtgagggacaaacactcagaacccagcagcagtgttctggaatcttatgtgagggaaaaacactcagaacccagcagcaaacccagtagcggtgttctggaatcatttgtgacagacaaacattcagaccgtcgtagcagtgttctggtatcttacgtgagggacatatactcagaacacagcagcagtgttctggaatcctatgtgagggacaaatacacagaacccagcagcagtcttgtggaatcctatgtgaggaacaaacactcagaaaaacgcagtagtgttctgcaatcctatgagagcgacaaacactcagaaaccagccactgtgttctggaatcctttctgagggacaaacattcagacactcatagaagtgttctggaatcctatgtgagggacaaactctcagaaaccaggagcagttctctggaatcctttgtgagttacaaacaaacagaacccagtagcagtgttctggaagcctttctgacagaaaaacatacagatccttgtagcactgttctggaatcctatgtgagggacaaaccctcagaacccagcagccgtgttctggaatcctttttgcgggacaaacattcagaatctcgtatctgtgttctggattcctatgtgagggtgaaacactctgaacccagcagacgtgttcaggaatcccatgtgatggacagacattcagatcctggtaacagtgttatggaatccttatgtgagggacaaacactcagaacccaacagcagtgttctggaatcctatgtgagggacaaacattgagaacccagcaacagtgttctggaatcctattcagggacaaacactcagtacccggcagcagtgatatggaatcgtatgtgaagtacaaagacacagaacccagcagcagtgttctggaatcctatctgggcgacaaacattcagaacttcctagcagtgtcctggaatcctttgtgaggaaaaaacattcagagcctcataacagtgttctggaatcctatgtgaggcacaaacacacagaacccagcagcagtgttctggaatcctatgtgagggacaaacactcagaacccagtagcagtgttctggaatactatgtgagggataaacattcagacactcaccctcatagcagtgctctggaatcctatgtgagggacaaacacacagaagccagcagtggtgttctggaatcctatgtaagggacaaacatgcagaacccagcagctatgttgtggaaacctatgtgagggacaaacacccaaaacccagcagcagatttctggaatctgtgaaggacaaacattcagaccgtcgtagcagggttctggaatcctatgtgagggacaaacattcagaacccagcagcagtgtgctggaatcctatgtgagggacaaaccttcataccctcactgcagtgttctggaatcgtatgtggggaacaaacactcagaacgcagcagtagtattctggaatcctttttgagggacaaatattcagaccctcgtagcaatgttctggaatcctatgtgagggtcaaacactcagaaaccagaagcagtgttctggaaacctttgtgagggacaaatattcagtccctcatagcagtgttctagaatcctatgcaagtgacaaatattcatatcctcgtagcagtgacaaagactcagaaccgaactgccgtgttccggaatcctataggagagtcaaacactcagaacccagcagcagtgctcaggaatcccatgtgacagacagatattcagaccctcaaaacaacagcagtgctctggaatcctgtgtgagggacaaacattcagagcatcgtagcaatattctggactcctatgtgagggacgaccacacagaacccagcagcagtgttgtggaatcctatgtgagggccaaacactcagaacccagaagaagtgttcaagaatcctatataaggcacaaacactcagaaaacagtagccatgttctggaatcctatgtgagagacaaacactcagaacccagcagcaaggttccagaaacctttggagaaatactcaaacccagcagcagtgttctggaatcctatgtgagggacaaacactcagaacccagcagtagtattctggaatcctttgtgagggccagacattcagaatctcgtagctgtgttctggattcctatgtgagggacaaacactcagaacccagcagcagtgttctagaatcctacttgaaaaccagcagcagtgctctggaaacgtttgtgaggtacaaatataaagaccctcatagtactgttctggaatcctatgtgacggacaaacactcagaaccctacagcaatgttatggaatcctatgtgaggggcaaacactcagaagccagcagcagtgttctggaatcctttgtgacggacaaactttcagatccttttagcagtgttccggaatcctatgtgaggggcaaacactcagaaaccagcagcagtgttctggattcctttggacattcagaccctcgtaacagtgttctggaaccttatgtgaaggacaaacattcagaaacacacagcagtgctctggaatcctttgtgaaggacaaaccctccgagtccagctgcaatgttccagaatttttggacagacattcagaccattgtagcagtgttctggaattctatgtgagggatagacactcagaaaccagcagcactgatctggaattcttcgtgagggacaatcattcacaccagtttagcagtgttcctgaatcgtacataaaggagaaacattcagaccctcgtagcaatgttctggagtcttatgtgagggacaaactttcaaaccttcgtagcagtgtcccggaatcctatgtgagggacaaacactcagaacccagcagcagtgttctggaatactatgtgacggacaaacaatcagaacccagaaacagtgttctggaatgctatgtaagggacaaacattcagaccctcgaagcagtgtactagaatcatatttgagggacaaacactcagaacccagcagcagtgttctgcaatctattgtgaggcacaaatattcagaccctcatagcagtgtcctagaatcctatctgagggaaaaacattcagaccctcatagcagtgttctggaatcctatgtgagggtcaaacacacagatcccagcagcagtgttgtggaaaccttcgtgagagacaaacattcagacactgtttgcagtgttcaggaattctaagtgaaggacaaacgttcagatcctcgtagcagtattctgggatcttatgtgagggacaaaccctcagaacacagcagcagtgggctggaatcctatatgaggaaccaacacaaagaacgcagcagcagtgttctggaatcctatgtgagggacagacactcagaaactttcagaggtgttctggaatcctaagtgagggacagacattcagactctcaaagcagtgctctggaatcctatgggagagacaaacactcagaccctcatagcagtgttctggaatcctatgggagagacaaacactcagaccctcatagcagtgttctggaatcctatgtgagggtcaaacactcagatcccagcagcagtgttgtggaaaccttcgtgagggacaaacattcagacactgtttgcagtgttcaggaatcctaagtgaaggacaaacattcagatcctcgtagcagtattctgggatcttatgtgagggacaaaccctcagaacacagcagcagtgggctggaatcttatatgagg

SEQ ID NO: 474387 - DNA, 2890 bp, Homo sapiens
cagcaggcacctggctccagacctggtcacctgtctggagcaaaggaaaaagccatggagtatgaagcacccaggttctcacacctaagacaacatcagataattcatactgaagagaaaccctaccaatgtgaagaatgtggcaaagattttaagcagtcttcagatcttactatacatgagagaattcatactaaagagagaccctacaagtgtgaagaatgtgacaaagcctttaaacaatcttcaaaactgaataaacataagaaaatttatactggagacacaacctacaaatgtgaagaatgtggcaaagccttttcctattcctcaacccttactcaacataacatagttcatactgaagacaaaccctacaaatgtgaagaatgccttactcaacataacatagttcatactggagacaacccctacaaatgtaaagattgtggcaaaatttttaagtggtcttcagaccttactatacatcagataattcatagtggagagaaaccctacaaatgtgaagaatgtggcaaagcctttaaacaatcctcaaaactgaatgaacatatgagagctcatactggagagaaatcctacaaatgcaaagaatgtggcaaagcttttaaacaaccttcaggccttactctacataagagaattcatactggagagaatccttacaaattcgaagaatgtgtggtcttcaaaccttactatacacaagataattcatacaagagaattcatacgggagagaaaccctacaaatgtgaagaatgtggcaaagcttgtaagcagtctttggggcttactatacaaaagagaattcatactgaagagaaaccctacaaatgtgaagaatgtggtaaagccttttactgttcctcaaaccttattcaaaatgacatagttcatactgaagagaaacactacaaatgtcaagaatgtggcaaagcttttaagaagtctttagaccttaatgtacataagataattcatagtggagagaaaccctacagatatcaagaatatggcaaagtctttaaactatcctcaaaactgaatgaacataagataactcatagtggagaggtatcctacgaatgtgaagaatgtggcaaaggcttttactgctcctcaagccttactaagcatacgatagttcatactgaaaagaaactgtacaaatgtgaagaatgtggcaaagcttttaagtggtcctctgagcttcctatacatcggagaattcatactgaagagaaaccctataaatgtgaagaatatgtcagagtctttaaacactcctcaaaactgaatgaacataacagaaatcatactggagagaaaccctacaaatatgaagcatgtggcaaagctttttaagcagtcttcaggccttactatacataagagaattcatactggagaggaatccagaaatgtgaagaatgttgcaaagccttttactggtccttaagctttactaaacataagagagttcatactggagagataccctacaaatgtcaagaatgtggcaaaactttttcttgttcctcaagtttactcgacataagacagttcatactgaagagaaatcccacaaatgtaaagaatgtgggaaagcctttaaccagtccttatgccttattaaacttatgagaattcatactggaaaaaaatcattcaaatcataagactgtggcaaaatcttttaagtattgctcaaatatatccatccaaaatacagcttacaaaacaccacacagtttataataaaagatatttttgcagagggaacacatgtgtaaaaatatttagtcaaaattaagtctttgtaaactttagaaaattcacagtaggtagaactaaggcactggcacttaagacgttacactaaatcagaatgttctgtatagaaagtaatccaaagctaaaactgttggataatttatttgtatataagtttaagaggagtggaagattattttttggagttataattacattcaagaaatctgagaaattcccttcttattaggtaggcatcattcattaacttttccatggaagagtaaggatattaaaatgtaagatgcatattgaaaatctaattggagaggctctttatgtctgacttttaacattgttcatgtgatacatgagttatgtgtttagagtgatattctgcattataattttcatcctactttacactgatgtaaatttaactgcccaaggcttaccagaagctttattttacattatttctaccaaaaattcatattctcaaatattaaaagtggtattctgtattaccatttttcaagtaatgtagtctgcatttattagtacctttcaatgtattttttttttacatggggtaaggttattaaaatgtcttgcagttgattttctagaatactaattttccccagacaaaatatgcagagctatgtttcattaatatgcagagctatgttttattaccaaaacacactactgccaaatgcacaaaaggaaaaaagatatttgtaccctgtgctaaaacagattcatttgcggtatttaaatgacaaaactggaattatttcaacccggaaatcattgtttcaaatttccatggttaaaggtttgctcaagcaaatcttaaaacacagaactttcttggttcttcttgtccttttaaattttcaaaaaaattttaaattagcttgtcaatttttaaattacctgataggattttgagtaggattgcattcaaccataatttaatgagtagaaatgacttttttacaatataaaatctttctattcataaacattgtgtgtcttttttatgtatacaatatttatatctgttttaaaaattgtactttaagtt

SEQ ID NO: 474388 - DNA, 926 bp, Homo sapiens
atacacctaatggtaaatgatgagttaatgggtgcagcacaccaaagtctacttagtgtgctatcgtagtgtggctgagctggcactcagagtacaagatgcaatcctttccactctttcctcttctttctaaagaaagagaagcctcaccccatgaccactggcaccataggacaatggggacaactgccaggctactgctgatgttccctgaagtccctggggctcttcagtcagcttgtaaaagactgggaactggatctgatctatccttctttcaggttagagagccatcttctagtgatggtttagacagtgttccacaaatctctctgccccaagcttttctgctgatggttcactttgaaatgttagttgtgtcagcaattgatagaggtggtttttcttcctgtattcctcctgttaaccaaaatggattagaagacttcctgagtctggccacaaataacctgttgtttgaatgtgttttcaaagcgtcctaactgtgctttcttaatctatttgtaaccacagctttctttttgaaaataattatttccctgattgtcttcttaatatttttagggtttattttcttatttcttcccaccaatcccagatttcagtgtgttgtcatctatgacataaaatagcaaaataataataacaatagtatttatcaaatagttattatatactatgcactatgctaggtgaattacatgcatttttcatttaattttcttgtcagttctatacagtagacactattattacttcccatcttatgtatgagggaagcacaagcatgtatctaaaaagcgatagagcccatattctctatcactgtgctgtgtcaacactttatattacaaagtaccccgatccacagatttattttactgtccataatattcatatcatga

SEQ ID NO: 474389 - DNA, 824 bp, Homo sapiens
ctactgacagcttgtaccatgcacctggaaaagctgccaacactcaatgccagctgtgaaagcagctgggatgggggctgtattctgcaaagccacaggggtggagatgcccaaggctgccttcacattcactcatgactcattgactcatctggagcgacttccagttctgcaagcttcattcatgctgatgttggaaacctggctggcagaatttgggactatgatggaggttctaaatattgaaaactggagccatgaagaagcaccagtctttaccaaacatgttactcagtgtagggaggacatggatgaagctggaaaccatcattctcagcaaactatcacaagaacaaaaaaccaaacaccacatgttctcactcataggtgggaactgaacaatgagaacacttggacacaggaaggggaacatcacacactggggcctgttgtggagggggagtagcgggcagggaaagcattaggagatatacctaatgtaaatgacaagttaatgggtgcagcacatcaacatggcacatgtgtacctatgtaacaaacctgcacattgtgcacatgtaccctagaacttaaagtataatttaaaaaaaaggtgtaagacacaatactcatatagaagatttacgtttgcattgaaattcatgagcttaaaggaagaagaaacattgatagcatttggaagtctttttacagtactttatattttgatagttttacgtataaattccatggataatacagaccttgtaattttatattattttataatatagacctcgtgctactatattatattataaaga

SEQ ID NO: 474390 - DNA, 875 bp, Homo sapiens
gcctattctgaatgcgtacttttcttataatacataactagccatggctgaaaggggccaatgtacagctcgggccgtggtgcagcttgcacctccacagggtgcaagccacaagccttggcagcttgcatgtggtgttaagcctgcatgtccacggaagtcaagaatcgagaagggaaatatggggtcggaatccccacatggagtccctacctgggcactgcctagtggaactgtgagaggagagcccccaacatcctccagaccccagaatggtggatcctccaacagcttgcaccgtttgcctggaaaagccacagacattcaatggcagcccacgaaagccgccaggaggaaggctatactctgcaaagccacagcagtggagctgcccaaggccatggggacccacctcttgcatcagtgtgacctggatttgagacatggagtaacacctgatgtcatagagactaccttagcaattgatagaaactgtattatttaacgtattaatacatcaatgtacaatttggggaaaataatcattgcaggtcacattacctttaaaacagaatgctcatcagggaagggcagtagtttgacatcttttcacactgtgttctgctgagtagttagcaacacgagtcatttcagcaaccttagggcatttttccttttggatttcagaagaccaatgttttcattgaggtaatgaacacttactacgcattcagaaaactcttaacattttattatctgatctgcccattatgaagctattctttcattctttaatatatttgatgattactctcctaaaaaatgaaggaaaattgtttctaccatttaaggcattagtcgtgtaattaaaatta

SEQ ID NO: 474391 - DNA, 1272 bp, Homo sapiens
tccctgacttaactccctgactttttcctttagtgtttattagtgcaacagaatgagtcttcattacattgactctgaggagaatccccactgggcactgcctagtggagctgcaagaagagggccaccattctctcgtccctggaatgctggttctaccgacagcttgcactgtgcacttggaaaagctgcagacactcaatgtccacccatgaaagcagctgggaggagggctatacctgcaaagacacaggggcagaggtatcaaaggcccataagaacccacctattgcatcagtgtgacctggatatgagacatggagtcaaaggagattattttgaagacaaaacatgtgaagtaaatgttcttcaagacactgacatcaggctacaaaagacagaagttgaacaagccatgcaggaacaatggcgagcctctagcctgatccagagcggcaatgggcaactcactggatcagaagtgcagcagacaccctgccggatctggaagggtggaagtcagtggcaggtctgctacggcagcgatcggcagtggttgacggcgagcaaaagctcacctggaagtggaacaaacacggaccagaagagtgcgcagttgcaagatttaatagagtgaaaacagagctcctatacaatgggaggggacccgaagtgggttgccactgccagctcgaatgcctgggtttatatccggataattgtccctccctctgtgctctcaggtgatagatgattgactatttctttacctcctgcttttagcctaatttatattttatctggggacaagtttttaaaattctgtgacaacagggaagagtgattgttataacattccccaactaaagagaaaaatgactaaataggtggagaaaaaggaaagtggtagcgcatagagtggtagcaacaaatagtggtatttgttggtattctgtcattgttattgtagacaaagaaagcagtgtgaagctggaaataatttctcattacaaataagataactacttcagaaatatattgttaatagttcaaagtagtcaagagagcaatattgttattgagctcaatatgtctaattataattgagttttatgatatttaacagtgatctttgataatattttaggctatgatatagagatggattttttccctcgtaagtcaaaaattagaatacattaattgtagaaaatgctttgaacaaataaatatgtgagttttctgttttcccagaaaaaggagagctttatc

SEQ ID NO: 474392 - DNA, 771 bp, Homo sapiens
ttcaacctgcaaatggagaatttcccaaatggagaatttcccaaatggagagaagcagatcctactgtctggtacccacaagtgacattcaccagaccagatgcagatgacaaattccaaaggctgttcttgctaggcaatcaggaacttggttggggatgggagtggcaggataagaaagagatcaaaatccacctccagccaaaaaagggtcaggtagctgctcaagagggcttctcaatctcctgtcccatggcagccaagctacaagcaacatgttcccagtcaaggaaccaaaatctgttaccaaaacaccagctctttgagctctctgtttccacatttcacctcttctgccctgggtcttgctctgtcacgcagggtgaaatgcagtggaaccatcatgactcactacagcttcagcctcccagactcaagtgatcctcccacctcagcttgttgagtagatgggactacagatgcacatcaccatgcccagctaactttttattttttgcagaagcaggatctcaccatattttccaggctggtatctaacttctgggctcaagtgatctacctaacttggcctcccaaagtgctggattataggcatgaaccaccatgacctgatgaaagaaatttttttaaaccaaactgttttacccaaaattttaatccagagctttcattagatgacatatcagagaaaataaagttgagccatataaacatgtctcttttagccagaaatataatttagattcaata

SEQ ID NO: 474393 - DNA, 1195 bp, Homo sapiens
agcagccaggcgttagcgtcaaccacagctgtccaggacagcctggacgcataggcgactctcctctgccacctagcgctgaaaagaaagtgttcagggatgaacaatagctccatgaagttagaatataaggagattactggagaggaaggacagcgagtgaccaaagggcactacttgtatcaaagagtaaaagacacatggaattcaattgcttctgggcatggtgttgaagaccaagcagggcaaagagggcatccgagtgagtgtgggaaggcatggggactcacagcccaagcagaatggggagggcatccttacagagagtcagcttggtgtcagagcccatataaaagaggagatggctctatgggaagcaagagcctaggtggggagttctcaaagtgtggtccttggaccagcattacctggaaattgtcagaaatgcaaattctagattcccattccagacctactgaatcaagaacttggacttgggctgagtaagctgtgtttttataagctctccaggtgattctgatgcacactcaagttgagaacctgctttataataactttttaatagctatgtaacattgcaaaagttatctaaatatgtatgtttttaatcatagttaaaatcatagttatctaaatatgtatgttttttacattacattttgacattacattccctttttatgttacatacaatgttggcaataaaattgttcatatatatggggctttcttccacttttcaattattctttagagtagaatgattagggcaaagattatgaccatttctacgtcaccttttctgtcaaatttctttctaaacacacatgtttatatgcctctcccaaaatataggcaaagaagttttcctataacccaaccatcttgaggtagtatccttttaacatgaataatttaactgataatctcataactttaaagtgataccttgattcggttagcatatttattactaataaatgagaatactttttctcgtttgtctggaatttatattctcactgtgtgaattataattttgccttttgtccatttattagtcattttgtagttcttaaaaatgaagcactttacatatatatatgtattgacacactacttattttcttcttactctttttgtaacatatttatgtgaatttgagacaatatc

SEQ ID NO: 474394 - DNA, 792 bp, Homo sapiens
ggtgtttaatcaatgtgcaataatgttagctcttcctgtggagtatctgttgtccaccactgtaaaatcttctggggcctacctctcaacccaaccaccacttggtgacgatcctactgaaggcttcagtaggctttacccagtgaaggcgattttctctagtggtattcaaagggacgtgggccctaagcccaataacactgtggtttttgcagacttgagagagcccaaggaccattgcgtattccctggatatcactggtggttattcagggcccaagggctctttagtcagtcgatgatgaatcctgctgggactgggtccttccctcaaggcagcagccacctgaaactgagcaatggtgatacaagcacttctgtggccatcaccactgggtgcactgtgtcagacctgaatccagcacaggactgggccttgcccaagatccttcccttcaggtcaggaccctcagctgcaggtctgttggagtttgctggaggtccactccagaccctgttcgcctgggtatcagcagctgaggctgcagaacagcagatattggtgaacagcaaatgttgctgcctgatcgttcctctggaagttttgtctcagaggagtacccggcctgttctcattgcttttgtggataagcagattttcagaggcccttgctcttcactgatctggaagttcttcgcatagttatttttacacagaggactgaagtaactatgtttgattatagtatgttatgcaggtgcccctaatttggtctcagtccagttggccca

SEQ ID NO: 474395 - DNA, 1321 bp, Homo sapiens
gccgtcttgatatatcctcacatgacaaagagaaagagagaggaaggagagggaatatctctggtgtctcttcttgcaaacccaataaaaagcttcttgaaagtgaacagcaaatcttacaaatgcacaagatttcctaaagtcgatgaaaagatgttagagaattacgcagagttacgtagaaacagggttctagcagaagagcagcttacaactgaagaacagaaaatccagaaggatgatgttataatggcttcaaaagataattatttgactatccaaggattgacagagaccttgagaaaagcaataaggccctcaaatagtttttcacaattgcttgcacattttatgaaacaaattgctatgtgggagacaaccacatgccaaggaactgagggtggctgtgggccaatagccaacaaggaactgagggcctcaatgaactggatcctaccaactgtcatgtgaggagatgctagaatatcctctgattgtgtgtgtgtgtctatgtgtgtgtgtgagtgtgtgagacagaaagagagagagccagagagagagagagacagacagagagagagagagagagagagagagaaatatgtattagcctgcaggtcgggctgctgtccatggacttggggaataagggaatgcactagttctatggggctttgcacaaatacgctgccagtggactgtgaaatctgtttttccttagaatcagcagttcagaagttggaatatctacttaatgtgttttttaaagcaatactgttttggattataaaattgatgaacgcattgcaaagaatttaaaaactaaagaaaatataaataagaaaataaaaattacccttaatttcaccgggtattttgtcttacctatacgtattttagattttcttcctctctccttccctctcccttcccctccctccttttctccctccctctcttccttcattcatttcttctttttttccgatacatttgagacctatttagcattatatcctgaacattatctcataacattaatttttttcaacaataacattttaaagaactatataatattccagaaatttactccaggaaatttattcaatcccccatatgagttgttttctattttttggtgttatcactctataattaactaatgcacagttctacagtggacagatttggtagttttgcctttcttttaactagatttatagaagtagaattattggctaaaaatataaaattttacattattgtttacaggtatggccaaattaattctgtgggactgatatagatccacagtcct

SEQ ID NO: 474396 - DNA, 767 bp, Homo sapiens
ctcactgtgagggtccgcagcttcattcttgaagtcaccccatgtatgcattccaagtcttgtggagagctgcatggaaaagctgcagctgtttgcaaggggggctctgggagatgtgggcacataaggcgctgcttaggatcatcaggcagtgttacatgtgaacatagcaaaacggccattctgttgctctgtgctcacagttgtgcggaaggcctccgttgctctcacacaagtgaacaggagtgctttgtctcctggaagccgaccctgatcctgtgtgtgaagcatagactttcagcttttgcatgctctccccatggcccggactgccacacaccaggctgccttgaggaatttggaaccaaacatgaaaagtctttctcaacaatagagggaacattgctttgccctttcacacatcagtctttcctggtgaatggcttcccggccttctgattcttgccgtatggaacaattggcctgttcagttaacttgccagcagtaatcagttattttctcctcgccatatatttcaaccattctttttggaggagaaagaaattaaagaaacaaagggaagtggctataaagaacagaactgtcagaatagcaagtgtttgagtaatttgttgggtccttggtttagggttgattgattttagcactaattttggtttggagtatttcttgggacaaagaaaccctattttaaactgcatctccattgaagattgtgattaccagaggggaaatgctgtgtaac

SEQ ID NO: 474397 - DNA, 868 bp, Homo sapiens
ttctcactgattctacattacgtaatttggattatgttctgagcattttgagtgttataaaactctgcgtcttttttaaatttgatgaaagttgttaaaatttttgctggagcaggcaatcaaactgttaggttaagaccacaaattccaacctctacctgtgggaactgttgcaaatgtagtttccatttcttttcttttcctcctcctccccctccttcttcctcctcctccctcctcctcctcctttttctttcttcttcctcttccctcacctcttctttttcttcttctccttctttctcccttcctcctcctcttttcttcttcttcttcttcttcttcctcttcttctccttcccccctcctctttttcttcttctctttctttctcccttcctcctcctcctcttcttcttcctcttcttctccttctttccctcctcctccctctcctcctcttccccctccttctccttcttctacttcttttcctccttaacatttatcagtttattataaggaatattgcaaaggatagataaagatgaagagatacatagggcaagatatgggaggaggggcgcagagcttccatccaccctgtgggaaccttcacatgttcagctatctggaagctcctcatttccatttttaaagcctttgcagtgcaattctgatgtgtcccatatgtgtccctcagtggctcaagcatgcttgtgaaggggagttggagatttggaattgttttggtgacctccaggaataaaactaggaaattcaagggagctggtttgtgaaggcttctaattagaagtgccctcaaatgccttcatatgtagtgatgtccctatcaacagaggcattc

SEQ ID NO: 474398 - DNA, 987 bp, Homo sapiens
gatctcctgacctgagggttgcaatgatctgtgggaaagtgtggggtcctggggttgcacattcactcaccatttctctgggcgggggaggttcccacggttccatgtcactcccaggagtgctgtggaatataaaagtaggaatagcagtgggaagacccttgcaatcactcccagatcacagtgcagaacaagggcagtcatttcttactgctcctcacagaggatccagcagaggacagccaaaaagttcaggcagcatttggaagttgaaagaagctctcagtgaggtttcacattataacctcaggtggggacaaattccctttttcagagctagggcaggggagagtgaaaagagggccatgagtgcaggagttgcaagcgcaggagccgtgggagaaagatccacaggtacaggatctgcaggtgaaagatcctggtacctggctttacagcagcagggagaggtgtgtcctgaaagacacgattacaattttcatgggcaaagcttatgactccaggcagtgggctcaagtgttcatcatgtgtgggggccgtatttgccaactataatgtgaagagatttcacatgtaatttcaattaattctaacaacaattatgaacttatgtctattatcatttgaattttatagatgagaaagctaaggcattgaagcccatacagctaataaaggacagcgctgggatgccagctttcagaagctttgcggaggttgaacacagatcagaggatatgagatacttgtgtttctagatctcattgagtgtctttaaaatatatattttgaattctttttcaatcatttcaaagttttcattttgtttaggatccatcgttaaagagctaatgtggtccgtcggtggtatcacaacattctttcttcgtaatgctggagttcttgtgcttgttcttcctcatctgtagaagctgtcacttcttatttttgaatttcctttcattt

SEQ ID NO: 474399 - DNA, 579 bp, Homo sapiens
gtggccacctcaccagtgtcatggctaggaacgtgggctttcgtcaagaccgcctgggcataccccactcccgcctgggtggggtcctggaggcccttctatccacccaggaccttggctccgtccaatcttcctcttcctggagcagacgagaagactttaggagccatggaggaggggagagggtgaaagaaaatggccctcggaaaggcacagccacaaaaccagcgcacctttcttttgccatcattggtggcctcacgactctgctgcagccttgtttcttcttccacgtcaagctttgtttcaagtgcctttctctccgcatccgctgtcgccggcgtttcaaccgtcctctctgggaagactttatttcccccttttttccttttctcttcatcttctccaatcttaccctcttcattgtcatctccgtccgacccactgacatcacagcctgatatttcttccccttctgtgagcttctttttcaggtcttctatttctttctgaaattgatgaagcaaagcatccttcagatcttcattaaatctagctttatttttaatactttttttt

SEQ ID NO: 474400 - DNA, 1053 bp, Homo sapiens
gccagtgccacaacagcagagagagaaaggaatagcctatgccaaggcagttattagagtgtcctgaaagttgtgagtgcttgctggcaaggagcagaaataaagcactgctgatgagggaagggaggatggccttcacccacatccgtggatcctgctcagagctccaaatctgcacatgcaccaaccagattcggaagctgtggaaattagtggatcctctgggaacaatgcttctttataatgatgctaagaccttaaaaaacaaacaaaaaaacaatcttcatgaattataccaaagaagtgttgagtggaccagatggctcagttataaagaggattgttgctccttgcatcatcctttgaatgtgcaggtgggaaaagttcagggactcttctcggggagctcatttaataagtttcctcaagtggagattatcaagggccccctcaggtctcaggctgtaacctaaacattagtgattaactgtgcaaagtttgctactgctaaaaggtgatgattttcttcatgctattggctaaacagactttggcataaatgtctccaaatgctagagttctaggtacttaccgtgatgcaggaaagggtctggaaacctgagggtccttattggagccaccagtctgtgctgggagatcttaggtgttatttggaaagcatacttttagtgcctactttgtacctaagcttgtgctaaatgttgaggaggagtccagagaaagagtaaagtggagaatttaaactttaaaataattattataagtaatccatcctgcaaaacaatctgtcctctgagttcttggaggacaatcttgatttacttttcttcccttcaatgaaggtgaattgtaaaatttctgcatattactgtgagaatccataaataagaataattaagagtttggactctggagttaaattatccctgaattttatactgtttactaactatataactttgggcaaattaactactctcttaatcctcagtttcttgattagtaaaatgagaatgataatagtcctagatc

SEQ ID NO: 474401 - DNA, 590 bp, Homo sapiens
tgctagcagactgattctctctctctctctctcttccccacctcctttctccaaggaaatggtatttagaccagaagaggccctttggaattataatgaggttatgggttttgaggaggaagaccacagtgagggtgtatccggcagagcaacttccaatagtgtcgatggtgtcagaatgagcaggcccataaatcagccagggaggctgcaccctcactgtaaaagtgaaggggactttcagccgcattttcttcttgctgttgaaagtaaacagggcataaatcttgctgaagaagaaggtttctatccagccacctgcaaacaccccagcagtttggaggacagtcggcttacaccttcttccactcaaaacacagcacccagctcaggaccaggcacactgtgttcaagtattgctggtagtgggcccccgggggccccacacctccagtggctttttgtcaaagaagttagtctgcgatacattgaaattagatagcttttactacagttacaatgtcctggccacatgcagcaggcactgtcctaaaatttactatccttagtgaatatatattttatatgtg

SEQ ID NO: 474402 - DNA, 673 bp, Homo sapiens
tctggcaccaccatttaccatctgtgtggccttaagtcccctcacctctctgggccttagtttccccgatgatcacaatagccttgctgtcctccctgggctgtgggaaggacatgggaggaaacctgtggaaggactattcaatggtacagggctgtgcaaataagaccatttgtttgttgattgattttgaaaactctgcctcctgctcctggcgccctggacataggtacccttgctcctcactgctgcatctgaatggaacttcaaacatgcagtggcctcacacatacaagtttcaaggtggtcaccagagaatcagaccagagaccaaatggtgtgcaaagaggaaggacagaatccatcaagccccaggcccccagcttgagggcattaagggcaaggagaagggccagcaccattcagacctccagggtcccctccagaaggtcctcccagggaactctggtctataggttttattgttttatgttttacgtataagttaattaatgatccatttttagtctttgtgtcttttgtgagctatgtttttgtagttttcagtatacaagtcgtacttcttttgttaaatttattcccaggtatttatcatttttgatgctattttgaatgtcagttttaaaatttcactttcagattgttcatttct

SEQ ID NO: 474403 - DNA, 544 bp, Homo sapiens
aggggtgtgttgcaggtgattcaagactatgttttctacccccttcagtgcctcttttcttactatgatgttaaaaacagatatcagatatagtctaattacaaagaaagcactaacttgcctctgtggtaacagggaatggaatgggccccaagcatactacagcagctctatggaaaagtggccagattgttacatgggtgctcccaatagcaacttgacaactccccagatagagagcctccaggggcaactgaaagcctggcagtggaactgcccttgccacccttgtactaatgaaggaccaaagaccctaagtgccttatccatacctccaacaagctgcagtcaacccaaggagaagtgtccagtctctctcccaagggttccccctgccccctactgctcatcacaagacaggaaacccctggcttgggcccatagaacagaccctccatcctaggctgattgcactgagtgattgctggcctgcatctctctgggttggggaagggacacaaacacggagatcatctcagagctg

SEQ ID NO: 474404 - DNA, 474 bp, Homo sapiens
ccagaataggtttctggaaacatgaacaaagatgacggcccagagacaacagaaatttatccaaagaggataaaaattcctttccatagtggttcagtacagctgttctatgaattcagaagagacctgaagtctcctacccgagagttaggcacctggttactggtgttctttgcactggccagggctcagaccgtaagatctagtgttgaaagtgaatcacatcattcatctgatcaaaaccctcgcagagctcccatgttccttgggaaaaaaaacacagttcttttaacagcctgcaaagtcctctgtgacctgtcacatagtatggaggaaagtttaaaaggagttgtgctgaaacagttggatatttatatgcaaataagtaaacctaaacccagaccttaaccacaattaatcaaaatgtatcatacacttaaatgtaaaatgcaaaattataaaacttcttggaaa

SEQ ID NO: 474405 - DNA, 621 bp, Homo sapiens
tcatcagttaaggcaggaacaggccattttcacttcttttgtggtggaatgtcatcagttaaggcaggaaccggccatatggatgtgagtatctttgtggcgttctctgtatttcctgaatctaaacgttggactgccttgctagattggggaagttctcctggagaatatcctgcagagtgttttccaacttggtttcattctccccatcactttcagaatgaatggtaccatctcctccttgtacctctggtagaattcggctgtgaatccgtctggtcctggactttttttggagacgttataactgatactgtagaaattccaaggattattagaggcaacaatgagcaagtatatgacaataaactggaaaacctagaagaaatggataatttcctagaggcatacagttttccaagattgaaaaatgaagaaataaaaaacctgaatagaccaataacaactaatatgattgaagccataataaaaggtctcccagcaaagaaaagcccaggacccgacggcttcactgttgaattttaccaaacattttaaagaagaactactaccaatcttactcaaattggtctgaaaaatagaggaggaaggaatacttcc

SEQ ID NO: 474406 - DNA, 591 bp, Homo sapiens
ggaagcccatgctgccagcggttgggggccgcaggctcagacaggaaatgcccccgagtgtaccccagggccctctgcaaaggcctgatgctttggatgaggcctggcgccattttgaagctgggcctgactctgggactctggcctggttctggggctggtggcctgggatctggggactgctttgtcacctgcctgggcaggcttgggtcctggtgcctgcaatggccccagcactcatgccccctggactttgcgtcaaggagctgtcatactcatgccaagctcctgatgggtgtctgacccactcaagcctccgggctttctgtttctcttctctgagcctcacattgctcacctggagaatgaggaccataacgatatcaggactggaaggagctcagagatcagggcaccgtgccctctgggctcgctgcgtcttcctgcttcccagccccaatttccctcccctttcctacctccagcgcatcttgtgtgagacgcatggggacaggagggtggtaactccaagatgagagtggcagcaggggcgggctctgcagagggctgtcttccgggatgcagcctgcc

SEQ ID NO: 474407 - DNA, 689 bp, Homo sapiens
ggtgataatgatggtggtgatggtgataatggtggggatagtgatgatggtggtggtggagatggtgatgatggtgatggtggtggtggtgatgatggtggtgctgctgctactgatggtggtggtggtggtgatggtgacagtagtggtggtgctggaggtgatggggatggtgatggtggtgatggtggtggtcgtgatagtggtggtggggatggtgatgatgatggtggcagtggtgatgatggtggtgatggcaatgatggtggtggtggtgctgctggtggtgctggaggtggtagggatgatgatggtggtgatggtggtggtggtgatggtagtggttgtggtgatggtgatggtggtggtggtgctggaggtggtgggggtggtgatggaggtggtggttgtggtatgaagatagtggtggtggtggtggtggtgatgatggtggtggggatggtgatggtgatggtgatagtagcaatggtgatggtggtggtggtagtggtgatgatgatagtggtggtggtggtgatggtgatggtggtggtggggatggtgatgatagtggtggtggtaatgatagtggtgctggtggtggtggtgatggcggcgatggtggtggtggtggtgctagaggtggtggggatggtgatgatggaggtggtggtgtttatggtgacggt

SEQ ID NO: 474408 - DNA, 1067 bp, Homo sapiens
ggtgataatgatggtggtgatggtgataatggtggggatagtgatgatggtggtggtggagatggtgatgatggtgatggtggtggtggtgatgatggtggtgctgctgctactgatggtggtggtggtggtgatggtgacagtagtggtggtgctggaggtgatggggatggtgatggtggtgatggtggtggtcgtgatagtggtggtggggatggtgatgatgatggtggcagtggtgatgatggtggtgatggcaatgatggtggtggtggtgctgctggtggtgctggaggtggtagggatgatgatggtggtgatggtggtggtggtgatggtgatgatggtggtagtgatgatggtagtggttgtggtgatggtgatggtggtggtggtgctggaggtggtgggggtggtgatggaggtggtggttgtggtatgaagatagtggtggtggtggtggtggtgatgatggtggtggggatggtgatggtgatggtgatagtagcaatggtgatggtggtggtggtagtggtgatgatgatagtgatggtggtggtgatggtgatggtggtggtggggatggtgatgatagtggtggtggtaatgatagtggtgctggtggtggtggtgatggcggcgatggtggtggtggtggtgctagaggtggtggggatggtgatgatggaggtggtggtgtttatggtgacggtggtggtggtgaaggtgatagtcatggtggttgtgttggtcatggtggtgatggaggtggtgatggtgacagtggtggtgattgtgacggaggtggtggtgatggtggtggtggtgatggaggtggtgatggtgatagtgatgggtatggtggtgaaaaatggtggtggttgtaataatgatggaggtggtgttcatggtgatgatggtgatggtgggagtcatggttatggtgatggtggtggtagtggtggtgctggtagtgcttgtgctagtggtaaagctgatgttcatggctcctctcagttctctgctcccatggtctctaaataccatgtcccactcaaaggcaccag

SEQ ID NO: 474409 - DNA, 535 bp, Homo sapiens
tggagccagaatctgagaaggctgggaagagggggaagtaccagctgcagaggtttgaagggcgccatgtccctcacctcttcagagcttcttctccctgttgctaccgccaagagaagagagcaacaactgcagctgctactgtttcttgactctggcgaagaaagtgggcttggggccaggcctactgtccagggctcccagtggaagatgctagaagagggcagcgcacactctctcaccgtcatatcgagactcccttctgctgtggagccctcactggcctcttcatttcaggtcatcaggtggagagcacgctgcagagaggactgttcccatgcccaggagaggcttgcgagtgagctccgtgtaatcactcactggcagaatgcagtgcagggggctggggttacagtcagcgaggagcgaggcacgatgatgctttggagtggaagtgagctttcaaatctcagcagccctgagtgattcctccacttagggccagtgtgtgtgtgatgggtgtggttgagagctg

SEQ ID NO: 474410 - DNA, 1412 bp, Homo sapiens
ggcagcctcctctcccaggctgtccccgtggactggccagcaccccctgggctccagcagcctggcagtccctccctgtcgagcctgggctccaggtccacagggcctgcccccgttctcagttctgatggtcacgtttccctcctgccagccctgtaggcagtggcctcctgcgggtcaccccatggaagctcagagcccccttcacctgtggcctccagtgggttctattgaacaaccggtccctcaggtgcaatcctacctggcagacaaccatgccgcttcccaggggaccccagccagcatgggcattgaggaggggacagcgcacggaagccaggcaagggctggtcacgattgtgctagttgatcagctagcagtctacgcaatcacaactacactaattgatcagctaacagtctatccggtcatgactgccctaattgatcagctagcagtctatgcaatcaggactgttccaattgatcagctaacagtctatccagtcacgactgctccagttgatcagctaacagtctgtccggtcacaactgtgctaattgatcagctagcagtctttgcaatcacgactggtctaaatgatcagctaacagtctatccagtcacaactgcactaattgatcagcaaacagtctatccagtcacgactgtgctaattgatcagctaacagtctatgcagtcatggatgctctaattgaccagctagcagtctatccaatcatgactgtactaattgatcagctagcagtctatccagtcacaactgctccaattgatcagaatgccatgaagcacagagcaagagactcaaaccatgctgaggaatcagatgcacaattaaaaacctcccttccttctcttctccccagaaagaatggctgctaagatttttttctttatccttccataccctttttctgcatgcatacagggttaaaggactctcttcctgccttgagttatatgaataaaaacaagtgctcagggaccccacattctaaaataaggtgctgaggtgcccccatgagaagggtctgccagccttccctccttccccacctccaggcgacatgggggctgggacagtcaggggagcaagaggcggcgtgtgctgggggaggtggaagatggggctgaagaggccagtcacgccgcaccccctccccactgcgtcagtccggagtcaagtttttaaattgacatctaaaggatttcatcataagtgaaaatagttgcaaaggatttaactttcagtgtattataaacattaatgtatcaatcttttaactgtattgaatttttgtactataaaaattttatccccaccattatccattttaaaatgcaccaagttctttaaaagtttgaactttacgttttacctttttt

SEQ ID NO: 474411 - DNA, 615 bp, Homo sapiens
gttctgacgccaagaagaggcatgaagcccagcaggcttctctggatgctgggaacacaatataccacatttgggcatgaagtctcacactgctccagggaaaccagcaatgctgccagatgacaccccccgcaagtggatgcctgcagcattaggacagcttcattcagggcagccaggaggacgctgggggagcttttcttctctgtggaaatacttgggagcagtgcacctagtttttcacttcttctgggaagagagagatgcagagatatggactgatgtggattctgggaactggaaaggacatcactttggcatctgcacccagcaaggactgtatgagaagggaaatttgcaggcccatgtcactcccaaacgtgagcatcaaaactgtacagaaatcatttgcaaatcaatgtatacaaaaatagcaaacacaaatattcaggtttatcccttgagtctgcttcttggtatcaccatattggtaacagctgaattttggaggggacacattcaaaccacaggagatatctaccaagactctacagcaaaatcatgcatatctgtgaaaaaagtggaaatttccccatttacggggcgatgaaatat

SEQ ID NO: 474412 - DNA, 547 bp, Homo sapiens
cccaataggctccagtgtgtgtttttcccctccctgtgtccatgtgttctcattgttcagatcccacttataagcgagaagtgatacttttcctgaggtggattggactcaggaagaaagagatgtgggaacctggatgggttccattccgagggcaagtgataccagactataagctctgccgccagtaccctcagaggcaaggtccacgtgtgttggcaaaactgaacataagctctcaccccaaaggactccgcgatggaggggcagcaggcagaggaaatatgccctttgctgagaagatgcattcagccagctgtggagtaggagacagtatggggctgggacaagatttcatacagaagaaagaagtgactctacatttatatgaattaggagctggagtcaggacgaggggccacgggagactgagaggctacatggggaaaaagacgagagacagcaggaaacccactggttacttggaaaagagccctgatgtaagagaatgtcttgtgggttttttttgagataaacactgtgggct

SEQ ID NO: 474413 - DNA, 702 bp, Homo sapiens
ttctctctctctgtcttgctttctcttcttattcattagttgagctttgagactttacataatggttggatctcaagagggcacatatggaagctgcaatgtttttgtagataaaccagcatttccggagtataaagtttctgatgcaaaaaagtccaaattcatacttctgcattttagcacttttaaagctggctgggactggcttattttgttggcaacgttttatgttgctgtgactgtaccttacaacgtttgctttattggcaatgacgacctgtccacaactcggagcacaaccgtcagtgacattgcagtggagattctttttattatagagggctatattcttactgtaaagatgagaggatgtttggaaacattttcaagcagtgaagctgttaaatctttgaggctagagtgcgttttctggttgaatgtcagcacgtttgctttggatgagtttgtgtgctcttgatatttgacattctttggccttagaagccacttctgttaccacatgttcattagcagatgatgactgacttactcccataaaaactcatacctttgacggagatattttaaaagtttttgtttatttgttttaaggctgcttttctctactaaaccaatggagactcatttgctcccctgatagcaacccctaaattcttctgtgttttttattactgtcatttc

SEQ ID NO: 474414 - DNA, 594 bp, Homo sapiens
ataattagttgcaaagatggctgggaaatgtcattccagctacaatcctattgctctggagaaagcagaagtgaattttgatgatattattttaaatttccgaacaacttatgtcagcaagtctggccaagttatctttgaagcaagatcaatttgcatccactatgtcacaacctggttcatcattgatttaatcgctgccctgccttttgatcttctgtatgctttcaacgtcacagtgacagtgcgcctcttgcgtcttttgcgtctgctgcagaagttagaccgctattcccaacacagtactatcgtcctgactctgctcatgtccatgtttgcactccttgcacactggatggcgtgtatctggtacgtcattggaaaaatggagagggaagacaacagccttctgaagtgggaagttgtggtaaatgaaaactacataacagctgccataactcactagtaaaacattttagtctttatattctttcaggttttataccattaaagtataattgtattctgtatagtaatatgcttctgtgaaatccctctcatttaatccatttcttcctaaagttcttaaccttc

SEQ ID NO: 474415 - DNA, 814 bp, Homo sapiens
cctcatccgaatgtctgtcaccagcatcaaagaccaaaggttgataaatccatgaagatgaggaaaaaccagtgcaaaaaggctgaaaattccaaaaaccagaatgcctcttctcctccaaaggatcacaacgccttgacagcaagggaacaaaactggatggagaatgagtttgatgaactgacagaagtaggcttcagaaggtgggtaatgacaaactcctctgagctaaaggagcatgttctaacccgatacaaggaagctaagacccttgaaaaaaggttagaggaattgctaactagactaaccagtttagagaataacataaatgacctgatggagctgaaaaacacagcacgagaacttcatgaagcatacacaagtatcaatagccaagccgatcaagcggaagaaaggatatcagagattgaagatcaacttaatgagataaagtgtgaagacaagattagagaaaaaagaatgaaaaagaaggcaaaaagcctccaagaaatatgggactatgtgaaaagaccaaacttacttttgactgatgtacctgaaagtgatggggagagtggaaccaagttggaaaacactcttcaggatattatgccggagaatttccccaatctagcaagacaggctaacattcaaatttaggaaatacagagaacatcacaaagatactcctcaagaagagcaaccccaagacacacaaatgtcaaattcaccaaggttgaaatgaaggaaaaaatgttaagggcagccagagagaaaggttgggttacccacaaaaggaagcccatcagaataa

SEQ ID NO: 474416 - DNA, 908 bp, Homo sapiens
aagattaattctgccatttccatctagcgcagggccatgctgttgaatgagtggccatgtgggatatggatccagtactgtaaatatgaggcatttcccggctcctgcagtgcctggcagtcagcagcacctagtagccagcagctgcctctagagcaccggttcccacccctggccaggtttcgtaacatttgcagcttcttcagtgtctggctcctgcagtgtgtagttcccagcagcaaccagcagagggcagcctctcctggagccacatcagatagctttgtagcaaggtcacaaaggcactggggtgaggatgtttgtcgggttccaggaacagagagacccaaccatgggatcccagtgggtccatctgaggaccagagactgtggtacagagagcagggcttggacttcctgggaatttgccttttagcctgccaggtcccctatcctgccccaatagaaaccccaaacctcaggctccagaggagaccggcagagcagcagagcagcagaccagcagaccagcaacagcagaacaaccaggcagagaaagggagaagaggcgggacatctggatgccgaggggagtttggccaggggccaattggacgtttgggttgcttccaacttttggctaccataagtagtgtggtcatgtccttgtagacttttgatttttttttttttcagtcagcctttaagatgtgcagctcatcatatcatgctgtaatcaagatgtgacaacagtcatgtcatgtcatgccacccagtcctttggctgtaccaccaatgtattgcataaaaccactcgattactcttagtttacctcttaaatttctttcactttactcccattgtcaccacctgtaataatttgctatggctgccataacaaagtacc

SEQ ID NO: 474417 - DNA, 2828 bp, Homo sapiens
gaagagaatcttcgaacggacccgaatggaatcatctaatggaatggaatggaataatccatggactggaaggcaatcatcatcgaatggaatcgaaaggaatcatcgaatggactcgaatggaataatcattgaacggaatcgaatggaatcatcatcgcatggaaacgaatggaatcatcaccgaatggaaatgaaaggaaatcgaatggaattatcatcgaatggaatcgaatggaatcaacatcaaacggaaaaaaacggaattatcgaatggaatcgaagagaatcatcgaatggacccgaatggaatcatctaatggaatggaatggaataatccatggactcgaatgcaatcatcatcgaatggaatcgaatggaatcatcgaaatggaatcaccgaatagaatcgaatggaacaatcatcgaatggacccaaatggaattatcctccaatggaatcgaatggaattatcgaatgcaatcgaatggaattatcgaatgcaatcgaatagaatcatcgaatggactcgaatggaatcatcgaatggaatggaatggtatcatcgcatagaatcgaatggaattatcatcgaatggaatcgaatggaatcaacatcaaacggaaaaaaacggaattatcgaatggaatcgaagagaatcatcgaatggacccgaatggaatcatctaatggaatggaatggaataatccatggactcgaatgcaatcatcatcgaatggaatcgaatggaatcatcgaatggaaatgaatggaatcgtcatagaatggaatcgaatggattcattgaatggaatcagatggaatcatcgaatggactggaatggaatcattgaatggactcgaaagggatcattattgaatggaattgaatggaatcatcgaatggtctcgattggaatcattatcaaatggaatcgaatggaatcaccgaatagaatcgaatggaacaatcatcgaatggactcaaatggaattatcctccaatggaatcgaatggaattatcgaatgcaatcgaatggaattatcgaatgcaatcgaatagaatcatcgaatggactcgaatggaatcatcgaatggaatggaatggaacaaattatggaatgaaatccagtgtgatcatcatcgaatggacccgaatggaatcatcatccaacggaagctcacggtatcaacatcgaatgaatcaaatggaaacaccatcgaattgaaacgaatgttggaatcattatcaaatggaatcgaatggaatcaccgaatagaatcgaatggaacaatcatcgaatggactcaaatggaattatcctccaatggaatcgaatggaattatcgaatgcaatcgaatggaattatcgaatgcaatcgaatagaatcatcgaatggactcgaatggaatcatcgaataaaattgattgaaatcatcatcgaatgtaatcgaatggtatcattgaatggaatcgaatggaatcatcatcagatggaaatgaatggaatcaatcatcgaatggactcgaatggaatcatcgaatggaatggaatggaacagtcaatgaactcgaatggaatcatcattgaatggaatcgaatggaatcatcgagtggaatcgaatggaattatgatcaaatggaatcgaataatcgaatggaattatcatcgaatggaatcgaatggtatcaacaccaaacggaaaaaaacggaattatcgaatggaatcgaagagaatcatcgaatggattcgaatggaatcatcgaataaaattgattgaaatcatcatcgaatggaatcgaatggtatcattgaatggaatcgaatggaatcatcatcagatggaaatgaatggaatcaatcatcgaatggactcgaatggaataatcgaatggaatggaatggaacagtcaatgaactcgaatggaatcatcattgaatggaatcgaatggaatcatcgaaatcgaatggaattatcatcgaatggaatcgaatggaatcaacatcaaacggaaaaaaacggaattatcgaatggaatcgaagagaatcatcgaatggacccgaatggaatcatctaatagaatggaatggaataatccatggactcgaattcaatcatcatcgaatggaatcgaatggaatcatcgaatggactcgaatggaataatcattgaacggaatcgaatggaatcatcatcagatggaaatgaaaggagtcatcatctaatggaattgcatggaatcatcataaaatggaatcgaatggaatcaacatcaaatggaatcaaatggaatcatggaacggaattgaatgaatcgaatggaattatcatcgaatggaatcgaatggaatcaacatcaaacggaaaaaaacggaattatcgaatggaatcgaagagaatcatcgaatggacccgaatggaatcatctaatggaatggaatggaataatccatggactcgaatgcaatcatcatcgaatggaatcgaatggaatcatcgaatggactcgaatggaataatcattgaacggaatcgaatggaatcatcatcggatggaaatgaatggaatcatcatcgaatggaatcgaatagaattatggaatgaaatccagtgtgatcatcatcgaatggacccgaatggaatcatcatccaacggaagctaatggaatcaacatcgaatgaatcaaatggaaacaccatcgaattgaaacgaatggaattaccatgaaattgaaatggatggactcatcatcgaatggattcgaatggaatcatcgaataaaattgattgaaatcatcatcgaatggaatc

SEQ ID NO: 474418 - DNA, 1251 bp, Homo sapiens
gaagagaatcttcgaacggacccgaatggaatcatctaatggaatggaatggaataatccatggactcgaatgcaatcatcgtcgaatggaatcgaatggaatcatcgaatggactcgaatggaataatcattgaacggaatcgaatggaatcatcatcggatggaaatgaatggaatcatcatcgaattgaaatgaaaggaagaatcatcgaatggacccgaatggaatcatctaatggaatggaatggaataatccatggactcgaatgcaatcatcatcgaatggaatcgattggaatcatcgaatggactcgaatggaataatcattgaacggaatcgaatggaatcatcatcggatggaaatgaaaggaaatcgaatggaattatcatcgaatggaatcgaatggaatcaacatcaaacggaaaaaaacggaattatcgaatggaatcgaagagaatcatcgaatggacccgaatggaatcatctactggaatggaatggaataatccatggactcgaatgcaatcatcatcgaatggaatcgaatggaatcatcgaatggactcgaatggaataatcattgaacggaatcgaatggaatcatcatcggatggaaatgaatggaatcatcatcgaatggaatcgaatagaattatggaatgaaatccagtgtgatcatcatcgaatggacccgaatggaatcatcatccaacggaagctaatggtatcaacatcgaatgaatcaaatggaaacaccatcgaattgaaacgaatggaattatcatgaaattgaaatggatggactcatcatcgaatggattcgaatggaatcatcgaataaaattgattgaaatcatcatcgaatggaatcgaatggtatcattgaatggaatcgaatggaatcatcatcagatggaaatgaatggaatcgtcatagaatggaatcgaatggattcattgaatggaatcagatggagtcatcaaatggactggaatggaatcattgaatggactcgaaagggatcatgattgaatggaattgaatggaatcatcgaatggtctcgattggaatcattatcaaatggaatcgaatggaatcgccgaatagaatcgaatggaacaatcatcgaatggactcaaatggaattatcctcaaatggaatggaatggaattatcgaatgcaatcgaatggaattatcgaatgcaatcgaatagaatcatcgaatggactcgaatggaatcatc

SEQ ID NO: 474419 - DNA, 2204 bp, Homo sapiens
tgaaatggaatggaatggaatggaatgaaatggaatggaatggaatggaatgaaatggaatggaatggaatggaatggaatggaatggaatctacccgattggaatggaatggaatggaatcgaatggagtagaatggaatgaaatggaatggaatggaatggaatggaatggaatggaatggaatgaaatggaatggaatggaatggaatggaatggaatggaatggaaacttcccgagttgaatggcatggaatggaatggaatggaatggaatgaaatggaaaggaatggaatggaatctacccgatggaatggaatggattggaatggaatgaacgaaatgaaatggaaaggaatcaacatgaatggaatggaagggaatggaatggaaggaatggaagggaatggaatggagtggaatggaatggatcgaatggaacggaatggaatggaatggattggaatggaatgtaatgtaatggaatggaatcaaccccagtggaatggaagggagtggaatggaatggaatggaatggattctacccgaatggaatggaatggaatgaaggaaatgaaatggaatggaatcaacatgaatggaatggaattgaatggaatggaatggaatggaatggaatggaatggaatggaatggatttggaatggaatggaatggaatggaatggaatggaatggaaaggaatggaaacgaagggaataacatggattcaccccgaatggaatggaatggaatggaatgggatgagcaaactgaatggaacgctaaggagtggaatggaatggatctggaatggaatggaatggaatggaatggaaaggaatggaaacgaagggaataacatggattcaccccgaatggaatggaatggaatggaatgggatgagcaaactgaatggaacgctaaggagtggaatggaatggaatggaatggaatggaatcgacacatggaatggaatgcaatggaattggaatggaatggaatggaattgaattgaacggaatggaatggagtggaatggaatcaaccagagtggaatggaatgaaatggaatggaatggaatggaatggaatggaatggaatggaatggaatggaacggaatggaaaggaatggaatggaatcaaaccgatggaatggaatggattggaatggaatggaatggtttggaaaggaatggaatcaaaaagagtggaatggaatggaatggtttggaaaggaatggaatctaaaagagtggaatggaatggaatggaatggtatcgacacgagaggaatttaatggaatggaatggaaaggaatggaatggaataaacacgagtggaatggaatggaatggtatggaatggaatggaatgggacagaatggaatggaatcaacccgagttcaatggaatggaaaggaatggaatggaattaatgcaatcaacccaaatggaatggaatggaatggaatggaatgcaatggaatgaaatggaatgaaatggaatggattggaattaaatggaatggaatggaatggaatggaatcgaatggaatggaatcttcccgaatggaatggaatggaatggaatggaatggagcggaatggaatggaatggtgtgaaacaaagtggaaagcaatggaatggacaggaatggaaaggaatggaattgaatggaatggaatcaacccgactggaatggaatggaatggaatggaatggaatgcagtggaatggaatcaaaccaagtggaatggaatggaatggaatagaaaggaatggattagaatggaatggattggaatggaaccaacccgagtggaatggaatggaatggtataaacccgaatgtaatggcatggaatggaatgcaatggaatggaatggaatggaatggaatggaatggaatggaattgtgtggaatggaacggaatggaatggagtgtaaaggaattgaatagaatcaaccagaatggaatggaatggaatggaatggaatggaatggaatggaatggaatgcaatggaatggaatggaatggaatctacccgaatggaatggaatggaatcgaatggaatcgaatggaatttacgcatatggaatggaatggaatggaatggaatggaatggaatggaatgcaatggaatggaatctacccgaatagaatggaatggaatggaatcgaatgga

SEQ ID NO: 474420 - DNA, 8499 bp, Homo sapiens
gagtggaatggaaaggaatggaatcaacccgagtggaatggaagggaatgcaatggaatggaacggaatggaaaggtgtcaaaccgagtggaatggaatggaaaggaatggaatggaatggaatggaatggaagggattggaatcaacacgagtgcaatggaatggaatggaatggaatggaatggaatggaatggaatggaatctaccagaatggaatggaatggaatggaatggaatggaatggaaaggaatggaatggaatctacccgaatggaatggaatggtataatggaatgcaacggaatcaacccgagtgcaatggaatggaatggaatggaatggaatggaatggaatggaatggaatggaatcaacccgagtggaatggaatggaatggaatggaatggaatggaatggaatggaatggaatggattggaatggaattgaatggaatggaatcaactggaaaggaatgaaacggaatggaattaaacggagtggaatggaattgaatggaatggaaacaacccgaaatcaacctgaaaggaatggaatggaacggaatggaatgaaatcaaatcgagtggaatggaatggaaagaagtggattggaatggaatgcaatggaatggaatggaatggagtggaatcactccgagtggaatggaagggaatgcaatggagtggaatggaaaggaatggaatcaacgtgagtggaatggaatggaatggaagggaaagtattggaatggaaacaacccgagtgaaatggcatagaatggaatggattagaatggaatggaatcaactggaatggaatggagtaaacacgagtggaatggaatggaatggtatggaatggaatggaatggaagacaatgcaatggaatcaacccgagttcaatggaatggaaaggaatggaatggaattgtatggaatggaatggaatggaatggaatggaatggaatggaatggaatggaatggaaagcaacggaatggaatcgaatggaatcaacccaaatggaatggaatggaatggaatgcaatggaaagaaaaggaatgaaatggaatgaaatggaattgaatggaatggaatggaatggaatggaatggaatggaatggaatggaatggaatcgaatggaatggaatctacccgagaggaatggaatgcaatggaatggaatggattggaatggaatggaaaggaatggaatggaatggagtgaaacaaagtaatggaattgactggaatggaaccaacccgagtggaatggagtggaatggaataaacccgaatgtaatggcatggaatggtatagaatggaatggaatggaatggaatggaatggaattgtgtggaatggaatggagtgtaaaggaattgaatagaatcaacccgaatggaatggaatttagtggaatggaacggaatggaatggaatggaatggaatggaatggaatggaatggaatcaattcacatggaatggaatggaatggaatggattggaatggaatacaatggaatggaatggaatggaatcattccgagtggaatgggagggaatggaatggattggaatggaatagaatggaatggaacggaatggaacggaacggaacggaatggaatggaatggagtggaatggaatggaatggaatggattggaatggaattgaatggaatggaatcaactggaaaggaatggaacggaatggaattaaatggagtggaatggaattgaatggaatggaaacaacccgaggaatgcaatggagtggaatggaaaggaatggaatcaacgtgagtggaatggaatggaatggaagggaaagtattggaatggaaacaacccgagtgaaatggcatggaatggaatggattagaatggaatggaatcaactggaatggaatggaataaacacgagtggaatggaatggaatggtatggaatggaatggaatggaagaaaatgcaatggaatcaacccgagttcaatggaatggaaaggaatggaatggaattgtatggaatggaatggaatggaatggaatggaatggaatggaatggaaagcaacggaatggaatcgaatggaaatggaatggattggaatggaaccaacccgagtggaatggagtggaatggaataaacccgaatgtaatggcatggaatggaatggaatggaatggaatggaattgtgtggaatggaatggagtgtaaaggaattgaagagaatcaacccgaatggaatggaatttaattcaatggaacggaatggaatggaatggaatggaatggaatggaatggaatggaatggaatggaatcaattcacatggaatggaatggaatggaatggactggaatggaatgcaatggaatggaatggaatggaatcattccgagtggaatgggagggaatggaatgtattggaatggaatggaatggaatggaacggaacggaacggaatggaatggaatggaaaaaacacgagtggaatggaatggaatggaatggattggaatggaatgcaatggaatggattggaatggaatgcaatggaatggaatggaatggaatggaatggaatggaatcgagttgaatggaaaggaatggaatcaacccgagtgcaatggaatggaatggaatggaatggaattgaatggaatctaccagaatggaattgaatggaatggaattgaatggaatggaatggaatggaaagtacccgaatggaatggaatggaaaggaattctatggcagtggaatggaatggaatggaatggaatcatccggaatggaatggaatggaatggaatggaatggaatggaatggaatggaatggaatggaaaggaatggaatggaatcataacgaatggaatggaatggaatggaatggaatggaatggaatggaatggaatcaacccgagtggaatggaaggaaatggaatcaaactgagtggagtggagtggagtggaatggaatcgaatggaatggaatggaaagcaatgaaatggaattgaatgaaatggattggaatgtaatggaatggaatcaaaccaagcgcaatggactggcatggaatggaatggaatggaatggaatggaatggaatggaatggaatggaatggaatggaaacaacccgagtggaatggaatggaatggaatggaatggaatggaatggaatggattggaatggaatggaatggaatggcaagaacccgaatgtaacggaatggaatggaatggaattcaacggaatggaatcaactggattggaatggaaacgaaaggaatggaatggaatcgagtgaacctgagtggaatggaatggaatggaatggaatggaatagaatggaatggaatggaatggaatggaaactaccgaatggaatggaaaggaatggaatcgaaagcagtggactggaaagaattggattggaatggaataaaatcaactccagtggaatggaatggaatgaaatggaatggaaagtaatggaatcgaatgctgtggagtggaaagaaatggattggaatggaataaaatcaactcctgtggaatggaatggaatgaaatggaacggaatggaatggattggaatcaacccgagtggaatggcatggaatggaatggaatggcatggaatggaatggaatggaatgaaatggaatggaatggaacggaatagaatggaatggaacgaaatgaaatggaatttattcaacacacttggaatggaatggaaaggaatggattggaatggaatggaatcaaccctagtggaatggaatagaatggaatggaatcaatggaatttactggaatggaatataatgaattggaatggaaatggaatgcaatggaatcaaccagagtggagtggaatggaatggaatgcaatggaatggaatggagtagaatggaatggaatggaatcaactgaatggaatgaaatggaatggattggaatggaatggaatcaacccgtatggaatgtggaatggaacggaatggaatggaatggaatggaattgtatggaatcaacgctagtggaatgcaatggaatggaacggaatggaataaacgaaatgaaatggaatggaatcaacatgaatggaatggaatggaatggaatggaatggaatggaatggaatggatgggaatggaatggaatggaatggagtggaatggaatggagtggaacggggtggaatggaattgaatggatcaacacgcatgcaatggaatcgaatgaaatggtatggaatagaatggaatgcaatggaattgaatcaacacgactcaaatggaacggaatggaatggagtggaatggaatggaatcaacccaagtggaatggaaaggaatggaatggaatggaatgaatggaatggaacgaaatggaatgaaatggattcaacccaattggagtggaatggaatgaaatggaattgtgtggaatggaatggaacggaatataatgtaaaggaattgaatagaatcaacccgaatggaatggaatggaaaggaatggaatggaatggaatggaatggaatggaatggaatggaatggaatggaatggaatcaactcgagtggaacggaatggattggaatggaatgcaaaggaatgtaattggaagggaagggaatgtaatcgagtggaatggaatggaatggaatcaacccgagtgcaatggaatggaatgcaatggaatggaatggaatggaaactaccagaatggaatggaatggaatggaatggcatggaatggaatggaatgtacccgagtggaatggaatagtgcaactgaatggaatggaatagaatggaatggaatggaatggattgaaaccgaatggagtggaaaggaatggaatcaacccgagtggaatggtatggaatggaatggaatgcaatggaatggaatggaatggaacggaatgaatggaatcaactcgactgcattggaatggaaagcaatggaatggcatggaatcaactcgcgtgaattggaatggaatgaaattgaatggaatggaattgaatggaatggaatcaacttgaatggaatggaagggaatgaaatggaatggaatggaaatgaatcaacactagtggaatggaacggaatggaatggaatggaatggaattgtatggaatcaacgctagtggaatgcaatggaatggaacggaatggaataaacgaaatgaaatggaatggaatagaatggaatgcaatggaatcgaatcaacacgactcaaatggaacggattggaatggagtggaatggaatggaatcaacccaagtggaatggaaaggaatggaatggaatggaatggtacggaatagaatgcagtggaacgaagtggaacggaatggattcaacccaattggaatggaatggaatggaatggaattgtgaggaacggaatggaatggaatgcagtgtaaaggaattgaatagaatcaacccgaatggaatggaatggaatggaatggaatggaatggaatggaatggaatgggaatgtaatcgagtggaatggaatggaatggaatcaacccgagtgcaatggaatggaatgcaatggaatggaatggaatggaaactaccagaatggaatggaatggaatggaatggcatggaatggaatggaatgtacccgagtggaatggaatagtggaatgcaatggaatggaatggaatcaccccgaatggaatggagtggaatggaatggaatggaatagaatgtagtggaatggaatggaatcaacccgagtgcaatggaatggaatggaatggaatggaatggaacggaatggaatggaatggaatcaaccagagtgcaactgaatggaatggaatggaatggattgaaaccgaatggagtggaaaggaatggaatcaacccgagtggaatggtatggaatggaatcgaatgcaatggaatggaatggaatggaatggtacggaatacaatggaatggaaagaaatggaatggaatggaatggaatggaatggaatggaaaggaatggaatgcaatcattccgaaatggaaagtaatggaatggaaaggaatggaaaggaatggaatggaatggaatggaatggaatggaatggaatggaatcaactcgagtggaatggaatggaatggaatggattggaatggaatgcaatggaattgaatggaatcattccgagtggaatggaagggaatgtaatccagtggaatggaaaggaatggaatcaacacgagtggaatggaagggaatagaatggaatggaaaggaatggaatagaatcaacccgagtggaatggaatggaatgcaatggaatggaatggattggaatcatcccaaatggaatggagtggaatggaatggaatggaatggaatgtatggaatggcatggaatggaatggaatggaatggaatggaatggaacggaatggtacggaatagaatgtaatggaacgaaatggaatggaatggattcaacacaatcggaatggaatagaatggaatggaatggattggaatggaatggaatgcaatggaatggaatggaatggtatcaactcgagtggaatggaatggtatggaatggattggaatggaatgcaatggaatggaaagaaatcattccgagtggaaaggaagggaatgaattgaatacaatcaacccgaatggaatggaatggaatggaatggaatggaaaggaatggaatggaatggaatggaatggaatggaatggaatcaactcgagtggaatggaatggattggaatggaatgcaatggaatggaaggtaatggaatggaatcattccgagtggaatggaagggaatgtaatcgagtggaatggaaaggaatggaatcaaaccgagtgcaatctattataatggaatggaatggaatggaatggaatggaatggaatggaatctaccattatggaatgaaatggaatggaatggagtggaatggaatggaatggagtggaatggaatggaatggactgtacccgagtggaatggaattggaatggaaaggaatggaatcacaccgagtggaatggaagggaatagaatggaatggaatggaatggaatggaatggaatggaatgcaatggaatcaacccgactgcaatggaatggaatggaatggaatggaatcaacccgaatggaatggaatggaatggaatcaacacgagtggaatggcatggaatggaatgcaatgaaatggaatggaacgaaattggaatggagtggaatggaatggaatggaatggaaagcaatggaatggaatggaatcaatccgagtgcaatggaatggaatggcaaggaatggaatggaatggaatggaatggaatggattcaacccgaatggaatggaaaggaagggagtcaacccgagtggaatggcaaggaatggaatggaatggaatggaatggaatgcaatggaatggaatggaatggaatggaattgaatagaatcaacccaaatgaaatggaatggaatggagcgaaatggaatggaatggaatggaatagaatggaatcattccgagtggaatataatggaatggaaaggaatggaatggaatggaatggaatggaatggaatggaatggaatggaatggaatcaactcgagagcaatggaatggaatggaatggaatggaatggaatggaatggaatggaatcaacccgagtggaatggcatggaatggaatggaatggaagggaatggtaccgaatagaatggaatggaacgaaatcgactggaatggattcaacccaattggaacggaatggaatggaatggaattgtgtggaatggaatggaatggaaaggagttggaatggaagggaatggaatggaatggaaatgaatggaatggaatcaacacgaggggaatggaatggaatggaacggaatggaatggaatggaatggaatggaatggaatggaatggaatggaatggaatggaatcaacccaggtggaatggaatggaatggaatggattggaatggaatggaatggaatggaatggaatcaaccagaatggaatggaatggaatggactggaatggaatggaatggaataagggaatggaatcaaatcgcgtggaatggaatggaatggaactgaatcaaactgagtggaatggaatggaatggattggaatagaatggaatggaatcatcccgaatggaatggagaggaatggaatggaatggaatggagtggaatggaatggaatggaatggaatcaacccgagtgcaatggaatggaatggaatggaatggaatggaatggaatggattcaacccgaatggaatggaaaggaatggaatcaacccgagtggaatggcatggaatggaatagaatggaaaggaatggaatggaatggaatggtatggaatagaatggaatggacc

SEQ ID NO: 474421 - DNA, 8872 bp, Homo sapiens
acgtaatggaatggaatcaatccgagtgcactggaatggaatggaatggaatggaatggattcaacccgaatggaatggaaaggaagggatgcaatggaatggaatggaatggaatggaatggaatggaatggaatggaatcaacccgagtggaatggcatggaatggaaaggaatgtaatggaatcaacccgaatggaatggaatggagtggaatcaacccgagtggaatggcatggaatggaatggagtggaagggaatggtaccgaatagaatggaatggaacgaaatgcactggaatggattcaacccaattggaatggaatggaatggaatggaattgtgtggaatggaatggaatggaaaggagtgtaaaggaattgaataaaatcaacccgaatggaatggaatggagtggaacggaacggaatggaatggaacggaatggaaaggaatggaatggaatggaatcaactcgggtggaatgtggaatggaagagaatgtaatcgagtggaataacggaacggaatggaatggaatggaatggaatcaagtcgggtggaatggaatggaatggaatggaatggaatggaatggaatggaatggaatcaacccgagtggaatggaatggattgcaatggaatggaaaggaatggaatggaatcaacccgagtggaatggaatggaatggaatggaatggaatggaatggaatggaatcaacccgggtagaatggcatggaatggaatagaatgtaatggaatggaatggtacagaatagaaatgaatggaacgaaatggaaaagaatgcattcaacccacttggaatggaatggaatggaatggaattgtgtggaatggaatggaatggaatggagtgaaatgaatggaatggaatggtacggaatagaatgcaatggaacgaaatggaatgaaatggattcaacccaattggagtggaatggaatggaatggaattgtgtggaatggaatggaatggaatggagtgtaaaggaattgaatagaatcaacccgaatggaatggaatggaacggaatgcaatggaatggagtggaatggaatgtggaatggaatggattggaatggaatgcaatggaatggaatgtaacggaatggaatcattccgagtggaatggaagggaatgtaatcgagtggaatggaaaggaatggaatcaacccgagtggaatggaagggaatggaatggaatggaaaggaatggaatggaatcaaccgcagtggaatggaatggaaaggaataaaatggtatggaatggaatggaatggaatcaactcgagtgcaatggaatggaatggaatggaatggaatctaccagagtggaatggaatggaatggaatggaatggaatgtacccgaatggaatgcaatggaatgcaatcaatggaatggaatgggatcgtcccgaatggaatggatcagaatggaatggatcagaatggaatggaatggaatggaatggaatggaatggaatggaattgaatggaaaggaatcaactcgagtgcaatggaatggaatggaatgcaatggaatggaatggatacaacctgaatggaatggaaaggaatggaatcaacccgagtggaatggcatggaatggaatagaatggaaaggaatggaatggaatggtacagaatagaatggaatggaacgaaatggaatggaatggaatggaatgcaatggaatggaatggagtggaatcattccgagtggaatggaagggaattcaacccaagtgcaatggaatggaatcgaatggaatggaatggaatgcaatggattcaaccccaatggaatggaaaggaatggaatcaacgcgagtgaaatggcatggaatggaattgaatggaaaggaatggaatggaatggtatggaatagaatggaatggaacgaaatggaatggaatggaatggaatggaatggaatggaatggaatggaatggaatggagtggaatcattccgagtggaatagaagggaatgtattcgagtggaatggaaaggaatggaatcaacccgagtggaatggaagggaatggaatggtatggaaaagaatagaatggaatcaaacagagtggaatggaatggaaaggaatggaatggaatggaatggaatggaatggaaaggaatggaatagaatggaatggaatggaatggaatggaatcaactcgagtgcaatggaatggaatggaaaggaaaggaattgtgtggaaatgaatagaatggaatggagtgtgaaggaattgaaaagaatcaacccgaatggaatggaatggaatggaacggaatggaatggaatggaatggaatggaatggaatggaatggaatggaatggaatcaattagagtggaatggaatggaatggaatggattggaatggaatgcaatgaaagggaatggaagggaatggaatggaacggaatcattccgagtggaatggaagggaatgaatggaatggaatcaacccgagtggaatggaatagaaaggaatggaaaggaatggaatggaatggaatggaatggaatggaatggaatggaatcaacccgagagcaatgctatggaatggaatggaatggaatggaatcaacccgaatggaatggagtggaatggaatcaacccgaatggaatggagtggaatggaatcaacccgagtggaatggcatggaatggaatggaatggaatggaaaggaatagaatggtacggaatagaatgcaatggaacgaaatggaatggaatggattcaacccaattgcaatggaatggaatggaaaggaatcattccgatggaatggaatggaaaggaatgggatggaatggaatggaatggaatggaatggaattgaatagtatcaacccaaatggaatggaatggtatggagcgaaatggaatggaatggaatggaatagaatggaatcattccgagtggaatggaatggaatggaatggaaaggaattgaatggaatggaatggaatggaatggaatgcaatggaatggaatggaatcaactcgagtgcaatggaatggaatggaatggaatggaatgcaatggaatcaacccgagtggaatgaatggaatggaacgaaatggactggaatggattcaacccaattggaatggaatggaatggaatggaattgtgtggaatggaatggaatggaaaggagtgtaaaggaattgaataaaatcaacccgaatggaatagaatggagtggaacggaacggaattggaatggaagggaatgtaatcgagtggaatgtaaatggaatcaacacgagtggaatggaagggaatggaatggaatggaaaggaatggaatggaatcaacacgaggggaatggaatggaatggaacggaacggaatggaatggaatggaatggaatggaatggaatggaatggaatcaacccgggtggaatggaatggaatggaatggattggaatggaatgcaatggaatggaatggaatcattccaagtggaatggaagtgaatgtaaccgagtggaatggaaaggaatggaatcaacccgagtgcaatggaatagaatggaatggaatggaatggaatggaatggaatggaatggaatcaaccaaaatgcaatggaatggaatggagtggaattgaatggaatggaatggaatggaatgtacccgaatggaatggaatggaatggaatcatatggctggaatggaatggaatggaatggaatagaatggaatggaatcatcccgaatggaatggagaggaatggaatggaatggaatggaatggaatggaatggaatggaatggaatggaatggaatggaatggaatggaatggaatcaacccgagtgcgatggaatggaatggaatggaatggaatggaatggattcaacccgaatggaatggaaaggaatggaatcaacccgagtggaatggcatggaatggaatagaatggaaaagaatggaatggaatggaatggaatggaatggaatggaatggaatggaatcaaaccgagagcaatgctatggaatggaatggaatggaatggaatcaacccgaatggaatggagtggaatggaatcaacccgaatggaatggagtggaatggaatcaacccgagtggaatggcatggaatggaatggaatggaatggaaaggaatggaatggtacggaatagaatgcaatggaacgaaatggaatggaatggattcaacccaattgcaatggaatggaatggaaaggaatcattccgatggaatggaaaggaatggaatcaacccgagtggaatggaagggaacggaatggaatggaaaagaatagaatggaatcaaccagagtggaatggaatggaaaggaatgggatggaatggaatggaatggaatggaatggaatggaattgaatagtatcaacacaaatggaatggaatggtatggagcgaaatggaatggaatggaatggaatagaatggaatcattccgagtggaatggaatggaatggaatggaaaggaattgaatggaatggaatggaatggaatgcaatggaatggaatggaatcaactcgagtgcaatggaatggaatggaatggaatggaatgcaatggaatcaacccgagtggaatggtatggaatggaaaggaatgtaatggaatcaacccgaatggaatggaatgtagtggaatcaacccgagtgcaatggcatggaatggaatggattggaagggaatggtaccgaatagaatggaatggaacgaaatgcactggaatggattcaacccaattggaatggaatggaatggaatggaattgtgtggaatggaatggaatggaaaggagttggaacggaacggaatgtaatggaacggaatggaatggaatggaatggaatggaatcaactcgggtggaatggtatggaatggaatgaattggaatggaatgcaatggaatggaatggaatggaatggattcattccgattggaatggaagggaatgtaattgagtggaatgtaaatggaatcaacacgagtggaatggaagggaatggaatggaatggaaaggaaaggaatggaatcaacacgagaggaatggaatggaatggaacggaacggaatggaatggaatggaatggaatggaatggaatcaacccgggtggaatggaatggaatggaatggattggaatggaatgcaatggaatggaatggaatcattccaagtggaatggaagtgaatgtaaccgagtggaatggaaaggaatggaatcaacccgaaagggaatggaatctaatcgcgtggaatggaatggaatggaactgaataaaactgagtggaatggaatggaatggaatggaatagaatggaatggaatcatcccgaatggaatggagaggaatggaatggaatggaatggaatggaatggaatggaatcaacccgagtgcgatggaatggaatggaatggaatggaatggattcaacccgaatggaatggaaaggaatggaatcaacccgagtggaatggcatggaatggaatagaatggaaaggaatggaatggaatggaatgatatggaatagaatggaatggaccgaaatggaatggaatggaatggaatggaatggaatggaatggaatggaatggaatgcaatggaatggaatggaatggaatgcaatggagtggatacattctgcgtggaatagaagggaatgtattcgagtggaatggaaaggaatggaatcaacccgaaatggaatggaatggaaatgaatggaatggaatggaatggaatggaatggaatggaatggtatggaaaataatagaatggaatcaatcagagtggaatggaatgtaaatgaatggaatggaatggaacggaatggaatggaatggaatgaaatcaactcgagaggaatggaatggaatggaatgaattggaatggagtgaaatggaagcgaatggaagggaatggaatggaagggaatcattccgagtggaatggaagggaattggaatggaggggaatggaatggaatggaaaggaatggaatggaatcaacacgagtggaatggaatggaaacgaatggaatggaatggaatcaacacgagagcaatggaatggaatggaatggaattgaatggaatcaacccgaatggaatggagtggaatgaaatcaacccgagtggaatggcatggaatggaaaggagtggaatgtcaggcggaatggaatggaatggaatggaatggaatggaatggaatggaatggaatggaatcaacccgagtggaatggaatggaatgcaatggaatggaaagtaatggaatggaatcaacccgagtggaatgaatgtaatggaatggaatggaatggaatcaacccgggtagaatggcatggaatggaatagaatgtaatggaatggaatggtacagaatagaaatgaatggaacaaaatggaatagaatgcattcaacccacttggaatggaatggaatggaatggaattgtgcggaatggaatggaatggaatggagtaatcaacccgaatggaatggaatggaacggaatacaatggaatggagtggaaaggaatggtacggaacagaatggaatggatcgaaatgtaatgaaatggattcaacacaattggagtggaatggaatggaatggaattgtgtggaatggaatggaatggaatggagtgtaaaggaattgaatagaatcaaccagaatggaatgcgatggaatggaacggagcggatgggaatggaatggaatagaatggaatggaatggaatggaatggaatggaatggaatggaatggaatcacccgaatggaatggagtggaatggagtggaatggaatggaatggaatggaatggaatcaactcgagtaatggattggaaagaaatggaatggaatggattcaacccaattgaaatggaatggaatggaatggaattatgtgaaatggaatggaatggaatggagggtaaaggaattgaaaagattcaacccgaatggaatggactggaatggaacgtaatggaatggaatggaatggaatggaatggaatggaatggaatggaatcacccgaatggaatggagtggaatggagtggaatggaatggaatggaatggaagggaatcaactcgagttggaaaggagtggaatggaatggaatggaatggaatggaatggaatggaaaggaatggaatggaatcaccccgaatggaatggagtggaatagaatggactggaatggaatggaaaggaatggaatggaatggaatggaatggaaaggaatggaatggaatggaatggaatggaatcaaccggagtgcaacggaatggaatggaatggaatcaacccgaatggaatggagtggaatggaatcaacccgagtggagtggcatggaatggaatggaatggaaaggaaaggaacggtacggattagaatggattggaacgaaatggaattgaatggattcaacccaattgaaatggaatggaatggaatggaattatgtggaatggaatggaatggaatggaggattcaacactaatggaatggactgtaatggaagggaatggaatggaatggaatggaatggaatggaatggaatggaatttaatgaaatcaactcgggtggaatggaatggaatggaatggattggaatggaatgcaatggaatggaatggaatggaatggaatggaatggaatcattccgagtggaatggaagggaatgtaatcgaggggaatggaagggaattgaaattgaatggaatggattggaatggaatggaacggaatggaatggaatggaatggaatcaacccgaatggaaaggagtggaatggaatcaacccgagtggaatggcatggaatggaatggaatggaaaggaatggaatgaagggaaagtattcgagtggaatggaaaggaatggaatcaacccgagtggaatggaaggatatggaatggaatggaaagaaatagaatgcaatcaacccgagtggaatggaatggaatggaatggaatggaatggaatggaacggaatcacctcgagtgcaacggaatggtatggaatggaatggaatggaatggaatggaatggaatcaacccgaatagaatggaatggaatggaatggaatggaatggaatcaaccagagtggaatggcatggaatggaaaggaatggaatggaatggaatggtacggaatggaatggaatggtgcggaatagaatggaatggaacgaaatggaacggaatggattcaacccaattggaatggaatggaatggaatggaattgtgtggaatggaatggaatggaggaatcaacccgaatggaatggaatggaacggaatgcaatggaatggaatggaaaggaatggaatggaatggtatggaatagaatggaatggaacgaaatggaatggaatggattcaaaccaattggaatggaatggaatggaatggaatggaattgtgtggaatggaatggaatggagtgtaaaggaattgaatagaatcaacccgaatggaatggattggaacggaatcaagccgagtgcgatggaatggaatggaatggaatggaatggattcatcccgaatggaatggaaaggaatggaatcaacccgagtggaatggcatggaatggaatagaatggaaaggaatggaatggaatggaatgatatggaatagaatggaatggaccgaaatggaatggaatggaatggaatgcaatggagtggattcattctgagtggaatagaagggaatgtattc

SEQ ID NO: 474422 - DNA, 5019 bp, Homo sapiens
tggaatcaacccgaatggaatggcatggaatgctaaggaaatgaatggaatggaatggtacggaatagaatggaatggaacgaaatggaatgaaatggattcaacccaattggagtggaatggaatggaatggaagtgtgtggaacggaataatcaacccgaatggaatggaatggaacggaatacaatggaatggagtggaaaggaatggtacggaatagaatggaatggatcgaaatgtaatgaaatcgactcaacccaattggagtggaatggaatggaatggaattgtgtggaatggaatggaatggaatggactaatggaatggaatggaatggaatggaatggaatggaatggaatggaatcacccgaatggaatggagtggaatggaatggaatggaatggaatggaatggaatggaatcaactcgagtggaatggaatggaatggaatggattcaacattaatggagtggaatggcatggaatggaatggaatggaatgcaatagaatggaatggaatggaatggtatggaatagaatggaatggaacgaaatggaatggaatggaatggaatggaatggaatggactgtacccgagtggaatggaataatcaacccgaatggaatggagtggaatggaatcaacccgagtggagtggcatggaatggaatggaatggaaaggaaaggaacggtacggattagaatggattggaaaaaaatggaatggaatggattcaacccagttgaaatggaatggaatcgaatggaattatgtggaatggaatggaatggaatggaatggagggtaaaggaattgaataaattcaaccggaatggaatggaatggaatggaatggaatggaatggaatggaatggaatggaatgaaatcaaccagggtggaatggaatggaatggaatggattggaatggaatgcaatggaatggaagggaatggaatggaatggaatcattccgagtggaatggaagggaatgtaatcgaggggaatggaagggaacaatagaatggaatggaatcaaatcgtgtggaacggaatggaatggaactgaatcaaacagagtaaaattgaatggaatggattggaatggaatggaatggaactggatcaaacagagtaaaattgaatggaatggattggaatggaatggaatggaatggaatggaatggaatggaatcaacccgaatggaatggagtggaatggaatcaacccgagtggaatggcatggaatggaatggaatggaatggaaaggaatggaatgtggaatggaaaggaatggtatcaacccgagtggaatggaatggtatggaatggaatggaaagaaatagaatgcaatcaacccgaatggaatggaatggaatggaatggaacggaatcaactcgagtgcaacggaatggtatggaatggaatggaatggaatggaatggaatggaatggaatggaatcaacccgaatagaaaggaatggaatggaatggaatggaatcaaccagagtggaatggcatggaatggaaaggaatggaatggaatggaatggtacggaatagaatggaatggaacgaaatggaaaggaatggattcaacccaattggaatggaatggaacggaatggaattatgtggaatggaatggaatgcaggtggaatggaaaggaatggaatcaacccgaatggaatggaagggaatagaatggtatggaaaagaatagaatggaatcaaacagagtggaatggaatggaaatgaatggaatggaatggaatggaatggaatggaatggaatggaacgtggaatggaagggaatgtaatcgagtggaatggaaatggaatcaacacgagtggaatggaagggaatggaatggaatcaacccgagagcaatggaatggaatggaatggaatggaatggaatcaacccgaatggaatggagtggaatggaatcaacccgagtggaatggcatggaatggaaaggagtggaatggtacggaatagaatggaatggaacgaaatgaaatggaatggattcaaccgaattggaatggtatggtatggaatggaatggaattgtgtggaatgcaatagaatggaatggagtaatcaacccgaatggaatggaatggaacggaatacaatggaatggagtggaaaggaatggtacggaatagaatggaatggatcgaaatgtaatgaaatggattcaacccagttggagtggaatggaatggaatggaattgtgtggaatggaatggaatggaatggagtgtaaaggaattgaatagaatcaaccagaatggaatgcgatggaatggaacggagcggatgggaatagaattgaatggaatggaatggaatcacccgaatggaatggagtggaatggaatggaatggaatggaatggaatggaatggaatggaatggaatcaactcgaagtggaatggagtggaatggaatggaatggaatggaatggaatggaatggaatcaccccgaatggaatggagtggaatagaatggaatggaatggaatggaaaggaatggaatggaatggaatggaatggaatcaaccggagtgcaacggaatggaatggaatggaatcaaccctaatggaatggagtggaatggaatcaaccccagtggaatggaatggaatggaatggaatggaaaggaaaggaacggtacggaatagaatggattggaacgaaatggaatggaatggattcaacccaattgaaatggaatggaatggaatggaattatgtggaatggaatggaaaggaatggaggaacggaatggaatggaatggaatcaacccgagtggaatggcagggaatggaaaggaatggaatggaatgatacggaatagaatgggatggaaagaaatggaatgcaatggaatggaatggaatggaatggaatggaatggaatggaatggaatggagtggaatcattccgagtggaatggaagggaatgaaatcgagtgtaatggaaaggaatggaatcaaacctagtgcaatggaatggaatggaatggaatggaatggaatctatcagaatgaaatggaatggaatggaatggaatggaacggaatggcatcataccgaatggagtggagcagaatggaatggaatggaatggaatggaatggaatggaatggtatggaatggaatggaatggaatcaacgcgagtgcaatggaatggaatggaatggaatggaatggaatggaatggaatggattgaacccgaatggaatggaaaggaatggaatcaaaccgattgaaatggcatggaatggaatagaatggaaaaagggaatgtattcgagtggaatggaaaggaatggaatcaacccgagtggaatggaagggaacggaaaggaatggaaaagaatagaatggaatcaagcagagtggagtggaatggaaaggaatggaatggaatggaatggaatggaatggaatggaatggaatcaactagagtggaatggaatggaatggaatggattggaatggaaagcaatggaagagaattgaagggaatggaatggaatggaatggaatggaatcaacccgaagcaattgtatggaatggaatggaatggaatcaacccgagtggaatggagtggaatggaatcttcccgagtggaatggcatggaatggaatgaaatggataggaatggaatggtacggaatagaatggaatggaacgaaatggaatggaatgcattcaacccaattggaatggaatggaatggaatggaatcactccgagtggaacagaattgaatgtattcgagtggaatggaaaggaatggaatcaacccgagtggaatggaagggaatggaatggaatggaaaccaataaaatggaatcaacacgagtggaatggaatggaaaggagttgaattgaatagaatggaatggaatggaatggaatcaactcgattgcaatggaaggtaatggaatgaaattgaatggaattaacgcgaatagaatggaatggaatggaatggaacggtatggaatggaatcaacccgagtggaatggcatggaatggaaacgaatggaatggaatggaatggtatggaatagagtggaatggaacgaaaaggaacggaatggattcaacccaattggaatggaatggaaagcaatggaattgtgtgcaaaggaatggaatggaatgcagtgtaaagtaattgaatagaatcaacccgaatggaatggaatggaaaggaatgcaatgtaatggaatggaatggaatggtacggaatagaatggaatggaacgaaatggaatggaattgattcaacccaattggaacggaatggaatggaattttgtggaatggaatggagtgtaaagaattgaatagaatcaacccgaatggaatggaatggaattgaatggaatggaatgcaatggaatggaatggaatggaatcaactcgagaggaatggaatggtatggaatggaatggaacggaatcaaatgaagtgcaacggaatggaatggaatggaatggaatggaaacaaccagaatagaatggaattgaatgaaatcaacccgagtggaatggcatggaatggaaaggaaaggaatggaatggaatggaacggaatgcagtggaatggaatggaatggaatggaatggaatggaatggaatgatacggaacagaatggaatggaatgaaatggaatggaatggattcaacccaaatggaatggaatggaatgtaatggaatggaattgtgtggaatggagtggaatggaatggagtgtaaacaattgaatagaatcaacccgaatggaatggaatagaatgtaatgtaatggaatggaatggaaaggaatgtaatcgaatggaatgaaatggaatcaacagcagtggaatggaatggaatggaaagcaatgcaatgcaatgcaatggaatgagggtggaatccattccagtgcaatgcaaggcaa

SEQ ID NO: 474423 - DNA, 1042 bp, Homo sapiens
gtgtgcggcaacatggggagtctgcaatgtggacggtttggaaactggcaaggacagcaaaggcaccacgccggtcttccacccttccctgcatggttcagggtgcccgcagagctccgggagcaaacagtcaactactgggggagggagacgtccgaaggtgtcgggagtgccaccgtggggagcccaggccagaacttcactgacggacatgggaagagagaggacggcgggctcccgtgcatctcagcaggcctctgcactgtggcaggggcaggaggagacctggaatggaaaggaatggaatggaatcaacgcacatggaatggaatggaatgaaatggaatggaatggactggactggaatggaatggaatggaatggaatggaatggaatggaatggattggaatgcaagggaatggaatggaatgaaaacgactcatcccgatggaatggaatggaatggaatggaatggaatgaaaaggaatggcatcgattggaatggaatggaatgcaatggagtggaatgggatggaatcaacacaagtggaatggaattgaatggaatggaatggtatggaatggattggaatggaatggaaagcaatcaacccgagtggaatggaatggaatggaatggaatggaatggaatggaatggaatgaaatggaatggaatggaaaggaatgtaatggaatggaatggagtggaatgggatggaatcaacccgaatggaaggaaatggaatggaatagaatggaatgcaatggaatcaacgcgagtggaatggaatggaaaggaatggaatggaatggaatggaatggaatggaaaggaatggaaaggaatggaaaggaatcaacccgagtggaatggaatggaatggaacagaatggaatggaatggaatgggaaggactggaaaggaaaggaatcaacccgagtggaatggaatggaatggaatagaatggaatggaatggaatggaagggaatataatggaattgaacggaatggaatggaatgaaatggaatcaaccc

SEQ ID NO: 474424 - DNA, 648 bp, Homo sapiens
ggtcctcttatgccgtgttctaggatttaaagtctagcaaaccagtgttctgaggttaaatttattgaatgcacactatcagtgattttgctatgttttctccagttctctctcagttggttagaatttgttgcctagacatttcctccaaagggctcatgagaaaaatattccctgatttatattttcaacactgtttttctatagcctctattcagaaagatagcttggctggctataaaattcttgctgacatgtttccccttgaggatcttgtagggcaatgtcatcagaaatattcagaaaatcaaggaactctttcgttgagtgaagagaacagaaattttaagactgagcgaatagaagaagaagaggaggaggagggattggaggaggaaaaggaggagaaagtggaggaggaggaggaagggagaacttctcctgggctctctgccgatatctgccagggaaaacactgataaacagaaagggaaagaaaaagctaagttcaagccaaatgtttctgtgctcctcttaagatacaatggagataacattgaaatacaaaatgctgtctatgtgttccttttgaaaagagccttccttttaaggtcagttaatactgttcatgcagatttccatagcagt

SEQ ID NO: 474425 - DNA, 1359 bp, Homo sapiens
ctcactgatcagtgggtctgaggtccctgtattgagtctccttgagtagccttgggattcctcggtctacacacagcaatccataatcaaaccaccccagccggaacttctgcctgtacagctgctgtcacggagcagacttgaatctcacccatggagaccggcaggcaaacaggcgtgtctgctgagatgctcgccatgccccgaggtctgaagggcagcaagaaggatggaatccctgaggacctagatgggaacttggaagaacccagggatcaggaaggtgagctcaggagtgaggatgtcatggacctcacagaaggtgacagtgaggcctcagcctcagctcctcctgcagccaaaagacggaaaacacatacgaaacgcaagaaggagaggaagcccaccgtggatgcagaggaggctcagaggatgacaaccctgctgtctgccatgtctgaggagcagctgtcccgctacgaagtgtgtcgccggtcagctttcccaagagcacgcattgcgggtctgatgcggtctatcactggcagttcggtgtctgagaacgcggccattgccatggctggaatagccaaggtctttgttggagaggtggtggaagaggccctggacatgtgtgagatgtggggagagacgcccccgctgcagcccaagcatttaagggaggctgttcacaggttaaagcccaagggcctcttccccaacagcaactacaaaagagtcatgcaaacaggtgtgtctgctgagatgttcgccataccccgaggtctgaagggctgcaacgaggatggaatccctgaggccctagatgggaacttggaagaacccagggctcaggaatgtgagctcaggagtgaggatgtcatggacctcacagtagttgacaatgaggcctcagcctcagctcctcctgcagccaaaagacagaaaacagataccaaaggccagaaggagaggaagcccagtgtggatgcagaggaggctcagaggatgacaaccctgctgtctgccatgtctgaggagcagctgtcccgctatgaagtgtgtcgccagttagctttcccaaaagcacttgttgcacgtctgatgtggtctatcactgggagatcggtgcctgagaacatggccattgccatggctggaatagccaaggtctttgttggagaggtggtggaagaggccctggacatgtgtgagatgtggggagaaatgcccccattgcagcccatggatttaagggaggctgtttgcaggttaaagcccaagggcctcttccccaacaactataaaaaagtcatgttctaggcccaaggccagagggaagggtctgtttttgcagga

SEQ ID NO: 474426 - DNA, 553 bp, Homo sapiens
gtctgctgagatgttcgccatgccccaaggtctgaagggcagcaacaaggatggaatccctgaggacctagatgggaacttggaagaacccagggatcaggaaagtgagctcagaagtcaggatgtcatggacctcacagaagccaaaagacagaaaacagataccaaggggaagaaggagaggaagcccaccgtggatgcagaggaggctcagatgacaaccctgctgtatgccatgtctgaggagcagctatcccgctacgaagtgtgtcgccggtcagctttcccaaaagcacgcattgcagctctgatgcagtctatcactggcagatcggtgtctgagaacaccgccattgccatggctggaatagctaaggtcttggttggagaggtggtggaagaggccctggacgtgtgcgagatgtggggagaaacgcccccgctgcagcccaagcatttaagggaggccgttcgcaggttaaagcccaagggcctcttccccaacagcaactataaaaaaatcatgttctaagcccaaggccagagggaaggg

SEQ ID NO: 474427 - DNA, 1659 bp, Homo sapiens
ccttggttcagagtaaggccaattacttaatgcattttctttgtagcattggccttaacaaattgtcacaatttggggaaggtgttctcaatagattttcataatcatgttggctcagaggttaggagttttgcctggtggagatggcagtggtaatggtggtagtaataatcttggaggtaatgatgacggtggcagaggtgatggtagcaatggtgatggtgtcagtaatgatggtagaggtgatgatggtggtggtcgttgtgataatggcattgagggaatggtggtgatggtggtggtgataatggcaatgggggaggtcatgataatagtgttggtggtagtggtggaggtggtagtgatggcagaagggatggtgatggtaataatattggtggtattagtaatgatagtagaggtgatgatggtggtggtcatgatggtaatagtagaggcaacagtgatgttgttaatgatgatggtggtagtggtggtggtgatggtttggttgtgtggttaacgtggtggtgatggtgttggaggtgctaatggtggtggtgatgatggtggtggtggtagaagcgatgatgacagttggaggacagtggacatggtgatgatcataatgctgacagtgatggtgataatggccgtggtctgtgtaacaatataatctttgcattcaaaatattttttcttaaggaataggacacctctttttaaagaaagcactttgctcctatttcaaatcagacctctgtaaaactgtttatctgaattcctgcccaaatttgtgtatcacaaaatagaggttgcaaaatgaaagttccatttgtgagggagactgcctgctggtgtccaaagcactttcttgactttgggacgaggtgtcctgaccatcctctcttctaaaggccaaatcttgcttactctagaccccagctccagctcacctccacagctgtacactgtggtgactcccctcctcaaaccttactcatttgccttagctcatatattgcgttaattattatttattttagcttgtgtatatgtttgacctccccaaccagattgtaagctccttgaagacagggtgcatgccttgtccttcttaaatcccataccctttgaagaaatatatatattgaacaaatgaatgaatggattgatgagtaaatctatggtgctattattaactccagaaagtacacacagcataatggtttacacagtaatcataacattaatttgagcataaagaccttctaatgacttgcaagaaagagggaatttagttactgctactactactacaatagctagcatttactgctactactgctacaatacctagcatttatggagctctgcaccaggctctgtgctcagcactttacacacattatcttcattaattttcacaacaatcctgtgaagtgggtactatttccccattttacagatggaaaacctaggatcagagattttgaataatttgtattatttggttaacgatactcactttctattcagacagacatgagttcaaacaacaactctggcgtttgccagttgcatggcttttatgatatcaattttggtcctggacctcagtttcttcatctaacatgtggggaaatatacttaactgtc

SEQ ID NO: 474428 - DNA, 741 bp, Homo sapiens
gtggatttctactgcttgtgtcatggggcatttgttcatttgcagagaagatatatccttgaccagtgccttgcaaaatagatttgtgaaagcagcacctgcatcactggagagtcctgtaattgctcttctctgtatgtcagatttaacagtgggaacctcagtcactcagctccaaaatttaaatacaatgggaacaactggatcccaaggtggaaggggccaagtggcagcactcagccatcaaaggcaaggtgggtgtagcgacctgggtccccggactcatcctgtggtcatttccccagtgccagaatgcataattggcatagcatgcttaagcagctggcagaggccccacattggctccctgactgctaagaagacagatggatcttggagaatgacagtggattattataagcttaacccagtggtgacttcaatttcagcttctgtatcagatgtggtttaattgcttgagcaaattaatacatctcctggtactggtatgcagccactgacttggcaaatgcctatttctccattcccatccataaggcctgccagaaacagttgtctttcagctggcaaggccaggaatatatgtttactgtcttacctcaggggtatatcaactctccagctttgtgtcataatcttattcggagagaccttgattgctttttgcttctgcaagatgtcacactggtccattacattgatgacattatgctgattgga

SEQ ID NO: 474429 - DNA, 745 bp, Homo sapiens
tgccagaggaggcagagtggtttatagtcctggaccttaaggatgtctttttctgcattcctgtacatcctgactctcaattcttgtttgcctttggagatccttctaacccaatggttaaaattatccaaaggcaccagggccctcagcgaggaatgtatccatcctatactggcttatcctgatcccaaaaccctgaagcaattaagaggtttccatggcataacaagcttctgccaaatacggattcccaggagattattattggctgtacagaaacctaaagaggtggcagtcttacactgctggggttatcagaaaggaaaggaaaaggaaacagaagaaaaccaccgagcagatattgaacccaaaagagccacaagaatcgaagctgtaaaactacaaatcgttcttgaaatggagccccagatgcagtccatgactaagatctactgcggacccctggactggcctgctagcccatgctccgatgttgatgacatcgaaggcatccctcctgacaaaatctcaactgcatgacccctactacaccccacttcagcaggaggcagttagagcggttttgcctttcaccagctttgatttatacttgattttaaaacacattgagtcttattctcccctcactagcatgagagagtagctgccataaatccttgatactgccagcttacacaaaggaaaagattgttctgaattgtgcaacatatataataccagctca

SEQ ID NO: 474430 - DNA, 1753 bp, Homo sapiens
cagactaatgcagtatattggtaccggtagattggggcactgctgtaaccataccccaaaatggggaagagactctggaactcagtaacaggcagaggttggaacagtttggagggcttagaagaaggcagaaaaatgtgcaaaagtttggaacttcctagagacttgttgaatggctttgaccaaaatgctcataattatatggacaatgaaatccagacagggcccctctactgtgtgcagcctaaggacttggtgctctgtctccctgccactctagccacggttaaaaggggccaaggtgcaactcaggctgttgctttggagggtgcaggcacaagccttggcagcttcttaagtcatgttgagtctgtgggtgcacagaagtcaagaattgaggtttgggaacctccatctagatttcagaggatgtatggaaatgcctcgatgtccaggcaaaagtttgctgcaggggaaggccctcatagcgaacctctgaatggtagatccatcagcaatttgtaccatgcccagaaaagccacagaccctcaaagccagcccacgaaaacagccaggagggaggctgtaccctgcaaagccacaggattggagctgcccaacaccatggaaacccacttcttgcactggcatgacctggattttcttagagacttaaaaaacggatttgagagctttccttttccaatataagtatctagtgctatacatttcccttgtagtactgttttagatgcagcgtatcactctttatatgttgtattttcattttcacttagttctattaatttttaaaattttctttgagattattcaatgacacatgcattatttagatatgtgttgtttaatttccaaaagtttggagatttctcctttgaattcattcttgtcagaatatatactctgtaatacagcaattcttctaaatatgtcaagatttgttttaaggacccttaccttaatttcagttattacatttttcagttctataatttttacttaccttttttaataatgtctatttgctgatatattttctttttagaacattttttcaagataatttttaactgcttgttagagtatttttataatggttgttttaaaactctttctagataatctcaatatctgatttaatttgatgttgacatttgttgtctcttctcattcatcgtgtgattttcctggttcttgctatgaggactgattttaaactgcatcctgtaaaactctgaatcttatttaatcatttattttcagcagaaaagaaaaatagataaaaattattaaagatgaagaagattcaaacaaaactctgagtcagtttgctatttataaatcaatacttccaaaatctgcaattcaagttcacatgtaatagttaaaacataggtcatatactggttcataaaacatgtaattacttgaaaatatttaaataatacaaattttttcaatattaaatgtcaatgacaaagcaatatttactaaatcaccaaacatttggaaattaagcaacatatcatttcaaaataacctataggtcaaaaaagacattacaaagaaaatggtgaagtatttcaaactgaatgataatgaagagacaacatttcaaactttgtggaatacaattaaaactgtgctaaaacggaattttctaggtttaaagtttatatcagggaaaaacggttttaaaacagttaccaaaaacttaaaatttaaaagttg

SEQ ID NO: 474431 - DNA, 959 bp, Homo sapiens
aggaaaaccagagacctttgttcacttgtttatctgctgaccttccctccactactctggtcctcttacaaccacatgagaagttgcggaataactcaacatttaccattttatggtcattcagcatttgaagcaattggaaaagtgaagaagctcagtctgatcaactccagcttcctgaatcctggtgaaaccattatatctgagaagtatactcagcaaatccatgagatacaccaaaaactacaatgcctgcagctgcctttggtcaacagaaaggtcccaattcttctccacgacaatgcccaaccacatgttgcacaaccaacacttcaaatgtttgtcaaagatcagatagttgtaggacttgagatcaaaatcagcttctcacaaagagactccagagtcgggaagagtagaaaaacaggccataagtatcaatcagaatctggcacgtggaaggcaaaacgcatgcatgagaggactctcccagagcttctacatgacaactcttcatttacctgaaggatataaaagctaaaataggaaatcagccaaatttgtgttcaagtatacaaataaattttgctctttagccttctgttgaattttttcccctcaaggcttaatggacttctctgaagtcttttaaaactgttttggaaatgtaagcccgttatactgcaacatatcacatttcttagcaagaaatgttgaacaaaataataacatttaagtctgtaggtttgagtttcaattaagctaagcttcaattactgtacttttaaaaaatagaatatattacctgggagaactagatttttcatttatttctcccttttcagaattttcatactattcttatctatttctattcccttagttttcttgtgatttctgtttttaattagaaattgtgtttcaaatttgattaaatattaagcctggggtgtttttac

SEQ ID NO: 474432 - DNA, 1518 bp, Homo sapiens
caggtcctaaagaccttgctgataaaacaggttgcagtaaaggagccagccaaattccaccaaaaccaacatggtgatgagagatacctccagtcgtcctcactgctacactcccaccggcaccatcacagtttacaaatgccatggcaatgtcaggaagccaaaacccaccaaaaccaaaatggtgacgagagtgacttctggtcgtcctcactgctacactcccactggcgccatgacagtttacaaatgccatggcaacatcaggaagcaagctgatgaagactcaaagttacctgacctctggctgaatggaaggttctcagtgtcatggaacattgatagtcaagagaagaatgctccagagctgatacctaagaaggctgctggtggtggagagggtgcctataatgggaaggccggagctactaccagagtagaacatctgaaacagagaaacttctgcattgcaaattaggttgggcttagtttcacctgtgatttatagctaggttcatttcttcctgtttaacttggtttttgttatttgtatctgtttaacatggtaataatggatcattttcattaagatggtatcatgccctgaaaatgatgccttaactggagggatgaagaattccgcaatgacgtctgtcattctttaattaattagagtgcacctaataaaacccagaagaatgaatatcctgtctgaacacaattacattatgtctgcataagggcctgcatttgactgttctgggcttcctgtttctccacatgttgcaaaaatatggacaacttgagcatatcacatagctatcgcatattgggttatgggagccaaacttaaagatgggttctggaatttaattttgcaagtattcagttgaaagaaggatttttgctgtttgttgaggttaaaatatcttagtgaaatctgaagtaaactaattagttgtaggtcagggaattattttagtatttcacaacatgattgtttttactaagtccaaaatttgcctaaaatttagtgattttacgttcacattttttaaaatagtcctagtttcatatttatttactttccattcctagggaggttcatgttagtcacgtcatagtgaccaaatttttggtttagaaattaggaacatactaaaaatctggcaaaagagaatgtgtgttttacttcatggcatcatttttattttgtttagtttttacttgccaaagctgccaaagtggaacatacaggagttgacataaatactgcaaactgacaggcaatccaaatatttctttctgtggtacaggcttttttgttaatagtaaatttgggaagaatctttaaatcagcttctaagaaattggttgagccaaatgtacgggtagcattcagtacaggttgatttctgctgctacttttactggcaaacaatggccaactgccaagccatggtcaacccacacagctgttttcaatgattcatttcccttgatttcccagctgaccca

SEQ ID NO: 474433 - DNA, 2852 bp, Homo sapiens
gaattctatgtgagggacacacattcaaaacccagcagcagtattctggaatcctatgtaacggacagatattcagaccctagcagcagtgttctggaatcctatgtgagggacaaacattcagaccctcgtagcagtgttcaggaatcctatgtgagaggcaaacattcagaccacagcagcagtgttctggaatcctatgtgagggagaaaaattcagaccacagcaggagtgctctgtaatcctatgtgagggacaaacattcagaacctcatagcagtgtgctggaatgttatgtgagggacagacatttagaccctcgcagcagtgttctggaatcccatgtgagggacaaacattcagacactcgcagcagtgttctggaattctatgtgagggacagacattcaaaacccagcagcagtattctggaatcctatgtaacggacagatattcagaccctagcagcagtgttctggaatcctatgtgagggacaaactttcagaccctcatagcagtgttctggaatcctatgtgaggtataaacattcagacaccagcaaaagtgttctggaatcctatgtgagggacattcagaccatggcagcagtgttctggaatcctatgtgagggacaaactttcagaccacagcaggagagatctggaatcctatgtgagggacaaactttcagaccacagcaggagtgttcttgaatcctatttgaaggacaaacattcagaccccaggagcagtgttctgaaatcctatgttaagggcaaacattcagaccccaatgtgaatgttctagaatcctatgtgagggacaaacattcagaccatagcaggagtgttctggaatcctatgtgagggacaaacattcagacccttgtagcagtgttctggaatcctatgtgattaaaaaacattaagaccacagcagagtgctctggaatcctgtgtgagggacaaacattcaaaccccagcaggagtgttctggaatcctatgtgagggacattcagaccctcgtagcagtgttctggaatcccatgtgagggacaaatattcagaccacagcaggagtgctctggaatcctatgtgaggacattcagaaccgcatagcagtgtgctggaatcttatgtgagggacagacatttaggccctcgaagcagtgttctggaatcctatgtgagggacaaacattcagaccccaacagcagtgttctggaatcctatgtgagggacaaacattcagaccctcgtagccgtgttctggaatcttatctgagggacaaacactcagaacccagcaacagtgttctggaatcctatgtgagggaaaaacattcagaccctcgtagcagtgttctggattcctatgtgagggacactcagtacccagcagtagtgttctggaatgctatgtgggggacagatattcagaccacagtaggagtgttctagagtcctatgtgagggttagtcagaccacagcaggagtgttctggaatcccatgtgaggaacatacattaagatcacagtaggagtgttctggaatcatatgtgaaggacaaacgttcagaccctcataacagtgttctggaatcccatgtgagggacaaacattcacatcccagcagcagtgttttggaatcctgtgtgagggaaaatcattcataccatcgtagtagtgttctgaaatcttacgtgagggagaaacactcagaatccagcagcagtgttctcaaatcctatctgagggacaaacattcatacagtcatagcattgttctggaatcctatgtgagggacaaacactcagaacccaacagcagtgttctggaatcctatgtgagggcaaatattcagaacacagcaggagtgttctgaaatcctatgtgagggacaaacattcacaccacagcaggagtgttatggaatcctatgtgagggataaacattcagaccacaacaggcgtgttctggtgtcctatgtgagggacaaatactcagaacccagcagcagtgttctggaatcctatgtgagggacatacattcagaccccagcagcagtgttctggaatcctatgtgagggacaaacattcagaccccagcagcagtgttcttgagtactacatggggtacaaacattcagaccacagcaggagagttctggaatcctatgtgagggacaagcattcagatgctcctagcagtgctctggaatcctatgtgagggacaaacattcagaccccagcagcagtgttcttgagtactacatggggtacaaacattcagaccacagcaggagagttctggaatcctatgtgagggacaagcattcagacactcctagcagtgctctggaatcctttgtgagaaataaacattcagacaccagcagcagtgttctggaatactatttgaagggcaaacattcggaccctcatagcagttttctggaatcctatgtgaggaacaaatactcagaacccagcaacagtattctggaatcctgtgtgagggacaaacattcagaccacagtaggagtgttctggaatcctgtgtgagggacaaactttcagaccacagtaggagtgttctggaatcctatgtgagggacaaacattcaaaccctcgtaacagtgttctggaatcccatgagagggacaaacgttcagaccctcatagcagtcttctggaatcctatgtgagggacagacactcagaacacagcagcattgttctggaatcctatgtgagggagaaattcagaccacaggaggggagttctggaatcctatgtgagggaaaaacattcagacctcagtaggagtgtt

SEQ ID NO: 474434 - DNA, 799 bp, Homo sapiens
gggtgaagtgactgaagcacagaccctttacgggggtcgggctgggggatggtcaggtctttttcatcccatgaggccacatttcagactatcacatggggagaaaccttggacaatacgccgctttcaagggcagaggttcctgcggctttccacagtgtatcgtgcccctggtccactgtcctccctgcgtggtgcacgatggaggctcagactctgtcctcaaggctggcaagaagacaggctctaaggacttcctcatcatcatgcaagaagaagagaaaacaaccatcaccgccatcgtcttcggaacagttttatctttcaaaatggaaattgcacccattcaccaagctctccattcctctctctcgcctacccctgggggccacctttctagtttgcaactctatgagtttaactactctagacacttgatagataagtggaatcataaccgtccaccttcattcttctgcatgtggaaatcaagtttctccaacaccaattcttgaaaaggctgtttttccaccaatgagctttcttagcactcatgttaaaaatcgtttcaacatataggctgaataatacttcattgggtgtgtataccacagtttcttaattgaaaaaatttctaaagagcaaatatttttaaagtctcggaatatgaaacttcagggatactgtgcctattttattcttttctatttcccatcttatgtatatgcaagtgtataacaaagcagcaatcaatgtgtgtataaatctataacttcaacaaatgtaaaatgtaaatgct

SEQ ID NO: 474435 - DNA, 804 bp, Homo sapiens
taatatcgcgctagcatattaccaataacatcacagggtgtccacccatggtgtacacgcactgtgatgttagggataatatttcgctgggatatgatgaataataccacagggtgtacagaaactgtgatattagaggtgtccaagtcacacagagccacggaatctcacaggtgtctgagaattcctcctcctgggactctcagaggatccagaactgcagccggtcctcgctttgctgtccctgtccctgtccatgtatatgctgacatcggtttcaccttggccatggttcccaagatgattgtgaacatgcagtcgcatagcagagtcatctcttatgagggctgcctgacacggatgtctttctttgtcctttttgcatgtatggaagacatgctcctgactgtgatggcctatgactgctttgtagccatctgtcgccctctgcactacccagtcatcgtgaatcctcacctctgtgtcttcttcgtcttggtgtcctttttccttagcccgttggattcccagctgcacagttggattgtgttactattcaccatcatcaagaatggatccttttgtcttactataaaattgtcccctccattctaaggatgtcatcgtcagatgggaagtataaaggcttctccacctgtggctcttacctggcagttgtttgctgatttgatggaacaggcattggcatgtacctgacttcagctgtgtcaccaccccccaggaatggtgtggtggcgtcagtgatgtatgctgtggtcacccccatgctgaaccttttcatct

SEQ ID NO: 474436 - DNA, 2109 bp, Homo sapiens
ccgcctcctgcaggcgaggctcacatccagcactgtcccttacagtcaccatgcccctggcgacctcagccataaagggagacagacccatcatctggagaacagggtaccaaacagcccacaggatggctgtgatgcacccacaaatcccctcagagatgggcaaactgagactggctggaggtgggccagaagctgtgaagccagggcaggggctaaggaagtacctgtcattgggcatggggcccccaaccctgcccagtctcaccttcatgtgcaggctcgagcccaggtacacggtgaagatggccacagcctgccaccagtgtgctgctatgaagagacaaggatcccctggggttgaccggaggagatgggatatggagctgggcagaggggatgccaggaccagacagggcacaacatgggtccaagatacccaggttggactctgcccagaattggctatctttgggaaaaacggccaagagactctggtgcagtatgaggctccagcccctgctacagacagagacaccgagccagcctatgccctgccagcagcaggcatgacctctgccactccacacccccaaggatgatgttcaaaactgttcacagctttggcccatcagaacagacactgacatgggtgcctcgcaggactgtgcccatgtgtgctagctgtgtgtcactgcatgtgcccatctgtgggcagggagcatcctggagctgaacatgggcccacccgctgccttctgcaaacagggccctgttccccagcagcccagacctggggcctggactctggtactgagcagaatgggttggggctgcaggcctgctcctctctatacaaaggcccatgtctgtatctatgccatggatgtacaacgggccacttgctcctaccacatgctccatgaggcagagaccaaaacatctgctccaagtgtcatgacaattatgccagggtaagccctgtcccctggtatgaaaagggagaatccctgatgtgtttttcaaactgtccctaaggggtgtccacagagccccacacctgccccgtgtagccacgagatttcacactgacactccagtgttgatggggccctgtgcccgccctggggtattaatggaatgtccatggcgtggaaaccccatacctctctccagggtgtccatgccttacccatctgtccccaatgtgtccatgagacttcccttccacccccagagtgtccacaggaagccccacctgcctctgccatgtccacaggaccctatgtgaccatgggaccccatatctgtccctgggatgtctatgtctagccaaccacccacagatagccataaagccccctgccccgcccccccccgctcccccccccccccagtgcacacagctatactcactgctgagtccagtcttgttcagggagctgcccacaacccaaagggcggctgccacatagaggatccagctgtgttgcaggacccgaggcacaggggcccagaaaaagaggatgaaggtgagcagcaggtgcacccctgctccagccaccaggggcacagggcgtggcagccacaggcccagcaggcccaggagtgaggtggctgaggcgcccaggctgtaaggcacgaggaggtaagccagccactccagccccaccgagcacacaccatagccctgcggggggacaaggggtgagtgttgaagtccggaacagcccagaccccagtctcagagccctccccgcagcgcggggagtgcctcacccccctgcgatgggggtcctaagagccagggggggaagaggggttggctcttactccccgcatcatggggggttcctcacccccctgcgatgggggtcctaagagccaggggggaagaggggctggctcttacaccccgcatcgcggggggcgcctcacccccctgctatgtgtgtctcttaatccgatcaagtagatgcctaaaattaaccatcagaatatttatgcctgattcatgtctgaaatttcaggatgaaagctatgaaatctctatttgtgtttgtatatctgttaaagtatgttatgtatatgtgatatattcttaactcc

SEQ ID NO: 474437 - DNA, 1466 bp, Homo sapiens
cagctggacggctccccaggcagagcctgccatggactccatgcacacagaggatgcacaccttgaggctggactatgaggagaacattcctgaagaggtgcatgaagcctggtcctgccctcactgggaacccccttccctctgggtaccagacagaattctatgcactttcctggaggctccatgctggtctgttcatttggaagtttgaggctgtccatgaggaagtaacaaaagagatatctcagagcaggttgtggggcacaggctgagcccttgcctagtccctccctagtccctttgcagagccagggctggaacaaggacctgtggataatgagggaactgctctgcaataaccggcctgagcagctgcttcaagaaacagccacaatcaaggcacctatagcccctgctgacccgtggagccaggaggtgatttacaacttctgcaaggcagtcagctccgtcagctgtatgcccttcaacattcacttcaactcaaacatcccaccagaaagcagtggggactggcgaatgcagcagccctgcaaagtggaacagagcatcctgggctccatacctggtccttgccacacagccctttctacagagaatagctctggggcgtttggggatccctatggccccgggtggcttcctgtcccccgctgcctatgctgcttcccttgcctgctgtcagagcccaacatggaggaggaggttgccgtcctgggagcctgagggagctcttcccttgcctgctggcagagcccaacgtggaggaggaggttgccgccctgggagcctgagggagctcttcccttgcctgctggcagagcccaacatggaggaggaagttgccgccctgagagcctgagggagctgtgtctgactggggcttctgcctggggttttgcaaagagctacttatgaatatagtctctccagattccttgtttcaaaggaagtgagcatgagctagcaagtgtagcaaccccacagctgataaacaactttgtcttggttttaaaccatcacatcttcatttcacattggaataaagtaagtgaaacctgctaccccagccttgcccgtgtgttctgtaacccagtctcctttggttgtgagggctgttgtcagaaatgttataagaaaagattatgcataaatgaaatcaaatgtaaaattatgcttataatgtcacttgagtgaaagtgaaaacggttcacatggctaacaccacttcttaagatacgggcaccatgtaaagctgagaatggattgggtttagttactattgtgcctcctcctcacccgagaggcccatttttcctggttgattcattaagtgtattagtgctgtcagtcgcctttggacaactcaaatgacaagtggctgttgtttcataaagaaaatgaaggctttagatgtgaaaccctccttttctcttctgcttctctt

SEQ ID NO: 474438 - DNA, 1471 bp, Homo sapiens
ctttgcattttctagaattttatataaatggagtcatccaggaatccaccccctgaagtcatctggctgcacaatgggaatgagatccaagagtcagaggacttccactttgaacagagaggcactcagcacagtctttgtatccaggaagtgttcccggaggacacgggcatgtatacctgcgaggcctggaacagcgccgaagaggtccgcacccaggccatgctgatggtacaagccgtctccaaagacaatggccacttcgaggtgcttcagaatgaggacgtgttcaccctggttctaaagatggtgcagccctggcatgccggccactatgagatcctgctcaagaaccgggttggcaaatgcagttgccagatgttactgatgctagagaacagccctgccaaagccctcctgcaggggagtgagcctgccagctgtgagggcctctgtggtggaggagttggtgctgatggtggtggtagtgaccgctatgggtccctgatgcctggctggccagcaagagggcagggttggccagaggaggaagacggcgaggacatgcgaggggtgctgaagaggtgcatggagacgaggcagcacactgaggaggcgatccaccaggaagagatggagcagctggacttccgagacctcctggggaagaaggtgagtaccaagacactatcggaagatgacctgaaggagatcccagccaagcagatggatctcctgctgggtggcaagaagaaattaccagcagagaatggtagcagcagtgctgagaccctgaatgccaaggcagtggcaagttccaagcccctgagcaatgcacagccttcaggacccttgaaacccgtgggcaacaccaagcctgctgagaccctgaaatccactagcaaagaagaactcaagaaagaccttaagaatgatgtgaactgcaagagaggccattcagggaccacagataatgaaaagagatcagagagccaggggacagacagccccagccttcaaggagaagctgcaagatccaccatcacctggacgctgaatggaaagaccctcaagaccaccaagttcatcgtcctctcccaggaaggtccctgctcaggggccttgggtacatgcaccaaggctggggctaagggctgggatcctggtctttgtggcacatgcccacatctcggcatccgtctggcagagcctctcatggcacccccacctgtggctccccagaggagacctgagcctgagttaattcccagctccagcgtggagagggctctgttcacaggcttggaggtgggggacacggaggctcaagccagcgaggagctctgagtaaagagctgtttagagcagcgtcttaggttaggggaagggtgggcagtgaccagatggcacggagctctgagttggggtcaacaataacttaagtcttgatagcattgtgggtttgaaggga

SEQ ID NO: 474439 - DNA, 1323 bp, Homo sapiens
ggtgtccacccatggtgtacatgctctgtgatgttagggataataactccctaggatattatgaataatacaacagggtgtacagaaactgtgatattagaggcgtccaagtcacacagagccacggaatctcacgggtgtctgagaattcctcctcctgggaatctcagaggatccagaactgcagcccgtcctcgctgggctgaccctgtccatgtacctggtcacggtgctgaggaacctgctcatcatcctggctgtcagctctgactcccacctccacacctccatgtacttcgtcctctccaacctgcgctgggttgacatcggtttcacctcggccacggttcccaagatgattgtggacatgcagtcgcatagcagagtcatctcttatgcgggctgcctgacacagatgtctttcttggtcttttttgcatgtatagaagacatgctcctgactgtgatgtcctatgaccaatttttggccatctgtcaccccctgcactacccagtcatcgtgaatcctcacttctgtgtcttcttagttttggtgtcctttttccttagcctgttggattcccagctgcatagatggattgtgttacaattcaccttcttcaagaatgtggaaatctctaattttgtctgtgagccatctcaacttctcaaccttgcctgttctgacagcgtcatcaatatcatattcatatatttagatagtactatgtttggttttcttcccatttcagggatccttttgtcttactataaaattgtcccctccattctaaggatgtcattgtcagatgtgaagtataaagccttctccacctgtggctctcacctggcagttttttgcttattttacggagcaggcattggcgtgtacctgacttcagctgtgtcaccaccttccggcaatggtgtggtggcttcagtgatgtacactgtggtcacccccatgctgaaccctttcatctacagcctgagaaacagggacattcaaagtgccccgtggaggctgcgcagcacaacagttgaatctcatgatctcttccatcctttttcttgtgtctgtaagaaagggcaaccacattaaatccctacatctgcaaatcctgccccttagtcacattttttttgttgcttgatggcttttattcctttccacatttgctatgtgaatattgctttcttcgttatgcctttaactggaatggaaataacttctcacctatgtgttcaaatgatttttaacatgagtgctaagaaagttcattggtggaaaagcagccttttcaagaaatggtgttggggaaa

SEQ ID NO: 474440 - DNA, 632 bp, Homo sapiens
cacctctagagcacgtcgcagttctgatggggctgtcaaatgcagctccagagcacctggcagatctggccggctgccattgcaactttagagcacacagcaggttttatgggaactgtcaatgccagttctagagcacaacgcacatctgacagggctgtcaattgcaactctagagcacattgcagatctgatggggctgtcaattgcagctctagagcacagggcagatctgatggggctgtcaattgcagctctagagcacacggcagatctgatggggctgtcaattgcagctctagagcacaccacagatctaacagggctgtcaatagcaactctagagcacacagcagatctgatggggctgtcaattgcagctctagagcacatcgcagaaaattcaggtcaggaacctctcagactgcgcttgcacccagccacctgcacagtgaagccatcctgcaaagcgagtggcaagcttaacttcaaatgtcacattgatgtccccaataaaatgtcacacatgcacagagtttactgagccaaatttcgatccactgccaaaagaaaatgctgacgacagatcatgagtctctgttttcctatttagacttttcaattctaaactg

SEQ ID NO: 474441 - DNA, 800 bp, Homo sapiens
taacggaatggattggaatcaacccgattacaatgcaacggaatggaatggaagggaatggaatgcaatggaaaacaatggaatgaactggaatgcaatggaatttaatggaatggaatggaacggaatggaatcaacccgagtggagtcgaatggaatggaaatggaatcgaatggaatggaatggaataaatacgagtggaatggaatggaatggaatggaatagaatggaatggaatcaactcgagtggaaaggaatgtaatggaaaggaatggaatggaatggaatggaatggaatgcaatggaatgcacgggtatggaatggagtcaatgcgagtggaatggaatggaatggaattgaatgccatggaatggaatggaatggagtggaatggaataaacaccagtggaatggaatggaatggaatggaatggaatggaatggaatgaaaaggacaggaatggaatggaaaggaatggaatggaatggcacggaatggataggaatggaatggaatcaacatgactggcatggaatggaatggaaaggaatggaatggaatggaatggaatggtatggaatcagcccgagtggaatggaatggaatggaatggaatggaacggaacgtaaagtaatgaacccgagtagaatggaatggaatggaatggaatggaatggaaacaacccgagtggaatggaatggaatggaatggaataaacacgaatggaatggaatggaatggaatggaatggaatggaatggaatggaatcaactcgagtggaatgaaatgtaac

SEQ ID NO: 474442 - DNA, 2324 bp, Homo sapiens
tcaacatcaaacggaatcaaacggaattatcgaatggaatcgaagagaatcatcgaatggactcgaatggaatcatctaatgaaatagaatggaataatccatggactagaatgcaatcatcctcaaatggaatcgaatggaatcgtcgaatggactcgaatggaataaatattgaacggaatcgaatggaatcatcatcggatggaaacgaatggaatcattatcgaatggaatcgaatggaatcatgaaatggaatcagatggaatcatcatcaaatggaatcaaatacaattatggaatgaaatccaatatggaaacgaatggaatcatcatcgaatggaatcgaatggaatcattgaatggaatcgaatggaatcatcttcagatggaaatgaatggaatcatcaaacaatggattcgaatggattcattgaatggaatcagaaggaatcatcgaatggacttgaatggaatcattgaatggactcgaatggaatcattattgaatggaatagaaagaatcgtcatcgaatggattgaatgcaatcatcgaatggtctcgaatggaataatctccaaatggaatggaaaggaatcatcgtatagattcgaatggaattatcatcgaaaggactcagatggaatcaacatcaaacggaatcaaacggaatggaatcatcgaatggacttgaatggaatcattgaatggactcgaatggaatcattattgaatggaatagaatggaatcatcgaatggtattgaatggaatcattatccaatggaatcgaatggaatcaccgaatagaatcgaatggaacaatcatcgaatggactcaaaaggaattatcctcaactggaatcaaatggaattatcaaatgcaatcgaatggaattatcgaatgcaatcgagtagaatcatcgaatggactcgaatggtatcatcgaatggaacggaatggaataaatcgaatggaattatcattgaatggagtcgaatggaatcaacatcaaacggaatcaaacggaattatcgaatggaatcgaagagaatcatcgaatggccacgaatggaatcatctaatggaatggaatggaataatccatggtcccgaatgcaatcatcatcgaatagaatcgaatggaatcatcgaatggactcgaatggaataatcattgaacggaatcaaatggaatcatcgtcgaatggaaacgaatggaatcatcatcgaatggaagtgaaaggaatggaaacgaatggaatcatcatagaatggaatcgaatggattcattgaatggaatcagatggaatcatcaagaggacttgaatgcaatcactgaatggactcgaatgaaatcattattgaatggaattgaatggaatcatcgaatggtctcgaaaggaatccttatcaaatggaatcgaatggaatcaccgaatagaatcgaatggaacaatcatcgaatggactcaaatggaattatcctcaaatggaatcgaatggaattatcgaatgcaatcgaatggaattatcgaatgcaatcaaatagaatcatcgaaaggactcgattggaatcgtcgaatggaatggaatggaataaatcgaatggaattatcatcgaatggactggaattgaatcaacatcaaacggaatcaaacggaattatcgaatggaatcgaagagcatcatcgaatggactcgaatggaatcatctaatggaatggaatggagtattccatggactcgaatgcaatcatcatcgaatggaatcgaatggaatcatcgaatggacacgagtggaataatcattgaacggaatcgaatggaatcatcatcgaatggcatcgaatggaatcatcaaatggaagcagacggaatcatcatcaaatggaatcgagtagaattatggaatgaaatccaatgtcatcatcatcgaatggactcgaacggaatcatcatccaatggaaactaatggaatcaacatcgaatggaatcgaatggaaacaccatcgaattgaaaggaatggaattatcatgaatttgaaatggatggactcatcatcgaaaggattcgaatggaatcatcgaatgaaattgattgaaatcatcatcaaatggaatcgaatggaatcattgaatggaatcgaatggaatcatcatcagatggaaatgaatggaatcatcatagaatggaatcgaatggattcattgaatggaatcagatggaatcattgaatggacttgaatggaaacattgaatggactcgaatgcaatctttattgaatggaattgaatggaatcatggaatggtctctaa

SEQ ID NO: 474443 - DNA, 1222 bp, Homo sapiens
ctggctctgtggagtgtgcagctccagcctcatctcccctctagcggccagccagcgccaccagccccgggcagttaggggtttagcacccggaccagcagctgcgagtgcactgggtcccccagcagtgccagcctgccagtgctgcactcgaattgtcaccaggcctcagctgtctccctgcggggcagggctcggcacctgcagcccaccattcccgagcctctcccctgccggcttaggagtgtgggcgcatggctcgggaccagcaggcagctccacctgcggccccagtgcaggatccactaggtgaagccagctgggctcctgagaggaatgaacaactctggaccggagaaacgaacaactccagatgcgccaccttaagagctgtaacactcgctgtgaagatcgcggcttcactcctgaagccagcgagaccacgaacccacgggaaagaagaaactccgaacacgtccgaacatcagaaggaacaaactccagacacaccacctttaagaaccgcacccacagacatactgaatggtataatgaacactggggctcagagggtggagggtaggaaaggggtgagggatgaatatctacctgttgaaccacaaggagcaaatataaatgacctgaatacaagtaaaaatgagatatggaataaacaaaaggtcagaagaagatgaacatttattgaatgtttaatgttaatatattaaagaaagtgtgtttttttcacattgcttaatacaacaaactccgtgacatgagttcacctgtataacaaacctgaacatgtacccagaacctaaaataaaagttaagataaataaataaatatatatattaaattcttcgaaatattctaacagatatttttatcatcacttgtttcataaataaacaggtgtttgtttaattaaaggaatgaattcattattctctcttttacagatgaggaaactgaaaatcagaatgatttatttacacattttccaagattattcagccaaaggatgacaagaaagtgttcaatcataattctaaaacatacttttgctatcatatagtaccaaattttagtatagtagaagtaaattatctctttaccattattcatcttagtttggaaagagatctcaacttcaacactgacaatgacaaagacaaaacccataagaaagtcagagaggacctagcttgcctgataact

SEQ ID NO: 474444 - DNA, 725 bp, Homo sapiens
aatcagctctctgtaaaacagaccaatcagctctctgtaaaatggaccaatcagcaggatgtggcttcactcctgaagccatcgagaccacgaacccactgggaggaaaaaacaactccagacacaccaccttaagaactgtaacactcaccacgaaggtctgcagcttcactcctgagccagcgagaccacgatcccaccagaaggaagaaagtccaaacacatccgaacatcagaaggaacaaactccagacacgctgcctttaagaactgtaacactcaccgcgaggtgttgtgagcccttaaaagggacagaaattgtgcactcggagagctcggattttaaggcagtagcttgccaatgctcccagctgaataaagcccttccttctacaactcggtgtctgagaggttttgtctgcagctcgtcctgctacaattacagtccacaaaaatgtatcgtacattgcaaaataaataagactataatctgaatgtttataacaaaaaaaaataaatgcttgaggtactagataccctatttactctgatgtgactattatgtattttatacctgtaggggggaggggggagggatagcattgggagatatacctaatgctagatgacgagttagtgggtgcagcgcaccagcatggcatatgtatacatatgtaactaacttgcacaatgtgcacatgtgccctaaaacttaaagtataatt

SEQ ID NO: 474445 - DNA, 676 bp, Homo sapiens
ttttcctatataacaaacttggacagctcccaggggtgacccatgtataatgacagccacctacttaacccattgtaaggagatggacacaggggagccaggatacggcttggcttgtgcccaaatggaaggagttaagttgctaaccctagagctggccttgcaggctggctgtgcagctgtgcgtgggagccagctgctgagaggagccacggagccggagcagacagtcgagataaaggcaaacagtgtaaagagctatagcacccacaccacttctttggttccacaggaaacctccaggataaagacacttgctgagtggaagtgctcacataccagcagttactgtgtcctggaggatgccctcatgagtttgaagcgggggcggggaaagagctttgagttctcctctgccgtcactagatggcggtgtgtcaaaggctatttcctaccaggatgctaacctccaaggaatgcacctgttttgttctggggtgttaaaatttttttttgcctgagtttgaaagaagagttgtaggaatgagaaaaaattattacaatagctcaccttcacttaatggacttcagaaaaaaatgattaactgggtaaggtttcttttagacttacagaaaaatttttagatgctaataaagtatttaatgactgttagag

SEQ ID NO: 474446 - DNA, 532 bp, Homo sapiens
acccccagcaaactgcagcagccctacagaagagggacctgaccatggaaagaaaaacaaacacaaagcaacgacgacagcatcaacaacaaaaaaacaaactcatgaagatgagaaataatcaacaaaaaaatgctgaaaatccaaaaggccagagtgccttttctcctccaaatgatcacaatatgtctctagcaagggcacagaactggacggaggatgagatggatgaattgacagaagtaggcttcagaagatgggtaattaaaaactccactgagctaaaggagcatgttctaatccaatgcaaagaagctaagaaccttgataaaaggttagaggagctgctaactagaataaccagtttagagaggaccataaatgaactgatggagctgaaaaacacagtacaagaacttcatgtatcaatagacaaatcaaccaagtggaagaaaggatatcagagtttgaagaccaccttgctgaaataaggcatgcagataagattagaaaaaataataataataataaa

SEQ ID NO: 474447 - DNA, 942 bp, Homo sapiens
aacttaaagggaaactttcacaatgtctagagcccttgatgtcctgcaaatgaaggaggaggatgtccttaagttccttgcagcaggaacccacttaggtgctcgtgccatcgctgcctttaaaaaccctgttgatgtcagtgtcatgtcctctagcaatactggccagagggctgtgctgaagtttgctgctgccactggagccactcaaattgttggccgcttcactcctggaaccttcactagccagacccaggcagccttcagggagccacggcttctagtggttactgatcccagggctgaccaccagcctctcacagagacatcttatgttaacctacctaccattgctctatgtcacacagattttcctctgcgctatgtggacattgccatcacatgcaacaacaagggagctccctcagtgggtccgagctggtggatgctggccctggaagttctgcgcgtgtgtggcaccatttccctcgaacacccatgggaggtcatgcctgatctctacttctacagagatcctgaagagattggaaaagaggagcaggttgctgctgaaaagactgtgaccaaggaggaatttcagggcaaatggactgctccagctcctgagttcaccgctattcagcctgaggttggagactggtctgatggtgtacaggtgccctctgtgcctattcatcaggtccctactgaagactggagtgctcagcctgccacagaagactggtctgcagctcccactgctcaggccactgaatgggtagaaacaaccactgaatggtcttaagctgttcttgcacaggctcttaagcaacatggaaataacgttgatggaaaatacacatcagtttctaaaaaataaattcactttggttatatcagaggtgtcaagtctgggatttgattttaccctatttgcaagct

SEQ ID NO: 474448 - DNA, 538 bp, Homo sapiens
aggactggcgatgaaagatgagacatcaaactctgaaggtgctaaagcaacaggtcatgagcttgccaaccaaccacctcagcagctgatgcctgcagggcagtggagaccagaagtcaccagagacatagcagcagaggccagtgagaacccaggctatagcttgaaatcccgcacacagatctcccctcccaccgctgccttgaggcttcccctgtatcctgtaggccgccttgggaagtcaaggggaagaaggcggccataccaggaagcagctggaaagctgcagtcctacttagagaagccccattaccttcagggcaaaggtcccataccaagccctagtgttttcctaacaccttcctccatcccagagaagggccctcaccagacactgaatctgctggtgccttgatattggacttcccagcctccaaaactgtgagaaatttctgttgtttataagccactcagtctagggtttttggttgtagaagcccaaatggactaagacatcctccatgtggattgtgcagta

SEQ ID NO: 474449 - DNA, 668 bp, Homo sapiens
tcagtgaacacatgagtgatatgaatataaaacaggtttttgctctcatggagaaagttttgttggtctggatagaagatcaaatcagtcacaacattcccttaatccaaagccaaatctggagcaaggccctaactctcttcagttctttggaggctgagattggtgagaaagctgcagaagaacagctggcagctaacagagatcagttcatgaggtttaaggaaagaggccaactccataacataaatgtacaaggtgacgcagcaagtgttgatgtagaagctacagcaagtagttatttagaaaatctatctaatttcaatgatgaacgtagctatccgaaacaacagatttttaatgcagaagaaacagccttctgttggaagaagatgtcatccaggactttcacagatgcagaggagaagacagtacctggcttcaaaactttgcaagacaggctgcctttcttgtcagggacgaatgcagttgatggcattacattgaagactgaattgtgattaatatttcagtactggtttattataaattatgcaggtatcccaaattaagtcattaactaacacaatttttaatattagctcaaggctttaattttttattttattttactttaagttctggaatacatgtgtagaacgtgcagg

SEQ ID NO: 474450 - DNA, 1967 bp, Homo sapiens
tcagtcttttccaactcttccaaagagatgatgtgtttcccagacttcccatttcccgatgacttccccaactttatgcacaacagcaagatccaggaatatatcattgcatttgccaaagaaaagaacctcctgaagtacatacaatttaagacatttgtatccagtgtaaataaacatcctgattttgcaactactggccagtgggatgttaccactgaaagggatggtaaaaaagaatcggctgtctttgatgctgtaatggtttgttccggacatcatgtgtatcccaacctaccaaaagagtcctttccaggactaaaccactttaaaggcaaatgcttccacagcagggactataaagaaccaggtgtattcaatggaaagcgtgtcctggtggttggcctggggaattcgggctgtgatattgccacagaactcagccgcacagcagaacaggcactgggttgggtgctgaagacagtggtgaacataacaggcatgatccctgctctggaacaagagctgccactggaaaaaaaggataaacaagtgattcaggcactaaatgctatgattccaaaactggatgcttcacaaaggagccaaagcaatggtcaaaaaggactgacagctgagagatgtcttctgacaccactttctgcagctggggtaatagatccattcctcaagagggatctggggtgctcaccagaatatccactacaaatggtcactaatttcatggttgaattggtgttttttaaggtcatgatcagttccagaagtggctcctgggtgatgagccgggtctgggacaatggttatccttgggacatgctgctcgtcactcgatttggaaccttcctcaagaacaatttaccgacagccatctctgactggttgtacatgaagcagatgaatgcaagattcaagcatgaaaactatggcttgatgcctataaaaagagtcctgaggaaagagcctgtatttaacgatgagctcccagcaagcattctgtgtggcattgtgtccgtaaagcctaacgtgaaggaattcacagagacctcggccatttttgaggatgggaccatatttgagggcattgactgtgtaatctttgcaacagggtatagttttgcctaccccttccttgatgagtctatcatcaaaagcagaaacaatgagatcattttatttaaaggagtatttcctcctctacttgagaagtcaaccatagcagtgattggctttgtccagtcccttggggctgccattcccacagttgacctccagtcccgctgggcagcacaagtaataaagggaacttgtactttgccttctatggaagacatgatgaatgatattaatgagaaaatggagaaaaagcgcaaatggtttggcaaaagcgagaccatacagacagattacattgtttatatggatgaactctcctccttcattggggcaaagcccaacatcccatggctgtttctcacagatcccaaattggccatggaagtttattttggcccttgtagtccctaccagtttaggctggtgggcccagggcagtggccaggagccagaaatgccatactgacccagtgggaccggtcgttgaaacccatgcagacacgagtggtccaccagtcccattcctgtgataatccactaattcattaatccataaatgatgcttcaatttatttaagcagagtcctcataacccaatcacctcttaaaggcctcacctttcaatactgctgcattgaggattagttttcaacatgagatctggagagaaaaacattcaaaccattgcatcatacaaaaaaaaggctattaaaaattggattatagcaacttaatcttctatttattttttgtactggcatttataacatgaagcaaaaaatttttatgggctgtgtttaatttttagttacttgattctatttagggca

SEQ ID NO: 474451 - DNA, 474 bp, Homo sapiens
gacttaccctccactgtgagagttacctaaagctcggtgtccgtgatggtctacagggcttccaaggtgattgggcagcctcagtcttcagctgctaggctgagaagatctgggaaggagtcagagagccttgggccagagttccacgggctctgggagtggctgccagtggggtcccgcacagatgggacgtggcttaggaggaatcctgggctgcgggcattccttggcctggtggccagatttctggcacttgtagcaagctcctgggggaggcaggcctggaggaacgcctggtcactgcggtttaggcgtttggaagttcttgtgtgctggagatgtggctggggtttgtctcacagtggaggcaaggaattgcaactcagaaatatgttgctatttggctgcctctactctattattgtacaccttgaaggtgaggttaattaagtccttttgtggggttttagggcc

SEQ ID NO: 474452 - DNA, 641 bp, Homo sapiens
acgccaacagcgcagaggtgttaccagggcggtagctttcggtggagtctgcacgctggatgggccccagcagtgctgggggagtggagctgacgagggaggagacaggaggcccacagggccagaggggaggccttccgccttccaaggccttgtggatggggcaaaagaggttggtctctgtcccgggagcaacgcgagccattgcagagttttcatcagaagcagagcagtgtgctcagctggggcagatcctgcgtttgctgggtccgaagcttaaacaactgggccatcccacaggaagagaagtcaaatgttctgaatgtgcatgctcctttgagtgcggtcattcgggttctgttctgagcacctctcacgcatttgctcatttcatcctcacaccacctggggatacccacgttaatgcaatcaacaggacccagaaaatccagttgcttatccagaaggcctctgaaaatagtccatgcattaacattcagtgttcttcaattaaccacttgaatgttccacacgggaaccttgcccaatacactttccttggttcttcagaatggttcttgccttgaatcatattttgtctgagaccacccttaccatacatggtttttgttgagttgttc

SEQ ID NO: 474453 - DNA, 974 bp, Homo sapiens
gaagaagcttctcagaggcggctctcccggctccagctccccaatggccatcatgtggagtcaagaagaacccaccgtggagtggacagctcctcagctgctgcccccagctctgggcccaaatataaatacagatgtaggtgtaggtgtagacataggtgaaggtgtaggtataggtgtaggtataggtgtagacataggtgaaggtataggtgtagatgtaggtgaaggtgtaggtgtagatgtacatatagatgtagatgtagttatagatttatgtgtaggtgaaggtgtaggtgtagatgtagatgcaggtgtagacgtaggtgtaggtgtagatgcaggtgtaggtgaaggtgtaggtgtagatgtaggtatagatgtagatgtaggtgtaggtatagacataggtgtaggtctaggtatagacataagtaaaggtgcaggtgtggatggaggtgtagatataggtgtaggtgtaaatatagctgaaggtgtgggtgtagatgtgggtgttgatgtagatgtaggtgcagatatgggtgtaggtgcagttgtaggtgtaggtgaagttggtgtagatgaagatgtaggtgtaagtgtaggtgtagatgtaggtgtagacgtaggtgtaggtgtaagtatagacataagtgaaagtctaggtgtagatgtaggtgtagatataggtgtaagtgtagatgtaggtgaaggtatagatgtagatggggtaggtataaatgtaggtgtagatgtagatgtaggtgtagacataggtgtaggtataagtatagacataggtgaacgtgtaggtgtagacataggtgtaggtgttgatgtaggtgtagatatagatgtaggtgtagatgtagatataggtgtaggtgtaggtgtagatataggtgtaagtatagatgtaggtgaaggtataggtgtagatcaagatctgggaatgttattgctctgaagaagaa

SEQ ID NO: 474454 - DNA, 2818 bp, Homo sapiens
gctatattggctatggtgggtgcggggaggggcggtcggctgagctggctgatggcagggcgttcctgagaggtttttgaactggaactaaacaagaatggcagaagccatcagcagccacgcttctcccagcaggggagaagccggcctcagccagagaggagaaaccactgatcagaaaggagctgggatgggactaggaggggagcgtcctagtgccatcctctttccggagcaagttcaagtggggattctgtcacatgcaaacaaaatgacaatgactaattcaatcattacggcttttgaaaaagcaaggcctgctgggcacaaggggggatcccgggctgccaccagccacacagaaactgagtcctctgtgggcagccagagcggggatgtgcgacctgctcagccagaggtggagaaaggatggctctggacagtgacaggagaggaagaggtttccctgcagggcgatgacctggcttgtgccttagaggcaggtgaatgtgtccgcaagaggtgcgcccaagcagaggcaaatggagtggagatcctgggccatccctggctcctgggccttttcctgatgcctttgaggctggattctgggctcacactttctcctgcaactcacgttttcgcaggtgtctcatgttccacctgggttggtctacatgaagggacagtggaactgggaatgaactatttcaagcggctcttcctggtgtgcagggagcttccaaggctgatattgacacccctgggtccatatttctttgatcatatccacagagatgggtgagggaagaaggtggtgaattacatcactccaccatgaggaacccatatgcaattaactcctaatccatccagaatttatgcttgtgtacagtgtgagatgaacaggcaacttacgttttttttttccttcaaattgttaaccaattgttccaatgtcatttgttcaataatttgtttctgctgaattcaatgtcacttttagcatagagtaaattcttatatttaacaagtctctttttggactttgtacttcattcctctcatctttctataagccacattcttaaatgtcatttcataacaggtatccccttattagtttttacccaaagcattttggctagtctaatttatttactctcacaaataaacttgagaatcacattgtaaaaaaagtgatttttataaaaatagaattcaatctacaaattaatttgtgggagcactgacaactacagaatatttgcccctctcatcctggaatattttatgacttattttagttttgagattttttttcatatagctcatgtacatttcttaaaaagattattcctagatatttgacagtttggggagttttctgaaacacattttataactttattatatgtttattttgtatgactattggaaaccaaaaataaaattctaagccctccaactgactgaatggatccctcctcttggccaagggcatcccaaagaaacctgaaaacctagttcaggccatgatgggagggactgtcacatttgccttgttatgctctccccgctttggagtttaggcacagctgaccagcattaacattaaaatagagatcataagactgacaaacagactctttgtagcaataaggtatcaaattccaacctgactctggcatcacatcacaggacgaacagcaggccctgagggaaatcaaaatattttaccccaaaatatatttctttgacatattttgaaatggtcccacaaaacctctcttgtgggggatatttgcattctgtagagaatctcactccctaactaggtcttttccaagtgattgatgccttttcaagtctggtaagagacattccccatctattctctctggggcctgttgctctgaggcttcatctacatgacaagaaacttgccttccacaagacgccttatcttaactgaagcatttctctctgctaacttcaactctttagacaaagctcaactctttcaaccaactgataatcaggaaatctttaaatctactaatgacctggaagcctccactttgagatgaccagcctttctggaccaaaccaatatataccttacacacattgatttaggtctttgcctgtaacttctgttctcctaaaatatataagaccaatctgtaatccaaccaccttgggcacatgttctcaggacctcctgtggctgtgttatgggccatggtcctcatatttggctcagaataggcctcttcaaatattttacagtgtttggctttttccatcaacattctcttatggaaatatcatgttacttccagtacttgttgttgattttatcaaaaataatttagttacttcttttctaattgtcaaaatttacttttcctgtcttattgctttgactagaatttccagagcaatttaaaatagtgttagtaatagcagacatctttgtctcatttctgaaaatgcctctagagtcttcacattaagaatgacttttgtttttaagatagataagttgtattgtgttaagaaagacctttttctatgtgtagcttttcaacagttgtattaagaatgggtattggattttataaatgccttttgcacatttatctagatcagggatggacagtccaagggccccaagggcctagtctgggtggcctatttgtgcaacctgtgagctaaaagtgactcttatacatctaaagggatgttaacaaataaaacaaaaaaccccacaatatgcaacaaaggtggcatgtggctcacaaagctcaaaata

SEQ ID NO: 474455 - DNA, 870 bp, Homo sapiens
aaatcaccaacttcctgctggcctttgggtcctctctcctgcagacatgctcctcttgtttttccagacctaccattggttaaagaagcaggggcatctcttccaggctgagccagaaacttgctgtggaccttgttggtcaaccctgcccttcactatcaggttctcactgtccccatccctgaagaaggcaagggagccagtgaacacagccagagaaagcaatcctgttgttgtgtgtctgcccttggaaagggctgcacacctgagactacagggtgtgccacagctggagctcctgcaggaggacacattccccacacccaagaaaggtccaaatagggttgtcacagcaaggcaggacggccatttggcctgctcccattcaagaaaggcctcaaattcacactgagtgaaatacactcacaggactgaaatgagaagtccatccacaacttcaaattgtgtcccattgtccaaccagcctgcctcttggtccctgtgcatgtatacattttataaatctgtcaagtctcttcttgtagcataacacacagtattgcaatttttgtgttaaaagtacttgtttgttgaatgcaaatattacggcaatttttgtaaccctgttttgacattacctctttaatatacattatatatatttaatatataatatatttataatatataataatatatatttataataaatatataataatatatatttataataaatatataatgtatagtatatatttaatatatattagatatttataatacatataatatatattacctcttttatatgttatataaaagatatataatatacttatatatttatatataaatattttatatata

SEQ ID NO: 474456 - DNA, 1708 bp, Homo sapiens
ttttgttcttgtgataaggttggaacagtatggagggcttagaagaagacaggaagatgtgggaaagtttggaacttcctagagacctgttgaatggttttgaccaaaatgctgatagtgatgtgaacaatgaagtccaggctgaggtggtcttagatggagatgaggaacttattaaattcaatctggctgcagaaatttgcatatgtaatgaggaggcaaatgttaacagccaagacaatggggaaaatgtctccagggcatgtcagagatcttggtggcagccccttctatcacaggcctggaagcttaagagggaaaaatggtcttgtgggctggacctagggccctgctgctctgtgcagcctcaggacttggcactctgcatcccagctgctgctgttccagctcaagctggtgttaaagggggccaaggtacagctcaggccatgacttctgagggtgcaagccccaagccttggcagcttccatgtggtgttgggcctggggatgcgcagaagtcaagaattgaggtttgggaacctttgcctagatctcagaggatgtacggaaatgcctggacgtccaggcagaagtttgctgcaggagtggagccctcatggagaacctgtgctagggtagtgtggaagagaataggagctgtgggaaaagggccactgtcctccagcccccagaatggtagttccactgacagcttgcactgtgcacctggaaaagctgcagacactcaacaccagcccatgaaagcagctggggcagaggttgtaccctgcaaagtcacaggggtggagctgcccaagaccatgggagtccacccctttcatcagtgtgccccagatatgggaccctcagctgcaggtctgttggagtttgctagaggtccactccagacgctctttgcctgggtatcagcagtggtggctgcagaacagcagattttcgtgaaccgtgaatgctgctgtctgatcgttcctctggaagttttgtctcagaggagtacccagccgtcacagccctacacactgagttacaagtggaagccatgggaatttagtgaagtacgagggaaggacagaagcagcaaagggatcccagggcctctaagcagaacacagtgcccactacagcaggtgattagacgtcaggatactggaccctcatctctcttccccatcatggaggaaaatatacaaatagacccttttctggggcagctttcgaaatgcctgattctttattgttcaattttgaaggctttgacaatggaaattctgactgctggactatttgagtatctgtcaaggcttagaggctctcagctttctgggtcaaatcagaggcaaatgttttcagcacaatgcagcagacaatgcaagtctctgattcttgaaagaagagaaattcacatttgtcccggtcctggaggcccttcccagactgcagcaggaaagttgagccccagtggaacacaggggtctttctgggtggagaaggcagagaatgacatttggggtgtttggatttagtagggaagggtgctaaaaggagagagtgcacaaggcagagcattctgggctgtccatgtgcagagcaaggctgtcctggaatgcagagaactaagtcaagatcacagaagtagtgaagtcctgggaaatgtttgagttcccacacagtcagtgttcagaga

SEQ ID NO: 474457 - DNA, 937 bp, Homo sapiens
tttttgtgatacaaagttaaatccaggtgcacatgtggacctcccatgctctccactttggtggtgggcgacgaccttgggcagtcgcatgtcccagcaggtttctatggctgtgactttgctcagccagaaagctggaagccaaggtctgtctccagatgccttgaaacaagccaaactacttcaagccaacatcccttctgccaacattccttctgccaccagctctctgtccccagtgctgacgccctttgctctgaagccagatggaaccaggttgttcccaaacgtcatgtctcctctcgcaagtgatttgcttcctcagatgccgggctcgatgctcttccagagtcctttctccattgtcgcgctagaaccatccaagaaagggaagaggaagccaccgaacatctccacagtcgacctcaaacccaaagatgaggcggtcctctacaagcacaagtgtcagagcagtctcccttccgtgatgaccgctttgttagcagcccagccacgccaacaggccaagcaacatggctgcatgtggtgtgggaagaacttctcgtccactggtgctcttcgcattcacgggtggacccacactggagagaagtcttttgtaggcaacatttgtgggcgagttttaccaccaaagccaaacactagacagaccctagcacagcctcgatggagaagaaatagcctaaatgtcaatggaacttatggaactttttactgtgtgccaacaagacctaggggacatttgtgggagcagcttgtgtgtggagtcctcatgaatggaattagtgtccttataaagaagtcccagagagctgctctgccccttctgctatgtgaagacactgtgagaagtcagcagtctgtaacctggaagagagcccttaccagaacttgaccatgctggcactctgatctc

SEQ ID NO: 474458 - DNA, 677 bp, Homo sapiens
tgacatagaaagaaagatctgaagatggaacagaatataatgcacagagctaaatccagacactcctcgcgcagctgcacaccaccccttgcctgcatctttggtaataggctgtggggaacaataccacgtggacagaaaggctttcaggaaaacaaatgcaaaaaggaacacaacaccaaaatgtacaagaacagagaaaatcaagattataagagaggcactaatgaaacagatgaatgcacacctgaggaagcatggttaatccagcaaataaaacttcagttggttaagacagaatttcatatcaagcaagaagaagttactaagaaaaaagagttaattacaaaaactaaaaaaagaagccaggcagctttgcaggaagcaatggaaacaaataggaagagaaaggaagagaaaggcacatgccacatggcagtttgtgaacaatacaagacaaaactttgaacactgccccctgtcgcaaaataaatgggggccacttttgagggtatggttggctgtatcccagagatttgtatatgtaatgcctcttctcattaatttctaatttggtctataagttgtttcattttttcttgctgacattcatatattttggaaggattatttctattctaatccaataaatcattttggggagattttaaatttag

SEQ ID NO: 474459 - DNA, 2499 bp, Homo sapiens
gggtggagccggctgaggtggatggcggcttgtgtcccgagctcctgtggtttcagttggccgcgcgtagaggagagatttccaatgtttccagagaggtccgagccacagtcattcggggcatccgaggacgagatggggtttctgacagcgacttaagtgccaggaagggtcagaatctgccaaggcccgtgtcccagggtggggccgaaggaacccaaggtagagggagtcagcggtccgacagagagagctccagccctaggccccactgtgcagacccaatcagaagaagagagtccttcatcctatatgccacatccctccactgaacttgggagcggatccgttttccaaacatgaggtgactctcgctttgcgatggatcacagggggccgggctttccacagttggcagggtaaagaagtcattctggctcggcctcccccatcccctggtaactggtgagtttaaatgagctgaggctggctttgccggagccgctaccggggggaggggtgtgggcggggtggggggctcccgcggcactgcagaaagtgggcctgagcctcgaggatgatggtgctacaggaacccgtccaggctgctacatggcaagcactaaaccactatgcttaccgagatggggttttcctcgcagaacgcctttatgcagaagtacactcagaagaagccttgtttttactggcgacctgttcttaccgcccaggaaagacctataaagcatatagactcttgaaaggacacagttgtcctacaccacaatgcaaatacctgcttgcaaaatgttgttttgatgtcagcaagcttgcagaaggggaacaaatcttatctggtggagtgtttcataagcagaaaagccatgatgatattgttactgagtttggtgattcagcttgctttccccttccattgttgggacatgtatattgcaagacagatcggcttgccaaaggatcagaatgctaccaaaagagccttagtttaaatcctttcctctggtatccctttgaatcattatgtgaaataggtgaaaagccagatcctgaccaaacatttaaattcgcatcttcacagaactttagaaactgtctgcccaactcttgcaaagcacaagtacctaatcatagtttatgtcacagacagcctgagaccattcttacagaaacaccccagaacacaactgaattaaacagattgaatttagaatctgccaattcaaagtactccttgaatacagattccccagtgtcttctattgattcagctgtaatttcatctgatactgtcccactgggaacaggaacttccatattatctaaacaggttcaaaataaaccaaaaactgatcgaagtttattaggaggaccagcatctcttagtccattaaccccaagttttgggattttgccattagaaaccccaagtcctggagttggatcctatttacaaaactacactaatacagcttctgtaatggatgtgacatccactggagtccctccaaaaaagtctgttgccagaatagtccaaattggagcaaagtctgtcttctcacagagtggaaatagccaagaggtaactccaattcttgcacaaacagaaagttctggtccataaataagtacaacacctcaggtattgagccccactatgacatctccctcaaatgcactgcatcgaagaagttcacgactcttgactagtgacagttccacaaccaaggagaataggaagaaattaaaaatacagtttccacctaaaatcccaaacagaaaaacaaaaagtaaaactaataaaggaggaataactaaacctaatataaatgacagcctggaaataacaaaattgtactcttccatcatttcagaagggaaaatatccacaatcacacctcagattcaggcttttaatctacaaaaagcagcagcagaaggcttgatgagccttcttcgtgaaagggggaaaggttatttagctttgtgttcataccactgcaaagaagctataaatattttgagccatttaccttctcaccactacaatactggttgggtactgtgccaaattggaagggcctattttgaactttcagagtacatgcaagctgaaagactattctcagaggttagaaggattgagaatcatagagtggaaggcatggaaatctactctacaacactttggcatcttcaaaaagatgttgctctttcatttctgtcaaaagacttaacagacatggataaaatttcgccagaggtctggtgtgctgcaggggactgtttcactctgcaacgggaacacgatattgcaattaaattctttcagagagctatccaagtggatccaaattatgcttatgtctatactctattagggcatgagtttgtcttaactgaagaattggacaaagcattagctagtttttgaaatgttatcagagtcaatcctagatattataatgcacggtaagtggt

SEQ ID NO: 474460 - DNA, 789 bp, Homo sapiens
tttctagcaacggagaactttgattggatttttcctgtctacagacagaatgagtctgctgttttcttttttaaacccgaggggactgagcctgagagcctcgagcgcggccatcctcctccaacccacaactggtgattgtggtggtggtggtggtggtggtggttttgtgttccagcttctgttctgttgttgttgttgttgctgctgctgctgttgctgctgctgctgctggtgctccaaggctcccaccgccgctgtgggattttccgtgggagagatatgggagaggactgacgcggcttccagatctatatcttgccagacatctctggctcagcgtcccccaccggctgcctgccaccttccaaggagctctgaggccgatgccccgcccccttcacatcccgccaccctcctccggttggcctacgcccggcgaccccaagggagccgccgaagtcttccaccagatgccccgggtgggccggatggatgggatgagactggaccaccccagaccgtgctgttcttgggggtgggttgacgtacagggtggactggcagccccagcattgtaaagggtgcccagtaaaagctggccaatctgaataatcctcctttaaacacaatttttgatatggttaaagtttttaagaatgtgactcctgcagaatagctgaacagacaatacacatttaaaaaagaacaacacaagggtcaatcagacttgggaaaaaatcaaaaacaacacaagtcttatgaagaactgagttcttaaaatattac

SEQ ID NO: 474461 - DNA, 501 bp, Homo sapiens
tccacatccagtttctcacctgctttaggccctgggggttacattagttagagcagcaattctcaacgccagtgctgttatgttttctttccctttctgcaagctggaagccctaggagatagcgaatccaaagaagaaagcaactcagaaaatctgaagctgagccctgaaggatgggtgagggttgccaaacaagaaggagggaggaatggattggagggtgccagagatgctgcaaggaggccggtggttgtagccgcagtctgggagagatggaatggtggcttgggttatggtatgggaagacatggagagaggctggtgaaactaaagtattgggacttgaagcagcagttttgggggaagatcttaagttcagtggagtatgagggacctgtgggatgtcaaagaaaatacatagattgggcggttggtcatgtaaacatggacagcagagagcaagagacagacctctccaataaagggattgcttggtaagc

SEQ ID NO: 474462 - DNA, 504 bp, Homo sapiens
cactggcatggccttctcagtgttaatctcctgccctggacgactgtcctcaaggtccgttaccatccgaggaatcctgggacagcctgtaaccagactcatcaatgaggcagtaattcctctatatccagttgtacccaacccctataccctgctctctcaaataccagaagaagcagaatggttcactgttctggacctcaaggatgccttcttctgtattcccctgcactctgactcacagtttctctttgcctttgaggatcctacagaccacacgtcccaacttatgtggatggtctcaccccaagggtttagggatagcccttatctatttggtcaggcactggcccaagatcgaggccacttctcaagtccaggcactctggtccttcagtatgtggatgatttacttttggctaccagtttggaagcctcatgacagcaggctactgtagatctcttgaactttctagctaatcaagggtataaggcatctaggtc

SEQ ID NO: 474463 - DNA, 757 bp, Homo sapiens
cctcacttacaatgtccttcgccaagcacctgttagacacaatcagagcacagagctgcaggcagggaaggaagaaactgaaggatcctgtactagcttgttttcatgctgctgataaagacatatccgagactggtcaatttacaaaagaaagaggtttattggacttacagttccacatggcttgggaggcttcacaatcagggtggaaggcaaagagaagcaagtcacatcttatgtggatgacagcaggcaaagagagagcctgtgtagggaaactcccctttttaaaaccatcagatcttgtgagacttattcgctatcacgagaacagtatgggaaagacctaccctcatgattcaattacctcctactgggtccctcccacaacacatgggaattcaagatgatatttgggtggggacacagccaaaccatatcagatcccatgtttaagaagttcccagttcagcatacagccttgacctgaagccttctcgatgtttccctgcactgactcttctgaacctaatcctccatctggaatatacgagtcttcaagaaaacattctttcttgctaccctgaagcatgacatccaggggatggaaagaaataatttgtccataccattcatcgaatgcagctgtggcccctatatcttacctaaaaactatttttatttttcacaattttaagatagaggcatagcttgtcttattgtgcatcatttgattgtgctttgcaggtactgcatt

SEQ ID NO: 474464 - DNA, 753 bp, Homo sapiens
cttcagcacatgatggggatacagtctccagctcatgtaaaatgcctagttgtcatactgtaccatattctcctcactttgccaggctgtccaggtcctttatgttgtcctctggacatagagttgctacaaccttttctggattcttatacctgctatggctgggggcctttcccagacagcagtcacctaaacaggacatttacccttataggtgctgagtgtttatggctgaatggaccttgcttcataggagaattaatagaagacaacttgatggaggtgagtgcttctgattcagtgctgcacgatgaggaagatgtaaaagtgccagaaaacaaattgaaattatacaatctggcagaaggattccgattatttaagactgcttttgatgtcttttatgacatgcctactgaacatgaagatgatgaggatgaacacctttatgatcatccacttccacttaatgaatagtaaacatactttatcttccttatgattttcttaataacattttcttttttctagcttactttattgtaaaaatatagtagataatacatatatgaaatatgtgctaatggaccatttatgttattggtgagacttccagtcaacagtagcctatttattagcagaacttgcataatgtgtttattgcttgattgtgtcccataagtctcttaagctatattcactgtttttcatttctttcttggttttcttttactttctccagatgattttcaa

SEQ ID NO: 474465 - DNA, 992 bp, Homo sapiens
tgaccataggaaccatcgaagacttaaagcagaggagagccacagcatgggtggtgatgtgagtaaaagggataaaagactgaccaaatgtcctgggcaatgtgagaagaaatgtgggattagatctcccacaaagagtccccactggggcactgccaagtggatctgtgagaagaggccactgtcctccagatcccagaatagtagatccactgacagcttgcatcatgcacctggaaaagcttcaggcactgaatgccagccagtgaaagcagctgaggggattgtacccggcagagtcacaggggcagagctgcccaaggccttaggagcccaccccttgcatcagtgtggcctggacatgagtcatggagaatctaagatgagcagttcttatatccataaaatatgcctatacataaaagatgacaatgttgaattttacctgagccatgtacttctggaaaacagtgaaggttaaagaaatcagaaatcccctgcagaggggaaagattttctttctccacctatcacaaggttcacggctgaaatctctattaactaaagacagattaacaagagaaacacatacacatttatttaatataagttttacatgacacaagagccttcagaaatgaagactccatgaaatgggaatctgtgtatttttatgctaagtttgataatgggtggtcagtcatgcagaactgtaattgaacagagagggtatgatctaatggtaataaactggggggtatcttagtcaattttctgctgctaaagcagaataccacagactaatttatttaaaaaaaataagttttatttggcttatagttctggaggatgggaagtcaaagagcatgctaccaacatctggtgagggctttttatatcatggtagaagcaaataagcatgtgagacaaagaaaagaaatataaacaaattcatcctttttactaggcattaactcaaatgataactaatt

SEQ ID NO: 474466 - DNA, 711 bp, Homo sapiens
gggcggtgcaagatgtgctttgttaaacagatgcttgaaggcagcatgctcggttggggctctcatggaggacctccactagggcaatgcagaaggaaaatgtgggttggatcctcacacagagtccctaatgggacactgcctaatagagctgtgagaagagggccaccatcctccagaccccagaatggtagatccaccaacagcttgcactgtgcagctggaaaagccgcagacacacaatgccagccagtgaaagcagccaggaggggggctataccctgcaaagtcacaggggtggagctgctcaaggccatagtagcccacctcttgcatcactgtgacctggatgtgagacatggaatcaaaggagatcattttggaactttaagatttgactgcctcgctagattttggacttgcatggggcctgtagcccctttgttttggccaatttctcctatttggaatggctgtatttacccaatgcctgtacccacattgtatctaggaagtaactaacttgctttaactttacagtcttataggtggaagggacttgccttatttcagatgagactttgaactgtgaacttttgagttaatcctgaaatgagttaagactttgggtgactgttgggaaggtatgattggttttgaaatgtaaagacatgagatttggaggggctggggtggaatgatatagtttgg

SEQ ID NO: 474467 - DNA, 704 bp, Homo sapiens
aggtgccaaggggtgcctgcaggccagcgctgagatgccctcaaactctcctcggcttccctcctatgcttgtcagtgcccaaagtctggagcgggctgaggtggcaagaaggagctggtgtgtcagcactgctccaagtgtgtgcacacccagccaggctgcagcagtgcctaggctcagccccaactttgctctgagattggagtgggcactgacagcagggagaagccaggcagtgggagcaggcacttgcagagatgcctgggtcttcagacatggtattgggagcaggcacatgcagagatgcctgagtctgcagccatggattgagcagctgcagctgtgcccaggggctcaggtctcctgcctgctctgtggagtgggagaattgggtttgcagcctctgtttgggtggctgcagctgtgcctgggaggaaatgtgggagaactttgttccaacactttcctgcttctggaatccactacctctgagctttgagtagctttggggtcttgcctgtttttatgcttcaggttcttttgtgcatgagttttggctgtgattttctctttcaaaccaaggcttatagctctatgcatgtgaatgaaagtaacattgtggagagatgaaattacataggaccatgacaacatgataaaaatgtcttaaaaatgggctttctgtaatagaaataatattcaa

SEQ ID NO: 474468 - DNA, 653 bp, Homo sapiens
cgtcgacctggtgctggagctcgcgccaatgtcggtcctgcgagtgtctcttggtggacacaccctcatcgtgatccccgaggtcctcctgagctccgtcgacgaatgctcaggagcgcagggcgactggtctgccggcctggaagtggacgttttcctgggcgctcacggggaagacgtcgtcgtcgagcaggaagtctgcgcatctgtcccagagatcgctgccgaggaagaggcctacgaggaggacgcggactctgagttcccggagctctggatggactccgcagccggctcagccgctgggctctacccctccgctagaagtatgttcagcccctaccgggagggccccatccgagggccctgtgctctggcccccaaccccagttcagagagacgctctccacgccccatcttcgacctggaattccatcttctggagcctgtccccagctcacctctccaacctctacctccctctccgagtccaggtccccacgcgcgcccggagctcccagagcgccctccgtgcaaggtccgaagacgcctgttccaggaatgagttgcctcccacaatcccttgccaccctgctgggctccaggagaccgtctcctgatagccgttgtgtgagtcaagactcagagccaaa

SEQ ID NO: 474469 - DNA, 945 bp, Homo sapiens
gcactgttggtcagcttgagagacctgatagagatgatgtctatcggcacgctcctggcctacaccttggtctctgtctgtgtcttgctccttcgataccaacctgagagtgacattgatggttttgtcaagttcttgtctgaggagcacaccaagaagaaggagggcattctggctgactgtgagaaggaagcttgttctcctgtgagtgagggggatgagttttctggcccagccaccaacacatgtggggccaagaacttaccatccttgggagacaatgagatgctcatagggaaatcagacaagtcaacctacaacgtcaaccaccccaattacggcaccgtggacatgaccacaggcatagaagctgatgaatccgaaaatatttatctcatcaagttaaagaagctgattgggcctcattattacaccatgagaatccggctgggccttccaggcaaaatggaccggcccacagcagcgacggggcacacggtgaccatctgcgtgctcctgctcttcatcctcatgttcatcttctgctccttcatcatctttggttctgactacatctcagagcagagctggtgggccatccttctggttgttctgatggtgctgctgatcagcaccctggtgtttgtgatcctgcagcagccagagaaccccaagaagctgccctacatggccccttgcctcccctttgtgcctgcctttgccatgctggtgaacatctatctcatgctaaagctctccaccatcacatggatccggtttgcggtctggtgctttgtggactggctatcatatgccaaagcacgatgtgaacctgcagcgactcaggctgcccttccagctatcaggcagaggaaaactccctgagcgccttttgtaatcttgctgatagcacaaactccaaactccctccagaaactgctactc

SEQ ID NO: 474470 - DNA, 637 bp, Homo sapiens
ctgcagctcctggatctcctcttcatgcagttgcctgaggaagttgatctcgtcagtcagcccttccaggcgagactccagctctgccttgttcatgtaagcttcatccatgtccttcttgatgaggacaaattcattctccgtttctgtacgcttattgatctcatcctcatacttgttcttgaagtcctccaccagcccctgcatattgccaagctccgcctccagcttcagcttctcctagcccagagcctccagctgccgcctaaggttgttcatgtagctctcaaatacgttgatccgagccatcttctgctgctgcaggaggctccacttggtctccagcatcttgttctactgctgcaggaaccgtaccttgtcgatgaaggaggcaaacttgttgttgagggtcttgatctgctccttctcctgggtgtgcatggcctggatattgggatctacctccaggttaacagggctcagcaggctctgcacatcgtggagaatggggtgtccatctcctcaagcatttatcctttgagttataaccaatccaattacactctttaagttattttaaaatgtacaattattactgactatagtcaccctgttatgttatctaatagtaggtctt

SEQ ID NO: 474471 - DNA, 641 bp, Homo sapiens
agtctctttgtctgttctgagtcacctggagctgggggtggattgacataagcacccatcttgccaccactcctagttctatgctgggtcagacctgaagctagcacagcactgggtctctcccaaggcctgctgtaaccactccctgactatggcctatgttcgctcaaggccctggggctctacaattaacaggtggcaaagccagccaggcctatatccttcctttcagggtaaagaactgccccaggccctggctgtgtccagagatgccatctgggagccgagtactagagtcaaaaaccttagaaatctacttggtgttttattgtactgcaggtggactggcactcaaaccacaagacacagtccttcctactcttccctccaatttccaaaggcaaaggagcttcaccctatggccaccaccaccacaggcccatggggattaccacagatgtttctttaaggcccacaggctcttcaatcagcctgtgatagatgcttcctggcttaggactcaccctttagggcagtgggctcctctctggtccagggcaagtccagaaatgccatccaagagccaagttctggaattgggtactccaagagcctaggcctggacttggggaccctaagag

SEQ ID NO: 474472 - DNA, 683 bp, Homo sapiens
tgtctttttttttttttccgaccttttggcttttttcttcctctgtttcagagaatatttgtttatattgtgactatcacagtgaccttttctacaaactatgaaaagctatttcaaattaaacctcctggccaactgtcctcttccttcagatgagggcttcagacccaaatctgaggtgtatgctgcgagtctgttggagttttgccggaggtccactccagcaaacgctttttgcctgagtatcacaagcagaggctgcagaacagcaaatattgcagaacagcaaatattgctgcctgatccttcctctggaactttgtctcagaggggcatctggctgtatgaggtgtcagaaaggaaatcccttgacccctggcgcttcccaggtgaggcgatgccctgccttgctttggcaaagcatcccctttccatggactgcatccactttccaaccagtcctaatgagatgaaccagatacctcagttggaaatgcagaaatcaccagtcttctgctagcaacccaactaaagttcctgtgcatatttttaatgtgctgctagatacggataaacaaatcaatgatgctgccataaacttcactggggaagttcttggtttcagctaaagtgatttgtcatctaaacactaaagttccatttttggtggagtctatggtcag

SEQ ID NO: 474473 - DNA, 806 bp, Homo sapiens
ggcggcagacaagagaaaagaatggaagccaagcaaaaggggtttccccttataaaaccatcagatcatatgagacttattcactaccacaagaacagtatggatgaaactgcccccatgattcaattatctcccattgtgtctcttccacaacacaagggaattacgggagctacaattcaagatgtgactctccaaaggccacatactggaacgacagagtggaccaaacatcaaagatggtggcccgccctccccacattgggagctctgtcctgcctcaggcaggttccacttgttgccagtggctcgttggaattccaagcctgtgggtcttatcttgtgaggtgccatggacgtggggacctcagatctatgctgattggctccctggatttggcacccttcctaggggtatgtacagatgtcccaccttacctgagttgcagtcacctttgtgagggatcccaggagtatgtaaagctcctgggtatctgtgcatgcctgagcagatgctctgccgtgactccatacagctctgtgtatcagactcaaggccctggtggtgtgggctcacaaggggacctcctgatctgaggcttgtgaagatccatggaagaagtgtggtttcccagaagttatttcacctccttgtttaaatgtatgtctaggtattttcttatagctatttcaaatgggattgagttttttatgtattcctcagccttattttattggtgtatagaactgctactggcctaagagggcttgctagaagcagctagtgtgcaccactctcactgaaa

SEQ ID NO: 474474 - DNA, 536 bp, Homo sapiens
gaaagttaagaaaccagcagtctgatgcaaggatgagagaagccaaaaacagccccaccgatcttttccatgggactctaaattcctcaggactgaatctagatggttctttattgcgggatctggccagcagcccgcaatgcaatggcgctgtctctttgttcccaggcagatcggcaggtcgagaaataatagacacacacaagatagtgaaagctgggtacaggggggtcactgctttctggtcccatggtgccaataatgcactggatataccagcatttattattaagtttaatgagggcgggggtagggaggctctgcagctgcagtattggctgctgcccctccaccaaggagctcagatgacttacacagcaggcatccacagaagtggtgatggctgcccctcccaccaggaactcagcaggcttagaggcaagttctaaccatgctgcatggctccatagtggggacccaaggccctgatgagcactggctcctgagtgggatcttccgatgcatgggttgcacag

SEQ ID NO: 474475 - DNA, 1564 bp, Homo sapiens
atatagtgagaagtagggtcagtctgtgtcaagagttccatgactccctggcaacttaccagtcccctgtgcttgctggaatcagagcaagttatggggtatgtctgtggctgctctggtgatgtggtaggtcaagggcagaggatccctggacagggcagtggcacttcaggtatgcaactgggatgttttccacaggagtggccaggaaggcagtcatgggaggagccagcagacaagggggtaattggatcaaatgcacctttgtcctccggctgtggtagctctgctgtctctcagccctgcagacagcaggagctacaaccactcagtgcaagatggagagccttatgtgataggcacttacagctgcatttccctgcagcttcacagcacagcaaaaccttccgggctctgaccatagtcccatctgactctctcgcgctactacaacttctgtcctccttcagtacttgaaaagtgatgaaagaagcaattttgcttcttctggttttaaaggaactttctatctcatgttctattccctaccaaaatggtcttcactctgttcttttctgtagcaatataattgaaaatggggtgaatgaaaaactttacacttatcttaaaattgagttggtataagtaattatatctaaatggaagatttagttttaacaccccgtttgatttgccccatgcattcaatgacgatattaacatacaacttttcaaaggaaaatgatagacatgaacatgattgaatatgatattcaaaaggttaacagggaagaaacttgcagcttagaattttagcaaattgtttcaaaaaataaacgtaaaataagacatacatatacacatatatatctgtatctgataaacatacatatttatatgagagatctatacgtgaaaaaaatcagacaatacatttaggaaaaaatgaataatacataaaagataaatattttggtaaatctaaatggattaactgcttaaaacaataagagtgacatctgatagaacttaaagcacacgagagcaagatagtataagttcagagaaagagaaaggtaatgatctaaggtcttgcaattttcagattaagatataaatatttttattagactttgataagacaacagtatacaatctattgtggtaactacaaaaatactgctaaaagaagaggtaactataaaaggactagtatggaaatgaaaaatatatatttttatttcaagatttatttttgatacttggagtacatgtgcagatttgttacatgggaatattgtgtgttgctgaggtttggagtatggatcctgtcatccagaatatgctccacatgcagttgagaacaatgtatattctgtaattgctgggtggaattttctgtagatgtctgttagatccaattggtcaagtcctaaacttaagataaatatacaagaaagagaataaataaaatatattaaaatggtttatataaacctgaaaatatcagaaattacattaaataaaatataaatttatggttcaattaacagaaactaattat

SEQ ID NO: 474476 - DNA, 717 bp, Homo sapiens
gttcgtctgctcgtcttcttgtctccttgtctgtttgtctgcttctggagcatggggttcaagcttatttgggtagaggataagggcgtgccaccggaagcaggattggagccttgccagaaagaggattctgaggagcctgacaaatgttctcgtcaatggaaagggtctttgtcagtagatgtaccaaagtctatccattcacccactgaaggacatctagacctacaatttttagcaatgatggataatactactaagaacacttatttaaaggattttaatgaagcctttaaaatcactgataggattttgagaggagagaatgacttcagtgcctttggtgttccagaagcactctcaaggggtgattgccagaagctgctggctacagtggctttcagtagctctgaaggctggaaaagagagcagttgcaggcctcagaagcctttggaggttctgatgctggcagtttccagcagggtcaatggattcctacataatctatttcatggctttcttgtttttaatacattcatttcaatctaacataactttagttgcaccccataatttgaatatattatatatttttgtactatttagtagaaaatattttctaattaccattatgactttttccttgagctacggactatttagaagaaagcatttacattcttaaacatatggtagttcttaagttatatttagtt

SEQ ID NO: 474477 - DNA, 481 bp, Homo sapiens
ccacgaagatggggagaaaccagcccaaaaaggctgaaaattccaaaaaccagaacgcctcttctcctccaaaggatcacaactcctcgccagtaagagaacaaaacaggatgcagaatgagtttgacgaattgacagaagtaggcttcagaaggtgggtaataacaaactcctctgagccaaagaaacatgttctaaaccaatgcaaggaagctaagaaccttgaaaaaacattagacaaattgctaactagaataaccagtttagagaagaacataaacgacgtgatggagctgaaaaatacagcacgagaacttcgtgaggcatacacaagtatcaatagccgaattgatcaaacagaagaaaggatatcagagcttgaagatcaacttaaatacagcgtgaagacaagattagagaaaaaagaattgaaagaaacaaaccaagccttcaagaaatatgcgaatatgtgaaaagacca

SEQ ID NO: 474478 - DNA, 1110 bp, Homo sapiens
ccgaatgtaatggaatggaaaggactggaatggaatggaaaggaatggaatggaatggaatggaatggaatggaatcaactcgattggaatggaatggaattaacccgaatacaatggaatggaatggaatggaacggaatggagtggaatggaatggaatcaacccgagtgcaagggaatggaatggaatggaatgcaatggaatggaatcatccggaatggaatggaatggaatggaatgcaaagcaatgcaatcaactcgattgcaatggaatggaatggaatgcaatggaatcaacccgagtacagcggaatggaatggaatggaatgcaatggaatagaatcatccgtaatggaatggaaaggaatggaatggaatagaatggaatggaatggaatggaatggaatggaatcaactcgattgcaatcgaatggaatggaatggaattaacgcgaatagaatggaatggaatggaatggaacggaacggaatggaatggaatggaatggaatggaaaggaacggaaaggaatggaatggaatggaatggaatggaatggaacggaaaggaatggaatggaatggaatggaatggaatggaatggaattaacacgaatagaatggaatggaatggaatggaatggaatggaatgcaatggaatagaatcatccgtaatggaatggaaaggaatggaatggaacggaatggaatggaatggaatggaatggaatggaatcaactcgattgcaatcgaatggaatggaatggaattaacgcgaatagaatggaatggaatggaatggaacggaatggaatggaatggaatggaacggaaaggaatggaatggaatggaatggaatggaatggaatggaatcaacgcgagtgcaggggaatggaatggaatcgaatggaatggaatggaatcaacccgagtgcaggggaatgtaatggaacggaatgcaatggaatggaatcatccggaatggaatggaatggaatggaatgcaaagccatggaatcaactcgattgcaatggaatggaatggaatggaaaggaatagaatggaatcaacccgagtgtaatggaatggaaaggactggaa

SEQ ID NO: 474479 - DNA, 1315 bp, Homo sapiens
taggcttcaggaggcccgcgtcctacgcaggctctgccacaggggttagaccccagaaacctggaggcataggagggaaaaatggttttgtgggctgggcccagggccttgctgctgtgtgcagcctagagacttggtgccctgtgtcccaaccactccagccatggctaaaaggggccaacatagagctcaggccattgtttcagagggtgcaaaccgtaagcattggcagctttcacgtggttttgagcctgtgggtacacagaagtcaagaattgaggtttgggaacctccacctatatttcagaggatgtacggaaatgcctggatgtccaggcagaagtatgctgcaggggcagagccctcatggagaacctctgataaggcagtgtggaaaggaaatgtggggttggagccaccacacagagtccccactggggcactgcctagtggagctgtgagaagagggccaccgtcctccagaccccagaatggtagatccaccaacagcttgcaccatgcacctggaaaagccacagacaataccagcctgttaaagcagccaggagaagggctgtaccctgcaaagccacagaggcagagatgcccaagaccatgtgaacccacctcttgcatcagcatgacctggatacttcatgacatcttagaaatgagccttcctagccatgtggatactagccttctaggaataaatcattctagtgatgatttattttcttctacagtactttctttgaaatattttgaagaacaggggtgatatggtttggctgtgtccctacccaaatctcattttgaattttagcacccacaattcccatttgtcatgggagggacctggtgggaggataagagctttcagtctttcatcattatgtatgatgttagctgtgggtcttcatagatatcctttctcaggttgaagaagttcctgtttacttctagtctgttcactgcttttatcatgaaaggctactggaggttgtcaaatgctttgtgtctatggaaatgattatgtatttatcttttgtgaattatcccattaatatactggatttactgattttcgtatgttaaaccaatcttgctttcctgggataaatcccaattgatcacagtgtataattcttttgatatcttgctggatttcatttgctagtactttttttttttgcctctgtattcaaaagggatattggtattagttttctttcctagtaatgtctttggttatggtatccatgtcttctttaactcatgtgtctggttatggtatccatgtcttctttaactc

SEQ ID NO: 474480 - DNA, 1771 bp, Homo sapiens
aaccatgcttttccctgagacacgtatctgttagaaagaattagaatgggtcccagtcagaagctacttggaatatataggaaatatatgacatgccgtgctgacttacagtgtgtatattttttacagtacactcctgatcatgtagttggacctggagcagacattgatcccactcaaataacctttcccggatgcatttgtgtcaaaactccctgcctccctggcacttgctcctgtctccgccatggagagaactatgatgataactcatgccttagagatataggatctggaggaaagtatgcagagcctgtttttgaatgcaatgtcctgtgccgatgcagtgaccactgcagaaacagagtggtccagaaaggtctacagttccacttccaagtgttcaagacgcataaaaaaggctggggacttcgtaccttggaatttataccgaaaggaaggtttgtctgtgaatatgctggtgaggttttaggattctctgaagttcagagaagaattcacttacaaacaaaatccgactccaattacattatagccatcagggaacatgtttataatgggcaggtaatggaaacatttgttgaccctacttatataggaaatattggaagattccttaatcattcttgtgagccaaaccttttgatgattcctgtccgaattgactcaatggtacctaagttggcactttttgcagccaaagatattgtgccagaagaagaactctcttatgattattcaggaagatatcttaatctaacagtcagtgaagacaaagaaaggctagatcatgggaaactaaggaaaccttgttactgtggtgccaaatcatgtactgctttcctgccttttgacagttctctgtactgccccgtagaaaagtcgaacatcagttgtggaaatgagaaggaacccagcatgtgtggctcagccccttctgtgttcccctcctgcaagcgattgacccttgagagacaaggacacaaacagccccctccaactcagtgcctctgccagagacaactgactgaatatggacccctggaaattttttgtcctcaggcactagtttattatatagcacttaatcctagaaaccagattcctaagttcaaaatgggtcgtaaagcagcagaaacaactcgcaacatcaacaatgcatttggcccaggaactgctaacgaacgtacagtgcagtggtggttcaagaagttttgcaaaggagatgagagccttgaagatgaggagcgtagtggccggccatcagaagttgacaacgaccagttgagagcaatcatcgaagctgatccccttacaactacacgagaagttgctgaagaactcaatgtcaaccattctacggtcgttcgacatttgaagcaaattggaaaggtgaaaaagctcgataagtgggtgcctcatgagctgactgaaaatcaaaaaaatcgtcgttttgaagtgtcatcttctcttattctacgcaaccacaacgaaccatttctcgatcggattgtgacgtgtgatgaaaagtggattttatatgacaaccggcgacgatcagctcagtggttggatcaagaagaagctccaaagcacttcccaaagccaatcttgcacccaaaaaaggtcatggtcactatttggtggtctgctgctgctggcattggtcaacagaaagggcccaattcttctccacgacaatgcccgaccgcatgttgcacaacccacacttcaaaagttgaatgaattg

SEQ ID NO: 474481 - DNA, 1187 bp, Homo sapiens
cttctctctgcctggtgttggcatttactgcacgtcccacactcatgggtctgaaactccctggaaactgcctagaaaaagaggaacacattttaaaagtctgtgaactgttcaaaattgagcacacgctttctagctggacaccttatcattttctttgtcagatatttgacatcaacatgcagagcagtttggatgaagagagcaagcatttggtggagagaaatgggtatcacagacatattgtcatattgccaccaaaagtatttacttcagataggaaatactcagactatatcttcaatgagagaactgtgaagaaggtgaaaccatgccccggagtaggccattggagaactggccaccccttcattactgatgaaattgatcacgaagactatggtggaggttttcccccatcctatatttttggctgctggttcggaggcaatcaccagagacaaagaaaagagatgcttagacaagcggactggttcagctggatgaagcgcaaccgctacaaagtcttggtttggtagatttgactttgctctttcctttctcttcggaggggaacgttaggaaaggcctgtggcttgcagagatgcactccccactggtgtggttcccatggctctaaactcctgtgcctgctcatgtgggaaacctatttaagacattctgttgcataattggaggaaaataattggaggaaaagtgtaagccatcttgagggaagcaatcactcgactaacattcctacttaaaaataaatgagaaaaaccagattttgcaatttcaacagacttttattgaacatttactaactctgcaaagtattatgccagatacagtaaagggcataaaaaataaatgggctagtcccagttctcaaatagctagtgggaaagtcggtcacttaaaaatctgattagattataacggaaagtgattctgaatagagtaatgagaaaacttgcatggagttggggagggaggggtgctcatctcagaccatcaagaacaaaggccccatggtgggcacagcattggtggaagactgtgggactggggtgctccttggctgtccccacaggccctatatatgtacctctctgttgccacctggagcaaaagccttgagagcttggctacaatcttggggagaagatagggggagggaagaa

SEQ ID NO: 474482 - DNA, 522 bp, Homo sapiens
taatattttgttatggcagccctagcaaactaatataggttgacactgccctttcaacatgcaaggcactggagacagcccttcattcagtgaaactgaacggccacttgggcttgtctctggttccaaaccaataacgaggggtcaccaaggtgcaggcccacaaggggctcctggctggattgccaacatttgttataggaccaactggtttgtatccccactgtgcaataacataccaattactgtgagacagcaggatttgcagcagagaaagtttcataatcacagcacaccaagtgaggacacaagaggagaccctcaaatccatctcaccaaggagttctgggctggggcttttaaggggatcgtggaaggtaaagggttggaaaattggggttgttggccaaatgtctgaaatttgaagacatttttattttacaaataatcttgaaaactgtctttatttctaaaagactgctaaagtaacgtgaacaaaaaggcattaaagtttctattttt

SEQ ID NO: 474483 - DNA, 4232 bp, Homo sapiens
cattggcatcaagacttagaatgctgctgacatgtcttggtaaagattacctctccgacctctgtgtctccatgaacaaatcaattccagtgacccaggaactgatatgtaaagctgtgctgaaccccaccaacgctgacatcctgattgagaccaagttggttctttctcgttttgaatttgaaggtgtctcttccactggagagaatgctctggaggcaggagaagacgaggaagaggtgtggctgttttggagggacagcaacaaagagattcgcagcaagagtgtgagggaattggctcaggatgctaaagaagggcagaaggaggaccgagacgttctcagctactacagatatcagctgaacctctttgcgaggatgtgtctggaccgccaatacctggccatcaacgaaatctcaggccagctggatgtcgatctcattctccgctgcatgtctgacgagaacctgccctatgacctcagggcgtccttctgccgcctcatgcttcacatgcatgtggaccgagatccccaggaacaagtcacccccgtgaaatatgcccgcctctggtcggagattccctcggagatcgccattgacgactatgatagtagtggagcttccaaagatgaaattaaggagagatttgctcagaccatggagtttgtggaggagtatttaagagatgtggtggtgctccggggaggaggctttttgcccatgactcccatggctgctgcccctgaaggcaatgtgaagcaggcagagcctgagaaggaggacatcatggtcatggacaccaagctgaagatcattgagatactccagtctgaggccaaaagccggagaacctggagctctgatgggcaggagaagatgagtgtcccagctccagaacaggtggattcggtcttcctccacctgtttgctctatccaggccctccgtggattggatggtgcccactcacactggtgaggagaacaccccactggacttggatgaccacggcggcagaacctttctccgtgtcctgctccacttgacgatgcatgactacccacccctggtgtcaggggccctgcagctcctcttccggcacttcagccagaggcaggaggtgctccaggccttcaaacaggttcaactgctggttaccagccaagatgtggacaactacaaacagatcaaacaagacttggatcaactgaggtccatcgtggaaaagtcagagctttgggtgtacaaagggcagggccccgatgagactatggatggtgcatctggagaaaatgaacataagaaaacggaggagggaaataacaagccacaaaagcatgaaagcaccagcagctacaactacagagtggtcaaagagattttgattcggcttagcaaactctgtgttcaagagagtgcctcagtgagaaagagcaggaagcagcaacagcgtctgctccggaacatgggcgcgcacgccgtggtgctggagctgctgcagattccctatgagaagctggtcaattcgggagaggatgtcctcgtgttctacaacgacagagcctctttccagactctgatccagatgatgcggtcagaacgggatcggatggatgagaacagccctctcatgtaccacatccacttggtcgagctcctggctgtgtgcacggagggtaagaatgtctacacagagatcaagtgcaactccctgctcccgctggatgacatcgttcgcgtggtgacccacgaggactgcatccctgaggtgagcgagcccagcctggctgtgcccttctcgttgctatgtggtgtgtgctgtcgtggctcactgggagacatggtggtggctggcctgggggagccctcatggctctgaaagctgcagctcattttgtagtgggatttcagttccctaaaacattttctcgagcattgattttgcatgaaaggaacacggaagaagttagtcgttctttctgtatctttaagaacagtgaggaaaaaagcttcagctctgtggactaatttagcctgttgagcaaaggggatatgacctgaatgaacttttcagaaatgtgacgaagagtaggttgagatctagtccatatgaatgtaagacttagtaagttaattctttaaaacaaaaacccttattacagaaataatggccattataaaaaatttaggaactacagacaatcaattaaaaaaaaaaataatgaatacctaagttttgaagttaatccttccaggcttccttttttcctactcatagattatattgattagtaatgaaaaactggattataaagtatatatttatgatatataaagtatattataaagtatatatttatgatatataaagtatattataaagtatgtattgtaggttttacaatgtgtaatattagtttgtagtacacatttatattacattaaaatatatgacatatatcatataatgtttttaggttattttgaaaagctaaaaacagtcatgtgtcgcttagtggtggggatatcttttgagaaatgcgttcttcggtgatttcctcattgtgcaaacatcatacagcgcacttacacaaacctagatggcacagcttgctacacacctcggctatatggtacagcctcttgcttccaggctacaaacatgcacaacatgtgactgtctcagtaccgaaggcaattataacacaattgtatttgtgtatgtaaacatggaaaaggtccagtaaaaattgggtattataatcttatgggtcactgttgtgtatgagacccatcattgaccaaaatgtcattagtcagtacctgaccatactctttgaaaagttcaaatatcaaagactgtaacggggtaaaccatgaaaagtcttataatctgttttcccaccaccctacagaaaataatttattatgttcttgtgtatttttctagaattttgcacataaacgcatacagtatatatactttacttccccaccccctttttgtaaatgcagaagatgatactctaggtatactattctgtaccttaacactgtaacttcttttcatatcaattcataaaaagatgccagatgtttttttacagttgcataaaatgccattgtatagatgtactgtcacggccctttggctgtctcctgagggtaaccacaagctgatttttatgtaatcctgcagttgcttttctgtatacatccctcaacaatatagtttagttttgtgaggttttggacttcttctgtgtatcattccatgcctttttaagttcagttctgtgttgttaaggttgatccaccctgatatgtagctgccatgaaagtagccatggcaagcagatttggctgtgttccaataaaactttatttataaagataattactggccctgattttgccgatccttgcattaaattacttagaaatgctgtaaaatcagttattaatatcattcttggaatatgttctcagactgtctagttttaaggggagaaatattggccagcaggcctttacctttcatttgttaaaagtaacccacaggagggagtcgcagatttcttaatgtttggtgtaggttttggtgtaatgcttaacatacccacttgtcttccaggcctgtaacaacactagtgacaggaaacatgcagactcgattttggagaagtatgtcaccgaaatcgtcatgagtattgttactactttcttcagctctcccttctcagaccagagtacgactttgcaggtaagaaataaccaacgtcaagcagaatgttcacgatacaccttctgcagttgggcttgatgtgaatttgggagtaagcaattgtaaatgaactggtctgcaaggcattaatacaagatatatttctcttggtggaagatagctttgatgggatttcttgggtaaagaagtacctggggatattttcttatactgaatggttctgttaactgttgattttctccttgagatcttttctgctttttttgtcctccagtcctctgcttccctgccctccaatcctagagataacatttataaaacatctagcacagtgcctgacacagagtaggtgctttaataaatggtagcctgtgctatttctgtcagactataagctacatgaagacaaagttatgccttacatgcatggtcatctcatatactactctatcccttgtacctggcattgtgactggcactgag

SEQ ID NO: 474484 - DNA, 924 bp, Homo sapiens
gaattctctttatgtcattgaagaccttgccagaaataaagaagtagcagtcgagactcgccagcctgtctttgtgcaactgctgcaaggcgtgttcagggtttaccactgcaactggttaatgccaagccaaaaagcctccgtggagagctgtattcgggtgctgtctgatgtagccaagagccgggccattgccattcccgtggacctggacagccaagtcaacaacctctttctcaagtcccacagcattgtgcagaaaacagccatgaactggcggctctcagcccgcaatgccgcacgcagggactctgttctggcagcttccagagactaccggaatatcattgagagattgcaggacatcgtctccgcgctggaggaccgtctcaggcccctggtgcaggcagagttatctgtgctcgtggatgttctccacagacccgagctgcttttcccagagaacacagacgccagaaggaaatgtgaaagtggcggtttcatttgcaatgcagggaatgccctgaagtatctttaacctgagagctcttaataaatatttgttcattaacggactagttaaaataaattgcttgtgaagtctttttaatttaaaattagcttcaaggaagtaatccgtggttttccccccattcaggttaataaagcatacaaaacagctgctagaagaaaatgaagagaagctctgcattaaggtcctacagaccctgagggaaatgatgaccaaagatagaggctatggagaaaaggtactgcattttattttcatggtcaaaccaggttttactatgaaactgaagggagggacctttcaaaacccaccttagctcaggcattactgactgaggggctagctttttttaaaagaaagaaagaaagaaagaaaaagctgtttatcctgcc

SEQ ID NO: 474485 - DNA, 1719 bp, Homo sapiens
ggctcactgctgatgtgtgaccttcagcagtaattgccaataaatgcagtggggctgtttactgttagacactggcaaccacagagcaaactcaactcagaacatacagaacctattgcaaagcaagttctggtcaaccgttactatggaaacgtcagaccttcgggacgaagagagagccttaccagctttggcaatggcccactgtcagcaggaggacccggcaagcccgggggaggaggagggggcttccaatctagttatcgacctcatcatgaacgcatccagtgaccgagtgttccatgaaagcattctcctggccattgcccttctggaaggaggcaacaccaccatccaggtaggaaggcagcttggctactggtatggcatccctgctgagcaggaggagagtctgttctgggagccagatgtctgggtggttttatccatgtgggaaaggagtgaagccagcagtggagtcagggcagctctcctcctgcacgtgggggttcgagagctgttggcattaaagaaagagggaggcagtgacttgtccccagcaggcgtccccagagacactgcccttctgcggaagctgtgaggggtcagcaaagccaccccaggttggctcaaggaccagcttggctcctttgagaaatggtggcgtaaaggaaactggactgttattgaacaggagtccttgaggattattggtctaaatccaggtcttaaggaggaagctcaaaattcaaaagtcgttacattcttaggcatatcagacttgagtgagccctcctgcagaagaagatggcagttcccacaactctgccctggtcatccttagcgcagctctctgagtgacggcagacagtaggggcagagttgagtagttgtgacagatagctgcaatgaccctcagcgtgtgaaatgtttaccatttggccctttggaaaaatgtttgctgaccctagggtttgtttaatctttactatgtagatgttaaactgcctaagggaaagaaccacagtatttcccctttgttctgtgctcctcatcccctggtgtcaggcatagcgaagggcgtctgccccacccttgcctggcagggtagttgaaactggtttgtctctcacttgttaaaaggtgactgtacagtgtggatgagggaggaccttatttcagacaaatgaaattgaaatgttgacacctctccaatacagacttgcttcacttcatcgcttcctttctacttggaagtctatgttatttctgaactcattaaagctggaaacatcctgagagaggctggtaaactgagagctgcagatgttggctggttgaaagccatcagaccttgcaaaaaagtttcttgttaggcggcgtctttatcctaagatggtgttttgggaccggagaggagcacgttaccctgctgaaaaaggcatttggaaactgctggattccagtgcttccagctgcagagttctgtgatctgtgttctcttgctcttttgttgtggttgaagtttccagaggccacccacatcccttggcttgtggctccttcctccatcttcaggtttagcaatggtgaatggagtccttctcacattgcctctcgccaccctcctctcctgcctcctgcctccacagcgaaggctccttgtaattatgttgggcccacccgggtaatccaagctcatctgtctactttaaggtc

SEQ ID NO: 474486 - DNA, 1675 bp, Homo sapiens
ggccaccttctggtgcaccccagctttagcgggcagtcctctgtaagcccgcatgggtgagatgttggatggtctgtcttggtgctctgggggcagctggaaaccactcaggcgaggcatctgccttcacagagcttgcactctgcataaggcagacagtaaggaggtgaacgaagataagaagtcagagaaattctttaaggtgttttatgaccggatgaaggtggcccagcaagaaatcaaagcaacagtgacagtgaacaccagtgacttgggaaataaaaagaaagacgatgaggtagacagggatgccccatcacggaaaaaagctaaagagcccacaacacagataacagaagaggtccgggatcagctcctggaggcctccgctgccaccaggaaagccttcaccactttcaggagggaggctgatcccgacgaccactaccagcctggagagggcacccaggccactgccgacaaggccaaggacgacctggagatgagcgcggtcatcaccatcatgcagcccatcctccgcttccttcagctcctgtgtgaaaaccacaaccgagacctgcagaacttcctccgttgccaaaataacaagaccaactacaatttggtatgtgagaccctgcagtttctggactgtatttgtggaagcacaactggaggccttggtcttctgggcttgtatataaatgaaaagaatgtagcgcttatcaaccaaaccctggaaagtctgaccgaatactgtcaaggaccttgccatgagaaccagaactgcatagccacccatgaatccaatggcattgacatcatcacagccctgatcctcaatgatatcaatcctttgggaaagaagaggatggaccttaacaatgcctcgaagttgctcctggccatcatggaaagcaggcacgacagtgaaaacgcagagaggatactttataacatgaggcccaaggaactggtggaagtgatcaagaaagcctacatgcaaggtgaagtggaatttgaggatggagaaaacggtgaggatggggcggcgtcccccaggaacgtggggcacaacatctacatattagcccatcagttggctcggcataacaaagaacttcagagcatgctgaaacctggtggccaagtggacggagatgaagccctggagttttatgccaagcacacggcgcagatagagattgtcagattagaccgaacaatggaacagatagtctttcccgtgcccagcatatgtgaattcctaaccaaggagtcaaaactacgaatttactatactacagagagagacgaacaaggcagcaaaatcaatgatttctttctgcggtctgaagacctcttcaatgaaatgaattggcagaagaaactgagaggtgggttccaacgcatcagcaacaacacagagagacacagttctgggatttcacaaacttgggcttgatggtgcgttcatttccaagcaggagcaaagctagtatcatttatgatactttgcacctctgaccaccaggaagtcataaccagttttgcagctgatcagtgggctcaagccaaagtatgataactcccctgaaaaggcttccttcatcagaatttgacttgatttgattggaaagctccatggaagactttttgaatgcctcttttgata

SEQ ID NO: 474487 - DNA, 1944 bp, Homo sapiens
cccgcaacatgtctttctggagcagcatttcgtttaacctggccgtcctgatgaacctgctggtggcgtttttctacccgtttaagggagtccgaggagctttgccttttgaaggatttcaaaagggaagaggaaccctggagccccactggtcgggactcctgtggacagccatgctcatctctctggccatcgtcattgccctccccaagccccatggcatccgggccttaattgcctccacaattctacgactgatattttcagtcgggttacaacccacgttgtttcttctgggcgctttcaatgtatgcaataaaatcatctttctaatgagctttgtgggcaactgtgggacattcacaagaggctaccgagccatggttctggatgttgagttcctctatcatttgttgtatctggtgatctgtgccatggggctctttgtccatgaattcttctacagtctgctgacccttccttttaatggtgattggtgtgcctggtccaccaagattgaagctccacagttggcagcctttgggggatctgagaggaaagctccacaggaattgggtcagcccaggaattcaagagtcacacaaccgcactgtgtactgggcactcccgatctactcagccgcacttacaccaagaggagtgtttttgaggctgtcatccaacagctctcagggagtccatttcttgtgaacacgtgtagcgaccataagaggctctctcccaagagacaggagatgcccctttggtcaacgccaccttgccccagtagacacttcgacctttcctccaatctgcctccagttggcttggcttcttttctgttcatttgagtcctcttctcttcatcacttgcaatgcaggccagtgccagtgcctgacgcagggcacataatggtgagaggaacacagtccctaccctcataggcctcacagtcaggagcacattacagggacagccgttttgtgagtggtcaccctgcactcttctctacacactctcactaccacctttgaggtagatggtatcttccaattacacctgaggaaactgaggcttggtgaggttaggtaacttgctcagagtcacactgtcagtaactggtggaggcaggagagcctcacaactctgttgattcccaagttgacactgccttttattcaagcatgtgaaaaagtccttgcatcagtgaaactggcatttcacgttccagtttgcatctgtgctttcaagtctccaacctatcacagaaagataagagtaactctcagcttctgatcatgctacctcagttcacttttaggaaacgcaataggatcaaaccagattatggttggctgcctctcctgtgctttgcggggggattttctaagctgtgtggaccttgacttgtttgtgtcttcaagtgatgtgctccttttggtatcaaagcagtactcaatgtgtctggtaagaaccagaaaacactgacacttcaaattattctactaataaggaaagcctgcaaccaaaagaaatcgggctgcctgtaaaaggagagagacctgagcagggaacacccatgtgttccagagttgggagagctccctccatgccagcaggccggaaggtagggagggtgatctggtggcctaattaaactgctgccccccctcccccacaaagactggccggacctggtcgtgagcctgcattaaagctgtgtccttagaaaaatattaacacctggagatgaaaatgtgcaaagttcataagcaggcagttaacaaaagcagaaatccagatggtcagtaaacatggaaaaatgttcatccttggtgctaaacaaagacatgctaattaaaacagcgcaatcctgtgttttacctgtgacattagtaaaggttaaaaagcctgatggtgcccagtactagtgagagtggggt

SEQ ID NO: 474488 - DNA, 1894 bp, Homo sapiens
gactgtgcacgtagaaacagacatatatgggagaacgttcgctgcagtgtacagttggaagcagtgtaaatgttcgggggtgtttcatcagatcatggtacatccatgaggtggggtgccttgcacatagaaaccggcgagagtttggcaagcgagttcctgttctccgatgtgtgtagggtggagagtggggagaactgctcctctcctgcacccagagaagagctggtccctgcagaagagacggaacaggataaagagcacacatgtgagacgctgctgatgtgcattgtcactgtgctgagtcacgggctgcggagcgggggtggagtaggagatgtactcaggaagccgtccaaagaggaacccctgtttgctgctagagttatttatgacctcttgttcttcttcatggtcatcatcattgttcttaacctgatttttggggttatcattgacacttttgctgacctgaggagtgagaagcagaagaaggaagagatcttgaagaccacgtgctttatctgtggcttggaaagagacaagtttgacaacaagactgtcacctttgaagagcacatcaaggaagaacacaacatgtggcactatctgtgcttcatcgtcctggtgaaagtaaaggactccaccgaatatactgggcctgagagttacgtggcagaaatgatcaaggttctggagggctttctggagattctgtgccgtctgtacccttgaggtccttagagttgaattccatgcttctcaaattttattgtacatatgaatcacctgtggagcatgttaaaattcacattttgactcagcagtcacttccaggacttgagatattctgcatttccaacaaccttccaggagatgccgaagctgctggcccgggaatcaccctttaagtacatttatactgacacagacctgtccacatgcacagataatgaccttcatttgcattcgatgtcttaatgtctagaggaggcctgtactgttcacccttgacttatgttccttctcacccctgactttgttctcttgtctctgaagtgtttgagtgggtcctatctttacatcttccaggggccagttttgaagttttctcttaatcaccttactttccggtcacagaaaactctggcacacttttgggtttctgtctcaatcatagaaacagtgtgtttcttgtcatctctggagggagggaaagagggaccacgtaaagaagctctgtcttaagttgagaactctgcaactagctgttcacccacaagttaatcttgtttaaacataatagatcatatatttccctctccccttttggtcttcccctttctcctttcactggagatgggagtatccccctcaaagctggggccaggctgatgcctactatgaagtcctcactacccaagaagtggaggtagaagatccaaggtgagagtttccgctctgtgccttccctcgccgtgtgaccctgggcaagtcacgggactttgctgacctgggtttcctgtctgtacatcgcggttcctaccgcctcacacatccgttgggtggtagacatgagctaaatgagacctggcaggtgggaggcatgcacagagggagggagcaggcgaaagagcaacaggcccagagcacagccagccaggaagcaggggctgcggggctgacagcagagctgacagaagcatcatttcctatggttccaaaactctgcaagacaccttggctgtgggcacgttgtcactaagaaaagtcagagtgggcatcttgactctaagagcctcctcctctggaaaatccctgtgtctttctctctcttgaactttaaatctttaagtgtccttcaaagttgaggcagggcatggttgacgttagc

SEQ ID NO: 474489 - DNA, 1024 bp, Homo sapiens
aggagatatacctaatgaccttggtacttatttgaagacgcaaaagaccctggataggcaaagcaggcttgcgcagaatgaccaaagctgcaggcattacagtactggacatcaaaatattccacaaagtaaacaggacagcatgttacgtggcacaaaaacagacacccggacccagtgtgaattactcccgctcaggaaatttccacctgagaaacatcattaactctttcatggtaccagcaatctggttagcaaattgcctctttactgaactaaaattctacattcagaaagaagaggaggagcttgctttttctctccatgagcacaccctagaaaggtcatgtgaggacacagccacagccagaggtggccatctgcaagccaggaagcagacactcaccagacactcaagctgctgccaccttcatcttggacttcaaagcttccagaactcttcaaatctctattacatagtcggccatttgctagctatggtataaatgaggaaccaaactgatgacatgcttaccttccttttgcatgtcagcaccaacggctagaattaaagtctacataaatattccagtccaagctttttaaattacaaaatatttgagttattatatttaaagaaaaaatgatttggttttgaactaaagtacttatcgtattctaaagtgaataagaacagttggaggttagatgatgtattggatcatagtatagaacctgatcagaaaaacaaataaatcaaacaattcttttggtgcttgatttatctacttgtttccatgctatctaaataactaaattaacaacaatttggggagtacacaggacacttttagcaaatctaggcttgaaatttgactttgtctttctatacctcactgaaatctctctcaccaagtaactgtgtctaaatcgtattgccattttcactttttgtcttaaaactttcaaaagcccttccatagatgagtcctctcctctttatgaagtacttttattccctcac

SEQ ID NO: 474490 - DNA, 678 bp, Homo sapiens
tttacccctcacagcagtgttctctggatatgggacatgaattcaaaatgggttgtaaagcagcgaagacaacttgcaacatcaacaatgcatttggcccaggaactgctaatgaatgtgcagtgcggtggtggttcaagaagttttgcaaaggagatgagagccttgaagatgaggagcgtagtggccggccaccagaagttgacaacgaccaattgagagcaattgtcaaagctgatcctctcacaactacagaagaagttgccgaagaactcagaggtgactattttacggtcattcagcatttgaggcaaattggaaaggtgaaaaagctcgataagtgggcgcctcatgagctgagtgaaaataaaaaaaatcggcgtttcgaaacgtcatcttctcttattctacgcaacaacaatgaaccatttctctcttcgattgtgacatgggacaaaaattgcattttacctgaccagctcagtggttggactgagaagaagctccaaagcacttcccaaagccaaacttgcgccaaaagcagggcatggtcaccatttggtggtctgctgtcggtctgatccactacagctttctgaatcccggccaaaccattacatctgagaagtatgctcaggaaatcgatgagatgcactggaaactgcagcacctgcagcc

SEQ ID NO: 474491 - DNA, 771 bp, Homo sapiens
atagaggctgcagtgagtcgagatcatgccactgcactctagcctgggtgacaatggcaggctgggaatgtattattctgaagaatgtaattcaagatgcctgggaaatatgaagcacgggtcatcccaaactacacactcaggaaaaacagcctttagagggaagcaatgcttgagcagaaacctgtatgaaaggagggcaccagacatggaaatacctagggaagaggacaagaggcataaggaacagcaaacacaaagtaccttatatgagaatgagtgtggaaacaggaaggaggaccatgtggctagagcggagtccgctggggagaaggtggaaggaaatgaggtcaggaaagtagccaaaggcaagatcagggtcttactgaggcaacagttatgtgcagagacaacaatacacataaaagtagaggaggaaaaattgccgtaatatattcagacaacccttgaaatagtcaatctggttggagaatgggaggaagtggcataaggtgaaacaggaatgctagagagagcccaaaatcagttaagctgtggtaaaacccaaatttgttaggtttgtttgacaaaacagcttcttttcaggattgagggcaatcttttgttaaggagaatagaatgctctagacatatttcacaatggttatttttttttccctctgaagtatgatgagaattttctccaatcttcaccttgataacttagtaggtgttttgaaggtagaactgacaaaagtataggggccttcc

SEQ ID NO: 474492 - DNA, 651 bp, Homo sapiens
acgtcttgattttggatttgtggcctccagaactggaacctcagagagagatgaacacagaatggattattgcagtcacacaggagggactctcgtgttactataatttacctattaaagagaaggctcatagaggatgtgttaaaagtagaattgagaatttggtttcaattgacaaaatccaatatgaatatattgtgcataaactagaatttgtagaagacataagcaatcaaaaggagaatggagatgacaaaattgacaggtacacaaatacttttaggacactttcccttcttgttgtcatctctatttcccttgatttctcagcttcaagtctttcaatttgtcttcagtggaagatcagaggagtcattgacataaatcttttcagcagctatctgaaggagaaactgaatgatacagagaacccacacttaaagaacagaaaaaaagaagtcattaaatacaacacagaaaccacagttattttacctgatgctcctcttgccgccctcctgatggattcctttggtgccagacaggaatgggctgcttggggaccaagagagctcccagggcctttctacggcttcctttacccctttattttgttcggctctctaaattgactcagctccaggtaaagtc

SEQ ID NO: 474493 - DNA, 629 bp, Homo sapiens
gcgcagagacttgcccaaaattatgcagctagtatcacagagccaggatacaaataatctacacacatatgttgtatatagaaaggcactggtgacagatccagactattgtattactcagcttccttttggtgagaagcagcagaaaccctacaaaaaccagttggaaccctgtaaaaatcagcataaaagggactttattgtctcattaatcttggcaatcaaagggctagatccatacactactggattgaggacctcaaatgatgttgtcagggcattttatctctacatctttttgttcttcttgtctgtctttttgaatgttggtcttatatttttcctcctgtttctgatagattttctccgcctgagagccaagctggatcttggcagacctaggcttgcagactttggcttacagtgccatagggatacaatacagtgcaatacagtagaatacaatacaatacgataagacacaatacaacaggaatagaggtcttctctctccccttgtccacatgtcagtcctgtggaagggctctgattggattttgttagctatgtgctcattccttgcatgagcatatggtagcatgtaaatggcatgctacagtgctcaaaat

SEQ ID NO: 474494 - DNA, 614 bp, Homo sapiens
ttggtgtaggcacctgagggaatctcctggtttgagggttgcaaacaccgtgggaaaagtgtagtatctggaccagaatgcactattcctcacagcacagtccctcatggcttcccttggctagaggagggagttccccaaccccttgcgcttcctggaggaaatgcttggttctagaatttcttgcatttttatgggctgaattgggctctgaagccaaagaagagaaagaagaagaacggacctgccggttgctgggcaagtgtgtagatgccgaaaaccattcccttgttattggaggactgtttcctattgactccaggaccatcccagcaaatgagtctattttggagccagcatcagcaaaatgtgaagggatggaggccaggaatgggtacagcttcaatattcacccagaaggggatatctgggagcaggaaacagaaaaggtcgacactgaggccagagagtcagcagggcctgtggagatgagggcctgagctcagaacctgcctcagagaggtatcagtaagctgattttaacctcttcataaaattgtgagaaaataagcaatagcatttattcacttcatgtatttgttatttgattttct

SEQ ID NO: 474495 - DNA, 602 bp, Homo sapiens
aggcgttggtaaagcagtggaggcaggccaaggttgttaccctacttgagctccctcactatggaaggagtgaagagtgggaagaaagatgccctgcccagagaggaggaatatagagaggcagtctggctacagtggctttgtggcactgccatttgttctgcccagtccaaacttcctggcagctttgtttacactgtgaagggaaaaccacctactcaagcctcattaatgctggacacttctccccacaccaagctcgagcatcccaggtccacttcagactactgtgctggcagcgagtatttcaagccaatggatcttatatgggggtgggatctgctgagcaaggccacttggctccctggcttcagccccgtttccagggggagtgaatggttctgcctcgctggggttccaggggccattgaggtgaaaaaacaaacaagcaaacaaacaaacaaacaaaaactcccacagctagctcagtgtcttcctaaactgccatccagttttgtgcttgaaacccagggcccttgtggtgtagtcatctgagggaatctggtctgtaggctgtgaatactgtgggaaaagcatagcat

SEQ ID NO: 474496 - DNA, 785 bp, Homo sapiens
cctacctcctctgagatggtggggcagaggggagttgtgatggtcatcccagggcttggggtgtgcccaagagtgagatcagagatgtgtttgaggctgtggggagcagcgtatgtcactttcagaatgtcagacttgggaccactcaacaaggagatcaagggctggtgttaccattattgtaagaacaacacaaagcctctcttctggcgaggtgttgctgatgccgagattcccatctttgacctggggtggaagaagtacatgatgaaaagttgcggcgaggatggctttcatatccaagtgcggctccaccccttccacgttatgcacatcaacaagacgtcctgtgctgggctgacaggctccaaacagggcactgtggccagggttcacattggtcacgtcatcgtgtccatcggcaccaagctgcagaacaaggagcatgtgattgaggccctgcacagggccaaggccaagttccctggccaccagaagatccacatctcaaagaagtggggcattaccaagttcaatgtgaagacatggtggctgagaaacggctcattccagatgactgcggggtcaagtacatccccagtcgtgccctctggacaagtggtgggccctgcactcatgagggcttccactgtgctgcccctcctaaggcccaacaataaatcctactttctgtccacctgaaaaaaaaaaagacacctcaaactgactaggaatctactacagcagtggtccccaacatttttggcaccagggactggttttgt

SEQ ID NO: 474497 - DNA, 1748 bp, Homo sapiens
gttaatatactgatgaataaaattgaaaaataccatttccatagcatttcctcagtgcatcacagcctcgtggagtttcacttgaaggaactgagaaacaaggacaccaacatcgaggttaccttccttagcagtaacatcacctcttcatctaagatcaccatgtacgacagtgatgagatcagatgtgagtttggagatatttctcgggttgggatgttggacatgaactctgctgtgaggcactacaagtttctgctggaaggagtgcatttcactcccaaaaccgtggccactagctggtgttccttctggctcacccaaagtcacacagctagatatgaaaatccaggagctactattttgttgcagtgtccacttgtttattctaaaaaatcaacaactactttcttggtcatattcaaagctgtaggtgtgggcagaggggctggtgaaggtgacacaaaggactgtggtaaggagctaaccccttggtgcatgacagccaaccagtgccaccagcagagcccgatcggagccaaaggggaagtacaggtgcagcaacgctatgggaaaggaatcatagcccatgccaccccacaatgccagataaaccaagtgaaattcaagtttcagtcttccaaccgagtttggaaaaaagaccggactaccattattgggaagttctgcactgcccttttgcctgtcaatgacagagaaaagatggtctgcttacctgaaccagtgaacttacaagcaagtgtgactgtttcctgtgacctgaagatagcctgtgtgtagtttaacctgggcaggacacatctccctgcattttttttttttttttgagagagaggtgtgatgagggatgtgtgtgtgcagcttattgtagaccattactactaaggagaaaagcaaagctctttcttattttcctcataatcagctaccctggaggggagggagaactcattttacagaacttggtttcctttgccgatcttatgtacatacccattttagctttcccatgcatacttaactgcacttgctttatctccttgggcattcgtacttaggattcaatagaaacatgtacagggtaaacaattttttaaaaataaaacttcatggagtatctgaatcatttaattgttttacttgaatggaattctgttacctacaaaaagttgagatttatactctgtgggattggagaaaacagtattgcattatcggtattaaaatagcaactaaaagaagtacttggaaaaagagaggggatgaagggtagggaggaagatggcaccatttaccaacccttaccattacctcctctggatatctggaaggtttgagggatcagagagatcttggggaatacaggtagatttcctctgggttagtgtttcccaaactttgatctttgtaaataaccttgtatcagccgcagcccagcaaaaaacagatggtgcgctcaatctgggttatttgaggagaatttaagaaaaggacaatttgccatagtcttttgtggggcaaccacagggataatgcagttccctgaagctactggcagtagaagctgctactaccctacctgtgaagaggccagagaaggaggggaagcaccagaaggctgcagacctgcagtgcagggacacagccagccagcagcaaccccgcagggagggagcagaagcacaggttctctgacttcactcttcttcctctcccattttcctgct

SEQ ID NO: 474498 - DNA, 939 bp, Homo sapiens
ctctcctggccttcacctcgccctcagcattgaacaatccccttcaggactcgcagagccctctgggatcgcccccctcagctctcatccctcgctaggcacttgagggctggggaagtcttacttattgctgtggccccagcaccccacacaaggccacatgtgtgacatttagttggagaactgcaacatgtttctgttttccaacagagcagtcttccctgtttctctgttctcatggtggaatatgtttgccctcagctcctgagttcacatggaacaattccaacaaccagaagacaatgttaccattattgtaagaacaacacaaagcctctcttctggcgaggtgttgctgatgccgagattcccatctttgacctggggtggaagaaggtaaaagtggatgagtttccactctgtggccacatggtgtcagatgaatatgagcagctctcctctgaagccctggaggctgcctgaatttgtgccaataagtacatgatgaaaagttgcggcgaggatggctttcatatccaagtgcggctccaccccttccacgttatgcacatcaacaagacgtcctgtgctgggctgacaggctccaaacagggcactgtggccagggttcacattggtcacgtcatcgtgtccatcggcaccaagctgcagaacaaggagcatgtgattgaggccctgcacagggccaaggccaagttccctggccaccagaagatccacatctcaaagaagtggggcattaccaagttcaatgtgaagacatggtggctgagaaacggctcattccagatgactgcggggtcaagtacatccccagtcgtggccctctggacaagtggtgggccctgcactcatgagggcttccactgtgctgcccctcctaaggcccaacaataaatcctactttctgtccacctg

SEQ ID NO: 474499 - DNA, 529 bp, Homo sapiens
gcggcataaaaaagttaatgatagtcgataaatgcctgacttacaagaaacaccaagtgaactgtctttccaggactttgagtacccagactatgatgactacagagcagaggctttccttcaccaacagaagaggatggagtgctacagcaaggccaaagaagcttatcggatagggaaaaaaaatgtcgccaccttttatgcccagcagggtactcttcatgagcagaagatgaaagaagccaatcaccttgctgccatagagatctttgagaaagtcaatgcttcgctgctgccacagaatgttttagacctccatgggctgcatgtggatgaagctctagaacatttgatgagagttttagagaagaagactgaaggcatcaaggataaggtggtgaaaaagacacacaatccttgtctttattggagtttattgtctagtggggtataccatctagtaggatagataacagtgaaaaaatagttacataagtaattagcattgtgataagaaaatacaagttgt

SEQ ID NO: 474500 - DNA, 1071 bp, Homo sapiens
accatttgaaccacagctggggagtctgaggaacactgtactggcatgcagggagcagtgtcctaatgaaacccgaggcaccactatgcctgtctggtactccagttttgatatgcattttcctgatggttaatgacgttgagtatcacacagtcgctgccgccagcccgtgcaccatgtcctcctactgctctgccgccctgctcctccgcctgtcacaatggaagaagagattgccatgctggtcattgacagtgtctccggcatgtacaaagctggatttgctggggacgacgccccctgagccgtgttcccctccatccttaggcgcccctggcaccagggcacgatggtgggcatggcgtggcatcatcatcaactgggatgacatgaagaagatttggcaccacaccttctacaatgagttgcgtgtggccccggaggagcacctggtgctgctgacagaggcccttgtgaaccccaaggccaacagagagaagatgacccagatcatgtttgagaccttcaacaccctgtccatgtacgtggccatccaggccatgctgtccctctatgcctctggatgcaccactggcattgttaatggaccctggagatggggtcactcatacagtgcccatctacgaggcctaagccctcccccatgccacctacatgccaacaaggtgctgtccagcggcactaccatgtacccgggcatcaccaacaggatgcagaaggcaatcactgccctggcacccagcaccatgaagatcaagatcatcgtgcccccagagcgcaagtactctgtgtggatctgcagctccatcctggcctcactgtccatcttccagcagatgtggattaacaagcaggagtacaacaagttggcccctccatcgtccaccgcaaatgcttctaaatggaccaacgtgcttgtggaagacaagtctgtggcttggtgagtctgtgtggccagcagtatccgatctgtgcagggtattactgtgtcaggacttagtgttctggaatttctctagaggctgatgctcttgggaaatgtaatctatt

SEQ ID NO: 474501 - DNA, 910 bp, Homo sapiens
ggtcttctttctcctgactctccagacagtactccggccactactgaaccatatgagggacttcttaaaaaaaaaataaaaatatgatttctttcaaaatactactgctcattgacaatgcacctggccacacaagagctatgatggagatgtacaaggagattaatgttgttttcacacctgttaacacaatatccattctgcagtccatggatcaaggagtaatttttactttcaagtcttattatttaagaaatacattttgtaagactatacctgctatagatagtgactactctgatggacctgggcaaagtaaattgaacaccttctggaaagtattcatcattctggatgccattaaaaacatttatgatcaatgggaggtcaaaatgtcaacattaacaggagtttggaagaagttgattccagtcttcatggatgactttgagggattcaaggcttcagtggaggaagtaactgcagatgtggtggaaataccaagagagctagaattagaagtagagcctgaagatgtgagtgaattgctgcaatctcgtgatcaaactcgaatggatggggagttgctttttacggatgagcaaagagagtggtttcttgaaatggaatctactggtgaaaaagctgtgaacattgttgaaattatcacaaaggatttagaatattacataaacttacttgataaagcagggtttgagaagatagtttccaattttgaaagaagttctactgtgggtaaaatgctatcaaacagcatcacgtgctacagagaaatcttttgtgaaagaagagtcaattgatgtgccaaacgtcattgttgccttatttctagtaattgccacagccacctcaaccttcaggaaccaccaccctgattagtcagcagcca

SEQ ID NO: 474502 - DNA, 879 bp, Homo sapiens
tgcagtgtgtaggccatctaaaccagaatatccagtgtgcagcagccacagaccgcctgatggagcagagggtaattgaggggaaattggacaaaggaggatctgacccaccttcagtctttaggctcctcatgggcacagggaagtcctacttcaaaatacgaaactttctagtcatgactggctgggctccatctgacggcacagaagcagaccggcacttttattgctgtttattgtcaatacccaagcatccttggtgcaagaagaccttcagccatcagtaccagcagagggtttcagtgtctcagagtcaccaattccagaaccagcagaggcactgtgatgacataaaaggagcactggccaaaagaatgcagcaggctgaaaaacctgagcaggctggctgtattgtcttaatgcattgcttgtatttttcagtcgtgttggtgattcaccagggtatttctttctccaactttccaaacctgcttcgttaaagtcattcttgcaggatcttcaggatgttttattaaacaaaaacacgaggtacagaactgtgtgtatggggtgagaaaaaataatttaagcatacatgtgtgtttgtgaagaaagaaagaataaatatttctggaagaagacatgagagactgactcgattgacttgaatggaacacctcttgtgaggggagcactgttttaggcttgggactagtactaaactgaattcgatttgactctggtcaggaggtagagagggagatgagaactagactcctcgactgaacatcagaagagctgatcatggaaccatgggtctaccacttcccagccacgctagcctggacagtatttttagccaccagttctgtcatgtgt

SEQ ID NO: 474503 - DNA, 569 bp, Homo sapiens
ttgcctttcaccatgattggaagcttcctgaggcctccccagcaggaagctgccatgtttcctgtacagcctgcagaattgcagtcttcagctccaggctcatggcagagggaacaagatagagaagggaaagtaaagataaaggatggcaagaatggacagggacaagacaaagacctgcatgccaggaacatgaaggaagagttggactgtgaaggaaagaggaaggaggtagatgtggaaaagcatctaaaaatttctcatggacccctacgatggataccaaacaagctgagaataaattgtgacaaggtaaatcaggagcgcatagacatctcaactggcagccagggcaggaccacagatattagcagcagatgccagtgcttcatggtgggaaccaggacctgtgatttgctggtaaactgattctccaaggaggaaaatgtgccttgatctgtggcatttcatgatatccgtgggataaatattctgaccatggctgatatccagctaccgacggtttaacaaccagtcatgaaattcccaaatatttaacacttcatctc

SEQ ID NO: 474504 - DNA, 706 bp, Homo sapiens
ggtcaggtgggccggagggaagatgccaatagtggcagccatgggctggaaggttggtgggttccaaggcttctggcctgccaatatggcatgggcaatgacagtagccatggtggaacaatcctctgtgtccccctatgcactagtattggcagtggctgaaatatggtgggtgggccagtctccatgtctgcaggtttcaggctacgcaaagggagggagagaggaggagagcattctaggaagaaccaagtgtcacaaaaagaatgaaatggaagcagaaaattcaagctccgtgtgcttctcacactataaaagcaaatacatagcctcacctaattgccagggagactggaatatgccattgagctatgagcacacgaagaagaatgaagtggtttatgagcatctggatagcctctgcaacccagagttaagtacagatactaagaaaacacagagcatgactccccaaatcggttgtagtgagttgtaaaagaggtatgagaagttctgggagggaataagacaggcatgacttggagatattgcttattcagtttgagatcaccacaataaagtgaattttacaataaagtgagggatacaaattttttgatttcccagtgcatataaccgttatgtttatactatactgtagtctattaaatgttcagtagcatggtgtctaaaaaacaatgtacag

SEQ ID NO: 474505 - DNA, 562 bp, Homo sapiens
cgccgcctttaagaactgtgacactcaccacgagggtccgtggcttcattcttgaagtcaacaaaccccagccacatgcacacaagaacttccaaatgtctgaaccacagcggccaggcattcctccagaaccgcctcccccaggagcttgctacaagtgccagaaatctggccacaaggccaaggaatgcccacagcccaggattccacctaagccatgtcccatctgtgcgggaccccactgaaaatcggactcagctgaagactgacactgcccgatcacctcggaagcctataggaccatcacaggtgctctgggtaactctcacggtggaagatacctctactccctccttggcgaccaatcatgcaccccttaccatctcattaaaacctaatcacccttaccgcactcaacgccaatatcccatcctgcaatgcgctttaaaaagattaaagcctattatcactcgcctgctacagcaaggcttttaaagcctataaactctccttacaattcccccattttacctgtcctaaaaccagacaagccttacaagtt

SEQ ID NO: 474506 - DNA, 1060 bp, Homo sapiens
gctgctcacaaacgcgctctcctctagcaccgcctgctgggccgaccacgaggcgcctgggctccgtgtagcggaaaatgccgtgtgtttctagggaggtgaaaaaggagccctccaccgaaaggcagaatcagccatttaaagttttggcaacgaaaactgtaagtcatgaggcattagatgcaggtatctacagtgcaattccaacagaaaaagtggatggaacatgttgttacgttgctacttacagagatacctttcgctggagctctgcgagccagaggcagcgctggcgttggagagtgatggcggcatggcggtgcggcggcggctgcgaacaccttgaggacgggtcgcattatgttgcccaggctggacttgaacttctgggctcgagcaattctcccacctcagcctaccaagcagctgggactacaggtctgcaccactgcaccccacccattcaagtccacatccccagaaacgaggataatgcttggcacaaggtaggcatttaatacatatatgttgaatgtatgaataaatatactggctctttctcaaggccagagaagcctctcttcatcttcccaggacttccattacctactttttttctggagggcgggggggaataatttcaacctacagaaaagatgcagatgcaagaataatgaaaggaactcttagataccctttaaccaaattcaccaataatgttttagtttgtaaaatctaatttgaaataatttttttaaaaatttattttctcctcaaatttctttttctttttctttggcttaagaatcttcatgtttttatttatttatttatttattttttgtttttgtttttttgagacagagtctcactctgttgcccagcctggagtgcagtggcattatctagactcactgcaacctccacctcctgtgttcaagtgattcttgtgcctcagcctcctgagtagctgggattaccagtgcacgccaccacgccaggctactttttgtatttttagtagagacagggtttcgccatgttggccagcctgattttt

SEQ ID NO: 474507 - DNA, 2583 bp, Homo sapiens
ttagctaacaatgagttgtcattttttcaataaaatacactttttgttatggaaaataactggtgaagtttgtgaaacttgtgtgcctctaaaatcagagtctgaggagctagctcatggggataaaaggagccagttaaaaataccaggaaggagagaaacacacataggtaaacagaaggggacatgcaaagtctataggatcatggcctataaaatgcttcaagtagtcctgtgctcaacattgcttatcggagcattgggagcgccatttttgttggaagaccctgcaaaccagttcctacgtctcaaaagacatgtaaatttgcaggattactgggacccagatcacagttcagatgtgtgggtaaacacactggctaagcaggtatttgtattagaaacaaatggtccttcaccatttatctttttaaatagtcattgcattagctgaccactaattaacacatgactagcctagccctgatttttcctctctagacactctgaactatatctgctttttcttgcccatgaagtggtttttgcctggtaaactctgcctcttgcttaaagactagactcaaatgtccctctgaagcctttcccttcttctcagggcgacatttgtctttccttctctccctttttgcatgctctttcacaaataaatagctctcaaaatgtcaattggaattacttgttttgtgtacccaacctacctacctagactataaaggtagggtctgtatcttatccttcaaggtaattattctcgggaactagcaaaatgattgttatatagtcaaagcttaataaattattacatgtatgtgtagattgatgaatggatagtggtcggactttagttcactttcagttgttcagtagctaaatatccccggtgacaattattcaaggctttaatgttgttcctccttttgcttgccttttgtacattttcctattcatttgcattctcgctgcaaaagaaacaaagaagaaatttgcattggccttttttattctatatttacttttctgatagaagaagacattaaaactccaggccaaatgaaattgctgaattatctgagtatttcaattattcatgatctccctcttacaatttagcaatttaggaaacaaagttgtataatgaatgaatgaattctttcacttattctttctttctttccacatatctcaggatctgattatcatcaggcatgaggattgtataaagtcataaaaagttgaatgtccttgttttcatggggccttgatcttgtccgtactccacataactgggtcttaaccggtctaccaggatctgcttgttttgcacttgctgatgaaaactactaactgaataatgcatccagttttatggctgtttttgtccaataggcattatttagcattattaaaacaagacatttgtttatttggtcaattaagtgattaagtaggctggtagactgtgtcttctttatagaatgttgacattttcaggtactctcctgcctctacttgtagaccagatttgtaccaactgacaggcactatgtaatgtagcaagactctgctacattggtttatactgtggccccacaaatactgtaaaatatctgagtattgaaataaacagataattaaaagtatgaaaaccaaattctatttggtataattcttccattatatttttctcatcttttaggaatatctgtatgataatcagaataactgatgcaagatgtgttctacacactcagagatcatgacttgtgtttccttttcttgaaggctcgtgaaacatggattgctttgaaaacaacagcacagtattatttggatatgaataccttcacctttgacatgtctactgcccagtaaatatgttttcctggttaaagcaggaggatgaagatggcagaggttggaatggcattgtgccaaaaccatgggttttagagatctgagggtatatccatgctgtttactacattatttattatgtctgtctcaaagttgttgaaaacagtagttatgaaaacccatgtaggaaactggaataagacattctcaataaatggtagttctcaaaaaaagaactaaaaaaaaaaaaggctgtagtaataacatttaccaaaacgatggcatttatgggaaaaggaaagcaaaaacataaacaaagaaaagtagtttcattaaaccactctgttcatagcttttactctctattgcctcttctttgagagagttttttaattcaaagaaggacagggagctctcaaatggagctgatcctcttctctcttcttcagtgcttgtcgcattcttaagtcagtcgattttaaaaccatgactttgaaacgtttttcatcaaaggtgtactgctgagtggagaatacagccttaccttaatacaacaagtagatagtggctaggaactcaatggaagtcattcacttatgcctcaaactgtggatagtactgaattagtgtactatcagtactgaattagtgtactgaattagtgtagcgaatacctactgcattagtgcattctcacactgctat

SEQ ID NO: 474508 - DNA, 936 bp, Homo sapiens
tatcaaaccactgatttgatattgcaattcttataagcagccttcctttccttctcccagcatgatcgacgcagaagatgggtgatttctgcatttccaactgaggtacctggttcttctcaatgggactggctggacagtggatgcagcccacagagggtgatccaaagcacggcagggcatcgcctcacccgggaagcgcaaggggatagcagctcctcgccagcaatggaacaaagctggatggagaatgagtttgacgagttgacagaagtaggcttcagaaggtcggtaataacaaacttcaccaagctaaaggaggatgttcgaacccatcacaaggaagctaaaaaccttgaaaaaagaatagaccaatggctaagtagaataaacagtatagagaagaccttaaatgacctgacggagctgaaaaccacggcacaagaacgagaactttgtgacgcacgcacaggcttcaatagccaattcaatcaagtggaagaaaggataacagtgattgaaaaccaaattaatgaaataaaattcaccaatgttgacatgaaggaaaaagtgttaagggcagccagagagaaggtcgagttacccacaaagggactaacagcggatctcttggcagaaaccctacaagcccgaagagagtgggggccaacattcaacattcttaaagaaaataattttcaacccagagtttcatatccagccaaactaagcttcataagtaaaggagaaataaaatcctttacagacaaggaaatgctgagagatttcatcaccaccagccctgccttacaagagctcttgaaggaagcactaaacatggaaagaaacaaccagtaccagccactgcaaaagcatgccaaattgtaaagaccatcgatgctatgaaaaaactgcatcaattaacaggcaaaataa

SEQ ID NO: 474509 - DNA, 479 bp, Homo sapiens
cagcgtgacctggatgtgagacctggatagtcccgtgtctattgttgccacattatgtccacaggtacacaatgtttagctcccccttatgaaattgcagggccactagtagcatataatgcccatcagggaaagctgcaggcaccagcgtgcaactccaacccaaaagagctgaagtgtaggctgaccctggcaaagccacagggtttgccaaatcctactgccactgacaccagtgcagccctagagcatgcccaaggcctgcagcctgcctgccacttaattcagggcccaaggccactgtattcagctgatgatgatgcagaccaaaacattttaacttctcgtgaaaatctctccagcatttcatctctctggctgtgctatctgaaaaatttgggaatcctgtgttccagatgctgtctctacaggagaaacggtaaattcttcaacaacctgtgtccctgagtgactaggtt

SEQ ID NO: 474510 - DNA, 897 bp, Homo sapiens
attttcaattaaaactaactgcagtgcgctccgtccagtttgaaattccaggcagctttgtttacactgtgatgggaaaaccgcctactcaagcctcagtaatgatggatgtccctccccctaccaagttcaagtgtcccaggtcaacttcagactactgtgctggcagcgagaatttcaagccagtggatcttaccttgctgggcgccatgggggtgggatcaactgagctagaccacttggctccctggtttcagccccctttccagggagtgaatggttctgtctctctggcattccaggcaccactaggccccaagcatcacctgaaacatgaatatagcttcaactctggagaagcaggagaacagagccgcaaagctcctgccatgacctttggtggcgatgactcatatcacagtggccatccatactcatcaatgactaataccacaggctctgcagtcagagatcaagttcaaaatcctagatctaccacttaccagatatgcaaactgcaaccatatatttaacctctttgttcctccattttctcatctgtaaagtggagataataatagaacctgtcacctaagagttttcttaaagactaaatgaaacaattcatgaaaaatgcttattagagtgtctttctggtaatatttttctataacttaagcttattaattatagttttaatgctttttaactaaaaatttaaataaaaaagaaagcatgtatatactgctaaattcagttgggaaaatattgcaagttaatttaatttttaaaaattttttaaggatgctcccatacttctaaatttaggatttgaggtttcatgcattcttagtgcacaatgataaatcagtgtaaaaggataaatcaattcacaaa

SEQ ID NO: 474511 - DNA, 719 bp, Homo sapiens
gtgagacttattcactatcacgagagcagcatgggaaagacctgccccaatgattcaattaccttccaccaggtccctcccacaacacatgggagttcaaaatgagatttgggtggggacacagccaaactatatcactaataatcagagaaatgcaaatgaaaaccacaatgaggaagaaaagcatctggatttcaaagctgcttgtgatactagatcagcaaatgtccccatgacggaatcccatgtgccctggaagaagacttctcatgtgctcgtgactattcctgaattattggcttattcctctatcactacctgtgatactggagtcttctgggtgacagtggtgaccactactggtccaaacagatcatatgtaaaagattattggagcttcattaaacagcaactgagaaaccacatgcctatttgtttgactcttattgcctctggagtcatggatgggaaacctggagctactgtccagcaagtggccttcatggcaagctccctgctagcggtcacggggatctatcaatgtagtccatcagccatctgcatagaggtcaaggtcaaaggatggagagcagacctggaggggtaaataaaggatctctttcataagaagagaaatgaacttggtcttgaagatgaggaaggagggccattgagagctgtatgcatacataaattctgatatttggaaaagcaccttg

SEQ ID NO: 474512 - DNA, 660 bp, Homo sapiens
acaggggtacatgtgcatatttattacatgggaatgttgtgtggtgctcaggaggaaaagtttgaataccttcatcttagattggcaagagaagggggataatagtctcaccaaaaggaatagaagtcttcaggccaataggggaagtatccctgggcaggcacaagttgtggctaaggcaggcctgaatctggggtgtgctcctcctgtggggctgcactcaccctggattgttctagaaaggctgtctataggtgtctccatgctgcattcctatgaaggaagctccagctgtgtctatgcgggagtgataggggatacaaggatcccttccccaaggtccttcatgatcacagaggctgcctgcctgttgaagtataggccatacaactttggatctatttgtgaggaactagaagtaggaataggtgaagattacaattgggagagagaaaccaactgggagatgtcagtgggcggtgagggagaagcctatagatggatgtgcgagtaggagaaatatcgctgaattcttttcccagcaaggagtaaccctggggaaggaatgcattcctggggctaagttttgttacaattttaagtttagtatttacacctgtgcaccatttttggttaatttttgtacgtggtataatgtat

SEQ ID NO: 474513 - DNA, 928 bp, Homo sapiens
tttttcagatgaggaaactgagggttaagtagcttacaggaatggcaactagcaagctgaatcattttgtgcttgttgctattggagagagaaaagccactgagcagagaatttttacaactgagaaattggaagaacaattcctgccttctaacaccaggtctttcagtttagcagcatcttctggccaaagttactgctgtatgtgctcccagaaattcaaattcagtgaaccttgggaactcatggatgaaccccaggctccactgggtgttcatgaaaatgtgcacagctgtgacttactggtcaagagtccaggctctggattcagcgctgagatcttgtacaagttatttgatctttctgggcctcaatttcctcatctgcagaatgaggataatgattcctcctgcagagagctgtgttgtgaattcaatgctctgcccctggactgccctggctgctgctttggtaaaagcttgcaaggagagagagtaacagccgctggcgaatccagtttgtgcaagcagcatcagcaatggatgagacctccccaaggctggaagaagactggaaaaaagtacttcagcgagaagcaggctggcagtgaaccagcttttacttatggagttggaaatgaactagatgcaatttctagaatcaactgtaaatctgaaaatccatttaagcatataaccatcctggaaaaccaacagcagctgtagcacagttaatgcccctgtcccccatagcccacttcagctctgggagagcactcagggacagagatggcagtggcttatgccaccagggagctgtatgaccatgggcaaacttagcctgatcactggcttcttcacttgtaaaccgaggtgattacgcttgcatgaggacttggagggaagatgggatgtatccttcgtgacac

SEQ ID NO: 474514 - DNA, 827 bp, Homo sapiens
taaggggagcccatctccttgcaagcattgaattctctaacagtggttctgatggcacctgtgcctgctgccgcctgcctccttagcatcatgctccatccacctccaccaataagtgaatccaaaggaaagatgcaagtgagggtcaaggttcagagggagtctcttgttcattctggcttcagctggggcttttgcaactgtgcctttgcccaagagctccagagagaagggacagaaagttttgacctctctaaaaaacatgaccttactctaaagtctattattttgcagatgacttattttgcatttaaaagaagaaagaagtgttggcaatctgcagttttacaggtagcagacaggatgacagtggtcccttccatttgttctggaatctgcaaaggtcctatttctgctactaattcttcatacatctcagcacattccccagagaaacccactacccctcattatcgtagttgaacagatggtcccaagcatttccctgaatttctgtatgatgccaagtgaaaattatcactcacggggactctctgccattctaaaaccaagatctcagttttggtttttggagacccttccccaacctggagtgtgtcagtaatcacaatttacagcatttctgttcctcttaagcaaatattacaggaatgtagtctgctcagaggaggctgtgtaaacggtttcaagttcttattgttctccatgatttatagtttaggtacatatttatcaaaactactgccctgtgatcagaaaatgtgttaatgtatatttttatagaaagcagtcaaaagtaaatatac

SEQ ID NO: 474515 - DNA, 886 bp, Homo sapiens
aagactttgtgaaggactttgagttaattctagaagaactgatgcaataatggctttccaacccctaaggctaaacgcagcaccctaaggaaaggctcaggtgagaggaggttcaaggttaaaagtcattcaaggagtacccactgactatttataatgtttaactggtattgggcagactgtcatacctagggactatatggccaccatctgggtactaccagcaactgctttcacgtgaaaaaaagatttccagaagaaacgggaagaattccaagacagcattagaaagcgtctcaacagtaggcatagggattctgcggtagctctgtagagacttctgttataaccactctgatctttgcacatcaaaaatccaagataaatcctgataaaatgaccagttgatggttatacaaataggctctggggttctaggcttggatttaccatgattttactgtgcattcatgggaacatgactcaaccctcagagccaaatcccttaaggtccaagaaggagactttttctccaaaaggaattcttccaaaagagaagccaattcagatcagcagaatgagagatgacgtcacacctgaacaccaggaaacagctcatctggctctggcactggggaagggagaatgtggaaacataaaggtgggaactgaaagcacaggcaagaatgaccaggtcatggaggctgtgcagagggtaaagttgtcacaaagagaacaagtcagctttgagaatcatttctacacccaaagagcctacagtctggactggaaaatgaagcaacacagtgaaacagagaacagtacagggtcatgcatgagccattgctatatgaacatcacagaaggtgagagattgatgtaactt

SEQ ID NO: 474516 - DNA, 978 bp, Homo sapiens
gacgttgaggctccagtgagccgtgagccatgattgtgccactgcacttcagcctaggtgacagagctagaccctgtcccaaaaaaacaaaacaaaaaacaacaacaacaaagacaagaaaagtggagaagctaccaccacccctgggcctgcgctgggtcacacttgaagccagcacagcactgggtctcaccaacacctgcagtgactacttcctggctactgacaaggttcactcaaggcccaagggctcttcagtcacaggtgggcccagaaatgccatctggaagccagagcctagagtcaggaacttaaatgaagaaattaagggccattatcataagataatgaatgtgcacgagagtgtttctggttgtttgttgccacacaagctgataaacaaaggagcagtacccaaacccaaggcatctcaactcttcagtgttctccccactgaggaaagaggaaggaaaacttgcctaacgtgtgaagagagatctcccaaatttaggcagatgggagaaagccttagggatgagcttgatggtttatctgggtatatcctcaagcctcagagggctgtgagaagaggggaacagactggaaaggatcaagaaacaagacatggagagttcaatgtcaagccaaatttccaaagaattggcagaatccaggactgtcagagtgtaaacctgtgttcttagcacctatgtgtttagctcatgtgctatcctctcaaaaccttcttccacctatctctctctcacacagcattgttagcccctttgtcacacttacccattctccttgttctataacatttatagaaatgtctttccaaaatatgaattccttagaagaggaactatattttgaccgtctttataacactctctgcttagaacacaggacccggcacacagtaggtgctcatatgtttaggtttgtcaaagatcagatagttgtaggtatgcggcg

SEQ ID NO: 474517 - DNA, 514 bp, Homo sapiens
cagtgacgtctcctttgcccagctgctctccagacttttgccttcctctgtgaagctgttcatgaaatgcccgttcttccctagcactgtggtcaccagatgtgatgctctgcacacagagctggatgagatcagccacacaggaggccccatttgtgaaagccatggggcacgctcaagaaaagcacctccattaattattctgttgtcaaactggaccagccaaataacatggatccttcacaagaccaaagccactgtcttgccccaaaagcacatccttgaaacacaagaaaggcacagcattactgccaataaacgggtgtttaaatttaccaagagggtggaggttaacttttccaaggtctcacagaaagaaagtggaaacaggcaagagtctgatgtgcacttaagctccatcactaatatctatttgttctgcaatgaagaggaattaaaggagaggaaaatagaaggttgcatgtttcagagaggatttcaagctggctgagga

SEQ ID NO: 474518 - DNA, 422 bp, Homo sapiens
agtgaccagtaggggccaagatcatggtggttggctccaccatcaatgatgttttagcagtaaacacacccaaagatgctgcgcagcaggatgcaaaggccaaagacaacaagaaggagcctctctgcaggcagaaacaacacaggaaagcgttggataaaggaaaacccgaagatgtgatgccatctgttaagggggcccaggagcacctacaaaaggtacccctgcccagcatgtacaataagtccggaggaaaagtgagattcaccttgaagttagaacaacaccgactgtggattggcagtaaagagcggactgagaaattgcccatgggatccataaaaaatgtggtcagtgaacatatggaaggacatgaagactaccacatgatgggtttcattgatttttgtatatgataggag

SEQ ID NO: 474519 - DNA, 1439 bp, Homo sapiens
tacttagccaaagcccacagcaagtgttacactggagcggaggggtgaaagaagactggggattggtcaggcagacagagaaaggcactgcaggtggagggaacggcctatgtggaggcatggaggtgacacaggggagctccaggagttggagaggaagctggaggaccagctggtgcagcaggaggcagcccagcagcagcaggccctggcgagctggcagcagtgggtggccgatgggcccgggattctgaacgaacctggggaggtggattctgaaaggcaggtctctactgtcctgcaccaagccctgagcaagagccagacattactggagcaacatcagcagtgtttgagagaggaacaacagaacagtgtcgtgctagaagacttgttggaaaacatggaggcagacacctttgcaaccctgtgcagccaggagctgagactggcatcgtacctggcgaggatggccatggtgcccggggccacgcttcgccggctcctgagtgtggtactgcccacagcctcacagcctcagctgctggccctgctggattcggccaccgagagacatgtggaccacgcagctgagagcgatggcggagcggagcaggccgacgtgggcaggcggaggaaacaccagagctggtggcaagccttagatggcaaactgcgaggagatctgataagcagaggattagaaaagatgctgtgggcccgcaagagaaagcagagcatattaaagaagacatgtctccctctcagagagaggatgatattctctggaaaaggaagttggccacacctgtcactggagcccattggcgaactggcccctgtacccattgtaggggcagaaaccattgatctattaaacacaggagagaagctctttatattcagaaatccaaaggagccagagatctcactgcacgttcctcccaggaaaaagaagaactttttgaatgccaaaaaggccatgagggccttgggcatggactagcccaagggaaagacctgcgggagcatctgaagagagaagggatgattttctcctgcccgccggtgtttgtgtgtttataatgcacaactcgcaaatataaattgcacatgcagaaggcacagaccccgtagcgcatgccaacttgcagggactcggtttaatcttgtctcatgaatttccagatggcccactctcttccatatcacaaggacataaacactccttctttcagccccacctccccagggccctggaggagacccccaccctgcaatccacaccccatcctctgctgcagaagctatggtctgtgtggtgacagccagattctctactcttatgttttgtatttgttacatattctatttttataaagggaatttaaaaaaataaatgtgttttgcacaaagctgtttattacaaaacccatgtt

SEQ ID NO: 474520 - DNA, 911 bp, Homo sapiens
catcaacagcaaagacaagctcccaagttaacttttcaatgctccacgggaaaatgggtgttaaaatgttgagaatgccacctgcttccactttcaatagaaactctttgtactttcatgcaactgctcctttggggatccctctccctactgaatatgattctagaggggctgtccctggggcacagcccaccagacaggtgaacgtggcactgggtctggcacttcacaatggaatttttgaaatggacaagtgttctttgagtctgtctttccaggcaactgaactgtggctggtttggccaaaagaggtatacggcgggttatctgagcttccattggaatattcctctgatctccagcaagagccttgccttctcatcacctgtgaaggtggcagtggctgtgccaaagctctgttactgagtagtgtggggatgctgttagcggcagcagctgtaatcaggcaacttgggggtgtgcactttgcttgcacttcagccccacagcaccctgcagcagtgggtgggaatttgtcctcacagcacataaaaatgtgcagtcacccctctactagaggtcgggtggtgtcactgccagttgctccctccttggttcctaaagcaacggctatgggtggggaatgtccatgggattccagagatgcaaaagcgcaaggggtgttgggccctagggaagaatgcagtctggtgtggctgggctctcaaaatggcagcctgctgcagctgcttaggactgggaagaaggtgtgggacacagaatggactccctctctggagcagtgccttcccacagtctccatgcagttccttatgttagtctcaggggccagaaagattgaggggctctcccatggctaggactgtaggaatctgttgtgggaatctgga

SEQ ID NO: 474521 - DNA, 2890 bp, Homo sapiens
agaccaaggcgacaagatgagaacctctcaaagccatccagcacctccaggcagaggcagttgggggcaggagcagtcgcgtgatgaggtgaaggcaggcttcaggtccacggtgcccccgtcccactggaggggctttgcagactgtaaagtgctatctatctgtataaatgcagaatattgcccttgtgccttcatggttttatttatttcaatctatatccttcatgcttctaaagaatttgtagtggctgacaaaggacaggtaagactgatagaggagatagtgggaaaaatgtacaacgaaggagaggcacacgtactgttcacggggacagacagtgagcctgaaacagtagctcctgctcccttagcagtggaaagaaagcaaagggcaatggggaatgaccaacacagccctcaccacttgattaaataagatgaagccaaactgctcttcttgggccaaattccaaaagacatttataacttgcattctcttacaaggggcattgaatgaaagaatgggaaaggataaatgataactcacatatgctaagtgcttcctatgtagtagccatggtcctaagtgctttttttttaataccattgaccgaggctccttgctctatgtgagctctttacattggagatctcacttaatcttccaacactttggtgtaggcattattatggctattttagaggtgacagaactgatgttcagagaagctgagtaacttgcctagagtcgcactcagctttgctccaaccccctccctctgaaatccttttgccaaccacatcttcaaagcccttttgtactctctcaaagacccttcccttcaactacacagtgcatactcttctgagtctacagtgatgcacttctcatcattcagtatacatgcatcatctattgaacataatcgacctgttcctaaaaaccagtcattctgtttgaagacactaagaatgtatttcccattatttaagtgggaaaaattacaatgcatcactcttcaacccaaatttcttaaccaatttcttaaaatacaatgtaaacacaacaaaatagataggatatccatctgctaatatgtcaagtgtttccattccatcctcatgatcaaacactaaatatagttaatgatgttttagttttgggcttttgcagtaacatggtcttgtttaccctcagcagtgtctaagacgcacatccctgtggcgatacatacttaatgtgatttttcaaactgactacacttggttcttacatttcactagttgtatttgaaatgtaacttgagacttgacctgatatcacattgttaaaaatgttatattgagtttcaaggctgtaaatataatttttttcaatgtaaacaatagctgaaaaagtactgatagatacacacagggttaagccatgtgaaattgccaatgcttaccattttgactatggaataacaatttcacatggttcaacctaatacagtccatgcagccttagtaatgaaaatcaagaggcactggaccaagaaaatgttaagtgcagaggcgttctgcagggtgaatatgcctgaatgtttgttgaacacctactatgtaccaggccctatcatgggagggggaatcattcatcaaccagatgtggccgctctactcaaggtgctcattgtactctaggaggggaaggataagataaacatacatacagttttagataatattgagtttatgcatattaattacttgaagcagtgtttgacatataaatactcagtgggaattgaacaatgagaacacatggacgcaggaaggggaacatcacactctggggactgttgtggggtgtggggaggggggagggatagcattaggagatatacctaatgctaaatgacgagttaatgggtgcagcacaccagcgtggcacatgtatacatatgtaactacctgcacattgtgcacatgtaccctaaaacttaaagtataataacaaaataaaaaaagaaacctaataataaaataaaaaaaaaactaaacaagaaactgtgtaaaactggtgctaattcttcctcaaacgtttgatagaattctcttgtgaaatcatctgagcctgatttaattttcagaagctattgtgaatttaatttatttaacagatataggagtgttcattttttccttagttgaattttggtagtttgtgctttttgaggaattggtccatttcttctaagctatcaaaattatgagtaaaaatgtgttcacaatattctctttatctgtttaatggctgcagaatctgtgttggtagcctctgtttcattcctggttttcattatttgttcttctttcattttatgtttgtcagtcttgctagagcttgatcaactttcttaaatatttttgaagaatcagcttattctttcattgattttctctactgttctcctattttcaatttcattgatttctactgtttattatttcattctttcagcttgccttgggtttattttgctctttttaatttttattatgtttaattgacccacagtaattgtacgtatttacgaggtactgtgtgatattttgatacatgtatgcaatgtgtaatgataaaaatcagagtaattagcataagcatcatctcaaaggtttatcatttctttgtgttggtaacattcaaaatctgctcttccagtatgttgttgactatgggtttgtcatgtatggccttcattttgttgaggtatacaagataatttattaaacaaatattcactgaataccaactacacgttaggcactggtttaggtgctctggatacattattaagtaaaaggaatcatgtccctgcatccatggggttacctaatt

SEQ ID NO: 474522 - DNA, 1414 bp, Homo sapiens
tggcacacagtaggtgctcactgagcgctcactggatggataaatgatgaatgcacaaatgagagccccagctcctaaggatccatctaagaactcagagactcaagggaaggtggaaccacaggtggaaggagccttgatgcctgagtcactgcctggaggaaggccactgcctggccacaccattggaggctacggctcctccctgggtgctagaattcgggagctgctccaaggccctgctgattttggacaggaggaccccaacttactggggctgtgtacctactgcgtgccaggggctaacacaccagactttattttatcctcacaacaggccagagagcaccgtgaagctggcgccaagtctgcttcctcctgcctggtgtgtgacccggcacagagcagacgctcgaggaacattgacgacctaaaatctccccgatgcagggtctggacttgggctggatagagaagttctaataatagctcacatcggcaaaaggtttgttacgtgttctttgttcctcaagataaacactattagctgttcaccttgaagcaacagactcactttgttcattctcaaaaaatgtctaccgagagataccatcttctgtaccaaaaatagacaagagaatgctgtcaatattggtgtactgtaatgtgaatctatactggtgaaaacaattttttgttccccttattaaaaacttagtgtccttttctcaaaaaaaaaaattgtctaccaaaaacacaagtccgaataaccatggttagcctgtcaatcattctttcaaataaaaagggtactcggtgaagaaggcagtgagtttcgcttaccactcaaatgactgcacgactgtgtttcttccatctgcagtggaagtgctttatgcaggcttcccattttgtcacacagaatgctgaaaagacattctcaaagattgagatttgacaatccttaacgaattttattgcttcattgaagattatgtgtttatgttttactgactgcatgatggtgaacaataccgtaactattagcatagtatagcatagcatagcatagcatagcatagcatagcatagcatagcatagcatagcatagcatagcatagcatagcatagcatagcatagcatagcatagcatagcatagcatagcatagcatagcatagcatagcatagcatagcatagcatagggtggggccagcattttgattcgagttaagccttagcggttttccccactgttggatttgtatcatcagtgattagtcaacagagtaaaatataacttagtgttagtagtattagtattaatactaacattaggatacaatattaatattactatcaacacaagattttacctcatagacctcagagaatgtccaggggtccatggg

SEQ ID NO: 474523 - DNA, 693 bp, Homo sapiens
gaagcggtgaccttctggtttcccatcttaccatggtggaaaccttagtagccaccctggccagtcactccgaggcggttcagcctccagctcctctttagccttcccaagaggtttgcaagcacctcatcccctgttaagtctctgagaaaacagaaggggccttgggagttggtgttgccagatgcagcacacagaggtttgggatgatgcctcctaatatgctgtgcggttctggagccataggcactgcagggaagcagaatgaggagcaggacctcagggggtccatgtggccagtgctgctgcccagggctgtattctacatgctccaggctttcctgtgcgtggcccaggggatgagtgtggagctcatcctcagctacagccccatttgggggtcagggtccaagaactcaggggactgggccaccatcctggaggagggagagaagggggcctgtgagctcagtgagggagactggatcctcttcccactgaccaagactgtgtggcctgcaagattggacccaaggtggaatccagcggagaatgttacctggggcctggggccatcacccccaggcattcgtggaggcccccgtctgaccacctccttgcagagctgttagcccatctcacagtctgctccaccacttgctagctgtagcggtgtcaccatgcacctgttac

SEQ ID NO: 474524 - DNA, 844 bp, Homo sapiens
tttcttgcattattaactaatctaggttttgtggcatatgttagcccagtccagcagggagcatgacgtcaggggttatacaagaagaagacaggaagatgagggaaagtttgaaacatcctacagacttgttgaatggctttgaccaaaatgctgatagtgatatggacaataaagtccaagctgaggtggtctcagatggagatgaggaacttattgggaacttcttaggtgcaaagccccagcgctgccacctgccccccgacccagcagccccctttggagccctcctccttcatctggcggggccatcccagagctcacaggacactggctgtgagggtactgtgaggaggggagctcaggcagtaatgttcgctcacccaccactcacctgctgtgtagcccagttcctaacaggccaaggatcggtaccagtccacagcccagagattggggacccctgccacagatgaatggaagggagaaaaccacaggctcagattgataaatcaccaattaaaagatgagtgtgagaatcagaagatctctttggcaaggtttcagtgacttttttctctgcagctggagttggactgagctggagaccagacacaggacttaactggaagatagcagaacttcaaggaagattgattgctcagcctaggtgagtcttctgtgacatagaggaacagaagcacagagcagaatcttgagacctggattagagatatttgcatagatgtaaccgagaactttgaaattcccttgagccctctgaccctaaagagtggcccatcccccttgttggaagttaatgggggtccacagcttgaagacc

SEQ ID NO: 474525 - DNA, 5083 bp, Homo sapiens
gaggacaagtcgacgagagatcccgagtacgtctacagtcagccttacggtaagcttgtgcgctcggaagaagctagggtgataatggggcaaactaaaagtaaaattaaaagtaaatatgcctcttatctcagctttattaaaattcttttaaaaagagggggagttaaagtatctacaaaaaatctaatcaagctatttcaaataatagaacaattttgcccatggtttccagaacaaggaactttagatctaaaagattggaaaagaattggtaaggaactaaaacaagcaggtaggaagggtaatgtcattccacttacagtatggaatgattgggccattattaaagcagctttagaaccatttcaaacagaagaagatagtgtttcagtttctgatgcccttggaagctgtataatagattgtaatgaaaacacaaggaaaaaatcccagaaagaaacggaaggtttacattgcgaatatgtagcagagccggtaatggctcagtcaacgcaaaatgttgactataatcaattacaggaggtgatatatcctgaaacgttaaaattggaaggaaaaggtccagaattagtggggccatcagagtctaaaccacgaggcacaagtcatcttccagcaggtcaggtgcccgtaacattacaacctcaaaagcaggttaaagaaaataagacccaaccgccagtagcctatcaatactggccgccggctgaacttcagtatcggccacccccagaaagtcagtatggatatccaggaatgcccccagcaccacagggcagggcgccataccctcagccacccactaggagacttaatcctacggcaccacctagtagacggggtagtgaattacatgaaattattgataaatcaagaaaggaaggagatactgaggcatggcaattcccagtaacgttagaaccgatgccacctggagaaggagcccaagagggagagcctcccacagttgaggccagatacaagtctttttcgataaaaatgctaaaagatatgaaagagggagtaaaacagtatggacccaactccccttatatgaggacattattagattccattgctcatggacataaactcattccttatgattgggagattctggcaaaatcgtctctctcaccctctcaatttttacaatttaagacttggtggattgatggggtacaagaacaggtccgaagaaatagggctgccaatcctccagttaacatagatgcagatcaactattaggaataggtcaaaattggagtactattagtcaacaagcattaatgcaaaatgaggccattgagcaagttagagctatctgccttagagcctgggaaaaaatccaagacccaggaagtacctgcccctcatttaatacagtaagacaaggttcaaaagagccctatcctgattttgtggcaaggctccaagatgttgctcaaaagtcaattgccgatgaaaaagcccgtaaggtcatagtggagttaatggcatatgaaaacgccaatcctgagtgtcaatcagccattaagccattaaaaggaaaggttcctgcaggatcagatgtaatctcagaatatgtaaaagcctgtgatggaatcggaggagctatgcataaagctatgcttatggctcaagcaataacaggagttgttttaggaggacaagttagaacatttggaggaaaatgttataattgtggtcaaattggtcacttaaaaaagaattgcccagtcttaaataaacagaatataactattcaagcaactacaacaggtagagagccacctgacttatgtccaagatgtaaaaaaggaaaacattgggctagtcaatgtcgttctaaatttgataaaaatgggcaaccattgtcgggaaacgagcaaaggggccagcctcaggccccacaacaaactggggcattcccaattcagccatttgttcctcagggttttcagggacaacaacccccactgtcccaagtgtttcagggaataagccagttaccacaatacaacaattgtcccccccacaagcggcagtgcagcagggagcccccacaaaaaatccccacaggggtatatggccccctgcctgaggggactgtaggactaatcttgggaagatcaagtctaaatctaaaaggagttcaaattcatactagtgtggttgattcagactataaaggcgaaattcaattggttattagctcttcagttccttggagtgccagtccaggagacaggattgctcaattattactcctgccatatattaagggtggaaatagtgaaataaaaagaataggagggcttggaagcactgatccaacaggaaaggctgcatattgggcaagtcaggtctcagagaacagacctgtgtgtaaggccattattcaaggaaaacagtttgaagggttggtagacactggagcagatgtctctatcattgctttaaatcagtggccaaaaaattggcctaaacaaaaggctgttacaggacttgtcggcataggcacagcctcagaagtgtatcaaagtatggagattttacattgcttagggccagataatcaagaaagggcggccactgtagagcctcctaaacccataccattaacttggaaaacagaaaaaccggtgtgggtaaatcagtgtccgctaccaaaacaaaaactggaggctttacatttattagcaaatgaacagttagaaaagggtcatattgagccttcatcctcgccttggaattctcctgtgtttgtaattcagaagaaatcaggcaaatggcgtatgttaactaacttaagggccgtaaacgccgtaattcaacccatggggcctctccaacccgggttgccctctccggccatgatcccaaaagattggcctttaattataattgatctaaaggattgcttttttaccatccctctggcagagcaggattgtgaaaaatttgcctttactataccagccataaataataaagaaccagccaccaggtttcagtggaaagtgttacctcagggaatgcttaatagtccaactatttgtcagacttttgtaggtcgagctcttcaaccagttagagaaaagttttcagactgttatattattcattatattgatgatattttatgtgctgcagaaacgaaagataaattaattgactgttatacatttctgcaagcagaggttgccaatgctggactggcaatagcatctgataagatccaaacctctactccttttcattatttagggatgcagatagaaaatagaaaaattaagccacaaaaaatagaaataagaaaagacacattaaaaacactaaatgattttcaaaaattactaggagatattaattggatttggccaactctaggcattcctacttatgccatgtcaaatttgttctctatcttaagaggagactcagacttaaatagtaaaagaatgttaaccccagaggcaacaaaagaaattaaattagtggaagaaaaaattcagtcagcgcaaataaatagaatagatcccttagccccactccaacttttgatttttgccactgcacattctccaacaggcatcattattcaaaatactgatcttgtggagtggtcattccttcctcacagtacagttaagacttttacattgtacttggatcaaatagctacattaatcggtcagacaagattacgaataataaaattatgtggaaatgacccagacaaaatagttgtccctttaaccaaggaacaagttagacaagcctttatcaattctggtgcatggcagattggtcttgctaattttgtgggaattattgataatcattacccaaaaacaaagatcttccagttcttaaaactgactacttggattctacctaaaattaccagacgtgaacctttagaaaatgctctaacagtatttactgatggttccagcaatggaaaagcagcttacacagggccgaaagaacgagtaatcaaaactccatatcaatcagctcaaagagcagagttggttgcagtcattacagtgttacaagattttgaccaacctatcaatattatatcagattctgcatatgtagtacaggctacaagggatgttgagacagctctaattaaatatagcatggatgatcagttaaaccagctattcaatttattacaacaaactgtaagaaaaagaaatttcccattttatattactcatattcgagcacacactaatttaccagggcctttgactaaagcaaatgaagaagctgacttactggtatcatctgcactcataaaagcacaagaacttcatgctttgactcatgtaaatgcagcaggattaaaaaacaaatttgatgtcacatggaaacaggcaaaagatattgtacaacattgcacccagtgtcaagtcttacacctgcccactcaagaggcaggagttaatcccagaggtctgtgtcctaatgcattatggcaaatgcatgtcacgcatgtaccttcatttggaagattatcatatgttcatgtaacagttgatacttattcacatttcatatgggcaacttgccaaacaggagaaagtacttcccatgttaaaaaacatttattgttttgctataatgggagttccagaaaaaatcaaaactggcaatggaccaggatattgtagtaaagctttccaaaaattcttaagtcagtggaaaatttcacatacaacaggaattccttataattcccaaggacaggccatagttgaaagaactaatagaacactcaaaactcaattagttaaacaaaaagaagggggagacagtaaggagtgtaccactcctcagatgcaacttaatctagcactctatactttaaattttttaaacatttatagaaatcagactactacttctgcagaacaacatcttactggtaaaaagaacagcccacatgaaggaaaactaatttggtggaaagataataaaaataagacatgggaaatagggaaggtgataacgtgggggagaggttttgcttgtgtttca

SEQ ID NO: 474526 - DNA, 1637 bp, Homo sapiens
ttctgtcttcaggtagtttaggaaacatgttttatgcttatgttactgctgcagctgctattaccacttctactactgccttacaactgcttaatatttcacagttttcagagaactttcatgttgagcaatgtttaaagcgtttgaaaaacatgaatttggagggctcaattcaagacctgtttgagttgttttcttccaaggttctctataaaggtgtcttaaaaaggttgattttgttatatgagcctttgtttggattgcttcaagaggtcgctaggattcaaccaatgccttacttcaaagattttacctttccttctgatatcactgaatttttaggacagccatattttgaagcctttaagaaaaaaatgcctatagcttttgcagctaaaggaataaataaattgctaaataaactgtttttaataaatgagcagtcaccaagagccagtgaagaaaccttgcttggaatttcaaaaaaagctaaacaaatgaagatcaatgtacagaataatgtggatcttggacagccagtaaagaataagagagtcttcaaagaagagtcatcagaatttgatgtgagggctttctgcaaccagctgaaacacaaagctactcaggagaccagttttgattttaaatgttctcaatccagactaaagacaaccaagtattcttctcagaaagtgataggaactcctcatgccaaaagttttgtgcaaagattccgagaggctgagtccttcacacaactttctgaagaaatccagatggcagttgtatggtgcaggagcaaaaaactcaaggctcaggccatttttctgggtaacaaacttcttaaaagcaaccggcttaaacatctggaagctcaaggtactagtttgccaaagaaactagagtgcataaaaacgtctatttgcaaccaccttcttcgtggctcaggtatcaaaacttcaaagcatcatctgagacagagaagatcacagaataaatttttacggagacaaaggaaaccacagagaaagttgcagtcgactcttttaagggaaattcagcagttctctcaagggactcggaagagtgctacagataccagtgctaagtggagactctcacactgtactgtgcatagaactgatctctaccctaacagtaagcagctcttgaatagtggagtttcaatgcctgtcatacaaactaaggagaaaatgattcatgaaaatcttagaggcatccatgaaaatgaaactgattcgtggacggtgatgcaaataaataaaaacagtacatcaggaaccattaaggagacagatgacattgatgatatttttgctttaatgggagtttagatgttcgttcatatgtgagacttttaagtgattaacaaggctagttcagtgttctaagtagaactgctaagatctggaagtaccacctggactcacagaggagctgctttagtgcagcattgcacaggagttcatttcagttcagtctacatttaaagtagcattgtgtcatttcatcaacaagtatttcttttttggcttcaactacatgtcaggtgttaatatgaaaaatctgccacagcctacccttgagaagcagatgtaattccttgagtgaggcta

SEQ ID NO: 474527 - DNA, 2532 bp, Homo sapiens
agacagctcctaaatgccatgtaaatgactttctgtctttcaggcatacagagcaggacacctgtgttgtgatgtcttatggcctactttcaggggaggctttccagtgcactcagaagcatcactgctactgtaacagtcgtggagtcagtgggcttcagagggcacttcctcacagtcagcttcaggtgactaagtatgatgctgcagcacaccaaggatttctaatacccaatttccccatcactactgtgtttaaagctaaggacatggccaaaccaaccacagaatttcatttagaggggccgtttcctgggaccacttctggttccaaatatcatatcagtcaaagtccattaaggaagggacttacggaattgggacccagacctctgaggacagaacaccatcccggtgctgctagtacctctgagggaaagccaggtattgtccaaggtttctccccatgtgatagtctgaaatatggcctcgtgggaagggaaagacctgaccgtcccccagcccgacacccggtgaaggtacgctcgagcgtggtcattgaggacaagtcgacgagagatcccgagtacgtctacagtcagccttacgaacaaggaactttagatctaaaagattggaaaagaattggtaaggaactaaaacaagcaggtaggaagggtaatgtcattccacttacagtatggaatgattgggccattattaaagcagctttagaaccatttcaaacagaagaagatagtgtttcagtttctgatgcccttggaagctgtataatagattgtaatgaaaacacaaggaaaaaatcccagaaagaaacggaaggtttacattgcgaatatgtagcagagccggtaatggctcagtcaacgcaaaatgttgactataatcaattacaggaggtgatatatcctgaaacgttaaaattggaaggaaaaggtccagaattagtggggccatcagagtctaaaccacgaggcacaagtcatcttccagcaggtcaggtgcccgtaacattacaacctcaaaagcaggttaaagaaaataagacccaaccgccagtagcctatcaatactggccgccggctgaacttcagtatcggccacccccagaaagtcagtatggatatccaggaatgcccccagcaccacagggcagggcgccataccctcagccacccactaggagacttaatcctacggcaccacctagtagacggggtagtgaattacatgaaattattgataaatcaagaaaggaaggagatactgaggcatggcaattcccagtaacgttagaaccgatgccacctggagaaggagcccaagagggagagcctcccacagttgaggccagatacaagtctttttcgataaaaatgctaaaagatatgaaagagggagtaaaacagtatggacccaactccccttatatgaggacattattagattccattgctcatggacataaactcattccttatgattgggagattctggcaaaatcgtctctctcaccctctcaatttttacaatttaagacttggtggattgatggggtacaagaacaggtccgaagaaatagggctgccaatcctccagttaacatagatgcagatcaactattaggaataggtcaaaattggagtactattagtcaacaagcattaatgcaaaatgaggccattgagcaagttagagctatctgccttagagcctgggaaaaaatccaagacccaggaagtacctgcccctcatttaatacagtaagacaaggttcaaaagagccctatcctgattttgtggcaaggctccaagatgttgctcaaaagtcaattgccgatgaaaaagcccgtaaggtcatagtggagttaatggcatatgaaaacgccaatcctgagtgtcaatcagccattaagccattaaaaggaaaggttcctgcaggatcagatgtaatctcagaatatgtaaaagcctgtgatggaatcggaggagctatgcataaagctatgcttatggctcaagcaataacaggagttgttttaggaggacaagttagaacatttggaggaaaatgttataattgtggtcaaattggtcacttaaaaaagaattgcccagtcttaaataaacagaatataactattcaagcaactacaacaggtagagagccacctgacttatgtccaagatgtaaaaaaggaaaacattgggctagtcaatgtcgttctaaatttgataaaaatgggcaaccattgtcgggaaacgagcaaaggggccagcctcaggccccacaacaaactggggcattcccaattcagccatttgttcctcagggttttcagggacaacaacccccactgtcccaagtgtttcagggaataagccagttaccacaatacaacaattgtcccccccacaaacggcagtgcagcagtagatttatgtactatacagtcagtccctctgataccagggggatagttaccgacaagcatctttaaaaaaggccaa

SEQ ID NO: 474528 - DNA, 1588 bp, Homo sapiens
tggcgtatgttaactaacttaagggccgtaaacgccatgcaacttaatctagcactctatactttaaattttttaaacatttatagaaatcagactactacttctgcagaacaacatcttactggtaaaaagaacagcccacatgaaggaaaactaatttggtggaaagataataaaaataagacatgggaaatagggaaggtgataacgtgggggagaggttttgcttgtgtttcaccaggagaaaatcagcttcctgtttggatacccactagacatttgaagttctacaatgaacccatcggagatgcaaagaaaagggcctccacggagatggtaacaccagtcacatggatggataatcctatagaagtatatgttaatgatagcgaatgggtacctggccccacagatgatcgctgccctgccaaacctgaggaagaagggatgatgataaatatttccattgggtatcgttatcctcctatttgcctagggagagcaccaggatgtttaatgcctgcagtccaaaattggttggtagaagtacctactgtcagtcccatcagtagattcacttatcacatggtaagcgggatgtcacttaggccacgggtaaattatttacaagacttttcttatcaaagatcattaaaatttagacctaaagggaaaccttgccccaaggaaattcccaaagaatcaaaaaatacagaagttttagtttgggaagaatgtgtggccaatagtgcggtgatattacaaaacaatgaattcggaactattatagattgggcacctcgaggtcaattctaccacaattgctcaggacaaactcagtcgtgtccaagtgcacaagtgagtccagctgttgatagcgacttaacagaaagtttagacaaacataagcataaaaaattgcagtctttctacccttgggaatggggagaaaaaggaatctctaccccaagaccaaaaataataagtcctgtttctggtcctgaacatccagaattatggaggcttactgtggcctcacaccacattagaatttggtctggaaatcaaactttagaaacaagagatcgtaagccattttatactgttgacctaaattccagtctaacagttcctttacaaagttgcgtaaagcccccttatatgctagttgtaggaaatatagttattaaaccagactcccagactataacctgtgaaaattggagattgcttacttgcattgattcaacttttaattggcaacaccgtattctgctggtgagagcaagagagggcgtgtggatccctgtgtccatggaccgaccgtgggaggcctcactatccgtccatattttaactgaagtattaaaaggtgttttaaatagatccaaaagattcatttttactttaattgcagtgattatgggattaattgcagtcacagctacggctgctgtagcaggagttgcattgcactcttctgttcagtcagtaaactttgttaatgattggcaaaagaattctacaagattgtggaattcacaatctagtattgatcaaaaattggcaaatcaaattaattgatctt

SEQ ID NO: 474529 - DNA, 2552 bp, Homo sapiens
gaggacaagtcgacgagagatcccgagtacgtctacagtcagccttacggtaagcttgtgcgctcggaagaagctagggtgataatggggcaaactaaaagtaaaattaaaagtaaatatgcctcttatctcagctttattaaaattcttttaaaaagagggggagttaaagtatctacaaaaaatctaatcaagctatttcaaataatagaacaattttgcccatggtttccagaacaaggaactttagatctaaaagattggaaaagaattggtaaggaactaaaacaagcaggtaggaagggtaatgtcattccacttacagtatggaatgattgggccattattaaagcagctttagaaccatttcaaacagaagaagatagtgtttcagtttctgatgcccttggaagctgtataatagattgtaatgaaaacacaaggaaaaaatcccagaaagaaacggaaggtttacattgcgaatatgtagcagagccggtaatggctcagtcaacgcaaaatgttgactataatcaattacaggaggtgatatatcctgaaacgttaaaattggaaggaaaaggtccagaattagtggggccatcagagtctaaaccacgaggcacaagtcatcttccagcaggtcaggtgcccgtaacattacaacctcaaaagcaggttaaagaaaataagacccaaccgccagtagcctatcaatactggccgccggctgaacttcagtatcggccacccccagaaagtcagtatggatatccaggaatgcccccagcaccacagggcagggcgccataccctcagccacccactaggagacttaatcctacggcaccacctagtagacggggtagtgaattacatgaaattattgataaatcaagaaaggaaggagatactgaggcatggcaattcccagtaacgttagaaccgatgccacctggagaaggagcccaagagggagagcctcccacagttgaggccagatacaagtctttttcgataaaaatgctaaaagatatgaaagagggagtaaaacagtatggacccaactccccttatatgaggacattattagattccattgctcatggacataaactcattccttatgattgggagattctggcaaaatcgtctctctcaccctctcaatttttacaatttaagacttggtggattgatggggtacaagaacaggtccgaagaaatagggctgccaatcctccagttaacatagatgcagatcaactattaggaataggtcaaaattggagtactattagtcaacaagcattaatgcaaaatgaggccattgagcaagttagagctatctgccttagagcctgggaaaaaatccaagacccaggaagtacctgcccctcatttaatacagtaagacaaggttcaaaagagccctatcctgattttgtggcaaggctccaagatgttgctcaaaagtcaattgccgatgaaaaagcccgtaaggtcatagtggagttaatggcatatgaaaacgccaatcctgagtgtcaatcagccattaagccattaaaaggaaaggttcctgcaggatcagatgtaatctcagaatatgtaaaagcctgtgatggaatcggaggagctatgcataaagctatgcttatggctcaagcaataacaggagttgttttaggaggacaagttagaacatttggaggaaaatgttataattgtggtcaaattggtcacttaaaaaagaattgcccagtcttaaataaacagaatataactattcaagcaactacaacaggtagagagccacctgacttatgtccaagatgtaaaaaaggaaaacattgggctagtcaatgtcgttctaaatttgataaaaatgggcaaccattgtcgggaaacgagcaaaggggccagcctcaggccccacaacaaactggggcattcccaattcagccatttgttcctcagggttttcagggacaacaacccccactgtcccaagtgtttcagggaataagccagttaccacaatacaacaattgtcccccccacaagcggcagtgcagcagggagcccccacaaaaaatccccacaggggtatatggccccctgcctgaggggactgtaggactaatcttgggaagatcaagcctaaatctaaaaggagttcaaattcatactagtgtggttgattcagactataaaggcgaaattcaagtggttattagctcttcagttccttggagcgccagtccaggagacaggattgctcaattattactcctgccatatattaagggtggaaatagtgaaacaaaaagaataggagggcttgtaagcactgatccaacaggaaaggctgcatattgtgcaagtcaggtctcagagaacagacctgggtgtaggccattatgcaggaaacagtatgaaggtggtgacactggacgagagcctatcatgcttaacaggccaaaaatgcctaacaaagcgtacagactgcgctagccagctcaaggatcaagagaattactgctagcgaa

SEQ ID NO: 474530 - DNA, 725 bp, Homo sapiens
gggaagccatacctcttgtctgtaagcatgttgtgggagctccagctttatgtaactgtaagcgggaccatcctgaagatgatcaaagaggcgggcgccatcatcagcacccggcattgcaatccgcagaacggggatcgctgtgtggccgctctggctcgggtcgagtgcacccacttcctgtggcccatgtgcatcggtgaggtggcccacgtcagcgcggagatcacctacacctccaagcactctgtggaggtgcaggtcaacatgatgtccgaaaacatcctcacaggtgccaaaaagctgaccaataaggccagccacccttttggagcaggaggaggagggccagaagcggtacaaaacccagaagtggagcgcatggagaccaactggaggaacggggacatcgtccagccagtcctcaacccagagccgaacactgtcagctacagccagtccagcttgatccacctggtggggccttcagactgtaccctgcacagcttcgtgcatgaaggggtgaccatgaaggtcatggacgaggtcgccgggatcttggctgcacgccactgcaagaccaacctcgtcacagcctccatggaggccattaattttgacaacaagatcagaaaaggctgcatcaagaccatctccggacgcatgaccttcacgagcacttattttttgtcataattatactaattataaataagtaataattg

SEQ ID NO: 474531 - DNA, 651 bp, Homo sapiens
cccgctgcccctgtgcttcccctccccgctcccctttcgcagcccctcccccacaggcccagtgtacccagacctgatctacgctggcttgaaggcaggatggggtcagatttgactctgtgtccgcagagtccggtgactggacagtccccagatctggggccccgtggagcctggtgaagtgacaatggctgccctcccggcctgtgggtggtctgctggcccaggaggcccaggtgacagtgtgaccccacgtttcccaccacatcagccttccagcctgcagcagtttgccagatttggcaggaacttcttcaggtatctcacttgtctcatgggaccctgcaggctcctagataagattgctggatccctgcagctggctgccccggctgccgacctctgtgcacctcagggcggcctgaggtggggattcttggaagtgtgggtcctggcagatggtgtcagtagaacactccagaatgtagcgtcagaaattggccttggacactcaggcacagcacctgcttcgagaaggaagagcagaggcccctggaaggaggggctgggcaaggggtggtgagaaaggggtgccctggaagcctgcatgctgctcaagtgttgttaccgcccatggtagctatctcaccc

SEQ ID NO: 474532 - DNA, 645 bp, Homo sapiens
aatgatatccagcatacagtaaaaagtgtgaagaaacaggtggaatggggttccaggagtgccaggctaagcaggaagccccctggaagctcccagggcccaaggacgcaggccacgtggtggcctccaggacccgagccgcgcgcttaacttctcgggctgggtccggcgggctgccccgccccggaacaagccccagccccactgtcaccgttggggatggagggagccacggcttcaccacttcctgccggtgtgccgggctgcgctccagggaccgctggggccgtcaccaaaagaacggagcccagggaacgtggagaggagcccagatgcctgagcgtcagcgccagagtccctctgggtcctccccctcccatggccgagccgtcgagagacaccgtgggcccgtacctgctggccctgagctccctgagcctgcgtgctcgttgctctgagcgcacacaaggattcgatggcagataaactactgccgcatggggagtgtgcgcagacccccaagagtgatgggcccggcgggtgtgtggggtctggtgggcgtgtgggagggctggggctggagtggggacactggcttcacaaaggttgtgacacagagctgggccctgacaggaggggggcagc

SEQ ID NO: 474533 - DNA, 637 bp, Homo sapiens
ccctcacattgctctggtcacttcagtcatgacccccaaaacaggcctctgctggagcccggccgcctcggtctccccttactgcagccagcccgcaggtccggattccctgcctctgctgtcccaccatccagacaagacccaccagctgggccacctgtcaagtcctcagtgggggccacttttctgcaaatgccccaagaatgctatggggctctccgtatcagtgctgtccagagaaacagaatccaggaggcgctggctggctggagacctggggaggagctgccgccgcccctcaagtccagagcaccgtgctggcagccttccctcctccttgggagcctttttcctctcaagcccttcaactgctcagatgaggcccacccacaccgtggaagccaaaatatgcatcattgttcttttcatgtaaggtcattgtttctggctattttcaagatttttctctttctgtttggatttcggcattttggctatgatgtttctgggtgcgattttctaataatcctgtgtggggtttgttggatttcttggatgtttagtttatgtttttcaccacattttggaaatctgtcacctttatttcttcaaccattttttctacctcatttctctc

SEQ ID NO: 474534 - DNA, 913 bp, Homo sapiens
tatgactgagctgatgtccaacatgcaagacaaagtcctctttacttttctttctcctctcctcaagcagaagaaaggacttactttctttgctgagaactgtgctacctggggttgggggaggagagatgcaagcactccgttagtcaccctggctggtgtcccaggcaacactgaattcaatgtgctctccctccctcaagagcacagattctctctccttgccatgaagctactgccaggggactggggaggggtgatatcagtgattcgagactgtttttcctacccccttcagtacctctttcagcgatatgaagagaatcttcctgaataccagtgccatcatataagtgatccctacactagtggccctgaacttttgtccccaggcctgtctcctattcctggcctaggattatctcttgaaaaggataacaaatttggttttcttggtttttattttcagttctctgagactccacttgctttcactctggctcctgttcctcctacttcagccagaggtcctgaacacctggagtaaagtggttattatgcagaaggcagatagtatttaaggaatgttataaagaaggaatgggcaaagcttttggactgattgatatgggtaacaaatgatagggacagataaaaaggactccctgattctgggcttattagggtagcaaagtcaacaaatattttttatgtaaggacatctttttgagaaattcatagccacctacaagatcatagtcgtaatttaaaaatccaatgatggagaaaaatatttaacaaataattgctattaactcaataatgcttttagatgaatatatatttataaataacatccgctatatgtctgttcacactgtgcactgtttgactcttctgcatattgacactg

SEQ ID NO: 474535 - DNA, 1003 bp, Homo sapiens
ggactgaggagagtttcagctacgtcatcagagcccccagcagtgaggggttcgacataatgaacgttgatgtgaagattgacacatcctggatattccaggacatggaagatagtgctgaggagcgggaatgtcttcaggaagaagcagctggccgcccagacatggatatgggtgcgctcaggaggcagctggagtcctccgagcagaagctgtcagcagcagaggacaagtacgtgacatcggagtccgggctgagaagcagaattcaggagctggagctgtcagaaaggaaactcctccggaaggtggaccagctgagcacccacgtggcccaggagagaagcgcctggctccaggcccaggagaagctggcggcgctgcagggggagctggccagccagatccgggaggagagcgtggccaggcggcagcagtggcggctgcggcggttgcaggagcggttgcggcgcaaggacgaggcactggggcagcaggcggtggccctggagcgctgccggcggacccagcggcgccagctgggcctggtgcagcggttggagcgcaacgtgcggtgcctttgccgcgccgcgggtcttctgctggcccagaggggacaccgcggccccaggctttccaggggcgccaccgaggcggctgcggaactgcgcgccctgcaggcgagggcagagcgcatcgagcgcgagcgggaagaggcggctcgcatcctgcatgaacaccgggctaccgagcgccagcttccgggtcatttggaggagctgcgctgttgcatttatggcctgaagctgtcagatattggcctgcaagggccaggtggaggaaccttgccaaaaaaaccaatgccctgtaataggaacctggaaacccatgtctcctattggtaacttgcccctggtaaggtggcggtaactctagggtagggaatgaatttttgccttttcttccttctacttccaaccaattggttgaaagccttgggccc

SEQ ID NO: 474536 - DNA, 933 bp, Homo sapiens
tttactcaaagccctcgtgtacatgcgttattttagtgacttctcgctgctgccaggcgatgggtgctgctgtttcccttcttggacagaagagaactcctgcctttacggcttcttctgcaagctctgtggggaagcaggaggggccctccctgccgcagctggctgggcctctgtctggatttacagactggaaatggaagagaaccagctgaagaatgaaatgcaagacgccaaggatcagaacgagctgttagaattcagagtgctagaactcgaagagagagagaggaggtcgccagcatttaacctccaaatcaccaccttccccgagaaccacagcagcgctctccagctgttctgtcaccaggaaggagttaagaggaacggctgggcgcaaaacttggccagaaaagaaaagaaagagcgcggtgtcttgtccagaggaaaggccgtggccctagaaattggatgtgaatgtttctgaacttatgaagaaattagatatccttggcgataacggggtaactatgagcgatcggtttctgctttcgtgttcttgttttgatctgggtgtattctgtgtgacttttgttttgttttgtttttaatttctctctgatgtaagagatctaagaagtacaatgtaaggcttttgtatggccgtgttcctgtgtgggtggtggggttggcattcgtcagaagtggggttccgaagttagattcccctggcctgttgagtgaggaggggacgggaaagcctcagaatccctacccagaatgcaggtggagtcacacgagattgctgaaatcagaaagggatctttttgccgtcctgaaagatgagcttgcatgtagccatgtttcacaaaagcttagtgccactctgtgaaatgtccccaaccagagggacaggagctgtctgcctgaggc

SEQ ID NO: 474537 - DNA, 4238 bp, Homo sapiens
aggccagcaggttggcagcagggacatgctttcacagaagtccgtatgatggccaggagccgccagtccccagaggggccctgcacctggagccgcatcaggcctggacgggcctcttctgttttggctccaggcccggagaccacaagcgagctccccagagacctggccggatccaaccgtgaacaggtccccagcttggaggtggaccccgagatccaggctcgacggcccacactgccccatgctggccctgagggtcaggagcctgcctgggacagtgccttggtgtctggatggaaggacattgcagacaaaggcaaagacaacagaggacgaggtgctgcccactggcagctccagggagcagggatgcggtggcccctccaggcaggggcagcactcctggccttcaagccccctctgcctgagggggctctgctgctgagcgaagagcacgtgcaaaggccctggggcggtaccagctgtgtcctgtgtgggaaagagcttgtcccctgtgcagctggtgaggaaacacggagaaccccaggagagcccagcttggatgaacagattcttctcctggtctgtggctgcccaccagaggagtgcttggacgagtcactcctccgcatggacctggcctggatttcagagaatctagcagctgacccagctgcagaagcctttctcctggtgcagacatccgcactccctctctgggggccggctggggactccgcttcttggcgaccactgctgctccaggaggttccctcagatggacaaaaaatccaagaagagttggccaccaggtccccgcctcctcccaaagccacaggacacccaggctgggattgtcaccagacaagaggccgcggtgcctccctcttccacgaggccccctacatttcaaatcacccatttctgaaaaaacaccccaaggatctgaaagacacttggaacaatggaggaggaagccttgcggggagaactgaagaggggaaggcaagggggactttgggcaggaaggggaaaaaccttggtgacaagtaccagctaagtcaggaaagccatcagaacctgagcttggagaatggggctggagctgcagaggacgtgcaggatcagaatggggcttcagagactaaggccgccacctgccgccctgggtcctggcaggagtttttgatgcctcttctacagggggaggcctcagtatcaaaggagggtcccgaatccctgagcaggagggaaagggtggaaggatacgtctggggtctccgaggaggactgtcatcagagaatgaggaagtggcacccccagccaccttctccagggctcatgagaccaaagagccatggccaacagacagtcagctcctcgcagggaaagtcagagccactgggaggacagctaggggcaaggaggaaaaccaagtgtggcttggaaatgctctgcttctgcaaggaggaagcctggaggacaaagggctagaggaagaggatgagatgccgcatcaagaagcatccggtctggggtgcaggggtgcccccgaggagcctgactcccaggaacatgagagcaaggaaatgcttttctttgcaggagagacaggtttgccactgtttcccagatttgccttatcagttgaaggggccgaacccactgatcatggtcatccacaggctgtgagcaaaggacacaacaggtgtgcactcacaatcgatgagcttgcacaggacgtggaggcttgtttccagcagctgtccaccctgcagccgggcagcaggggctggcagtgctcagcctctgcatgtaggggagagaactggagctttgctcagaagtggcacagtggctgggagagagctcactctcagcaggtttggggaaattggggtatttgttctaatgaagaagcgaagtctaaagagagtggtgaaggtgataagccgggaaagaccacggccctgggcaccagcgaagttcctggtaacccagggacactgcctcattgggatgaagccagcccaaaccctccacaggggcctgctgagccctggggtgccctcgagagagtgaggagcaggtttcatcagctcatttctggattgaagaaacagagaagccagattttacatgacaacaccaaacttcacggagaccaagagaggttccatgaaagagtgtgcgcccttgaaagagagagagagagagaggtgacaaaaatatccaggctcgagcgggataaccacaggctggtaggggacatctctcagttaaagaaagaactggatcaatatttacaggcaatctctgaccttgaagactgcaatgggaagagttactgcaaaattttggagcttgaagaggaaaatgaaacactgaaagggaatctgggccaactccagaaagccacgtctgagagtgtcaggaaatccaaagacacgatggagcaagtcaccctggaaaactggaagctccagacactgatctcggagcttggcgtcagttataaagagctgataaaggatatcgtgctaggaatagaagacatgatccgggccttaagtggggagaacgagcaccttctacgcagggtccatgtcctggagagggaagtcaccttgcagaggagcacggatcaggggcgtttggacagctgctttcaagagcctgtgggccacccttggaggaggaaatgagtctggctgcagggcagacaggaccttccacaggcaccgggaattccagacgcggtgctgattctccccctccatcgctggtctggagaaacactggtgtagccaatgccctgcaaggaaatgtcagtggagcagaagtgaaagaagcacatttggagaaagaggagaagaggcccaggtgttctgtggctcaggggcaagctctgagctccctgagcaatggccccatggtaggttgggtctgcatatctgcttactcatcacgcatgactctgttccgggggccaccccattcacttatgcaattcaccagagtcctgtgagggaggtcattgattttcagctgttcttcttttgcaatctatgcaattaaagctataaatttctctctaagcatcccacacattttgagatgaagtctgttcagttcaaaatagtttctaaggattagagctttctcctctaggtctcctgctggggggcctctcctccagaaagcttccccccacccccaggctggttctgtgcagagatgagtcagagcctactcatgtgtgtctcctcccagctcatgtgtgtctcctcccaactctgccttcaatgataccattttggtagcttgcagtcagtcatggtgggaatattcacgccatggaaactggcaaatgctacaaattggtactgtccccccaacccagatgtggttgttgtacagttgccaccccccaactggatgatgtctctgttcagtgcccccttcaggtcatcacagcctcctggcttccctttatcaggctgtattgaatgttgaactacctgcctgtcattctccacacccgcctgagctcctggagggcagcgtcaccaccgcccatctcaggccagcgtacaccctgcccatgtgctcatgatgtctgctagacagcaggagactctctgggcagctcacagggctgctgtgtggggtgatcccatgggacagcaggctgcccaccccccaccgcacagccattctctttagaggataccttggtgctctctgaggacccatgagacgaagctctggtccaagtcactgccagaggagggaggtagaggaggcaatgtacttcccagaaaggccaagttgttttgacgtcttgaagctgaattttacgggaccattcagagcacccatctgttcttaacacggcccagcccgtgcatctcaggcccatgtcgtgtatatttctattaattaaaaaaaaaatcttctgctattgtatattttattatgagagatgccccagcagccctggagtcacctgaattcttccttctcctcctcttctccctcgtctctttttcccaagcagggtagcttgggatccccctcctacctacccctgctaggtcgggatgagttttgggggccttacaattcccagggaagctgccttacaggaaaagggaactgccatcacaaggggaagggagtttgagaagcgtttgagtttctgggctcctaaatcttcacaaacggaactttt

SEQ ID NO: 474538 - DNA, 1330 bp, Homo sapiens
gaagccctcctgctttttgatgctggcaggtgagggaagccaggacagaataagaaagaagtcacagcccacaggaaccaggaaaatggtagggcttcttggcaatgcttgggtccctggtcactactgtgtggagctgagctctgcccctgtggtagctgcacacccatcccttgttacaggactagccttgccttcctgtgccatttttgcccaggcaacttcagtttggttcctttcacaagcagccaaattgtgcctgcagatacaaaacctggtctatctcagtgaaatctatggttctaggtacagtgtacttcccagcagtagcatgtgtgcacataacggtatcaagaacaaactgtgtctgagaatggcaggaactggatatgatcaaaccttaaagcgtgtggacaaaatgatgggaaatgcctggaggtttggtcccaacgtctgtggacgatttactgccttatttctaaataggatcaatacacccaggagccctagtgtaatgagattcaaagggaccctgactcctgaacgaatccatcaattggaccggaatgttaaggacagcgaaagtgaaatggctctaatgaatcttgatattgaaacaaaatattagggcattttgagaagaaagcattttatctcatctgtattttccattccccatgtgattaggaagctcatggaaattgaacaggctcatctgtttcatagtatatgctatttctacacaccagagctttctctgaccctcactaccctcactcaaaatgtgttcccagaatagtcattgcctgcctgccattccccaggcactgtgcagaacactagagacacggcctcctcctcatcaaggagctatggtctggagtttccagtagtttcccaggatcagatgccagctctgccattgctaaggcctctgagtatctccttctttacaccagccccataagggcctgagagcagcaagtttcctcttcatctttttatctggggcaggcaaaatggatcctgccaccttgagtggtgaagcaggccaagctgggcctttctgcatgttttgtcattctgatggacctgtaggcagccagggaaccaggcttacctatctgaagagaggcccctctctgtaaagggatcccttgctggggttgtaagtgacatgtgaagcattccctccctggcttcacacacattctagcaagtctcattgtaacttcactcatgaacgaattccccaatagttggagttgtccatgaaacagacttccctggcacagctggtgggctccccatcagaggacacatccatgtt

SEQ ID NO: 474539 - DNA, 843 bp, Homo sapiens
tgtccttgtggcactgagaaattgcctagtttgtgagtacagagaactcagtgctggcgaataaacatccctgctcttcttcaaccactcacccctacccaccactccgttggaaacgattctgggacatactgatgtctgtgcagtgtacagatgtctgaatttgagaagagttgctggcaaacagtaagaagcactggtatacatgagctgtcgaggtagcaagaaggaatgcctgcaaatatggcccttttggcgtactggattggcccccgtgcctggacagctcaggggaccgaggtgcctggtggggggctggcgagccctggctctgcagctggtactgcagcagcccaggaagaaatccagggctgccgtttgactcagcatctgatctccacagacatgaaagaaaatgggtcagaaagaatgtgtatggggagggaggaagtccctgggaactggagcactcagggtcagtggggactctgggcctgtgatgtcacctccattcccaaggagagcatgcctcgctgcctcaaacatcctgatgtgcagaggatgtcagggatggacagaaacagcccaagaacagaggtcctggctgactcctctcccaagtatgcttgtaagcttctgaatttgttccggttaaattgaatagatgcgtgcgtgttgggggaggaggggatgggggctgggggctggcagtgggagagagaaattagggagactgagtgttccatgacagctccacgagtgaaagctggaattgggcttcattggaaaagacacagttggggaaatacttgagaataataaccttgaataattacaagaaaa

SEQ ID NO: 474540 - DNA, 552 bp, Homo sapiens
gctcatttaaacacagaggaaaggagctgtgatggggggaatgggtgccccccttgggcgacttgtgggacccagaactcatcacgcagagcgtcccactgctgtgcagccactagctgctcggtgctggggctgtggtatgagcatggactctggagtcagaattcctgccttcaaagccccactcctcaccttgctagctgtgtggcctgggagacccacagtgaagagtggggccatcgtgttgcatgtgtgtggctgggccccatcccctcctttctacagcaccacccctctattccttatcaagttcacctttaaggctcctttgcccctcactggggcagtcatgaggggagcagaggcctcggatctgggcatggatgagggtagagccctggctgtgtcctgcagctggaggggccaggaagggctttaagccatggagtgagggaccagagttgggtttacaagggtcactgtggtgtcggtgtggaggggcttgaagggaggagtttggagggaggggctgtagcaatgttgagattccct

SEQ ID NO: 474541 - DNA, 751 bp, Homo sapiens
cttggtctgatgattggtgtgggggccacctcccggcagagcagacgcacctgctccacctggtgggaagataactcacctaagccccggggcagcgcagacgcacctgctccacctggtgggaagataactgccctaagcctcaggggaccgcagacgcacctgctccacctggagggcagcagcctccacagggacctggggagtcagccagggttacagttcgtgacagaagccctgggggatgcggaggaagatgaggacgatgaggactttgtggaggtccctgagaaggaggggtatgagccacacatccccgaccacttgcggcctgagtatggggtcctgagcccatcgacaatagcgctcagcaagggggccgagcggtcgcagcacatgccgggtgtgatgggacgctgatatgacacagccctgctgcagtgagacgccgtgcgggcaaggcgggcgcgcgttcggctgtgacgtgtggcctcttgttttccgggagtcgttattcttcctgaaaatgccctcagtgcctgaggaatgctgtctgatttttggggttttgctttgaaatatttaccctgctttaacacgcttacccatctttttaatggtttaaaacaacaaatcgatgaaaaatatatttcattcttgtaactcttaggaattctcagattgatcttttggctgcgattgtatctaaatgtcacattgttcacttgtcagtcttgcctccgtcactgtg

SEQ ID NO: 474542 - DNA, 676 bp, Homo sapiens
tgcccacccgtgcattgggaggagtgggtggagcctctgaaagttcatgttgtttgcagggggaggagcctggcctctcctgttcttggatggtgatctgggattccagcctaaccatgtggtagaaaagaaaaacccattttctggggaggaatacaaggctgcagaaatttgcataagtaaagagccaaatgttaatagcctagacaatgggaaaaatgcctccagggcatttcagagaccttcccagcagcccctttcaccacaggcctggaggcacaggaaggaaaaatggttacatgggccaggcccagggccccactgctctgtgcagcctcaggacatggtgccctgtgtttcagtggctccaggtccagctgtagctaaaagaagccaagagcccagaatgggagatccactgacagcttgcaccatacaccgagaaaagctacaggcactcaatgccagaacaggaaagcagctgtactctttcctgtactctgcagagccacaggaatggcacaaaacctaatcttttatgtctctgtgggcttcctcaccttgcctctctgactttgtgcattccgatccttttgctaagaatatctttcttcccttttgtcacctggcatattcctgtttatgttccaagactcagtttaagtttaatgattgg

SEQ ID NO: 474543 - DNA, 1056 bp, Homo sapiens
ctgaagatcctgaagtattgctttgaagaattgtaatgggaaatgaaatacggctttaccagtacaatccaaaaggcaaagcacaatcaaagcaatggctactaagagatggaagtagtccagtcaaagcaaaagcagaccagttaagcgcaaaggtcatggcaaaaattttcagggatgcccaaggcattttgcttgttgactgtctgaagggccaaagaacaattagatctgcttattatgagtgttttaagaaagttagccaaggctttagtttaaaaaaaaatgcctggaaaagcttcagcagagtcctctaccatgacaatgttcatgctcattcctctcatcaaacggaaaattttgcaaaaagccatttgcaagcagctgaaactgcaaatgctagatctgtaattgttaatggagtctgtttttacatgttaaaagaaaacaaatgtactatgcacaataatgtcattgatttttaaaaattctttgttgaaagaaaaccaatattttatactgtttatgtttaaatataatacttctcaggtctttctacataaacctctctgattgtacgtaattctcataccctctctgatcgtacgcgcttcacacaccctctctgatcgtacgcgcttctcacaccctctctgatcgtacacgcttctcacaccctctgatcgtacgcgcttctcacaccctctctgatcgtacacgcttctcacaccctctgatcgaacgcgcttctcacaccctctctgatagtacgcacttctcataccctctctgatcgtacgcgcttctcacaccctctgatcgtacgcgcttctcacaccctctgatcgtacgcgcttctcacaccctctctgatcgtatgcgcttctcacaccctctctgatcacaggtgcttctcataccctctctgatcatatgcgtttctcataccctctctgatcatacacttttcataccctctgatcacatgcaccttttcgtgccacattgctggcatacttactagcaaattagtaacatttgacacttgatgtttac

SEQ ID NO: 474544 - DNA, 746 bp, Homo sapiens
tagtttcagctagcaaagcagaaagatggtttgcatcataaaacagagtcgagaagtgtcagccagtctgagaaataaagagaaagagtacaaagagaggaattttacagctgggcctctggggatgacatcacatattggtaggaccatgatgatgaccccgagccgcaaaaccagcaagtttttattagggattttaaaaggggagggggtgtacgaacagggagcaagactatcaaagagacatcatagcatcttaatgcctcctgacatgtctgattcttgtaagaaaaatgctagccatatcaaccctggggatgaaaagaatctttccttgaatttcacccatctgtgtaatttttcactgattctaactaggaaaaatgccgtgctgttcatggaagatgtgtggactaaaaagaaaaggatctggggaaataggcgaaagagtttacaaatcagatttccaagggatagggtaggaggcgagggagatggtcagagatgcagctttgcttgccacctctccagcgttgaaaatgcttctatgtgtcagtggcttcaaatggactcctggctctgctcccgtggcctggaggaaccctctcccaaggcaatctccatagatacaggtactagtgacaatttaagaggatattaactacccagaacatcaatattatatttatatgttatcaaatgatatgccaacatgttctaagcatattctgtgtataagtcattac

SEQ ID NO: 474545 - DNA, 670 bp, Homo sapiens
cctgaatgattgccttctagctttggtacacttacatcaacctatatggtactacgcacctaggctatgtggtatagcctgttgttcctaggctataaacccatacagcatgttactgtactgaatactgcaaacaattgtaacacaatgatgtttgtgtgtctaaacatagaaaagctaagatatcctccagaatctccaagggggagaaagagggattctgttttgatagttaatggtcgtgaggcttacaagttcccagaaactgacaatactgctttgtttataggcattagcaccttaattttcacagcaataattgaaaccgtactctctgaggcagaggttattggtgtttcaattttgcaaaagaggaaattaaggtccagagaggtcaagaaacttgctccaggtggcagagccaggaagtgttctgagcgttgtgcatgtcacggaggctcgcatgctttatcttctagggtcagatgtgctgctggagagggataatgctgcatagctcacccaagcagctgccagtgctgatgcttagatgtgtgctgatttcttcctgtcagatgcttgaatcttgtgtcaattcatattaggaccttagtatttcctgcttctcagcattaacatttcctgtaataagcttcttgtgattcccttt

SEQ ID NO: 474546 - DNA, 1085 bp, Homo sapiens
tacagaaatgaggtgtcgcagaatagaagtcaatgtgaagctgaggaaagctaagaggaatgaccagatgctgaagaggagaaatgcaagctcatttcctgatgttgctgcttctccgctggagaaaaaccgcaaaaaccagggcactgtaaattggtctgttgatgacattgtcaaaggcacaaatagcaacaatatggaaagtcagctccaagctactcaagctgccatgaaactactttctagagaaaaacagccccccataggcaacataatctgggctgtttggctcctgcatcatgatgatccagaagtattagcagatagctgttgggctatttcctaccttactgatggtccaaataaacgaactgacatgttcttgaaaataggagttttgccccaacttgtgaagcttctaggagcttctgaattgccaactgtgactcctgcactaagacccatagggaatattgtcactggtacagatgaagagactcaggttgtgatcgatgcaggagctcttgctgtctttcccaacctgctcatcaactccaaaactaactttcagaaggaaggtacatggacaatgtcaaacatcacagctgaccctcaggatgagatacagcaagttgtgaatcatggattagttattctggttatcctggatgccatttcgaacatctttcaggctgctgagaaactaggtgaaactgagaaacttagtataatgattgaagaatgtggaggcttagacaaaattgaggctctacaaaaccatgaaaatgagtctgtgtataaggctttgttaagcttaattgagaagaatttcttggtagaggaagaggaagatcaaaatgctgtgccagaaactaactctgaaggctgtaccttccaagttcagaatgggactcctggaacgtttaacttttagatcatgtagctgaggtatgtatttgttgtgtactatatttggtattttgtcttactgtttctctactaagaactctttttaaatgtggttggttattgtagcactttttacactgaaactatacttgaacagttccaactgtacatactgt

SEQ ID NO: 474547 - DNA, 617 bp, Homo sapiens
caccgtggaagcccctctgtgtcctcatggtctctctaccagcacaggagtgccctgctccagggactctctctgccacacccttggccctaccctgccagtcctccactcctactcactggcaagactctaaccttggaaggacggacccccctgcttggcatggccctctgagctgcctgcaggccagctttctcatggagctgtccactaagcacattccccatccacctgaagctcatgacctcactcctacccccaagaagacagaatcttgtgaaatcaggagcttttgtctctgtaccttcagcctctgcctgccatcctgtgaacaccagacatattcctgcctcatcaggacaggctccagtgccagcagcctgaggtccccaggcctggagcagcaagggtggaggaggaaggaaaagaaccaatcccctctgggcgggcccagctgtgccccaggcgctgtcatgggatggcgctggctttgcttctccgagtccacccaatgagagacccttgcactgtggccctccctctgacgagcctttggggcaggaaccccaccaagagcacccccgataatgctctttcccatgcagccctgaacagtg

SEQ ID NO: 474548 - DNA, 2466 bp, Homo sapiens
ggacagtcagctcccggaggggagagtcagctcccggaggggagcgtcagctcatagaggggacagtcagctcccagaagggtagtcagctcccagaggggacagtcaactcccggaggggacagtcagctcccggaggggagagtcagctcccagaagggatagtcagctcatagaggggacagtcagctcccggaggggaaagtcagctcccggaggggacagtcagctcccggacgggacagtcagctcccagaggggatagtcagctcatagaggggacagtcagctcccggaggggaaagtcagctcccggaggggaaagtcagctcccagaggggatagtcagctcatagaggggacagtcagctcccagcagaggggacagtcagctcccggcagaggggacagtcagctcccagaggggaaagtcagctcccggaggggacagtcaactcacagaggggacagccagctcccagcagaggggatagtcagctcctggcagaggggacagtcagctcccggaggggacagtcagctgccggaggggacagtcagctccaggcagaggggacagtcagctcccagaggcgaaagtcagctcccggaggggacagtcaactcacagaggggacagccagctcccagcagaggggatagtcagctcctggcagaggggacagtcagctcccggaggggacagtcagctcccagaagggatagtcagctcatagaggggaaagtcagctcccagaggggatagtcagctcccggaggggacagtcagctcccagaagggatagtcagctcatagaggggacagtcagctcccagcagaggggacagtcagctcccggcagaggggacagtcagctcccggaggggaaagtcagctcccggaggggacagtcaactcacagagaggacagccagctcccagcagaggggacagtcagctcctggcagaggggacagtcagctcccggaggggacagtcagctgccagaggggacagtcagctcccggaggggacagtcagctcccagaggggatagtcagctcatagaggggaaagtcagctcccagaggggatagtcagctcccggaggggacagtcagctcccagaagggatagtcagctcatagaggggacagtcagctcccagcagaggggacagtcagctcccggcagaggggacagtcagctcccggaggggaaagtcagctcccggaggggacagtcaactcacagagaggacagccagctcccagcagaggggacagtcagctcctggcagaggggacagtcagctcccagaggggacagtcagctgccagaggggacagtcagctcccggaggggaaagtcagctcccggaagggacagtcagctcccggagggaacagtcagctcctggaggggacagtcagctcccggaggggacagtcaactcacagaggggacagccagctcccagcagaggggacagtcagctcctggcagaggggacagtcagctcccagagggaacagtcagctcctggaggggacagtcagctcccggcagaggggacagtcagctcccggaggggatagtcagctcccggaagggacagtcaactcacagagaggacagccagctcccagcagaggggacagtcagctcctggcagaggggacagtcagctcccggaggggacagtcagctgccagaggggacagtcagctcccggaggggaaagtcagctcccggaagggatagtcagctcccggaggggaaagtcagctcccggaggggacagtcaactcacagaggggacagccagctcccagcagaggggacagtcagctcctggcagaggggacagtcagctcctggaggggacagtcagctcccggcagaggggacagtcagctcccggaggggatagtcagctcccagaggggacagtcaatccgggacagccatgaatgccatgacttccagaaggacatgggcaccctctgcccggaattcatctctggacctgacggagattcacccgctgaagccggcatcacaggcccgctgtgagtactgtgtgaccagaatgcgtagtaatcacctaacgcaggatgtggcggcgccgacccacgctgcgtgcgcaccccacagcagccctgtctcccccgcgagctgcagccggaaccttctaacaggaactcaacaggcagggaatttgcagaggtggaatcctaataaattcaagaaacacaacatcatgaatgctcggagcatctctggcatctctgagaacctcggagcagcacgcacacccccgcccggcggccagcagaagatgtggaccgatgctgcagggcccgtgggcacccaggaggaagagcagggggaggtgaactgtggtctgttccggggctggggctgagtccagcctgccacctgtttttgtaaataaagtttta

SEQ ID NO: 474549 - DNA, 660 bp, Homo sapiens
gcatagataagcttgccctgtagggagtgcctggtgaggggaagatgtttcttgggagcctgggggacagacgattcaccatgcctttggctcgtgctctgcctccctgtgcatggatcgcgctggggctggcgccgacattcctggcacagggcttggcttggaagtgcagccctgccacactgcagcatgtgtttgttttacaatccacagacaagaagaagggaggcaaattccagccttttaaaaagttgtttggcaaaaggaaaaagaaagacccttcgttgttccgggtgccgtcgttggggaagaagagttactctcaccagagtgtcagcaatgggaccttctcttcggatgaggagaccctggaagacaatctaaggttttacaaagccttgggaaattccactttggatcaaatagctgcatttctaataatgtcacctgtcctcgttattgactcttgtccacaaacctgcatttatgagacgtgtactatattttaattaaacctttttataataaacacatctcttaagtaaggatataaaaggataagctttggactattaatttttaaaatgtcactttaaatatttaaaaaattagtgggtatatgcccagaggagtataaagcattttaccataaagccacac

SEQ ID NO: 474550 - DNA, 1068 bp, Homo sapiens
tcgctgaaagccaggtatgagctcacaaaaacaggttacatcaaaatggctacataaacatgatgacatagtgcacggggttgtctggctgttccaagcaccggtacacaggcaggttctaggcagggcttgcagctggaccaggcatgtcaccccgaagggaatgcggtggcaccccaagaggggtgctcagaccttgaagccccggaaggggcgattctacttgctaattagctcttttagttctgccatccgcagccctagggatagtgacatgttaacagctctgtcagccccttgccctgctctggctggtggctctggggctggctcagctttgccactgcttcctgtcatgtggggcagccgccctcccccagaggacagaggaccacagtgttacagccttctgagtacttgtgttcagtgagtcccaagttcttgtctcatgtccaagacgaatgaggtcacgctgacagttcaagagtgatgaggacaaagaattttattgagcgacaaaacagctctcagcgaacaggggaggagaaggtggtctctgacctgaagttagctcatctagccaaaatcccactgaagactgtaacactaagtacattatatcattaaagtcagggaaatagtgtctcaacttatttaaatttgcatcattttgcatatttttgccaaaagtaataaaatgatatgataactaagaggaagaaacaaaatatttattattttcagatgacaacattatttacctgtaaaacacaaataaatcatctattaagctacaaaaatcatcaagatcacttagtaagatttctgtatacaaatcaataggcagaaatcaataattcacagttagcatattttttataaaagaagcattaacattagcaaagatcaatataatgtgaaaaactttgaaaaaatcagactcaagtttatttttgaaactatgtatttagaagagccacgttaatgataggatcctgtggcaaacaaaatctgagatgctctcatttttccaacccattggtgcttatgcatttttataatcccttc

SEQ ID NO: 474551 - DNA, 2082 bp, Homo sapiens
gaggccacagcatcacagaaccactggcagaatgaagcacaagttctccaacttgacagtacctaagaatcagcggaagatgatgataaaaatgaaaactcatggatcttccaaatctaggatagattctagtattcagcatgcttaccaagcaattgcagatattgagacagccagatggaaaagtctccctggcaaaactttagccagactacgcactgggaggaatgcacactggggtggagccacagaagtttgcgctgtttgcagccaggttgatcctggcccctcctcttcctgggtggaacctgggattcagtctgtgagtcaggaagcccactggcaggaaggacactctctcacttcaccaagagtctctgtttcccctttttctttcttttcacccaataaaccctgccctactcacccttcaaatgggctctgaattatttcctctgaggaagcaaggatggagtttgcagcagactcttacagattcactgccaataacattagagattcacaatgcattttaaaatattaaaagttttgaagtagagtggtggttatgagacagtaggtagagtagtgggaaaggggggataagaaggggttggttaataggacagactggagaaaaagaaactcttctcagttgactgggatgactagaggctggtaatgacaaggggctgaagttttcactaccatgagttgtcacatctaatggacttgacagccggagtgtttttaaacactaaacctagctgggtgtttctcaactctgctgcatcttagactcatgtggaaaattttatcccaaagaagggaaagagggcagtggacaggaggagagaagagaaaaagaaaacaccaatgcttggatcccactcctgggagactaatttaatgatctgggaagaataaatcctcagatccttgcccatgtgctcacttggctccagagcctataaccgagtgacatctaaaaacagagttatccaagaacactcaactggtaagggaagaacgcctcaattgagcatgtgtacaactccagtaaacacactgtgcctgcagcccctcccaactgctggcagaccactctacatgcagacagctcaccccaaggagagaatcaggggagaagagacacaaccgcctgaaagcatgccaacatattccccaagtcaaaaggttcaaaccatacacttgattctctcaagttgcttgcttggccttctttcaagtgtactttacttccctccatccttgccctaaaactttttactaaactttcactccataggctgggcacatggtaaacattccactttggctcaatgtcagattgatcaatgaaagttaattgatcaattaactaagatgttagtctctttgccttcaagtactataagggaaaatacaacataaaagtaagaagtttaatgctccctgttgaaaataaagaaagagaacaaacccccacccttttcttaggatacttcctttacaaaacttgtacattctctctttgtctctttgaaatatattttctatttacagttcattaaatctccagaggcagaacctgtggatacagaaagtctacttacacttcaattggtgttatctacagctgctccttgattacattaagtttctgagccctcatctgagaaaacttagattatcatagggaataatggagtctttcattcagtctttcaacaagtctggcatatttattgaatgtaaatgctctagacaactgtccaggtactagagataaaatagtgaataaagcaaagcctttgtgtttaagaagtttgcattattctaaggaatgaaaggcaataaagaactaaatatcttgtttttcacattttaatatttttaaaattgggatggcatggctgtaataatcctgattattagccaggcaacaggaatgaggtagttgtcattgcctgcacatatgccaacttggtcatatctgttcacactgccattatgccagttgaatcatgtgtagtgctaatacatgttctatttaattgctatgtaaagtgccttttttat

SEQ ID NO: 474552 - DNA, 1018 bp, Homo sapiens
tggcacaccaggagattatatcccacacctggcccagagggtcctacacccacggagcctcgctcattgctagcacagcagtctgagatcaaactgcaaggtggcagcgaggctgggggagtggcgcccgccattgctaaggcttgagtaggtaaacaaactggcgaggaagctcgaactgggtggagcccaccacagctccaggaggcctgcctgcctctgtagactccacctctgggggcagggcatagccaaacaaaaggcaacagaattctctgcagacttaaatgcccttttctgacagctttgaagagagtagtggttctcccagcacacagctggagatctgagaacagacaaactgcctcctcaagtgggttcctgacccctgagtagcctaattgggagcaccccccagtaggggcagactgacacctcacatggccgggtactcctctgagacaaaatttccagacgaacgatcaggcagcaacatttgctcttcaccaatatccactgttctgcagcctccgctgcagatacctaggcaaacagggtctgtattggacctccagcaaactccaaaagacctgcacctgagggtcctgactgttagaaggaaaactaacaaacagaaaggacatccacgccaaaacaccatctcaatggaacaaagctggacagagaatgactttgacgagttgagagaagaaggcttcagacaatcaaactacaccaagctaaaggaggaagttcgaacccatggcaaagaagttaaaaaccttgaaaaaaaattagacaaatggccaactagaataaccaatgcagagaagtctttaaaggacctgatggagctgaaaaccatggcacaaaactatgtgacgaatgcacaaccctcagtagccgatcgatcacctggaagaaagggtatcagtgatgcaagatcaaatgaatgaaatgaagtgagaagtttagagaaaaaagaataaaaggaaatgaagaaagcctccaagaaata

SEQ ID NO: 474553 - DNA, 634 bp, Homo sapiens
tcttattctcaatatgcattttatcacccagtcagctcttgacattagaaaacttcaaaaattggaatccggccctcaaacgccacaacaggaattaatcaacctcaccttcaaggtgtacaataatagagaggaggtagccagacagcaacgtgtttctgagttacagctacttgcctctgctgtaagacaacccacaaccatgtctccagcatacaagaacttcagaacatccaagccacagctcccaggggctccttcaaaacatccttgtggaccttgcttcaaatgccaaaagcctggcccctgggcctcagaatgcccggtgcccaagattcctcctaagccatgtcctgcctgtgtgggcccccactggaggtcagactatccgactcacatcgctgccgctcctaaagcccctggagcccaaacccaatgttccttggccgactccttcccagctgtcctcggcttagtggctgaagactgatgctgcccgatcgcctcggaagcctcctggaccatcgcagatgctttgggtaactcttacagtggaggaccattgatgtttaaggtgatttttaagtatatttggcattaatatataaccatatttgttattaaaaaatggtgc

SEQ ID NO: 474554 - DNA, 1009 bp, Homo sapiens
taataggcttctgccgaatatggattcccaggccttaaagaaggccctaacccacgtcccagtgttaagcctgccaatggggcaagacttttctctatatgtcacagaaaaaacaggaatagctctaggagtacttacacaggtcaaaggaaccagcttgcaacccgtggcatacctgagtaaggaaattgatgtagtggcaaagggttggcctcattgtttatgggtagtgacggcagtagcagtcttagtatctgaagcagttaaaataatacagggaagagatcttactgtgtggacatctcatgatgtaaacgacatactcactgctaaaggagacttgtggctgtcagaaaaccatttgcttaaatatcaggctctattacttgaagggccagtgctgtgtctgtgcacttgtgcaactcttaacccagacacatttcttccagacaatgaagaaaagatagaacataactgtcaacaggtgattgctcaaacctactccactcaaggggaccttctagaggttcccttgactgatcccaacctcaacttgtatactgatggcagttcctttgtagaaaaaggacttcgaaaagcagggtatgcagtggtcagtgataatggaatacttgaaagttatcccctcactccaggaactagtgctccactgacagaactaatagccctcactcaggcactagaattaggagaaggaaaaagggtaaatatatatacagactctaagaatgcttaccttgtcctccatgcccatgcagcaacatggagagaaagggaattcctaacttccgagggaacacctatcaaacatcaggaagccattaggagattattattggctgtacagaaacctaaagaggtggcagtcttacactgccagggtcatcagaaaggaaagtaaagggaaatagaagagaactgccaagtggatattgaagccagaagaacggcaaggcaggaccgtccattagaaatgcttatagaagga

SEQ ID NO: 474555 - DNA, 821 bp, Homo sapiens
tctggagtgaacctccagcaaactccagcagacctgcagcagaggggcctgactgttagaaggaaaactaacaaacagaaaagaatagcatcaatatcaagaaaaaggacatccacacaaaaaccccatctgaaggtaaccaacatcaaagatcaaagaaaggaaacaaaactagatggataatgtgtctcgtgaattgacaggcttcagaaggtggataataacgaactcctttgagctaaaggagcatgttctaacccaatgtaaggaagctaaaaacctgaaaaaaatgttagaagaattgctaactagaataaccagtttagagaagaatataaatgacctgatggagctgaaaaacacagcacaagaacttcatagagcatacacaagtatcaatagccaaattaatcaagcagaagaaaagatgtcagagattgaagatcaacttaatgaaataaagcatgaagacaagattagagaaataagaatgaaaaggaatgaacaaagcctccaagaaatatgggactatgtgaaaagaccaaacctacatttgattggtgtacctgaaaacagaccaacattcaaattcaggaaatacagagaacaccacaaagatactcctcaagaagagcaacccaaagacacataattgtcagattcaccaaggttgaaatgaaggaaaaaaatgttaagggcagccagagagaaaggtcgggttacccacaaaaggaagcccatcagactaacagtggatcgctctgcagaaaccctacaagacagaagagagtaggagccaatattcgacacttaaaaaaaaa

SEQ ID NO: 474556 - DNA, 626 bp, Homo sapiens
ggcggcgctcgggctccgccagtattttcagatttttaatcttttttggtttgagtgaggcttatgagatctgatggtttcaaaagcacctggcatttcctctgcttgcactcattctctctcctcctgccctgtgaagaggtgccttctgccatgattggctcagaagaagacaggaaaatgtgggaaagtttggaactttctagagacttgttgaatggctttgagcaaaatgctgatagtgatatggacaatgaagtccaggctgaggtagtctcagatggagatgaggaatttgttggaaccggaataaaggtgttcttgctatgctttggaaaaagactggcagcattttgcccctgccctggagatctttggaactttgaggttgagagagatgatttaggatatctggcagaagaactttctaagcggcaaagtttcaaggggaagcagagcataaaagtttggaacatttgcagcttgaggatgcaatagaaatgaaaacctcattttctggggagaaattcaagcaggctgcagaaatttgcataagtaacaaggagctcagtgttaatcaccaagaccatggggaaatgtcttcagggcatgtcagagaccttcac

SEQ ID NO: 474557 - DNA, 490 bp, Homo sapiens
tgagggtttggtgtacagattatttcctcatccaggtaatgagcataaaactcgatagctctctgatggttacgcaaggtttgctggtgaagatgctacggagagggccactgggaagcacgccagttgggcagctgaggctgtactgcatgcagaagttctccctgtcaactcaaatgtccatgagggttatgaagtcttctgcagctggaattccagagatccgtggtgagaatgggccactccatgcctacttaatttacctctttcccaggagccacttggggccaggaacaagttctggtactcagcaactttgtgcagagtttccagcttcctcttccttcagcccaggggaagtacagttaatccccagcctggcatatctgagcagtagcccatatgactgtcatccctgtggttgccccactcctacagacaactggacaccaaaagagcagggaccagtgtggtggactctgttttagac

SEQ ID NO: 474558 - DNA, 2788 bp, Homo sapiens
ggcctgactaagtctgttctttttgctcttatgttttggtctcagcacacttccgttcctctggaggcaggcagcttggttcaaagaagtacacagtagatttaggaaatgcaacactggaagtctgatgccagctccattatatacttgggcactcttgggagattcacataccatcaccagcctcacttcatctgtgaaatggaaataagggctgcccaatcttctagcctctctgaggttctacttcccccacgaaagccccttgatgctgtcccaccttttccttctgccttcaactttaacacctctgacaagcctgttgtaccacagggtggaagatactcacgccagatccaaatccaacttcggtcaatcaccagctgtgtgatctttggtaagttaaataactcattggaacctcagcttcctctcttattggatgaggaacataagtctccccgctgcctttgggactttgtgcatgttatttttgctgccaaaaacaatctcctcctctgatttatttggatgactcattcttcaggactcagctcagaagtcacttcttcctggaagccttctttgatttgccaaatcagattagatgtcccggctattctctcttattttccctgtcactacttcctgttacattgtaattacatgtttgtatccctctcaagaccatgtcaccaggcttagaccatagattacatgaacagtaaatatcaccaaaagatgctttattaatcatatgggtaaagcaccaggcacatagtagctgctgaataagtcattccgtatcctttagtatacattgcactgaagttagtgttatttatgtctctccacttgactttgtgtattggaagacatagacccactcaattttatacgtcttaagacctagatccacaacttgattatctttgtgtccctcgcaagatctaatacatacaaaaagacaaatgttggattgaatcataatgaacataaattaaaattctttaaattcaagccttcacatgaggaaaacattttgccaaacttcactgttgttataatagagaatccagtttactttaaaaatggtttctctttttgataaaaggtgctcagtaaatgattatggaacacacagatgatgaacacattggatttttcctgtatgtgcatgtactggattctaaattggtccgatgaggatagagtaacccccattcttcatcttgcctctcattgtgccttgcatctggactggtgctcagaaaagcttgctgaattgaactggggaaggagctattgtgatcctgctttttccttgctttttagaatcttcttagagaactgctcaaaaggttgctttgctatgcagagaggcagatagtattttgtatttttcttttataggccttgtgtgagttatgttttaaagaggttctgtttcaatgtatttccaggattcatttcaagatttggacctccttatagaagttcttgtagtggtgtcttggtaatggcaaattctctgagcatttgtttgtctgaaaatgattgtatctttccttcatatatggtacttagttttgttggatacaaaattcttggctgataattgtttttttttttgaggagcctgaagataggtccccaatcccttctagcttgtaaggtttctgctgagaaatctgctgttaatctgataggttttccttacaggttacctggtgcttctgtctcacatctcttaagattctttccttcatcttaactttggataacctgatgacaatgtgcctaggagaagatctttttgtgatgaatttcccaagtgttctttgtgcttcttgtatttggaagtctaggtctctatctaggctggggaagttttccccaattattcccccaaatatgttttccaagcttttagaattgtcttcttcaggaacaccaattattcttaggtttggtagtttaacataatcccagacttcttggagggtttgttcatattttcttattcttttttctttgtctttgttggactgggttaattcaaagactttgtctttgagctctgaatttctttcttctactcattcaattctattgctgagactttccagagcatttcacatttctaaaagtgtgtccaaagtttcctgaatttttaaattttttaagctatctatttcattgactatttctccctttactttttgtatcatttttttggatttccttgcattgggctttgcctttctccggtgcctccctgattagcttaataactaacctcctgaattctttttcaggtaaatcagggatttcttcttggtttggatccattgctggtgaactagtgtgatttttttggggtgttgaaaggccttgttttgttatattaccagggttggtaatgtaacaggtaatattacagggttggtacagtattcaatgaatttcataagatatttaacactgtattataaaataggctttgtgttgttgatgattttgctcaactgtagcctaatgtaagtgttctaagcacttttaaagtaggctaggctcagctatgatgtctgtagtttaggtgtatgaaatgcatgtttgacttatgatattttcaacctgcaatgagtttatgacataaccccataataagttggggagcatctgtatatccattaggtgaaatgttaatgggggacttcatgaaaggtacaacaactgacaacactgattaatcttaacatcatgtaaatagaagcaatcagacatt

SEQ ID NO: 474559 - DNA, 956 bp, Homo sapiens
aagacactgtattttgttttatgtggctgaggaggcctcacaatcatggcagaaggtaaggaggagcaagtcacatcttacatggatggcagcaggcaaaaagagagagcttgtgcagggaaactccccctcatagaaccatcagatctcttgagagtccttcactatgatgagaacagtgcaggaaagactcgcccccatgattcaatcaccttgcactgggtttctcccacgacacatgggaattataggagctacaaactcagccacatgagttgctttagccaatactatgaggtggacatagcagtatgccagttgcaggtctctttcatcttggtcatctctgtgagaaatttgcacatcctcgcctgctggggagataagagatgtgtggagctgagtcgagtcatagagtctgatgcagatctggggtttgagcccagttctatctgacttgaaaaccagaggtcttgtccactctgctagtcttcacagtattattattgctgtagaataaaccactgtgcttctttattatgtaattttccgtctgtaataagtttctgtccttctttctgcattaaattttttatataatttgggagcttgattagttgacccaaattttgattttctatgatgctttgatactttgccttaaactagaagaaatagtacctcacaggttaaaaggtacactctagggactcaataaataattattgaatgaactagaaatacactaattgctttgaattacaggctctggcataatcaagttgtgagcattcaaatcttggcttaactatttgtgtcttggcaaattccttgatctttgtttcaccatatgtaaaatgggaatgatcacagcactcatttcacaggcaaagagtaaaggcaaatagtaaattaggtaataaatgtaaggtgctagagcagtgcctggttcctag

SEQ ID NO: 474560 - DNA, 680 bp, Homo sapiens
tgcaacttgcatctctccagtagataaaagctaggaatgctgctcacccttcacagtgcacaggacaacgccacatcaaagaataacccagtcccaaatgtcagtggtgctgatgttaagaaatcctgcattaagaccaaaaagccagatgagtttggagtcactaaggagaggtgcaggagaggcggccagtctaaagtgtatgaactttactgttttagaattaggacagtttcacgggactgggatgaggggaacttggctctgtcgataactctgatacctggattttctccaagaaatgaatttcttccccctcaggggttctttatgcgctggtgtttgacaaccacaccttgcagcttcatccctggttgctgccctcctgcagacaccgtgccttttcctgtctacatagccttcatccctgactacctggtgcactcttccttctttgtctacctgcctactcaacatggagacgatgaggatgaagacctttatgatgatccacttccacttagtaaatagtaaacattttttctttatgattttcttaataatattttcttttctctagtttactttattataaggatacagtatattaatacatataacatacaaaatatgtgttaatggactgtttatgttattgacaaggcttctggttaatagaa

SEQ ID NO: 474561 - DNA, 616 bp, Homo sapiens
catctgcaacagcccaatttccaaaaatggtcgcatctgaggccagagcctactctcggctaagggatggcccctcctggggcatgccgtccaggtcagtgtgctccaaggacagtggttctttcaactgctccttatgtgaagaatttctccaggattcatcattccatctggatctgtataaataaagctgaagttctggtcatgaccactccctggatcactcctgcccctgtgttcctggagcctcagagttttgcagacttgttgaatggttttgaccaaaatgctgatagtgatatggaaaataaagtccaggttgaggaggtctcagatggagatgaagagcaaagatatggtttggaatcagaacttatgcttaaaagggaagcagagcataaaaatttagaaaatttgcaggctgatgatgcaatagaaaagaaaaacccattttctgaggagaaattcaagcctgctgcagaaatttgcgtaaataatgaggagaaaaatgttaatcaccaagaaaatgcagaaaatgtctccagggtatcacagagagatttgcagcagcccctcccatcacaggcctagaggcctaggaggaaaaaatggtttc

SEQ ID NO: 474562 - DNA, 532 bp, Homo sapiens
tagtgttgtcttgtgatggaattctcacaagatgtggttgtttagaagtatagtgccttaccctttgcactcactctctctcctcccaccatggctctgctctaaaatggcattctttcatagcatccagtgtataggttacagtgatgttctagttgtggaaggtgtctcctctgaactcaaagaagcccaccaggagcactatattttatttactatccccataactctctatgggttctgggacattcccatcttattggtggttgctgggctttgctgggatgttcttctggtttcaactatactcacctatgagtcaagggtcagctttggtgaggtgggtggttttgctgatcctggcaaacttcatggtcactctgatagcacagctaagaaatccagggcaagaagtgatcctggagatcaattctattcgtcttcctactgtgcagatgtgaagactttcccagagataggcctgcccgaatttattagtttggtagtgctgccataacaaaattaccacaga

SEQ ID NO: 474563 - DNA, 488 bp, Homo sapiens
cctcttatagtgtggtgtgcaccatgtgtctgggttctggtgaatgtaagatacacagaagtgatgtaaaatacttccagaagcatctctcagagagtgacatccccctgcacacagctgccatgtctgtatggctgacttgggagaaatgccagaaaggttggcatgagatgatggtagaggcacattttccagatggagtagatgtaatatggcagagcatctatgaacttaagtctctgagtgactgtggttcagcatcctttgccttccaagaagggtacacttatatggatgtgactaagaagcagaaaaaaaatgaagattgtcaccaggtaaacgggagcgccatctggatgggactagagtttctctgtggacccaagtcagctcagtcaccccttcatcacggatccagacctgacgaatttctaatacaaatgtccacctggaagcatcactctgcctaacccagctgtgctttcatt

SEQ ID NO: 474564 - DNA, 545 bp, Homo sapiens
ccctcgggctcgggctctggctcgggctctggctctggctctcctagggaatatggagaatccaaatggcatgttcagtttgtgctgcatggtggaggtcttggtaccagagccaggaatttgggctctactccgcaggcagcagcaaaccacagaaggggttgcagatgtcaaacagataatgaatagcatcaattatagctatgacatctccaggacagagatggaggaaatgaggccacataccaaggagtataggcagtatctaaaagatgcaaaagggaaggaaagggattctcccacagagcctccagaagagaatgtaaccctgcagataccttgcttattagtccagacatgtctaaggaacggcaaggaagccaatagggctgaagtagatgtggccaaaggagaagaagccattgaattagaaggagagaacgtgactactggatagatgaaggatcaggatgattcagaaaagaaatgtatagcatttgcaaaggacttgaatgataaattactgagcattccccaaatgccag

SEQ ID NO: 474565 - DNA, 729 bp, Homo sapiens
cactagggaacgcactagtgcatggctttgttctctggcccctcaaggttcaggacctgctgtgctgcagggcccaaggtgttcccagtccatttgcaacaccactgtgatgggggatgctggtcaaagtacttcacatggacagcggtagtgggatttgctctcatatacatgtgtcatcagtgatggcagtgcagcaggatgtgtgcacattagagttggggactgtagaacgaaaactaggaaagcctggggcaagcagaagccagccaccctatttcaaaccatcttcaagactaacagcagttgatagatgtggacagagaaagatgctacaacagaacaagccaaaaactgatcttccagaaagagtcaacaaaacaaaagttgatcctcttacaactacacgagaagttgccgaagaactcaacaatgaccattctgcagtcgttcggcatttgaagcaaattggaaaggttttgaaaaagctctataaagccatttctccatccagttgtgatgtgcagcaaaaagtggactttatacaacaactggcgactaccaactcagtggttgggccgggaagaagccccaaagccctttctaaagctaaacttgcaccaaaaaaaagtgatagtcactgtttggtggtctgctgccagtccgatccactacagatttctgaatcctggtgaaaccattacatctgagaagtatgctcagcaaatc

SEQ ID NO: 474566 - DNA, 1015 bp, Homo sapiens
gactttgtcaaagatcagttggtttttgcaacagctctgagggtcattctagctccagggctcctcactgagtcagctgaggactttgttgcaactgcatccgcagctcaacttcttcctctgctcactcttacttccctcactccctcacagggcagcatgcgcgagcaagcgctgggagagcgagcgaacggggagcggaggcggcctgaccgagtgagtgccagcgagtgtggagttaggggaagccgcctacccccgacccgcttccccattccttctctccccgttcccgtttctccccccaaccaccacaccccgccccccgccccccgaactccaagcagcaccaagtctagagcttcttgacctgctttactgaccattctgatgcaggtgctggtgagttatgagaggtcatcacaggtagtacttggccaaacccataacagtgctgcttggttcccaatgtggatgatgaagaagaaggagaagaacaagatgatgatgatgatgaagaagaggaaggattataagatattgatgaagaaggggatgaggatgaaggcgaagaagaggaagatgatgatgacaattcattcttatctcttcctgtctgaacaaaaactgtatggaatcaacaccaccaagttctgtgggagaaaagaaaaaccttctccctttgctctgctggaagctggagagtgccagacccctgtggtggcaagacaagtgaagcctgactatgcctgcagcatccactgtggaaactactacatctttgccatgccaaacaagtgggggtgaataacactggggtagtagaaccagttcagtcaccccttcctaagccctagaggtggtgctgccccaatttatttgcagctttctagaatgtgaagtctttttgtcctagctctaaatatgaggcattaggaaaagtgcctttggaaatcctattgcaaatatctgttgagggaaccaaccaatgtgtttgctgcgttgtcggctcctt

SEQ ID NO: 474567 - DNA, 566 bp, Homo sapiens
agctgcgtcctggagggggcgccacagtccatcatatgctctgggaacaaaatggggttatgatcgtgtcaacggttcatggcgggcaccttggctggtctgtctttccaattatcggattcagcttcagcaagagtcctaagtctttttcaacaccctcatgatgtaggtgctgttgtcctctttctggaccttagagatgtacagtgcgccactctgaggatcaagtctgaccctgcctttaaatttggattcaaagtacttagattttctggaatcccattctacaatcttctggtcgaaagtataaaaccaggtaacgtggggaccaagggaaagcttccccttcaccttctgaaggtttgccaaaaatcactgacaagaggcagattaaggaggaaaggcatacagatcaatttaacgtgtaagcagagccttcctaatgaagagccaaagatacagggcaaattgtccatttttatgcttaggttcaacaaagtatggacagtcatggagaaatatgattggacaaaaagggtatgattgaatgccaatagactgactgc

SEQ ID NO: 474568 - DNA, 1131 bp, Homo sapiens
gacaagagatcccgagtacatctacagtcagccttacgggtgacaatggggcaaactaaaactaaaagtaaatatgcctcttatcttagcttcattaaaattcttttaaaaagagggggagttagagtatccaccaaaaatctaatcaagctatttcaaacaacagaacaattttgcccatggtttccagaacaaggaaatttagatctagaagattggaaaagaattggtaaggaactaaaacaagcaggtaggaagggtaatatcattccacttacagtatggaatgattggcccattattaaagcagctttagaaccatttcaaacagaagatagcgtttcagtttctgatgcccctggaagctgtataatagattgtaatgaaaagacaaggaaaaaatcccagaaggaaacggaaactttacattgcgaatatgtagcagagccgttaatggctcagtcaacgcaaaatgttgactataatcaattacaggaggtgatatatcctgaaacattaaaattagaaggaaaaggtccagaattagtggggccattagagtctaaaccacgagggccaagtcctctttcagcaggtcaggtgaccgtaacattacaacctcaagcgcaggttagagaaaataagacccaactgccagtagcttatcaatactggccaccggccgaacttcagtatcggccacccccagaaagtcagtatggatatctaggaatgcccccagcaccacagggcagggagccataccctcagccgcccactaggagacaatcctatggcaccacctagtagacagggtagtgaattacatgaaattattgagaagtcaagaaaggaaggagatactgaggcgtggcaattcccagtaacgttagaaccgatgccacctggagaaggagcccaagagggagagcctctcacagttgaggccagatacaagtctttttagataaaaatgctaaaagatatgaaagagggagtaaaacagtatggacccaactccccttatatgaggacattattagattccattgctcatggacatagactcattccttatgattgggagattctggcaaaatcatctctctcaccctctcaatttttacaatt

SEQ ID NO: 474569 - DNA, 878 bp, Homo sapiens
cgagctccagccattggagcctgggactctcataaaacagcactatctgggatgtttttctctgggaaaccagaagcaggttccttgagtccagaccacaccagcaaagagaacaaaaaagcaatcactgtcattatcaccatcattgttgtgatcatcatcaataacatcatcatcatcacggcactctctgccccaaagctttggacatttgaagaagtatttgaaacctggaactggccatgccggctcagtgagggtccactggccaatcctgaacattggccaagtttacctgtcagatgctgtgccccagacctaggcgtggaaaaccagccagcaaagcaggttccccgtagaagcccccaccatcaccttctttcccatttaaccaaagaccagagagtgggacatcggtacccagagcagagaaaggctttactcaagtcaccaagcctattagtggcagagccagaattagaagtgaagttcccctatctctcagcttgccacctctcccctactctgccaggtaaacagaagagggagaggcagggggagtttggggagattccagatggctccatgagcaaagtcttagaaaaactacctgctgcagaaaggaactaaatgatcaaaccacagagagtcattttgcctacttctaagggataaaatctaaagctaataaatagactgtattaggcagttgtatggagaaatgaagaaattcgcagttaggatttgggttacagctgccaagtattgattgcaagtaacagaaattacttccaactaacttgaacacaaaatgaatctgtttgaagaacacaggtaacatggtttggatctttgtctcctcaaaatctcctgttgac

SEQ ID NO: 474570 - DNA, 2183 bp, Homo sapiens
ggggagagtttgagtgcccgtggaaaatatggtcactctattcagggcagtggaagaacactgtccttggtttcctgaaaagggaacgttagatgtgaaactatgggattgtgttgctgcaaaattccgggaactggtcccaacagggaattatgttcccgtcactgtttggggtgattgggccttggtacgtgccatcctaatgacataccaatcctgtgaccccctgcagttaccacaagtttcggaatccggcaaccctctacctcttcctcagctttcctctcccactcggcctttgttatctgctcagcctctcccttcgcctactcctcccccacctgaagatggtgagaattcaatatctaactccggtgactttggcttaacctcaccccctgatgatcttatttctttccatgaagagccgatacttgtagctcccgaggcccggactcggacagcccaggatcataactatgctaatttttccctcttcaaagctttgcagcctttggctccagagccatctaatggccccaggaccaaactacaatttacctgtaattctgcaggccttcccccatccaccgcagcccctcatcctcctgtcatttcggtccctcaaccggtcactttgccatccactcaacctgcttctctgtacccttcttcatgcatggatgcccctgccattcttgttgcacaggattgcgccaataaccaccagtatgcttttacctcttctgctcccccaatgccccttctcacactctcataccagtccgacatcctcaacttcaatgcgtgggcttatccagttgcgctggaacctccaaatgctcaaggggtaggagtgcgtcgatatgcgccactcaatcttacctttttaaaagaattcaaggatgcttgtactcagtatggtcctacttctccatatgttaaaatggtattacagactctttgtactgaggtcattttgcttcctttagactgggatcttttggcaaaagctgttctaagtccatctcagcatttacaattccgtaccaggcagtcagaggagtcccctttgcagactcagctaaatcgggctgatggcattctaataactcaggctcagctcacaggccctgataattactctgatactactgcccaactaggctttgatgctctcaccacggaacaagtaacaaagtgtgtatgagagcttgagataaattacgtgccccaggccaagctcctgtttcttttactactgttaaacagggtcacaatgaattatatccttattttttggtcaaattacaagatgctgttcaaaaacctgtctctgatgagcgcgctcaaggtattctccttcgtacgttagcttttgagaatgcgaatcatgagcataaaatggccatgtgttctgtccaatgacaaaatttacctcaattacatttagcattgtttactttcaactttctaaatgttcctaaagacaatactctgactgcagctgaatgccattatacaggcaaaaaattctccctaaatgaaggcaagccagtgttatggaaaaactcctaaaccaatacctggaaacctggaacaattataacgtgggaaagagggtatgcttgcgtttcaccaggagatcatcaatcccctgtatgggtgcccactagaagacttacacttcgtgtgaatactgacaaagaaaaccacagggaaaagacgtccgtgtcagagactgccctgatatgtggtgagatctgtgctgactcctcagaaactggcacaccaaatcaaaatgggtctggttcaatcctccctaatggcaacggagaccccctaactaatcccacttctcctaattacctttctttttctccttacaaacctaaaaatctcaacctttctattagcctgaaaataacatctctctgttcttctcttcctcctttagcactgaatttcagttacaataggttttatttaataattctcctccttatactttctatctcaccagtttccctcacactgatttacctgctacacaaaattattcttattgggcttatgtgccttttcctccacttattcgacctctgacctggatggatgctcctgcggaaatctatactgaggatagtgtgtggatgcctggagctacagatgaccattgcccc

SEQ ID NO: 474571 - DNA, 981 bp, Homo sapiens
cacagtcggaattcacaggtccaggaatcaaggggtgaaattggaaatggcaccatttaacatcacctttagtgacccactagcaaaatttttgctgcctgttctgacaacattatgttctgctggcctagttccagagggaagaatgctgccaccagtagacacaatgattccattaaactggaaattacaattgccacctggacatgttgggcttctcctatctctaagtcaacaggctaagaagagagttacagtgttggctggggtgactgacctgaactatgaagatgaaatcagtctactactccacagtggaggtaaggaagagtatgcatggaatacaggagatccattaaggcatctcttagtattaccatgctctgtgattaaggtcaatggaaaactgcaacagcccaatccaagcaggactacaaatggcccagacccttcaggaatgaaggtttgggtccctccatcaggtagaaaaccacaaccagctgaggtgctttttgaaggcaaagggaatacagaatgggtagtagaagatggtagttatcaataccagctatgaccatgtgaccagttgcagaaacaatgactgtaattgtcatgagtatttcctttttcttttgttaagaacatatttgtgcatttatacacctgtaataagaaaatatcttcattttatttcctttatcatgtgacataagatttattgacttcatatcagcatttaaagtgttgataactttatgtaatagcatttaggttaaggattagtgtgcttccagttgtgcgaaggatagctgtattacgttaggcataattaggagcttattattgtctttatttgaggattatgtattatttcaggacattcatatgggttcaagttgaacagatgaacttgtgatggttaatattgagtgtcaacttgattggattgaaggatgcaaagtattgttcctgagtgtgtct

SEQ ID NO: 474572 - DNA, 524 bp, Homo sapiens
agactgaaattcctgaggtcaccaaagaatggctggctttgtatacatctggattaaaaatggcatcctgctaccaccctggcctgccacacccccaacctgtgcctatgcaaacccccagaccctaggaggcagacaaacaagtgactggaagtggagcagaacacattggcagaagacacaagtggctggacgtcaagaggacgttgaggagagcatgccggtggaagagcacatgacagacgccagcaggcctgcaggccatcaaccagcagaacaaggcagagtttggccgggacagttgaaggagagccccagccacggacaacggggaaactattccccttctggctccccatctgctgagagctacttccactcaataaaactttgcactcattctccaagcccacgtgtgatccgattctttcccgtacaccaaggcaagaaccccaggatacagaaagccctctgtccttgagacaaggcagaggtctaactgagctgactaacacaagccacct

SEQ ID NO: 474573 - DNA, 632 bp, Homo sapiens
gcctgtggtttgaaagagaaatttagattcctttagataaacctctttgcataaaaacgtgtaaagccctggtgaggatggcacgtgggcatggcacaagggactacaaggcatttggtagaatatggaagttcccccttctggggatcaaacccaaagtatatgatcctgagagtgttgggtacaaaggtgaatgccgcagagttgctggaacagattatgttggtatcagccgaaacctggactttgctccaggcgtgcgcatgcagacattccaagtgaccatccttgatgacctgggacagcctaccttggaaggcccagagaagtttgaattacttcttcagatgcctatgggtgcagtgcttggagaaccaaataaaactaccattttcatcgaggacaccatcacggactatcaaagaattaacctctctttactgattgatgctgcatatgaaacacttttcaactctctctctccatatataaagttcctttagcgaattcttcgatttttgttcacaagtctttatcagaactacttggtagggaaatttttcaactttttattcctttgcactcttttgtaaaaaaaaaaaaaaaaggataataaacagtaaaatgatgaa

SEQ ID NO: 474574 - DNA, 875 bp, Homo sapiens
ctcggaagcatcagtgtaacaatgggacaagtgtgggctctggttcgttccaccttggaaccttttcacactgatgatgaggagaaaggagagtataatgaagtaacagaagaagtaacagagcaagtttgtttgcctgctaaagctaaagtggcaaaggagggagaggtttatccctatccttctgcaccccctccttattttgaagaaaaagagtggcctgaccctccagatctttcttttctggaggatgctgggcaaaaagtgattgccccagtgactgttcaagcagcgcctcaagcgatcgctctcagttctattcaggcaggaattcagcaagctagaagagagggtgatttagaggcttggcagttccctattagaatacaccccccagatcaacagggaaatattatagctacatttgagccttttccttttaaattactcaaagaatctaaacaagctattaatcaatatggacaaggttctccttttgtaatggaactgttaaagaatgttgctgtttccagtcagatgattcctactgactgggatgctcttgctcaagcttgtctaactcttactcagttcttacaatttaaaaccttgtgggcagatgaagtttccattcaggctgcttgtaatgcctaggcccaacctcagattaatataactgcagaccaacttttaggggggtaaggtgttttgatgaaccactagttagactacccaagagaagaagagagaagatccaaataaacataatcagaaatgaaaaaaggacattacaactgatactacagaagtacaaaagatcgtcagagactattatgaacaattacagagtcacacactagaaaacttagagggaa

SEQ ID NO: 474575 - DNA, 993 bp, Homo sapiens
agagaagccagaaataaggatttttctctgctatatcccaatttttaagtgctagtaaatccttcacattttttttttaaacagtgggtttgtggtctcgctgacttcaggagtgatgcgggagaccctcgcggaggaagaggaggaagaggaagaggaggaagaggaagaggaggaagagaaagaggaggaagaggaagaggaggaagagaaagaggaggaagaggaggaagaagaagaggaagaagaagaagaggaagaagaagaagaggaagaagaagaattattattatttcagccggacatttcatgtgggggaacaaaggaaagatctgatcccccggttcacatttcccatgggtcaaagatttatcctctgtggtgttacacccttccttgggttttgcaacattttgtttggctatgtgttgacaggagtttagagatgcgcatggtggacatgccacgaggaactagcaggctgtgcctgtgtgagggtggtcagtttgtcacacagtcaaactctgcagcagcaccaggggcagaacaaagtgacccaaagcccccaaactcgtaaggctgagaggacctgaagaggcaccaaagaggtgactgatgccctctctgcctttctctcatttacctatccatttgtttttattcttgtgaaatcacattctccctacctccttcagttggtgacatacttgatatacgccgctgaaagtatgtgtcataatgaaattgtgtttgtgcctgtgtgtatgtctatgaatttttagtttacatagatgactacaagtctttatcaactttttactattttccatttctttttcactttttctgtttagggctattttgttgttgcttagtatacatccagtattaaaactggctaagcctaatattcttccattcattatgttgtttgctgatgtttttgattaattgctaggttatttatagttctctgtgacagatcatagattt

SEQ ID NO: 474576 - DNA, 773 bp, Homo sapiens
ctcatcaaagcagaaaatagaatgatattaaggaaaggacagactagctacacagagttaacggataaagaaaaattactggaaaggacaccagagttaacagcaaatgcctgggatgaggcagtgccaggttacacctgtgcaaagccagcccacatagaactcgtcactgcatccagagctgaatgtgaggccaagggaacttggagcaggacacaagaggtgtcagatccacaattcttaaaaaatatcaaaagcttagcacctgagtcacatatgggcagaaagaagcaatgggtgctagaatgggccagaagctttggctgggaaaagaaggaagggaaagaacacttgtcaaaaattaacttttacccagttaaaatccagtgtggtgatactggtgttgtgtggatgcagccaacagtcatcaaattcagtcattacagcaacctcaagtccatgagagctgtgaagtggatcctggatttggcaatgaggaaggcacttggtgtcctttcagagctgtgccattggagaggcaaggaccaacatcagctattaacctaagagacttcagcaagtctctaagaaactagaagatgaaaagaaaaatatcccagaaagggggtagagaagctgagaatacttacatgaaaataagctttactccagtgacactttggtacagtacaaaactaaatgaagaaatacaggtatagtctttgtcattcaatcccctgttatatatttagagacttgtgtgaatcttgctt

SEQ ID NO: 474577 - DNA, 642 bp, Homo sapiens
gataaaactcagggcattggatgccaaccactcctttctgctgggagaccccttctgctatagaggaagcttgtagtgaatgggcccaaacatcaatggctccactcgtgaaatccttttggattccaaaagagaaaacacagacaactcttctgttgcaattatgggtgctcagaggtcagctgctgtgaaggtggagtcaaaccttcatgtgactctggagtcaaatcttcatgtgatcccatcacagcttcaagctctccctgaagattcaggggctttcctaatgttatcaggacctgcagtatttgaagtttcagctgaagcttctgaatcccactttcaagctgtgagttttcagactgcaaagacacttgctcagtttggagaccttttatttgtcctgaagtctcctgtgtccctaagtgaagacctgtttggacttttattacgtgctttgaaactcagagtttattgctttgggggactggctttcaccacaggtgacttgagggcttgataggcttctgtaattattcccatcttttcactaactttgtgatattcttagatctgggcagaaagtcttttggccagcttatccctccttgaagtctgttggctgtttactataaaaacaac

SEQ ID NO: 474578 - DNA, 1802 bp, Homo sapiens
agctgcctccttggggcaggattttaaaggttgagaaagtccttttcactggtttgtgagttcatcactagcttcatgcaagacctattttacaacaggtcttctaaatctggttattcaaaaagcattgctcagtcagtggagaaagagagtgccaacctgctagtaccaaccgtttgttatgaaatacttgatttcgttcataactggactcaaccactaactgaatttttatgtgaaagagaacacaacagagcagcaaataaaagtcagaatacaattgtgagaattcagtccagagaggatcataagtttaatgagagtactggcagtagatgtggaaataggtggatagactcaggagagttaaagtttacagaattgtctgttttattgggcataggaatgaacaagaagaaagttgtagggctaaatgtcacgtttaaagcttttgccattggattgatgggagcgccattcagcaagatatgaaagctgaataggaccaagttatgcagggagattgcaaatcttccttcctgtagtatttggaaccagtactgcctgcacatcaagcttgcatggcaatgatattttcaggacattcctctgatgcatccatgctgttggtagtggtacgtaaagctggacttcttattggtcagccttggagtctccagcttggcaacacttgttcaaaaataagcaaccagcatctcatgacactttgctgtcctccagcatcaagatgatgctcctgaattctgacaatacctctacttcaggagcagaaatgcctgaattatatgatcaacgttcccaagtaaatgggattatcccaggacatgtaggttcacattaatgtaattagtaaaagaactgtaatctttttggcctctcaagctggtaaagcaggaaatcaaaactctgttcatactcttacaatgtgaatttcattattgcatgagaccatgctgtttattatgaatttatccaagaagagaaaacatacttgacacaatagaacatgctaaagaaatataccaactttctcacttatctggacaaattaaatccaacttgcaaacttgagttgtgaaatataataataataaaatctatatgaagtttaagaacaggtttatttgtgattagaaaatgacagaaaattcagaaaattaatttacctatcagtattccttttatatccaattaatttaaaattgtatattctgtgataggaagctagtttgtacttgtagaatatactatataatccataaatagccatgactttttcattcaaaaagattgggcattgagtttgctatagaattttcatattgattttaaataaatattctaaaataagatatgagggtcttatcccaaagaaaatgaattttaaacaaaagcatcaagtatgccttgtcttcaagagaaaaccactggattgcaaaagtggatatagttttaatattggcctttaattcttcctataactgtttggaaacacagtacgcctgccatcagtatccatgctatgtgataaatcaaacagcaaaatatgtgaatgtgatgtgtctgccttttaaatgactattctgttttccacatttctgtacacagaggaagtagataaaatgtcacctgtagctaatcatgaggatgcattttattgaatacttctatggtagaatctacggcattttctgctgagctgctatcaagctgtgttagggtactggatctaccaattacgtttatgttaggttacttacaagggtagcaatacaataaaa

SEQ ID NO: 474579 - DNA, 588 bp, Homo sapiens
aagtttcctgaggcttccacagccatgcaaaactgcgagtcaattaaacctctttcgtttataaattacccagttgtgaagtctgagttgctggggtacatcaggccaaagcagattcagggatcccaacatggtggtgactacacagctatgacggggttccactggctccattacatccggcacagaggactggtcagtggtagtttttcagtcacagctccaaaactatcttataaacttacactcttctgcatccttggtttcagatggtgccactttgcatcttatcctgatcccacatttctcactgattgtttcatgtgtcccaaattgctgacccattttttaccccacactcacagatttgggtcaactcactctaaacactattctgatcgtaaccacacatcaactccgtcagaattagggctaaaatcgattcggtaaaattcaaatgtaccactttggtagtttccagacatcttgatgttgaatgttttatatttatctaaccctttcaaaccacttactatgtgctaggcaccatattaagtactttacaaatattaattcataacagcccac

SEQ ID NO: 474580 - DNA, 598 bp, Homo sapiens
tgactaagtcctagagatctactgtacagcatagacaccgagtttgaggaaacgtacagaaggaagagaagtcactggaatctgaaaaacaggatggaaagaataaaagctgtgctaagcaaagctattcatgaaacatgtaacattttatgtagaattgctaggtgtttgcagttggagggtttcctgttagccaagcttggcatcttgctgaatatggaatccattgaggatatttcttatatctacattgggacagaacttctaccactgttaaagggagcacttttcacttggctgtctcaaaatgatgcagcctctatggaaaacaatatggagagtcctcaaaaattaaaaacagaactatcagacgacccagtaattccacttctaggtatatatctaaaagaattgaaattaggatctcaaagagatacagtacttcttctatgtccattgaagcattattcacaacagctgagatatagtgacaacctaaatgcccactgatggctgaatagataaagaaaatgtgatgtatacatacaatggaatattactgtatctcagataaagaaaatcctgccatttgtaataa

SEQ ID NO: 474581 - DNA, 633 bp, Homo sapiens
accaatcagcaggatgtgggtggggccagataagagaataaaagcaggctgccccagccagcagtgcttcagtcctgaagccagcgagaccacgagcccaccagaaggaacgaacgactgcagacgtgccgccttaagagctataacactcacctcgaagatccgcagcttcactcctgagccagcgagaccaagaacccaccagaaggaagaaactgccaacacatccgaacatcagaaggaacgagctccagacacgcagcctttaagaactgtaacactcactgcgaggcagtggaatgagggggaagcccagcaaggcccatctgtttggagtcttcctggacttctggggcctgacccttttggaacgggggttttaagattcataatcgacaaacaattattgatgtggatgaactaactgacaccattttaagtcatctgtagaattctttttctaaccacttaagagaaaacaaaaaaaaagctgtagttcaaaacttatgaaactttaaaagaactcatccgcatcagcactaaaatgtcaatggtcaatgtctattttctgcaaatacaaaatttaaatttagaattctttttggtgactaaactgtgcattagaatttattt

SEQ ID NO: 474582 - DNA, 673 bp, Homo sapiens
accccgcactcgctcactcacatgctgcctctcaccgcagtcacagtggctgtgggattcgcgccagagacttgccctcaggcgcggctagaagtctatgggggagttttaatcaagcagttttcatgggaatttacatgtataaaagtaagaatacctcattttaaacaattgtatagtgaactaaccactgacctaaaagaaagagagggcagaaagaaaagcagatttaagagtgatggacagggaaacacagcagagagcggtcttttcagtactgctttgaaaagacacaagaagctgaaaacaactggagctaatctgaagggattggggatgattatactatttaattatgcaaatggtgaatgcggaaactttttgagaaataggacaggggtcctcaaatttgagaatgcacaaggattaccaggagagcttgttggacagcaaacattcctgggccttaatcccggacagtctaagcagctctaagctggtgctgatgctgctagttcacattttattagcacttttacttaacaagtgttgctctaggaaacagcggttatagtaagcccactcttggtaagttgggtgagaacagatttcaatgaatgtgactctggaactacttggatccatcatggggtgaaaccatgtgaccctacaa

SEQ ID NO: 474583 - DNA, 551 bp, Homo sapiens
ccacaggattagttgagtcgtgagttccgagtccgggtggggtgggatttatttacatgggtcatggttttgtgtatgggtaggtcattgctggctgtcctggtacaggaatatcttgtagaaatacttctattgcctgctatgcctgtcactcagcaccgtgacacagaaatcctgcaccagacactggatgcccgtgtcctagggtggctggcaccgtgggaatatgtacaaatggccaaaaagcacaagaaaagatgtctggcatcattagccatcagggaaatgcaaactaaacccacaaccagataccacaaccagatacacactaggatagctataataaaaaaacttggcaagtgttggcaaggatgtggagaaattggaaactttatacactgctgctgggaatgtaaaaggatgcagctgctgaggaaaagtctggtcattcatcaaaagattaaacatagagttatcatatgacccagcaattctactttttctcctatactgaagagaaatgaaaacatttgtccatacaaaatcttgtg

SEQ ID NO: 474584 - DNA, 850 bp, Homo sapiens
gaggacaagtcgacgaagagatcctgagtacgtctacagtcagccttacgtaatgttggaactgatgccacctggagaaggggcccaagagggagagcctcccacagttgaggccagatacaagtctttttctataaaaatgctaaaagataggaaagacggagtcaaacagtatggacccaactccccttacatgaggacattattagattccattgctcatggacatagactcattccttatgattgggagattctggcaaaatcgtctttctcaccctctcaatttgtacaatttaagacttggtggattgataggacacaagaacaggtccgaagaaatagggctgccaatcctccagttaacatagatgcagatcaactattaggaacaggtcacaattggagcactgttaatcaacaagcagtaatgcaaaatgaggccattgagcaagttagagctatttgccttagagactgggaaaaattccaagacccaggaaccgcctacccctcatttaatacaataagacaaggctctaaagagccctaccctgatttgtggcaaggctccaagatgctgctcaaaagtcaattgccgatgaaaatgcccaaaaagtcatagtggaattgatggcatacgaaaacgccaatcctgagtgtcaatcagccattaagccattaaaaggaaagtttcccgccgaatcagatgtaatctcagactatgtaaaagtctgtcatggaattggaggagctatgcataaagctatgcttatggctcaagcaatagcgggagttgctttaggagggcaagttagaacatttggagggaaatgttataattgtggtc

SEQ ID NO: 474585 - DNA, 1354 bp, Homo sapiens
aaacaaagcagttcggaatgcttacggcgttcactcaggagcccagctggcttcacccagtggatcccgcacggcggctgcaggtggagctgcctgccagtcctgcgccgtgcgcctgcactctcagcccttgggtggtcaatgggagtgggtgccatggagcagggggcggcgcttgtcggggaggctccagctgcacaggagcccatggctggggggaggctcaggcgtggggggctgcaggtcccgagctctgccccacaggaaggcagctaaggccccgcgagaaattgagctcagtgccggtgggctggcactgctggaggacccagtacaccatccgcagccgctggcccgaatgctaagcccctcattgcccggggccggcagggccggccggctgctccgagtgcagggcctgccaagcccacgcccaccccgaactccagctggcccgcaagcgccgcgcgcagcaccggttcccgcttgcgcctctccctccacacctccctgcaagctgagggagcggggtccggccttggccaacccaagaaggggctcccacagtgcagcggtgggctgaagggctcctcaagtgccgccaaagtgggagcccaggcagaggaggcgcggagagtgagcgagggctgtgaggactgccagcacgctgtcacctctcatgatgaaggtcaatggaaaactacaacaacccaatcaaggcagaactacaaatggcccagacccttcagaaatgaaagtttgggtcactccaccagccaaagcaagactaagcaaaaagaacaaatctgaaggcatcgcattacctgacttcaaactataccacaaggttaaagttaccaaaacagtacatgggtactggtatgaaaataggcatgtaaaccaatggaacagaatagtgaacccagaaatagagccaaatatttacagccaactgatctttgacaaggcaaacaaaaacataaaagtggagaaggacacactattcaacaaatggccctgggataattggcaagccacatggagaagaatgaagctggatcctcatctctcaccttatacgaaaatcacctcaagatggatcaaagacttaaatctaagacctgaaaccataaaaattataaaagatagcatcaggaaaacttttcttgacattggcttagccaaagagttggtgcataagtaattgtggtttttgccattaaaagaaccaatgcaccaacctaatagtaacttaaagtatcaacttactttgatcttattgtggctatttgggagctgtttttctctatcacatgtgcacacatatatgtattagcagtaactacaggagctg

SEQ ID NO: 474586 - DNA, 1317 bp, Homo sapiens
ccacatcaggcttcataaacaagaagcgtctgagttattgagagtacgaaaggcacatgggaggcactgagaagtccaagatcaaagcaccagtagactcagtgtctggtgagtgcctgtgttcccaaacacagtgcctctttgccatgtcctcactcagtggaaagccatgtcccaaccagtgctccaacctgctggagcatctctcagtggaaacaatggcaaacagagcatctggaaagtgggatgtccgcagtgggaggaaatacggagggagccaccagtgggatgaagcagcaggaccagggtctggaatacaactgggcttcctgtgtcttctcaggggcaaagaaacactgtcttgtatcagtgcagagtcttggataagtggatttcttgcctatattcctcccgtaacagcagcagatggcttctgccagctgtcagtgaagaattcttacaaggctgcagtcaaggcgtcagcaggtctgtggtcttatctgaatacacagttggaaggatctgcttctgagcttgagcagttctgcaaaccaatgttccaactttctcctaatacagaacctatttattttagcaggtcacgtctgaaatgtactgcttataatggaagcctttaatatagcaatgtacttttgaggagtatggagaagaaaaccaggagaatatccctgctatttcaaatgctaatatatatattatatatattataaatatattaatatattttattaatatatataatatataatatataatataatatattttatataatatatagaatatatagaatatatatattctatataatatatattatataatatatagaatatatagaatatatatattctatataatatatagaatataatataatgtaattatattataattatattataatatataattatattataattatattataatatataatataattatattataatataattataatatataatatgttataatataattataatatatgttataatataattataatatataatatgttgtaatataattataatatataatatgttgtaatataattataatatataatatgttgtaatataattataatatataatatgttgtaatataattataatatataatatgttgtaatataattataatatataatatgttgtaatataattataatatataatatgttgtaatataattataatatataatatgttgtaatataattataatatataatatgttataatataattattatatatatatatggcagaaaacaag

SEQ ID NO: 474587 - DNA, 836 bp, Homo sapiens
tctacaataagtcttaagattgcgaagggatccagagactaaaacattgataccttgggataccaggcacagctccacctgttctgtgaagacaaggggcagctcatctgctggcactgtgagcgggcaccgcagcacaaagggcacaccacagctcttgttgaagacgtatgccagggctacaaggaaaagctccagaaagctcctcctacagtaccgggattacagtcaacatgactctggatccagatacagctcatagtgaactaattctgtatgaggattggagaaaagtgacttgtggatatccccaggaccatcacagcacttcttccaggagatttagtgccttcccctgtgtcctgggttgtgagggcttcacctctcaggaagatgctccttcaaaatggatgctggaaaacgaaccagaaggaggaaatttggacagaaagaggaggacaacatgtgaagatgagacacacccgggagagtgccacatgaagagggaggcagagattgagtggtgcatcctcaagccagagaacaccagcgaagactggcaaccagcaggaactagcgagagccatggaatgtattcttccccagagcctctggagagggcaccgccctgtcgacgtcgtgattttggactcctggcctcagaactctcgttcttctgagcaacccatgaccatggtatgtgaaactcacaagtaataaccaaataaacactaggcacttttgctattattagctcaatttacggtaatcagaaaggttagctattatatctagcattttatttactttttaattctcagtgttctaagaactgt

SEQ ID NO: 474588 - DNA, 1017 bp, Homo sapiens
ggtaaaataaaatgtttcttgaccaaagcaaaaccataatgactacagctgctgcagtttactgggagaccactccagacccaattcacctggacctgaagatatcaccaggggaggctgcagaacaacaaagatggctgcctgctccttctgctctgggagctccatcccagagggccatcgagctgatgctgaccatggcgctactgtatgtggggtctggcaacccgttaggaggtttcactcagtcaggcagcgtcagattgggcccacttaaagaaacagcctggctgccccttggtggagtgggagtgctgtgctggggggactcacacttgtccggacttcctggcctctttagagacagctggcaggaaagactaggtcctctgaacgtgagaccatggctgctcctctccccaggggctccttcccagggatataacagttctgttcataaacccttggctggatttgctgcaattcctgcagcaaggcaccacccaatgaggagggatggatccaggaactcagttgtcttaggcagtgtccagtctgttgctgccagcggcaactcaagggggatgcacagctccgtgcttgggttccaaggccctggtggcatgggctcacgaggggttcttctgatccacaggatgcacagatctgtggagaaaacatggtttcctggagcaacaccattaatgctccctggggctgaagaagaagaagaagaagaagaagaagaagaagaagaaggcaaagaagatgcagaagaagaaggcaaagaagatgacgaagaagaaaaagaagaagaagaagaaagaggaagaggagagtgggatagtttataaagtgcaagacttgatctgatctgtgtcttcaaaatataaaaattctgtggtaggcctcactttcactagatgtaaggaagagggtgtcttagttcattttgtgctgttgtaacagaataccacaagatattctgatgaagttagaaatttatctcacagttct

SEQ ID NO: 474589 - DNA, 625 bp, Homo sapiens
tagagctcaggccatggcttcagagggtgcaggccccaggcgttggcagcttccacgtgatgttgagcctgtgagtgaacagaagccaagaattgaagtttgggaacctccagctagatttcagaagatgtatggaaatgcctggatgatcaggcagaagtttgctgcaggagcgaggccctcatgtagaacctctgctagggtagtgcagaagggaaatgtggtatcagtctctaccaggcccccacctagtggagctataagagggccactatcctccaggccccagaatggtagatccactgacagcttgcactgtttgcttggaaaagctgcagacactcaacaccagcctgtgaaagcagctgggagggaggctgtaccctgcaaagccacaggggatgcaatgatggttcaacattcacaaataaatcaatgtgatacatcatatcaacagaatgaaggatgaaaaccatatgattatatcaaatgatgcagaaaaagcatttgatatgtttcagtatatcttaaagaaatatcaattgtattaatcattttattaatattggctcgattactatttatttaaaataattaaaactctaaaatatgtgaaatagtaaaa

SEQ ID NO: 474590 - DNA, 479 bp, Homo sapiens
agacaacgcttatgctgataagatggctagacaagcagctagctttccaacttcttccgatagcagaccggcctttattactcaaatcagccaagcattttttcaggctcttggtattcagtgaaacctttatatcccttacggtcctcagtcttcaggaaagaattcaggcctgtccttggaatgctacagggtacagcccatttgagctcctgtatggacgctcctttttattaagccccagtctcattccagacaccagaccaacttggactgtgccccaaaaatcttgtcatcctatcttctgtctagtcgtactcctattcaccattctcaactactcatacatgccctgctcttgtttacactgctggtttacactgtttctccaagccatcacagctgatatctcctggtgctatcctcaaactgccactcttaactcttgaagtaaataaataatctttgctggcaggact

SEQ ID NO: 474591 - DNA, 619 bp, Homo sapiens
gcatcccctgaacctggtacattcgcctttggtccctctccccacccccgactggggaagtcaatgatttaccaaacacagcacacagctggtccatggcaaaggcagcaggaacccagcactatctgcctaaagatggtgacctgcttatgggtggccgtggacctgctttggaggagaacactgggagaaggtcagagagatcttcccgctgctgccctgcgttctccttcccctcctttgtctccacggaagcagccaccacttccaccactgagctggcattggcgatacgacaatgaacaagatacaaatggcctttacccttatggagcacgcaggacccctgaattggtagccagctggttagaagttagggtggctccggaggcctccaaacttgcagctggtgtctgccgtgaaggaagtcttgtaaagaactgtgcccttaacctgcggtttggcctaaatccagacagggaattgaagacaataacgcctaatccatatggttactgtgagaattaaatgagctaatacagataaagcctttgaatagtaactatcataagtacaaaatgaatatcacctatttttatttgtattgatttatttttat

SEQ ID NO: 474592 - DNA, 471 bp, Homo sapiens
cctcgcctgtcaacttaggataccgaagaaaaataatgctgaactggctctctgggagggtagggcagaggagaggaaataaacccctcatttgcagtgtttgccgattaccatggtataaatgccccctctggtcaatttcaggctgccaacatgaagacactggatgcggaatcaggaggagatgtatacagctcagtctccaaagccaggacaagccagctccaacacactactggctgaatctcaccaatcctgcaaaacataagccaaaatacaactcacctttggaatcagagaacttacaggttcataaaattgcgaagcccagatgtgcacctgaggtgagacttcgtccagcttctgtctgtgtcactaatctttcctgctttcagcggcatccctcgcaggcccgtgttgttcccaactggtgttcccacctggcggcaaactggcgactgtagttacaga

SEQ ID NO: 474593 - DNA, 650 bp, Homo sapiens
actgatatattcctcttcatgaatgtacaatagtgatacatcattttttaaaatctttgtcttaataagtctacctatctcaaagcaggaaacacagaggagtgtctgtagaaatgaagagatgggaaaacacgatatccaaaaaactgcaggcaatacagtccactgtgcagtattggctgttaccccgatggtcatggggctgcctggaagctgcggctcgctgcccctgcccagcagcaggagggagtattggacagcacgtccccagccccggaaaagatcaaaagtcaaaagtggaagtatggtttctactgaatgtgtatcactttggcagcaccgtaaagtcaaaaaattaagtcaaaccacgttaattcctatcctaaatttccctcgaggatataacaaggagaaacagtattaagttacagctagactctggtgggatttagattaaaaatataaaagtacatctagatgctagatgagactagtgacgtcacgaaccagactgaaacttaatcacattaagaagcagaaaccaccacaagcatccatatagtgtgtttactgtcaggtttattctgacttgccttcacaacagttgactctcagtttagcttgttgattcacagaaaaaaaaacctgaa

SEQ ID NO: 474594 - DNA, 829 bp, Homo sapiens
gggagtcgccagacttcagacagcagcgatcgtggctgttgaggaactggactcaaccccgccatgctggcagcatgcaagcttggaaatgagcctagcagaagtgtggcctttgtggcgggatcaaagcaatgggctcagggcccgaactcagaagaggctgcagaagaaaggggagcctctgcagccctgtcctgcagcagcagcagcagcagcagcatcttggaagtgacccggacaacacagctgcagctgcggcatggagagcagagtgcggaaaagagagcagcgaagctgttctgggagaaacgtcatgactggcagtttgaaacatctcctgggttgtcactgtcccaagcacaaagctcaagcgtttgtggcaaggccctatactttatgagagctggagcaaatgatagcaacccaaaccttaaaggaggcttcactccccaatattttactcacctcggatgctccacatcaaagcaggcctgtgctatcgctgtgaagacctgcctgcgaagccaggatggtacaaaaactactaaaattgagtaatgattttatcaaataaagtgaacgtaggtctaattctttacattgctgtgtgcagaatattaagccaagatttttttaaataaggtattttctaacatactgttctttctaaattattgatcatatttttgtgaaagcaaaaagtatttgctattatttgataacaaatattttaaaaatataatttcaccttcatttcatacttttcaaatttttatttttgcatgttttagataataaataatacattagtagagtaatactgtaaaat

SEQ ID NO: 474595 - DNA, 609 bp, Homo sapiens
agagacagcaaataagcattgcagaacggcctgaagtttcagaatgggttgtaaccttagaacattgcctgctatccaaatctccttggaacaaatccacctagcaccaggaatcaatttaatcgtggctctagaattcacaacaaaatcgaataatacatgtttatggcagcatctgagagagcttcctgtctcagcgcaggctgtgccagaactagacctcccacagaaccctcgacctatgctaaggccaacaaactcttccctcctcggaaagaaaacattgatcagtgatcacaagtcccctgttgacctgggggttgtacttctcattggagtggaaggaaccacctttctgattttcatatctcaattctatgaggtgattatatccactgagtacagctctgatctctgtgctgtcagatcaggttctcgatcctgcattctggaaaacccaaacctggtctgggttgaatttgccaagggagtaaccaaatacgagatgagaagaatatatgaaaacaaacaataaaattgaatatagtaatttagcaacttctcatgaattaatgaatgacactgatatttagatggctactgacacaa

SEQ ID NO: 474596 - DNA, 599 bp, Homo sapiens
agggtcccagaccgtgccgaagcatcacgagacctctccttgtctatgcacaaacgagtgtccaactctggagcccagactgttgcttcccggtctggtggtgaatccttcatagcctggcagaataaggaacagaagtgggccaactgcaaacaaaaatcagctgcagacatgagggctctgaggcctaacacaaagtgctcatatgtgaggcacgccaggaccgaagccaacaggaaggagacagaagctggggagggagcctgggaaacacaccgtcgtagtacaatggtgccccagctgtggcagctcagtgcttcattgtacaacagtcaagcctatagaatccgaagagagccaggtaatcgcagagtggagaaccagctccagggtgcccgcgtccacacagcggcaagagtgccatatcccagctttacagttttccagtcagatgtgcaattagagtcattcctttgtgtgaagacaattgaaggttggatttttctgtgacttttaaatcaaatgaacacaaaatccttaattgtcaatcagacttacatgaaatacatgtcatgtccagaaccatggatttatccctg

SEQ ID NO: 474597 - DNA, 716 bp, Homo sapiens
agcagcccacactcaagattgagagtcgagggaagcgtgtggtttatatgcgcgcaggaagcgtgtggtttatatgcgcgcaggaagcgtgtggtgtatatgcgcgcaggaagcgtgtggtgtatatgcgtgcaggaagcgtgtggtttatatgcgtgcaggaagcggaagcaaaaatgaggataaaagaaaaaagaggcaaagaagaagggaagcaaatatataagagtacatcgctgaccagccggaattcttctagaaaacgcagctggctgccaggtcagcagggatatcatctgagaggtgacatgaaatcattgcgtcctggaacaatgcaccaaccaagcagaacagacactggccataaagctgaacaaagtgtgcaggctcactcaggggcatacaagaacacgtcagtggctcgtatggagaaagtgggaggggcggaacccagggagaggccacggcggggtggggacactggcagggaccccataatcatgactggattcctgcgtttcttaaacgtggtgctactgacattttggggagcgttatcgctctttgctgttgggggctgctgtcctgatgtaggatgtttaggaatctctctggcttctacccactagttgccattttcacttccccctcagttatgacaaccaaaaaatgtcaccagatattttcaaatgtctcctgggaagtaaaatcaccct

SEQ ID NO: 474598 - DNA, 473 bp, Homo sapiens
atattgtacaaaatgtattgcttttcagatcatgttaatgcttactttttcacgtttccactcttacttaattgccaaaatagagaaaacctattcaaaaacacttatctgaaaaaaaaggaatccttgattgacactgggtctgtaaaagcacagcagtgggctccttcccatcacatcacctcaccaaaggtggattctgaaaactctcccaaggcccagtcccaggattcaccgggcagccctcacgacctgcgcactcactgcagaagctgcctgagagagcaaagccggagccgcatggttccccctgaggaacgagcgcagcatccgtccaacgtgccaacctcagacacgagctgggcagcgttttcagatgctgacagcagttcggtctcattagagacacagatattgtcatcaaagttcaaacaggatcagagacaaacagtttgaaacataacactgaaaac

SEQ ID NO: 474599 - DNA, 1065 bp, Homo sapiens
attgtaaaggcaccagttctgaggccatgggaaacagtgagcttataggtagaggttatcacagggcacagtcttccaaacatttcactcacagggcacagtcttccaaacatttcactcacagggcacagtcttccaaacatttcactcacaggggacagtcttccaaacgtttcactcacagggcacagtcttgcaaacatttcactcacagggcacagtcttccaaacgtttcactcacagggcacagtcttccaaacgtttcactcacaggggacagtattccaaacgtttcactcacagggcacagtcttccaaacgtttcactcacagggcacagtcttgcaaacgtttcactcacagggcacagtcttgcaaacgtttcactcacagggcacagtcttccaaacgtttcactcacagggcacagtcttccaaacgtttcactcacagggcacagtcttgcaaacgtttcactcacagggcacagtcttgcaaacgtttcactcacagggcacagtcttgcaaacgtttcactcacaggggacagtattccaaacgtttcactcacaggggacagtattccaaacgtttcactcacaggggacagtattccaaacgtttcactcacaggggacagtattccaaacgtttcactcacagggcacagtcttccaaacgtttcactcacagggcacagtcttccaaacgtttcactcacaggggacatggacaggttctaggtcctgttgtgtcagcatccgagttgcaggtggtggttctggctctatcagttgcagggaaactaagctgccgatataaagagaatccagggtggacagtgtggcctgatccatctgggctccatgaagatcatcaagggagaaggttccccactgcaccttccatcacaaacctgagaatggcctcttcactgatatttcataacttcaaatacatataaaatgaatatatttaatatatactctacaatctatgaataagataaattttctcctgattcttccccaaatatttagccattttttaaaatgctaaaatga

SEQ ID NO: 474600 - DNA, 561 bp, Homo sapiens
tgagaagaaagacctgaaggaaaagattatgatgtaggcacctgggaaagactattacagttacaatgagtattattaaaagacaaaaaataaaagatgctggtgaggatgcagagaaaagcgcactctcatacgctattgccaagggaagctctgagggactgtgccatgaggaatggtacattctggcccagatactaggcttttcccatggtctttgcaacctgcagaacaggagattccctcgagtggctacaccaccagggccctgggagagctccgactggcatctggtgggtgcccctctgggacaaagcttccagaggaaggtacaagcaggaatctttgctgttctgcagtctccgctggtgatacccaggcaaacagggtgtggagtggaccttgagcaaactccagctgacctgcagctgaggggcctgactgttagaagaaaaactaacaaacagaaaggaataacatcaacatcaacaaaaaggatgtccacagccaaaccccatctgaaggtcaccaacatcaaagaccaaaggtaggtaaatccac

SEQ ID NO: 474601 - DNA, 890 bp, Homo sapiens
ggctcgccctccatgggctgcacccactgtccaaccaatcccaggcatctggtgaccaagttgaagccaatgttcattgaccattctgaaaattctagggcccttaacaattacactaactttactctgcctgtgatctatggagatgaggaatttactggaagctggagcaaaggtcattcttgctatgctttagcaaacagactgacagcattgttcccctgctgtagggatctgtggagctttgaacttgagagacatgacttagggtgtctggtagaagaaatttctaagcagcaaagtgttcaagatggcagtgcagaggggaaatgtgaagttgaagcctgcacagtccccactggtgcactgcctagtggagctgtgaaaagacagccaccatcctccagacctcagaatggtagatccacagactgcttgctccgtgtacctggaaaagtcacagtcactcaataccagcctgtgaaagcagcttcaggggcataccttccagagcccatggctgcccaaaagctgcccatggcagtgggaggctaccccttgcaccagtgtggcctggatgtgagacatggattcaaaggagattattttagagctttaagatataatgactgccttgttgggttttggaactgcatggggcctgtagaccctttattttggccaatatctcttttttggaatgggagcatttacccaatgcctgtacccctgttgtatctgggaagtaacaaacttgttttggatttcacagactcacaggtggaagcagcttgccttgtctcagggacttttaacttggactttggagttaatgctggaatgagttaagactttgggtgacaattagaaaggcattagtgttttgaaat

SEQ ID NO: 474602 - DNA, 880 bp, Homo sapiens
cacatgaggtaaatatttcagccatgtgcagtgcaagaagacagctgtcaggagtcacatttctacagactggaagcccatccatatatttttattatttctttctagaaaattttcaggctgatgatgcagcagaaaagaaaaacccattttttgaagagaaattcaagccagctgcagaaatttgcataagtggcaaggagcctaatgttaatccaccagaccatagggcaaaagtctccaggccatgccagagaccttcacagcagcccctcccatcacaggcccaaaggtccgggaggaaaaagtggtttcatgggccaggcctggggtcctcatgctgtgtgcaccctagggacttgatgccctgtgtcccagctgctccagtcatggctgaaaggggccaacatagagcttgggtgttgcttcagaggatggaagccctaagccttgacagcttctatgtggtgtttggcctgtggggcagtgtggaagggaaatgtgggatgggacccccacacacacacagagtccctactggggcactgcctactggggctgtgggaagagggccaccatcctccagaccccaggatggtagatccactggcaggttgcattatgcacctggaaaagccacagacactcaaggccagcctgtgaaagcagccaggaaggaggctgtatcctgcaagccacaggggcagagctgcccaagaccatgggaaccgacctttggtatcagcgtgacctggatgccttcaaagtttccgctttatggttgattttccagaacttttgattttcaaaataacattctgaagattttgtcctgaaatagtattcaaaaactagtcttcccatatttaatgaaccctgg

SEQ ID NO: 474603 - DNA, 2306 bp, Homo sapiens
cagccagtcgcaagatgatgttctgtgtttcattttcaggaattctagctctgcagctagaggagataaaggacctgaaaggattggatgatgcccaatcacattccaagaagcccagtgccgaggggagctgccgccaaaccaacgaggtggggcagacactgtcagccaagaggcagctggagcatttgctttgctgccttgacaagcagaggagttacccagggaccctgggaaaaatgggtgtggcagtggcagcagggctccacctgtctgccattttactgagtggtggattcatagccataccctgtcagctggaactgaattctggacagcttttcccagacagcaggggtcctgctggagggggttttattcatatcttggttattgtggataatactgcactgaccatgtgggtgcagatatctacatctatattcctttggatatatgcccagaagtgggatcgctggatcatatgatagttctatttctattttttgaggaacctctatatgatttttcataatggctgtactaatttatattccccaaaatagtgtttaagtgtttcctttacctctatatgatttttcataacgtctgtactaatttatattccccaaaatagtgtttacatgtttccttttctctacaccctcatcaacacctgttatctttcatctttttgataatagtcatcctaataggtgtgaggtgacaccttattgcagttttgatttgcattttccgaatcattagtgatattgagcacattttcatatgcctgatgttcatttgtatgtcttcttttgagaaatgtctatttggatcctttgcccatgttttgtcttcctttgttttgatattgagttgtgtgagttccttatatattttaaatattaacctgttatcaaatatattatttacaaatattttctctcattctataggttactgttttattttgttgattgttttctttgctgatcattgagttcttattgcctggcaccttaaagtcagtaccgatttttctatttcttagttttgtaaccttggctaaattatttaactaatctgtgtctaggtttctgcaactgtaaaatgtaaaatgagaatcataattttatctattcccagggcaacacgtacaaaatccttagaatgttgcttggcacaagtcagcagtctgtatttgttagtgatttttattactatgtttcaggcttcatcctaagtacattacatatttaatctcatgtactttaatctactcattttacagatgagggaatcaaagctgaagctagttaagtgatttgggcaaagtcacaccatcattagaatagaggtagaatctaaattcagatcatagactgcctgatttcaaatgtgagcattttgggttttgtgactatactgttgaaaaacaataagccctcaccattttcttttgaactcagtaatgttctgatcaatagaacaaaatgttttttactgtattctaagattaaataataaattcactatatacaatgttctgaattactctaaaagaagcaaggaattaatactggggtgtaacaccccagtaaatattaaattccttcacgcgatatctatagtttaaggctttacttgataagcatttctttcttttagaggttttagaaaactgaatttttaaaagaatgctatttcctgaaatgatttcacctgatttcctagggaaacacactaactcacatatatcctgtcaatttgaaaatcagcttgccacttgatcacaataacctcgatatctaatttctcaaataattgaccaagttaaacctctgacatgccgttgattgtcacttaaccaacgaggtgtagcagatcaaagttatatcattagacatggcatattaattaaattttgttctgtagtttaattgaaaaaattctgtagtttaactgagaaaaaaatgtttccttagctgctagtgttttgaagaggaaaaatgataaagaacagatattgaggaggcctttccatttaaaaccttttgttactgtaaagtatatatcattttggttcaatttgaaaactaaaatctgtaaaccaaaatttctctgagattagctaaatgtaacccaatcaaagacacattactggaattatttctagagtcaattgtttaagactctaatctgggcatatgaagagatattcaactttgtattctttgtcatgtgtcatcttctgttactcctgttaatttaagttaggcacgcaactttatgatgaatatgat

SEQ ID NO: 474604 - DNA, 943 bp, Homo sapiens
ttacacctgatgcatgtactttctgccccccggctccttcggctatactcactctttgttgagtctcccacaattaccattgttcctggcccggacttcaatccagcctcccacattattcctgataccacacctgacccccatgactgtatctctctgatccacctgacattcactccatttccccatatttccttctttcctgttcctaaccctgatcacacttggtttattgacggcagttccaccaggccaaatcgccactcaccagcaaaggaaggctatgctatagtatcttccacatctatcattgaggctaccactctgcccccctccactacctctcagcaagccgaactcattgccttaatttgggccctcactcttgcaaagggactacatgtcaatatttatattgactctaaatatgccttccatatcctgcatcaccatgctgttatatgggctgaaagaggtttcctcgctatgcgagggtcctccatcattaatgcctctttaataaaaactcttctcaaggccgctttacttccaaaagaagctggagtcattcactgcaagggccatcaaaaggtgtcagatcccatcactcagggcaatgcttatgctgataagatccaaattccagtgaccccacaaggtcattccccttttctgactccacctgcctatagtggcctcctcttctttgctgaactcctactgcacttgtcagtaacattccactgagttctcaatgctagtgtgtcattgtttctctgtgctttctatgtgtacatattatgttctgtatgagatttcttagcctctgtaaatccttagaatacctagcagagctgagcgcagggtggaaggttgacacccatgaactattttttatctcgtaatatcacacatggcagccataatgcattgcaccccttgc

SEQ ID NO: 474605 - DNA, 1023 bp, Homo sapiens
cctaagccatttatgagtcgtgaatgccactttgggcaagttacctaatgattcccgggttgccgctgctgactcagccggcgtgctttattcccttatttggccctacccacatcctgctgattggtccattttacagagagctcattggtccattttacagagcgctgattgtccccacccatcccaaaagcccagccggcttcacctctcaccggcattcaccacaggactttgcggcacctagcctgaacactccgacagcccagagggagcttgtcccagacaatcaagaggaaaagacggtaagccataaagagatggagacctgctatcctggcgaagagggaatggtggtccacacacgggattcagcctcggatcaagcccagcaggtaccagctggccacgccaagtgtggggcttgccgagctggtgctcacctggaacccgcgccagcccaggagcaccgaatggcctctttctcggatcttcggtggtacatgtcttacggccagggtaggtgtcttctggttggctctcttcctgcttctgctgtcttgctgacacacgctgctgatgcaggtggccttgcaccttgggactgggcctgagcagggaggagtcactcatccccttaggctttcaggccctggggagaatcttacaagttacctgaaactaattatcaagcctctatgctagtgagtggggaaggatcttaaactcatcattttaactatctccatatcctgtttaatctgtttttcagctatttataacttacaacaattgggttaaatatacttttgtgagcacatgtgaatcatttagctttctctaaacctaatttctccagaatttggaaactatttgtgagtattcttaatttatggcaatataattatttacataagttcaataagaatcttttttttctttttaataaaaggacacagttagaggcactggttattttaccaaggctttgactggaatggcatattttcagacatgaacaga

SEQ ID NO: 474606 - DNA, 1803 bp, Homo sapiens
gatattggagcagaaccaggagtgggggcagagaaaagcaaaaggcgtatgaagttactgaagaagctccttctcaaacatagtaggggcaagagcaggtttagagccagcgagggcagtatcttcaggtcttcagaacaatctccagatgtaccacctctgttgcttcaggtcctgtggggttacagctttggatctggtcctctgtgctctggtagcactgcttattgccttagtccctccagccttgtggttccagcagcttcctgtgatagagtccgcaagcaggctgatccactctcatccaacctcaatgctaaacaagcaaccagagctctgggactatcgaatttccagacaagtgaaaaacattcacattcagaaagaaggtatagctatacttgccagtcattttcatactccagaattggtgaagtaaaagttcatgtgaaggggactatttaatcataaaattcacaaagtgattcatccaagagtgtaaaaaaattacactaatttatacataagcatatatttgaaactattagcctgtgtgtgtgtgtgtgtgtgcatgtgtaaaagagatgccagaactgtgctaaacacttactttttcgctacaaattctctcagggctattttgccataaccagaataaatgtgaaattcttaactaaactgctacaaatgtatgagtcttctttgagtgttgcaatgggccaaactgtatattaacaagaggtttaatttatttctctgttatggcacgtaagaaatgttcttgtacaatttttatcgcagattataattcaataaatctataaatgttaagaaagcatgttgattcattattaattcatgccaaaacaaacagatgctttcatttcaagaatatctgtaatgtttaaaaaatcaaattgccagacaggaagcaattataaaatggtcagaatagaaaataatgttaacaatctttgacgatttcttttttagacactaaactattcacatttttttatctatgtcttgattatatttaccattcaacatttacttagatgaaaagtttgctatgcttagaaatacaaaaaggaaaagaaaaagacatctatgaacacaagaaagtaaataaaattttattacaaatcatttatttaagaagataggacttcacttattctcactgctgaaaattaaatttattgatatcaattataaaagccctttctgtatgttaaaccaaaacatcaatgtattaacacagtcaagtaaagtttattaacaagcattatgtagttagaaagatagtttctcttaaatttatttttctaagctaaacaaacaaaaatttaaattttgtttgtaaacgtttgcttcagaaatttaatgaatttttccgtttctttggcaaaatatggaaaaattaattgtgactagtacacctcaaagttgatgaaaaataattgttccggaagataaatttcataatcttttaaataaaaatatatatagtatttctaaagttcatatgaaaaatatttgtccaaaggacttctttgtttaacgttactacaaggaacagagccagctgatccctgaatccatcgcaaataaaaaaaggaagttccaattgacccaggaggggttgtatagagaaagaaatcgctttcttttgacgtattctttgatgcaagtgcagactaacctgttatttatatctccaaaagaggagctgggtcattcaggcctgccaggccatttgtaaaaatgaagaaagctcacaattaaagggctaaaattatt

SEQ ID NO: 474607 - DNA, 2244 bp, Homo sapiens
ggctcctgctggaggcagcatggcaaagagccaagggcagggctctggagtcagactggaagacctctgctccttaccgactctgcaaacccccatgtggctgcttactccatatatgaccatgggctcattcttgagtctatctggatctcccgcagctcaacaatgtcattaccgagcaggctttttctagatttccactctgccatcctcagtgggctgcagctgtttggagtgatccactcggtgttcaccaacctgcttctgtgggccaatggcgtcctcaatgagtcaaagcaccaactcaatgagcacaaggaacggctcatcactctgggttttgggaacataacaacagatgaccacacaccgcagtgtaactgcacgcccccaactctgtgcactgccatctcccacgggatctactacctctaccccttcaacatagagtatcagatcctggcctccacaatgctctacgtcctgtggaagaacatcgggcgcaaagttgacagccatcagcaccagaagatgcagttcaagtctgatggggtcatggtgggcgcagtcctgggcctgaccgtgctggccgccaccattgctgtggtggtggtatacctgattcatattgggcgctccaagaccaagagcgagtcggcactcatcatgttctacctgtatgccatcaccctgctgatgcttatgggggctgcggggctggctggaatccggatttacaggatagacgagaagtcactggatgagtccaaaaatccggcccgcaaactggactcggacctcttggtgggcactgcctcgggctcctggcttatctcctggggctcaatcttggccatcctctgtgctgagggccacccccgctacacctggtacaacctgccctactccatcctggcgatcgtggagaagtacatccagaacctcttcatctttgaatccattcaccgagagcctgaaaaactctctgaggacatccaaacccttcgggtggtcacagtctgcaatggcaacaccatgccccttgcttcttcctgccccaagagtggaggtgtggccagagatgtggctccccagggcaaggacatgccaccagcagccaatggaaatgtgtgcatgagagaaagccatgacaaggaggaggagaagcaggaggagagcagctggggagggagcccaagcccagtccgccttccccgtttcttacagggcaacgccaagagaaaagtcctgaggaatattgcagccttcttgttcctctgcaatatttcgaggctgcctgccacagccagggagtggaggaagctgaagaaggctacagccggaagcgggagtgaggagcctgacaactcaagaggtggcacagggggagagaactgggacacaaaagagtctgagaagcagggaacactttggatacctcccgcctttggctgtcgacctgagtatgacaatggattggaggagattgtctttggctttgaaccctggataattgtggtcaacctggccatgcctttttctattttctatcgaatgcacgcagctgcctccctctttgaggtctattgcaaaaggtgtccaaactctacagacccacagaatgtaacggatgtctctcgattcctcctcctcaaactctcagaggatccagaactgcagccggtccttgctgggctgttcctgtccatgtgcctggtcacggtgctggggaacctgctcatcatcctggccgtcagccctgactcccacctccacacttccatgtacttcttcctctccaacctgtccttgcctgacatcggtttcccctcccccacggtccccaagatggttgtggacatccaatctcacagcaacgcccagctgcacaacatgattgccttacaaatgacctgcttcaaggatgtggaaattcctaatttcttctgtgatccttctcaactcccccatcttgcatgttgtgacaccttcaccaataacatcatcatgtatttccctgctgccgtatttggcattggagggtacctcagttcagatgtgtcatcttccctgagaaaggctgcagtggcctcactgatgtacaagatggtcacccccatgctgaacccctccatctacagcctgagaaacagggatattaaaagtgtcctgcggcagccgcacggcagcacggtctaatctcaagaccttcttatctgttccattccttttgtagtgtgggtt

SEQ ID NO: 474608 - DNA, 718 bp, Homo sapiens
taatatcttcctaggaggatccagaactgcagccggtcctcgctttgctgtccctgtccctgtccatgtatctggtcacggtgctgaggaacctgctcagcatcctggctgtccgctctgactcccccctccacaaccccatgtacttcttcctctccaacctgtgctgggctgacatcggtttcacctcggccacggttgccaagatgattgtggaatgcagtcgcatagcagagtcatctctcatgcgggctgcctgacgcagatgtctttcttggtcctttttgcatgtatagaaggcatgctcctgactgtgatggcctatgactgctttgtagccatctgtcgtcctctgcactacccagtcatcgtgaatcctcacctctgtgtcttcttcgttttggtgtcctttttccttagcctgttggattcccagctgcacagttcgattgtgttacaattcaccatcatcaagaatgtggaaatctctcattttgtctgtgacccctctcatcttctcaaacttgcctgttctgacagcgtcatcaatagcatattcatatatttcgatagtactatgtttggttttcttcccatttcagggatcctttggtcttactataaaatcgtcccctccattctaaggatttcatcatcagatgggaagtataaagccttcgccacctgtggctctcacctagcagttgtttgctgattt

SEQ ID NO: 474609 - DNA, 973 bp, Homo sapiens
ccgcctcctgcaggcgaggctcacatccagcactgtcccttacagtcgccatgcccctggcgacctcagccatgaagggagacagacccaacatctggacaacagggtaccaaacagcccacaggatggctgtgatgcacccacaaatcccctcagagatgggcaaactgagactggctggaggtgggccagagcaggtgcgccgggctgtgtggatgcaggtggtcccgctccgcaccacatgcgtggcctcaaaagaagaaagctctgtgcttagtcatgtcctgtccccaaccccagggagcatcctggagctgaacatgggcccacccgctgccttctgcaaacagggccctgttccccagcagcccagacctggtgcctggactctggtactgagcagactgggttggggctgcaggcctgctcctctctatgcaaaggcccatgtctgtatctatgccgtggatgtacaacaggccacttgctcctaccacatgctccgtgaggcagagaccaaaacatctgctccaagtgtcacgaaaactatgccagtgcccacagctatactcactgctgagttcagtcttgttcagggtgctgcccacgccccaaagggcagctgccacacagaggatccagctgtgttgcaggacccgaggcacaggggcccagaaaaagaggatgaaggaggggaagaggggctggctcttattccccgcatcgcgggaagtgtgtacaacccctgcgatattggcagtaatatcatcctctccgcctgaacctaagaaacaatatctcaggaacatgtacaccccctgcgatattggaagtaacatcattttctccccctccggatattcggaacaatatcacagtgggtgtgtacagcccctgcgacattgccgctagtttcttcctctccctcccaggatagaaggaagaatgtcacaagggggtgtacaccccctgc

SEQ ID NO: 474610 - DNA, 1376 bp, Homo sapiens
gaggcattgcctcacccaggaaattcaaggggtcagggaattccctttcctagccaaggaaaggggtgacagacagcacctggaaaattgggtcactcccaccctaatactgcacttttccgacagtcttagcaaacagcacaccaggagattacatcccatgcctggctcggagggtcctacgcccacagagcctcactcattgctagcacagcagtctgagatcaaactgcaaggcagcagcgaggctggggaaggggtgcccgccattgctgagccttgagtaggtaaacaaagcggctgggaatcttgaactgggtggagcccaccgcagctcaaggaggcctgcctgcctcagtagactccacctctgggagcagggcatagccaaacaaaaggcagcacaaacctctgcagacttaaatgtccctgtctgacagctttgaagagagtagtggttctcccagcaacgcagctggagatctgagaacggacagactgcctcctcaagtgggtccctgaaccctgaatagcctaactgggaggcaccccccagtaggggcagactgacacctcacatggccggatactcctctgagacaaaacttcaagaggcacaatcaggcagcaacatttgctgttcaccaatatctgctgttctgcagcctccgcagctgatacccaggaaaacagggtctggagtggacctccagcaaactccaacagacctgcagctgagggtcctgactgttagaaggaaaactaacaaacagaaaggacatccacaccaaaaccccatctgtacgtcaccatcatcaaagaccaaaggtagataaaaccacaaagatggggaaaaaacagagcagaaaaactgaaaattctaaaaatcagagtgcctctcctcctccaaaggaacatagctcctcacgagcaatggaacaaagctggacggcaaatgactttgacgagttgagagaagaaggcttcagacgatcaaactactccaagctaaaggtggaagttcgaacccatggcaaagaagacctgatggagctgaaaaccatgccacaagaactacgtgacgaatgcacaagcctcagtagccaattcgatcaactggaagaaagggtatcagtgatggaagatcaaatgaatgaaatgaagagagaagagaagtttagagaaaaaagaataaaaagaaacgaacaaagcctccaagaaatatgggactatgtgaaaagaccaaatctacgtctgattggtgaacctgaaaatgacggggagaatggaaccaagtggaaaacactctgcaggaaattatccaggagaacttccccaatctagcaaggcaggccaacattcaaattcaggaaata

SEQ ID NO: 474611 - DNA, 472 bp, Homo sapiens
aagaagagccagaaagaatttgaataagtgaagtcaggcttttttgtaatgtattctcagaaagaagggaagaatttggttcgggactcccctgaagactggattctttcttgtcagaaggaagaaactctgaacacatctgaacatctgaaggaacaaactctggacacaccatctttaagaactgtaatactcaccacaagggtccgcagcttcattcttgaagttagcgagaccaagaacccaccggaaggaaccaattctggacacagttatagatcctcagctgcaggtctgttggagtttgctggaggtccactccagaccctgtttgcctgggtatcagcagcggaggctgcagaacagcgaatattgttgaacagcaaatgttgctgtctgatcgttcctctggaggtttcatctcagaagggtacctggccatgtgaggtgtcagtctgcccctactaggggg

SEQ ID NO: 474612 - DNA, 714 bp, Homo sapiens
caccactaaagaatttactcattatgatactggctgtgggtggatcggcaggtcaagaaataaaagaaacacagaaaatagtgaaagctgggtccaggggggtcactgccttttggtcctgtgatgctgccaatgcactggatatgccagcatttgttattaagtttagtgagggcaggggtccctcagctgcaggtctgttggagtttgctggaggtctactccagaccccgtttgccaggttatcaccagcggagactgcagaacagcaaatgttgcagaataacaaatattgctgccttatcctttttctggaagcttcgtcccagaggggcaccagcctgtatgagctgtctgttagcccgttctgggaagtgtctcctagttcgtctacgtggggaaaatgccctgagggagagtgcacctgcacaccagtagctcacctctcagaggtctaccctcatcagaatcgtaggcttctggtctatggtacttctacaactcaatgaggtctttaaaaataggatcttgttacattttgcctgaatttctttttaattattcatgtagaaatgtggtcttttgtaaactactcatttcctctagagccaaagccatccaataagtaattaatttcttggtaatttcattcaaagttggtaacttttacctcctaagtactaaaaactgcaaaatgttttggaaatttttaac

SEQ ID NO: 474613 - DNA, 1138 bp, Homo sapiens
ctggctccggcctgggccatcccagaaaggggctcccacagtgcagcggcaggctgaagggctcctcaagcatggccagagtgggcgcccaggccgaggaggtgccaagagtgagcgagggctgcgagggctgccagcacgctgaattgagctggatcctggggctgccggagcaggattggtagtggagtgggcctggagcctgaggccattagtgcctgcttggaacctcagagaatccactgacacctgccctcactacgtaacatcaacccaatttccacttgttaattgtgataagtcaccccagcagtgcctctctcagtcgttgctctgcaggagagagaggcaggactgcggccggcactaccgcgctgtgatttgcgcagagctgaagaagcccctgacggttgaagaggtggccccccgccccgtcaggcctcacgagtgatggcagcagctggagccacaggccttgtagtgatagatgtggcaacaaatgctcttcaggccaaggtaatagctgctgctggaagtggcgagaagtgcaacctggtgatgcagaggggcacacagttcagcgtgaactatagtcagagcagcctgaaggatgcagtgaggaagctggtgggcaagggtgggatgaatgtggccatcaacatggtgggaggagacgtcttcctggaggctctccacagcctggcatgggagggcaggattgcagtggtgggatttgctggagggagcattgtttcggtgccagccaaccttctgctcctgaagaaggtctctgtgatgggcctgtactatggtcaatacaaagaaatgaactttcccgtcttctccaggagcctgtcttcagtgcttcagtactgccaacaagggcgcatccaaccatatgttggaatggttttcaagctggaggaggccgctcttctgcagggctgccgcgtgttttggggggtccactccggaccctaatcgcctgggtccctcccacacctgacggtatcaccagtggagattacaacacagtaaagatggcagcctgctccttcctcagggagctttgttccagaaggctgccacaacttattattattattattattattattattattatactttaagtttt

SEQ ID NO: 474614 - DNA, 806 bp, Homo sapiens
tgcagcttcagcagacttaaatgatcctgccttctggttctgaagagagcagcgcatctcccagcatggcactcaatatctgcttccagaggaagaagcaggcagcaatctttgctgttctgcagcctccgctggtgatacccaggcaaacagggtctggagtggacctccagcaaactccagcagacctgcagaagaggggcctgacagttagaacactaacaaatgaatccaataatattaacatcaacaaaaaggacacccacacaaaaaccccattcaaaggccattggcatcaaagatcaaaggtaaataaatccatgaagctgaggaaaaaccagtacaaaagtgctgaaaattccaaaaaccagaatgcctcttctccaaatgattgcaactcctctccagcaagggcacaaaactggatggagaatgagttggatgaattgacagaagtaggcttcagaaggagggtaataacaaactcctctgagctaaaggagcatgttctaacccaatgcaaggaagctaagaactttgataaaaagttacaggaactgctaactagaataaccagtttagggaagaacataaacgacctgatggagctgaaaaacacagcatgagaacttcgtgaaccatacacaagtatcaatagctgaaatgatcaagtggaagaaaggatatcaagtgactgaagatccacttaatgaaataaagtgtgaagacaacattagaggaaaaagaatgaaaaggaatgaacaaagcctctaagatatatgggactctgtgaaaaaacaaaacat

SEQ ID NO: 474615 - DNA, 1403 bp, Homo sapiens
ggtctttgatgattgtgacgtacagatgggattttggtgtggatgtcctttctctttgttagttttccttctaacagtcaggaccctcagctgcaggtctgttggagtttgctggaggtccactccagaccctgtttgcctgcagccagtggaggctgcagaacatcaaatattgcagaatggcagatgttgctgcctgatccttcctctggaagcttcatctcagaggggcaccagctgtatgaggtgtcagtcggcccctactggaggtgtctcccagttaggctactcaggggtcagggacccacttgaggaagcagtctgtccattctcagatctcaaactccacactgggagaaccactactctcttcaaagctgtcagacagggacgtttaagtctgcagaagtttctgctgccttttgttcagctatgccctgccctcagaggtggagtctacagaggcaggcaggcctggttgagctgcagtgggctccacccagtttgagcttcccggccactgtgttaacctactcaagcctcagcaatggtggattcccctcccgtagccttgctgctgccttgcagtttgatctcagactgctgtgctagcatctgagaagaatttctgtctttcattgaagttccaaaggcttcttattttgatgactttgcctaaagaagggattctacagccaaatgctttctttttaacataccgaatgagtaaaagtgcaaaataagtacagaactatcaaacagcaacaaatgtgcttctgctgcctaccacagaattttccttggtaagaagaaaaccctacattacatttctttttggcttctgtctctgcagcctcagagttgatgatgaatgcagtcctgctccactttgattccatctggctctggaaggtgtttctgaagatttgtgaacagcatttgaatttgtttgtttttatttatattgtctttttactatgatgtataaatatgtcctgtaatgtcattgatctatatgatgagtgagacaatcaagtgttaaaatggaacttgttgattaggatatttataccatagtttagttttcttaagaaactctgacagacacgatatttaaaatgactaaatttacactttgacataaggctactaaaaggtagaatataccattgagatatgccacttgaaaaaactacttttaaaaaaatggcattactggtgtcatgaagaaaagaaatgcttttatctcaaccctggtttcaaaaatttgtgtaaaaattttcacctcaataaataaatttatctcagtgtttcctcacaatcagattcaggttaaacatttttggcaagagctctacaaaagtgtatttcccatagcctcataatgacaggttcatattttc

SEQ ID NO: 474616 - DNA, 709 bp, Homo sapiens
agctcctccccaccactccccaagggcactagcagtgggatctatccttgtttgcacaagccagcagcagcagcagcagcagcagcagcagcatggcggggtgcacactcattggctgcagaaggttgctaatggataccaaggtgtctgtctctgtgtgggcatttgcaacagcagtggtggcagcatggctgagaggtgctggtgtgggggacttttgcaccagtggcaatgacagtgcagggatgaggcactggtggggtcatggctggcagactctgtgtctgccaacacttgacagcagtggcagtgtggtgggggaaaggggcagcgtgcactcatgccagcagcagtggcatgacagggtgcacacgcacatgcctgctggactgctttgccgatcctcaactctaagcactttaccattctttttctctgatttggtccccaaattccagagactttgtatgattatgtggactgaatccacatcaaggtcatatcacccaacctctgcagtgcatattgatacttcttggcagtgctttgctttattactagtggactcctctcatcacagttggctgctccgacctttctgttcttcagcccggtcttaatcccctttgagtggatgacctcaccaagaggcagacatcattgaacaggcatgtccatagctccttgttctaacagagcctctctccat

SEQ ID NO: 474617 - DNA, 847 bp, Homo sapiens
ctgctgtgctagcagtgagcgaggctccatgggcgtgggacctgccaagccagatcccttgcacttcccgggtgaggcgatgccccgccctgcttccgctcacacttcatgggctgcacccactgtccaacaagccccaactttcccatgtatcaacttccactcacttggaattcttggtggcaagttcggctatgatgacctggtgatgggcaggaatgagtcctttcttcttataagcatcaccaacaggaaagatcatgtgtttgacaactctatatcttcctggtgggaccctgatccaacaggactttggccttttaagaagagagagatgcacacacaccagggatgcatgtgtatagagaaaaggccaggtgaaaacacaggaaaaaaagcagccatccgtgagtcaaggagggaggctttacgagaaccccgccctgctagcaccttgatcttggacttccagcctccagaactgtgagaaaataaacatctgttgtttaagctgctcagtctgtggtattttgttatgacagccctagaggactaatgaagcaaattatagggtctagttggtttccatctccatctaactttcctcgtaaataattaattcaagtgtttacaaatagaaactgaaataacatgctaagcatgtggaccctgcggcccccctcccattttccatgaaagtgttccataaaaaggaaagataggtctcaaaaggttaacaccggatttctatggatggtgtaatacttatattttcttttttatacttgtctaaattttccacaatttttataaatggcatatactttcatgggaaaaacactttctt

SEQ ID NO: 474618 - DNA, 627 bp, Homo sapiens
gaagagctgcagctcctcctgtgcggttcacgatctgcttttctggagagatgtaaagaagactgggtttgtctttgccaccacgctgatcatgctgctttccctggcagctttcagtgtcatcagtgtggtttcttacctcatcctggctcttctctctgtcaccatcagcttcaggatctacaagtccgtcatccaagctgtacagaagtcagaagaaggccatccaatcaaagcctacctggacgtagacattactctgtcctcggaagctttccataattacatgaatgctgccgtggtgcacatcaacagggccctgaaactcattattcttctctttctagtagaagatctggttgactccttgaagcaggctgtcttcattgtcccgattgtctatgagaagtacaagacccagattgatcactatgttggcatcgcccgacatcagaccaagtcaattgttgaaaagatccaagcaaaactccctggaatcgccaaaaaaaaggcagaataagtacatggaaccagaaatgcaacagttactaaaacaccatttaatagttataacgtcgttgcttgtactgtgaacgaacatactcagtgtcagcttgagcctgcatt

SEQ ID NO: 474619 - DNA, 536 bp, Homo sapiens
tgttgctctttctctctcctggtctttattcagttaacttattaccccccagccggcaatttcttaagataagacaacaatgaaggttgccacattgattgattcttccttcatgaaagatttctctgtagcatgtgatgctgatctgccatcctacaaagcacaagggcaacagcctgatgtagcattcacacatccactggacttcgtttctacctttgcacaatggagcagtcatttcctaagagccccagaaaaagaaaattctagcaggaataatccaacctttggctccatttgtggcagggccagcttccagcgggtttggctggctgtcctggctgggcctttcatctccaaggtctctaagcagactggcttgggtcctcacccatgtagattcagtgctgggaaaacagacttaaatcctttgtgtaagttcactcagagattccacaaaatggactcaggatctgtaaagactcttttaaaaaaatgaatcttgttctgtaagatttttagcagctcctgttgcc

SEQ ID NO: 474620 - DNA, 1184 bp, Homo sapiens
agctctcagctgattacaagcaagaagcatgaagagattttcttcctacactcacgatgagaacctggtggagctcctaaaggggactgaaaacatgcagtttacagctctggctacaaccctgaaggtcttctctctgccatcccctgaacacattacctctgtcctcagattggctctcctgatggttgcacgatggctgcagcagttccagatgtcccatcgagacacaaaaagatcccagatggaagatgccatctcctcctatgtgcctctttttaagaaatatccagactgggtaattacaaacgatagacatttatttacctcactgttctggaggctgagaagtccaagggcactggtatctgatgagggtcatcccatggcagaagaacatgagagcaaaaaatacaaagagaagaaatgtggccaaactcatccctttatcaggagcccactcctgaaataactaacccacttctgtgataacagcattaattcatttatagggcagagccctcatgacctcttaaaggtcgtgcttctaaacactgctacaatggcaattaaatttcagcatgagttttggaggggactttcggttcacagcactaatcattagggaaatgcaaattaaaactacagtagatattgcctcatatccatcaggatggttactatcaaaagccaacaagcaagacactctacattcagcaaatatcaagtgttggtgaggatatggagaaactggaacccttgtgcactgttggtagaaatataaaatggtgcagctgctacgaaaaatagtatggcagtttctcataaaattgaaaatagaattatcatataatcctgcaattccaattctgagtgtatatccaaaataattgaaagcaacatctcaaagagatatttatacactcatgtttatagccgcactgttcacaatagccaagaggtggaagatgtctgtcggtaattatttttcccaatcacattcatgatcacttttttcatttcttctaagactctaatatccattttttaaataggaactttaggtcatttgaaaagccaaatagtaagtattgaaaaaccagacactacagtaaggcctgaaagctcccaccatattaagctaaagcagaaacatcgagagcaaaagttaggggttgtgatgg

SEQ ID NO: 474621 - DNA, 822 bp, Homo sapiens
tttaatggacttacagttcgacatggttggggaggcctcacaatcatggcagaaggcagaaaggaacaagtcacatcttacgtggatcgtggcagatcacattgcaatcaaactagaactgaggattaagaaactcactcaaaaccgctcaaatacatggaaactgaacaacctgctcctgaatgactactgggtacataacgaaatgaaggcagaaataaagatgttctttgaaaccaatgagaacaaagacacaacgtaccagaatctctgggacacatttaaggcagaagaaatggatatattcctgaacacatacaccctcccaagactaaaccaggaagaagttgaatctctgaatagaccaataacaggctctgaaattgaggcaataattaatagcctaacaacgaaaaaaagtccaggaccagatggattcacagccgaattctaccagagagaagaggttttggaaacatttgccataactaacaatgtgcaggcacggtttccacttacacaagtctgaagagacttcagtattctcttatgatttcatgaaatattgagtcggttattccaagaaagaagacaacagccaacaggtaaagtgagctgcttcagtgaatggaacgtgaaccaagaaataaatctttttaatttcaacattaaattactttcaatactaaaaatggaagacatttcttaaggatttattaagtgtagaattcacaaaaatagtgttaccttagcaactcatgacacagaaattaagctgtcaacatcttgatcattcaaaagcggtcattgatctttgtgtca

SEQ ID NO: 474622 - DNA, 895 bp, Homo sapiens
tgcctgggtttatatcccgatccttgtctctcccgctgtgctctcaggcaatagatgattggctatttctgtacctcctgtttttgcctaattagcattttagtgagctctctgattggtcgggtggaagaccacagcaagaaggcccttgaaagctgccagccccttgatattggacttcttagccttcagaaccataagccaacaaatatattttgttataaattacctagtgacaggtatccagtttttaacaacaaaaaatgcattaaaagacaagtatatgcagctgattctactggcagtggaggttctgtatgctatatttcaagtatatgccttaaattggtttcccagaaacagaaactaagaaagagatttggattcagatgtcttattgggaatactctgaggaaatcacttttatataatgagagaagcaggagtgtgcagaggaaggaattaagttacaatgcagttgcaacagagattccagccacccacacagggacttctgaagctgggatgatctttccagaatgactcaactgacacagttgtgacagccttttaaaaaacagtattcaataaatgacatgagctattcgacactttattataaaatgggctttgtgttaggtgatttgggccagttgtaggctaatgaaagtgttcttagcacatctaaggtgggctaggctaaggtatgatgtttagtaggctaagtgttcggtattaaatacattttcaattgtgatattttcagcatatatttatcagtatataacctcatcgtaaggtaaggagcgtctgtatgtgagaacatgaatacattatcccgttcttttttggcctgtaaggtttctgctgagaaatctaatattaatctttcagc

SEQ ID NO: 474623 - DNA, 688 bp, Homo sapiens [sequence omitted]

SEQ ID NO: 474624 - DNA, 2392 bp, Homo sapiens
tgagggtttggtgtacagattattttatcacccagaagaggacgggaacatgtgggaaagtttggaacgtcctagagactttttgaatggctttgaccaaaatgctgatagtgatatggacaagaaatctaggttgaggcggtctaggatggagatgaggaacttgctgggtactggagcagatgtttgcttcaaggtcagggccctcatgggagcttctgctagggcagtgtggaagggaaatgtggggttgaagcccccacacagagtccccactgaagaactgcctactagaactctgaaaagagggccaccatcctccagaccccagaatgatagatccaccgatagcttggacagtgcacctggaaaagccacagacactcaacaccagcagctgagaggggggctataccctgcaaagccacagggcagagctgcacaagaccatgggaacccacctcttgcatcagtatgacctggatgacatcacttatgaggtataaattattcatgttatgcttctcatctggagtgttttctctccagtccatagcagtgttcaaggcctaaaagcagaggtgacaaaaacagtctgcctgcaaatgaaacatggctcaaagacatgttttttatggtccacacagtagccaataacttaaaaactgaaaatttttatataaaaatccagattttcatctttacctgaacacctagaacatgtggttgcactgtcccccgtggcaatagttggctggagctaagcagctctggaaccttcttggtggggcagtgtatgtactccttggtctagcccagttttcatttcttcttatttcttagcctgggtccctataggcacttcaacttttgatctctgacatgcaagaatgaaattatatagcaaagagtagaaaatctttgaacactcattcacaagggaaagtttcaacattattatagcagtacctaatctaaataaagtcaaccacaaatttatttatgtttaataaactttattactacaacttattcaacatttattgaatcctgttttgtaccaagaattagatgaggaaatgtggacaaagagcagagtaaagtatatttctgccttcccataattaatcatgtagtcaatataacagaaatcattttaaacaaggtattttaatacaatgcaataacagagatatatacaaaaggcactaaaagaaaatatctgagcatcagctgtattatattcaaagagccaacttatccatagatgttattaatgaatagatgacagatttgatggcttacatcaatttagtttttacaagaggaatataaacacctgtgtcataattgaggactgcaaactactcaaagtcataattgtaattttgcatgacttgtaaaatgtctgcttcagtaatcatgaagcactaagaaatcagtatcacactttagaatataactaaactttttattcctaacctattatttacctgcctatcttaaagaaatatcttggatgtttgagttaagtatctgcttgataaatgttatataaatcagttgctacaggcatcagtgttttggatatttttcaaatatagtgcgactgtttatttcaaatttaattcaaataagatgtattttgaactgtctcaggttaaatttctggaactttatggtaacttgaaggaatttaaaagtaggaattattacaattcaaactcatattaatctaaagacaattctgagctttagttttgggttttttatcaaggcaagatcaatctccccctgaatttgacccattaatctgtcttccccccttaaccacaccctttcaaattttgcatatttgaaaagagctatcataccttcctcacaaatatacttattcaataatttcctgtttagattactcatatggctctattatttttctgcgaactttcttctcaaatgttgccctgtttttaaacattccttgtaaaacatagcacttagaaacaaatgaagtattctagattgtggatgatcagatccaagtttggcacaattatttttcttgatgtagacaatattatttttgagcaagctttatatccaataacatttctggtagcatatcatacttcagatgcacattgaacttaaattattcatttgtttcttctgagtgccatatttggcttcatccactaaaccatatgataattatttggtacatatgataaacctatagttctaatgacaacatttctgtaaaagctatggatttcagattccttgaaataaattttcagtccacctttcaagcactgtcttcattgagtataacactcactcagtacaggatacttttcatggtatagagtccctaaggaccaaggag

SEQ ID NO: 474625 - DNA, 870 bp, Homo sapiens
tcctcctgcttcaaagccagcaaagacccttcacagtagttcctcgattcacagaagagtgaaattcagagcatgaagtcatggttgtgaggaaatataactattatgtttcaggacaagaacctgaaggtaaagatttgtatgacagtcccagtgctctttcccttcagccacagctgcctcagaggaagaataactccagagcaccagaccttctgagtcctcctgttcctatcaaattaactaccctccatttacctcagacaatttgggagtttgttgagacgttttggccaaagtcagagactaatccacagcaaaacaccctcagagccaaagaaaccacaactctgagtaacaggctgtggtatctgtcatgtcatctaaaagatactgaaatttcttggatcattgtagtcagtggtcatagaacacagaagcaggcaaagcctcagatggccaaagctggaggagatatctattcacttctatgcatgtgcttcccttgataatgagaaatggtttatcatgtcattttaagtcaacattaaaatactttggtcactggaaatatatgcatccaatataactattttacttttttaaaccagtgtgccacagtggttacaataattctttcaagtcttttaattaaaaactttttaccctaacccttgaaaaaggacttgtatttatttttgccagaaatccatgaaaaagtaatctcatagatttactagaaatgatacagatcttattatttgtcaactggccgtaactacaccgtacataacaacttacagctaacgatattgcagtcagaaatgtaaaggaagaattgtcacagttatattcctgtagaatctagtt

SEQ ID NO: 474626 - DNA, 5217 bp, Homo sapiens
gcagaggcggagcggggaggctcaggcatggcgggctgcaggtccggagccctgccccgcgagaaggcagctgaggcctggcgagaaatcgaccgcagcgccggtgggccagcactgctggcggacccagtacaccctccgcagctgccggcccgggtgctaagcccctcatttcctggggctggcagggccggcctgctgctccgacccacgcccacccggaactccagctggcccgcaagcgccgcgcgcagccgcggttcccgctcgcgcctctcgctccacacctccctgcaagctgagggagccggctccggctctggccttggccagcccataaaggggctcccacagtgcagcggtgggctgaagggctcctcaagtgccgccaaagtgggagcccaggcagaggaggcgccaagagcaagtgagggctgtgaggactgccagcacgctgtcactatgatgtgtcatggctaggacttcccaaagctgccatggaagaataatggcttctgtcttttccatcatcctggtctacatttggccattcattggtggaatctgatgaaaattctcctggtaggtgagttgggaaaattgagttttcaggctctgtacctccatggggaaaagggaggagctttaaaaagcaggaatggcattgttttcaatgaaataactaaaaaacactggacctctctttttaccatgatttcacatctgcttgtttaaaggaaactttatgattttttatgttgattaatgttcttataaatcaagtaattacatcttggtgtggttctttatgtaattttacatattcatggagtatatacatctttgacaaatgtagcttaggcttaatgttttgacatttcactcattctaacaatttgatgcaaatactctattgaaattcttcctgctaaggtcaacaaggactagttgtcaatgcccatggctcatttaaaattcttgttacattttctttttctgtgttattattagtagtaacagttcacattcttgaaatcattgttcacttgacctttgttcagtagggttgaactttattatgagccctgtccttactcagcctccatttctattactattcctttttttgcctccattttactcctttttctttaccaacatcatgttttttcctaagtcttgttttcttctcccttacagctctataaattatctctgtctagcattactctgaatagctctatttaaatagctcacaaaaatgataattcataatctttatatatataagaataactttaatattcaatgacttctctttctgtattctctcttttggttacttcattatttattcagtgaactaaaagatcaaattcaataccacagttaaaggcacacatggaaactatgctttctttgactttttaccctggtctagaacacagcacaatgtcaaaaatgatggttaaacaaataagatatttatctaaagaaaacaaaaaacatatatcatgtaaataaatttgagaaaatgaagtggcagcaaaattgttcaaaacctcatctgttagaaactcatttcccataccagaccaactcattccaacagaagcatgtggtgtacatgataaggaatctctaagtgatcaagacagaaataaaaagcgatgcaagttagtgaatataagttttcatatgtcgatgagtgacaagtatttatttaagaagatgtactagtctcggaagtgtttacattaatgaaataaactggaaggttatcaaaagctaactgcaaaatcacaaagaagaccaatcaccttgttcgctaaggcggctgtctgagaacgtctccagattaggaagcacacaggcaccttgcttttcgaatttgcaggagccacatataagtatatttaacataggcattaggattatagacaatagcaaatctattctagtgatgtaaagtatatgttccttaatatatcattcagaactcaccctttctaccacatctaatgtggattgcgtgccttatcccacctttttattttttacattcctggagcacctggtcacaacttgaacatcagtggtatcactgactgcatggaaattacctggctacttgtatgccttcaaacagaagactgaaccatttggagggatgtgtgactatacttttttttaaatctttatatcacttcacatggctcttattagttgttcaatagttgctgaatattgacactcgtatgagtgagaagtcctgacaatgactgcaataaactcaagtcacccttgaaatagacagaaatgcttgagagatgccactcagtgaatcaatttgataagcaagatgtaggatttgtagaacagtaaaggaaatggaatccagatttggggtgttgatggggagattctgaacaattggtaagtatgtatattaaatgaaagattttcaaatttctaaatgagctttttaaaagtacaatttacatacaaagaaaattcacttttaatgtagttctgtgagtacagatatatgtatatagtagtgtaaccatcaccataatgaaaatttaaagtggttctaacccccaaattcctgcatgtctgttgtagacaactcctccctcacactctcaatctttgttagccactgctatgttttctatctctatactcttaccttttccatgatgtcatagaaatataatcttactagactctcagattgtctactttcacttaacataataaatttgagattcttgcacgtatgagtttttttttttcctttttgagtattattgcctcatttaaagacattgtagtttgtttattagctcaccatttaaacatttcggttgattctagtttggagtaattattttaaaaatcaactggaaccattcaaatacaggtaggttttgtgagaatgtaagtttttatttcacttgtgtaaatactagactaaaattgtgatgccacttagtgtttaactttctataaaattgccaaactgttttctaaagtggggtgccgttttttttctttgtaggatctatgagaattccagttgctccacttgtagacactaagtattgtcaatttttaaagctattctaccaagtgcataattatatcttattgtggttttatttgcacttatctgataactaataatattacatattaccatgtacacattttccattcacatatatatctatgaatggaaaatatatttatatttcataatatatatttcattatatatatattccataaattgtcttcaaaagttttgcctattattacacttggttattttatggaggtaaagtgggattttcttgaggtaaagttaatataacataaaattgataattttaatgtgcacaaaagcatttagaacatatacaatgttatgtaactgtcacctctatatagtaccaaaacattttcatcaccccaaagaaaattctgcattgattaagcagttaccctgaattccaatctctgccccagctgctggcaaacatcaatctgtctgtctctaaagatgtacctattctggatatttcaaataagtcatatctcagatcacatacaatatgtgatcttactggctggcttccttcactaagcaagatgtttttgaggttcacccatattgcattatctattaatacttcatttattttttatggctgaataaaattccattaagattatatattgcaatttgtttttccattcatctgctgatggacagctgtgtcatttctatcttttggctattgtgaatatcgcactgtaaactgtgaacatacgtatacaagtatttgagtacctgtttttaatttttgggtatgtatctagaagtggaattactgggttaattgttaattctaattaattttttatgtagccaccaaattgttttctatactggctaaacaattttatgtatttctatatattttcaccattgccgatttcattttaaaaagaattatatccatcttagtagatgtgaagtagtacctcattgtggattaaatttatgttttcccagtgagaccaatgggattgagaattatctcctatgttttttgtctatttctctattttctttgaagagatgtctattcaagttctttgcccatttttcagttgggctatttgtatttttgttgttcagttgcaagagttatttatatattctggataacacatattcagataggtgatttgcaaatgttttttctcattgtgtttgtgatttactttttttttacaatgtattttgatgcacacattttttattttgaagtcaaatttatctgtttttaaaaatttcattgccaatgcttttgatattacatttatgttattgacccattttgaaatcagaaaatataagtcttccaaatttattatttttttaaagattgtttttgctactcaggaccacttgcaattcattatgaatttaagaataggcttttccattttttcaaaataaaaggctattgatattttgatagagattgctttcagtctgcagattccttaggaagtattgatatgtaaatagtaatgtcttcctatccggaacactggatttatttccatttattaaggtcttccttaagcaatgctttcttgtatttattgcacagattttacctttttggaccaacttatttttaagtataagattctattggaacctactgtaaataaaattgtttctttttttttttttttttcttttgatggagtcttgccccgtcgcccaggctggagtgcagtagtgtgatcttagctcactgcaacctcccgatcccaggttcaagtgattctcctgcctcagactcccaggtagctaggattacaggtgtgtgccaccatgccaggctaatttttgtatttctagtagagacagagtttcaccatgttaggcaggctggtcttgaactcctgaccttaggtgatccatccacctgggccccccaaagtgctgggattacaggcgtgagccaccgcacccggcctgcttattcattttcttttgggggtatttgctggtaatttaaaggaaaacaactcattttttgtgcattgatcttgtatcctggactgttaattcgtttactattattaaataacaaattattaataataaattaattatcaattgtg

SEQ ID NO: 474627 - DNA, 1248 bp, Homo sapiens
ctcagccccatggcaacagcccccagggcagcagccttagggagggctcctgcttgtccctggctcctgctagctctgtggaggggcaagtggaagaaatttttctctctgctgatgttttcttccacatggaaggagttcatctcgcctagcactccctcctctttctgccctcttcactcttccttgatcagattggtgactttggaaagagaagaagaacctagaaaagaggctgagataatctacaggctcatgtcccccaaaagggagatgaaaaccagttcacaagaaagaacaaagaactgcctgaataactgggctttctgtggccagagaggaaacaaccatcttgttctcacaggatggcagagtggaagtatgcgtggatattgggttttggttaacactgtggagctacaagttaaacggagagatagaaagcaggaagttggaaagggaattctgatagtgatccgttccttgattccaatttttccagagtcctaacttgagacttcttatccccttggactttgactcagcaagatgctttggtgcgttgttaatatctttgcttccttcttcagctaagtttacttggcctatttaaggacagtcacaaaagagagttaatggataccaaagtttggaagagacagcactatctcactgtaacttggaactgaaccagatggggtctcgttgtgctgcccaggttgctcttaaactactgatctcaagcaatcctcccacctctggctctcaagtagctgggattacaggcaaataatgatggaaatctggggattcttgatgggccgttgagattctaatgggatctggtataaacacattttagcagagacttacttcctctctgaagttttcctgacgttgaaatataccacaacaaactcagtactgtcaaaagtactggttcttaaatacagagcacatatatcactccagtggaagagttcatcagatagtgagaatctcacctataaatctcaagcatgcctgccaaggagtctcaagtcaggaacagaggagaaaatagccatcaaatagggcgtcttgtcagtattattcaaatgtaatagaaaatcaaattataataaaacatttaacataccaagaaacattctatgggaaatactgagacagcttattcctgaattagtattgtgagatcataatgttcacatcatttaaggatctggttgatctgataaagattctatc

SEQ ID NO: 474628 - DNA, 753 bp, Homo sapiens
cactctccaaccagtcccaatgagatgaaacaggtgtctactgttaaagtgagggcattcattggaaaagaatgggaccctgcaacttggaatggggatatgtgggaggaccctgatgaagctgcagatactgagtttgagaaaaaccctgcactgcctgaggcaacagtgatgccctctccaaaggcaattgccaggcaagataatgttgattctcctcagaagtcacaccgaacacctctgtttgcttctagacctgtaactagactaaagtcctggtgggtccccagaggccatttgaaagctgaggaacgaggaagccaatctgagtcccaaaacctcaaaagtaaggaagccagcagtgcagcctgcagtctgtggctgaaggcccgagagcccatggcaaaccactggtgtaagtccaagggtctgaaagctgaagaacttggagtccaatgttggagggcaggaagcatccagcacaggagaaaaatgaaggccaagaaactcagcagattctaaattgtatgtttgttatttcagccatttcagcctggttcagaaccatttctggggagcgagtgtggtcatttggaggctgatgatgttcctttaatgtttgaatgtttgaaattgccatctcttggatagttttattttttcttgcctttatattccttgatgcccttgagggtttgactgtggtataaggtgagtttggccaactgatttcatttagggaagatttcaggg

SEQ ID NO: 474629 - DNA, 1754 bp, Homo sapiens
cctccacttccacttattctcctctcctccatggtctacggaggcttatgctccactacctgcttcggcttattcaattcaggcggtacttttgcagatttgttacctaagtatattgtaacaagtgatgctgaggtttggagtacagaagatgccgtcactcaagtactgagcatagtacctaaccgtttttcagcccctgctcacctccattccccaccccagtcatccccattgtccattgttgccgtctttatgtccctgaatacccaatatttatctcgcacttacacatcagagctgaactgtgttgtggttgcagcacgtatttcagacgattggatgagcagctctgaaacagactgtttttcagatttatccccagtaaggcaagggatccaagcctttgcactctttcaacattcaaccactggttgtaagctacctcccgaaggacggtgatgtgaacttctgttccttttgttcctgatgaggatggaaaaaatgcatttataagattaatgggcacatattatgtacctgagagcatatttacctgctgcagcaaaattcttttgatatgttcataaaaaataagccaactaatttcctctcaaaaaactaaaagacactgaaaatgttataaaataaactacataggatccacgaatgatctttactaaatagaacatcatcaaatattgaaaatgctgtcatgtggaaaaggaattgaactgatactgagtgagcacaaggcataaaatcatgaccaatgtacagagagatggattttatttcaatacatggaggaattttgtagctgtgttgtacaaggatggaatgggtgacttgcgaggtagatcattccctgatatttatttgtcactttttaatttctaccacatttaattgcaagcaccttttaactcccttatggcgctgaaaattcaaatgttcatctctgtatcctctgtcaaacagcacctgaatatatatagaaatggactcagggctcttttgaaacaggtaatttagccaaatacagagtaataagaaagtagtctaatagtttatccagaaagaaaactttcaagatttttcatattccagggatctctatcagataaaagaagtatgaatgcatcttcatttctacacacattatctttatgtgtatagatgaaaatgaatgaaatgaaaataaacactaccatttcaagatcaaagataatggatacatttcaatataatttcttaaaaatttaaagttactattttataaccttaaaaataactcaatttacattttctcttacagtcttgttattatatttaacaacaaaatttaccaacttacaactctaaagtgatggggtaaaaactcataccccaaagtttgttgctgatgacattcgtttggtttgtgaaactacagactttctccaggcattatcttttcagttgtaaaccttttaaccagttcatatgaaaatatctgctaacacagcaaaatcatgagtgcatgtctttcaaattaagttccattcatgtcatcatgtttttaaaaatataaggtaataaaagtctttctaccctaaagtaaagtctttcactatctttgtagcaattgaactattctactgaacccaatatatgaaaacctttccctactgctcccctcatctggtttctaatctagttaggccttctttataactccctacttctgtgcctttgaatatctaaagtggatt

SEQ ID NO: 474630 - DNA, 2869 bp, Homo sapiens
atcaatgtggcaccttcgcctccagcgaaaccatgccatcaccttcacaaattcctggggcttctgaggcgatccggcagtgtcagtcttcagccacgaagccgagaagatctgggaaggagtcagtcagagagccttgggccagcattccaggggctctgggagtggctgccagggttgctgccgaacgagccatgaactgggctgggtttttcatatttgatgaaaaagagcctaaacgctatctgatttgggataaagaaaaaggagcattaaccttgactatgcctttagctccagccacctttttaagagcaaattgctgggcagcttatgactatcgatgtagaaaaccaaagaagttctcatctacactcatggaactgagagacttcagcaatgttgctactcataagagccacatgaaaaaattaataaccttccaaaagatcaatgaaaaaacaatcaagatacgtaattaaaagaaacatttctcttgtaacaacaacaaaagacattggatagtcatagacctttaagaaaagatgtgtaagatctatgaggattagtgaaggttttacagaaagacctaaattaaggtgaggtatgaataggaaggtgttaaagcaagaatataaattttccaaaatgtatgccaaaaattattttctgaaatatttcccaaatctcacagttcaatgaagtgccaatcaaaaccatatcaagatttttttctgtggtgattttttaaaacttaatttgaagtgtcgttaacagagagaaggtgaatttctcacagagctatccaaagaaaatctgattatatatcatcttgccaacttcaacaggtaggccttattatatttaaagagggtaaggaggtttaagagtgccatggattgaattttcttggtccctatcaaattcatatgttgaaactgaatcctcaatgtgagtgtttatttttatgtgaagtttttgggaggacattctgtatctaaatttctaggactttctaagaagggagaaaaaggaacatcatacacaattattttaaataaacttcaaagtacagttagaacagaaaaaaacttttcattattttatacattttattatgtaacttttgtccatgttgagttcactctaagtcatgatgctgttcctcacgtttctcttaattatattctctaatagtagaatgtgtacagttttaatattctctaagctttagtcaagggcagctttgttctttaagccttcatatattcaacagctatcaccaaaataatattcaatctttaagccaattttctatgtcagataattctttaaaatgtcatggttggttgctttaatttcatcaccccttcgaaagaccgtttgggctctaaaatggttacatatgtcttggttaatgtcctcagtcatggtgccttcagctgtcttttcatttctggacctaggagacttattcaatttccattatattgtatggctaatcaaaagaaggtctttacaccctacttatttagctgtcagaagtacctgtatcaaaagaaaaatacaaaccaaaataatctaaataagcatttcttaaggttatgactcctgcactgaatttacggaaatatttttggtcaatttctggcttttgagtataattagtacaagtgatcagagaatatgaatcaagttttcataaatcgttatcacttgtggaactctttccagagctaagaggatacaactgtttgcatacctagttcctagtaatattcataagtggacaactttcaagctctagcttcaagtttatcatcatctgatttacaataatttattctttggtgccaaattaaaccttttgttcctaactgcaaagagttattaagattaatagtttgtccccacaaaagattttcaataaatttcccttttgtcttccttttctgatgggtgagaagggagggaacctttcagaaagagtgacaatggatcagttacagagataaaatcaacagcaactctctggatttacttccagtaaacaacatcaaaatgatacagggttggaattttgtgaatctattagttaatggtggtttttttttcttaaaaaattttaaactgctctatttctacctcctggatcctttcaaattctatcaccatctactttagatccattggattaattattttacctgctcagttttactaattatttatattattggagaaaaaatattgccaatactttaataaaactcagcatatgtacaatataagtgggaaattaaagcagagaaacagatgcattcagattaatttataaaatatgctctaatatatgtcttaatgatatattagagtgaaaaactatagttaaaactttaggagtagcaaaatattaccaatcatttgcagagatatgaaaagaaaatcagatgcccaattactgaagcattgttaaagcagactttgtctcctttaggaatcactctctttctaatcccccaatttttttttgtttcttggaaagttacaactctgtatgtaatttacttagtattttcttgaaaaaaaaaagaagaaaaagtttggaaccttagatttaactcatttctggatagattattcacatttttaaccagatataattcttgcttaagttctttgaataagtttttcataaaatactgtgccttttttctggggtaatgttccagaggggagtatggctgcctctgctgtgcagtatagtttgccagggaagttgggggtagcaggtagtgaaaggcctcacccagctcccacacagttggcaagcctggtcttgctccctcagtatcctattaacagctcc

SEQ ID NO: 474631 - DNA, 810 bp, Homo sapiens
gccgccaaagtgggagcccaggcagaggaggcgctgagaccgagcgagggctgattatagagagctgccagggaagcatgggttatgttccacaaacttttccaaagttacatggtgatgatgatggtgatggtggtagtgatactgatgactatggtgatgatgacagtggcaatggtgataatggtgattataatggtggtgagggtagtgatgatgatgagaataagaatggtgatgatgatgaagtgacagtcttctcatctgtgaccactgaaaaattcaaatacctcacacacatgatctggagagacctgtgggatactttaaagacacttaaggactgctcatgtcccccaagaacttggtgtgtgtatatgggtgtgggagtgagggggttcaaagaacccatagattccattattccccctcccccaaaccctcgctcacaccctctgatgctagttgactcattcattctctatgacccatcatctcctttggaacctgtccatgttttccccgccttcccatttcctctgcctggagctctaactctaagacagagaaatgctttcctaaagagatgagtgatatcacatccttttctaaactgttttttttatccctagcccatgctacacccagcaagcttaattccctttgtgcaagtgatctcctcaacatttgtccctgaatcaaatgttttaaatgcatgatggcaacttgctactgaaaacagttctctgaaaaaatgctttaaaatatagaaaacaaagtaaggagttatttctgtctgcccactgtcac

SEQ ID NO: 474632 - DNA, 667 bp, Homo sapiens
agatattatggttaaaataagggcactactacaattgaagtgtcacccagtgaaactgctagaagtcaaaaatacagacaacgccccagaccacactaataaacaggttaacccactggcatggcatactgggaaaccggggaaggctaaaacagcagtgccagtcaaaatacagcttaaagaccccaactatttttccaatcaaaaacaatacccaattaagttggaagcaagaagaggcctagcacccatagttgagaaaaatcctaataccagagaaaaacaacaatacacttggatagtgctccctcagggattttgcgatagcctccatttctttgcccaagccttagagagggatctgagggatctgcaactggagaatgggagtgtactccactgcttggaatatggacacttggctgcatctccaagaatcatactagaccatgaactagtcctgaatttgggaggatacctccccctttttgaaagcttttaagattttcccttaaggcatattgtcataaattttagatattattttaaaatttagcatatctgtattctattctcatatgaatcattaacactttcagggtgacgatggtaaaataagtctaaatcactgaggaaataagatctcagggaaataagcatgtttatg

SEQ ID NO: 474633 - DNA, 1127 bp, Homo sapiens
caaggttttggcttgtgccaagtaaaaagggcctggggtcctcccttgcattttgaagaagacaggaaaatgtgggaaagtttggaaattcctacagacttggctcagaatacaggaagatgtgggaaagtttggaacttccaagagacttgttgaatggctttgaccaaaatgctggtagtgatatggacaataaagtccaggctgaggtggtctcagatggagataaggaactagggaagtatgacaaaggagactattgttgtacaaagagactggcgacattttgctcctatcctagagatttgtggaattttgaatttgagagagatgatttaagatatctagtagaagaaatttctaagtggcaaagtgttcaagaggaagcagagcataaaagtttgaaaaatttgcagcctgacaatgcaatagaaatgaaagacccgttttctgaggagaaattcaagccagctgcagaaatttgcataagtaacgataagccaaatgctaatcaccaaaacaatggggaaagtgtctccagggcgtggcagagaccttcacagcagccccttccatcacaggcctggagatctaggaggggaaaatggtttcttgagccacgtctgggtgccccccaccctgtgctgtgtgaagcctagggatttggttccctgtgacagccaatctagctgtggctaaaaggggccaaggtatagtttgggccatggcttcagagggtgcaagccccaagccttggcaactttcatgtggtgttaggcctctggtgtacagaagtcaagaattgaggaggttaataatgctgtaaggacaaacttctacaacaagaaaatgtccaggtgccctgatactagcaaggcacattctttgccagtcatgacccatggtcataagatgtttataactgatgaaatagcttaataatttatgtgaggacaaacccctacaccaacaaaatgtccacatgccctgacacataaaaatataatgcttttaacttgctgttgtaaatgttttgtgactgaatattgtcctgcaaccatattcatattccatcatatctttcttttattgttcgtaaatgaagattgagtcatcatttcaacact

SEQ ID NO: 474634 - DNA, 708 bp, Homo sapiens
gggtatggtggaaggatgcaactaacaaataggaattaggcacagtctgcattcatgccggtccctaatgatgataggtttccagctcaaccggaagaagaagaattggatgtggaccgtaccatccttaacaaatgattcttatcaagtacataatgtgttcagtagcaattcttttcaacttctcactgttaaacttaagcctcttgaggaattgagggctcctgtcactactaacagcaataaaacaaaaggactgccagactgcccaaagaaacctacaaagggaacttttctactgaattcaattttatggaatgattgtaatgctcccaaggccattgtgctgcaaagtctagccatgggaactgttattgattgggctccaaaagagcattattcgcaggattgctccagcaaaaatacctcatgctcggagtataattatttgttagattatataaaggatggatggcagtcatacaggttgagacaataggtgtctccttacccatttaaatggatggacgcaggcattgttcctcctagaccaaaaatgattcatcccattgttaccccagaacatcctgaattatggaaattagctgcagctataacaggaataaggatatggaacactacttatcaactccttcacactaataccaaaacacccacattcaacatcaccttgatatctaaacaggt

SEQ ID NO: 474635 - DNA, 648 bp, Homo sapiens
gagcgtccgagcgtccgtggcttcattcttgaagtcaccatggctgaaaggggccaacatagagcttgggccatggcttcagaaggtgcaagccccaagccttggcagcttccacgtggtgttgagcctgcgagtacacataagtcaagaattagggggtggggtgctcatggagaaactctattggagcagtgtgaaagggaaatgtggggccagagcccccacagagtccctactggggcactgcctagtggagctgtgaggagagggcaactgtcctccagaccccagaatggtaaatccactgacagcttgcaccatttgcctggaaaagccacagacactcaatgccagcctggaaagcagctgggagggagactgtaccctgcaaagccacaggggtggagctacccaagaccatgggaacctacctcctacatcatcagcatgacctggatagccaacaggcaggaatgtttaagtctgctgaagctgtgcccacagccgccccttcccccaggtgctctgtcccagggagataggagttttatctataagcccctgactgggggtgctgcctttcttttagaggcaccctgcccagagaagaggaatctagagaggcagtctggctaaagtggctttgcc

SEQ ID NO: 474636 - DNA, 621 bp, Homo sapiens
ttccatttgtaagaccatctgtagctttatggcctcaatcctagaggaaacaaatttgacaaggaggttaaaaatacagagcccgaagtgcacaagttttgacactaagtacacaagttttgacactaagtacactcaaacattgtatcgtctctatccatttccatcctacaagatatccaatttgctttcaaattctgtcagttctacctttaacatatgtccaggaccatttcaaggacaaatacagaatgtgaggtcccgttctagccaacggaaaccggacatagcagtagggtggacatgtcagattataaatgaccctatctcctttgttcggtgtactcacgtggcaaaattcctgttgattttcagcaaacattcagagggcaaagcggcagttttccctccactcctacaatgtcagcatcaatgtcctgctcctgatggcatgctgtaattgtataagatgtagccattggaggaaactggctgaagggtacaagggaccacttggtattgtctttgcagcttcctctgactctataattacctcaaaattaaaagcttatatatatgataataaagttatatatcatgtatatgttacatatacatata

SEQ ID NO: 474637 - DNA, 574 bp, Homo sapiens
aacatcttagattaacatttgtgatgatgactgagccaatattgacacattattataaccaaagcccatccattgttcagatttcatccgtttttacccagcgtcctttttctgtcccaggatatcaaccaggatatggcattgcattggatcccaaccaggatatgacgttacattggatcccaaccaggatatggcattgcactggatcccaaccaggatatggcattgcactggatcccaaccaggatatggcattgcgttggatcccaaccaggttatggcattacattggatcccaaccaggttatggcattgcattggatcccaaccaggatatgacattgcatttactcatcacgcctccttaggttcctcttggctgtgacggtttctcagactatccttgttttttaggaccttgacagttttgaggcatactgcacatctcaattcagacttagccgcatttcaagtgctcgatagcctggatctagaagatgctgtagaacttggctccctgatgtctaaacccctcccttctctcctgcccattggtgatctccagaccttc

SEQ ID NO: 474638 - DNA, 547 bp, Homo sapiens
cgcccgcttccctggtagtaaagagctggcatctttctaaaaaaaaaagggagcttgctcaggtgccagcagtgacagtgatgggtcaggtaggtgggcttttctttaagcccgtgggtggtgagcatgcaatagctgtagtggtgatgggccaacgcttgggcctcaggcaacatgtgcaagtgccagtggtgggaggtgtgtgcatatgtcagacatcagtgctggtgagtggtgtaggctccggcaaggtgtgcatgagttctggtggcaacgagcagtacagattgatcatctggtctctggacaacatgctggcccttgcaggagtggctttgagtaaggtgagtttgtctttaggccccccaatgctttgcatgggtcaggctgtgatgggcaagagttgggcaatttctagtccccagagagtaggcttgggtgattgtggcaagtgggttgggtttgtttttaaggccctttatagttcaagcatgtgccagaagtggcagagagggtgggatgatccttaggcccccagacagcatat

SEQ ID NO: 474639 - DNA, 766 bp, Homo sapiens
aaactatatgaggtttctttctgccatgccccctagctatgcaaagaaggttcctcataaaatgccactacgactcataactgtacgacttgcctgctttacaactagatatccaaaaggacttggatcttttgatctaagctgtatctactttagggggcaccagaagcataatagtgctgtggttttttgtagattcctagaggtcctgaaaatctataatcagcaggtggcaaagccagtcaggcctgtgttcttcccttcagggcagagaggtcccccaagccccccagaagaggaccctcaccccacaaccactaccaacccaggccatgaggagtactgccagatgaactccaatattcccttaaggcccaagatgcagacacagtcctccctctcctctttcctctccacttctcaagcagaaggaaggggtctcttttggagcccagagctgtgcagtactgcagatgccagcactcctttggctgcctctgatggtgtctcagtctgtgacatgtcccccagtccattgttcctgagcctaattcagctctaggactcacctaagagttgtagtccttgtggcctagactgccttttaagtttacgtggagacacggagtgccatagccctcagtggcaaggtttgcagacactcaagttcagacggctgggatcagtggttcctgtctggctagggctgatttaaatgctccctctctggatgggcatcagatgagtttgatctggttttctgctc

SEQ ID NO: 474640 - DNA, 1599 bp, Homo sapiens
gtttgagttaatgctgaaatgagttaagactttggagaactgctgggaaggaatgattggttttgaaagaactcagcttggagcctgtaagcggctcggaccctcagctggactgacagtgcagagtatctgcgtatcagtgtactttattcatctgtcgctgaatcagggctctgcaggaacagaccccctgcagctagtgcccccaagattgaacgtggactcttacctttcaccatatacaaaaattaactcagaatggattaaaggtttaaatgtaaggctgcagactataaacattctggaaaacaacctaagagatactattctcaatatcagccttcacagagaatttttggctaagtcctcaaaagcaattgcagcaaaaccaaaaatagacaagtgggccctaattaaactaaacagcttctgcacagcaaaagaaactatcaacagagaaaacagacaacctacagagtgggagaagatattcacaaactatgcttctgacaaaggcctaatatccagagtctataggcaacttaaacaacaagcaaaaaacaaataaccccaaaatggccgcaaatgtatagtagatataaatgaaaaagcatacaaaggggaaacaacttagaattgtaaactctttcatgagattgataactaaggtgtaaagtggtatcatattgtggttttgattagcatttccctaatgactaattatgttgagaatttttcatatacatattagtcatttgtatatttgaagaaatgtccattcaaatccttgcctgtttttaattggattgtcattttctttttgtgctgtaacagttctttacatattctgcattcgctacacttacatattattacaaacattttctctcacactgagttgtcttttcattttcttgatgttctttgaatcacaaatgtattttcttattttaatgaaatttattttaactgtttcttttctcaattgtgttttagtgtaagatctaagaaactattgccagctcaagttcataaacatttattcctatttttttctaagacttccatctttttagttctaatatactggataatttcaacggaccagccttcaagttcaatgattcttttttttaagaaaaaaataagttcaagtctgctgtttatcctctctagtgaatgtttgaaatttcagtcatagttctcaatgtttgagccgagagtttaaaccttttttcatctttccttggcatgtacacagtcctgcatgtgagtattttcttcttgatttccaggaatatgttagagctttcaaaggcctgtattaactcccttacttttacgtttttttgttagcctctctattagtctgttctcatgctgctaataaagatatacctgagactagtcttgctagcggtctatcaattttgttgatcctttcaaaaaaccagctcctggattcattgattttttgaagggttttttgtgtctctatttccttcagttctgctctgattttagttgtttcttgccttctgctagcttttgaatgtgtttgctcttgcttttctagttcttttaattgtgatgttaggg

SEQ ID NO: 474641 - DNA, 474 bp, Homo sapiens
atctgaaataaaagcttaggtgcgatggttttctatgatgttgtctctgctgtcttgccgcaaatgttaacaagaaatcaacacttccagtattttaattttttcctattggttccccttaaattacaggctcctttggcctgtattctaacttctgagattcccattattacagaaagtctattggacaaatctgtcatcatagtgaggcaggaggatggggagagattgatcaatgggtacaaagctctcactgcctggcttctcaagggcacttgctcggatctcagagcagggatggtgctgaacctgggcgctgtcacagccctgctgggtgtgcactcttggggcactactgacatgccagccccctaccgcctgggtcccctctggaatttgagcactgaggagcttgagtggggaagctgaggggcaggtggagggtggctttgtgatggcctgaagatgttcctt

SEQ ID NO: 474642 - DNA, 2426 bp, Homo sapiens
ccagttcccagcaaattccttatcttgatctgagactgcctcagtctgagctttattgtccatatcactatgagccttttggtcaaagccgttcaacaagcctccaggaagttcaaactttcctacattttcctgtcttctgagccctccaaactcttccaatctctgcctcttacccagttccaaagtcagttccacatttttgggtatccttatagcagcactccactctaccagtaccaatttactgtattagtctgttcttaccctgttaataaagacatacccaagactggggatgccatccgtcagaaaacatcttgcacgacaaatctctttggaaaaggaaaagtcagagaaattggaagcctgagattgacaatgctattcttgacatctgatagtgagaaccataagcaaggactggagagtggcctctacgagctaagagcataccctggcagacaagcctccagagcagagtccatcctgccaacactctgatatcagcaatgtgagaccagtaacagagatcccccagttgagtctgccctgccttctgccctagcggacattgagaaaataaatgagtgttgtcttaagctgctaactttgtagcaactgtcatacagcaacagataactcatactaagatattttgaattgaattccttcttagaaattgttatagatctaatgtaattatctaaaatgccataattttcattaatttcctttggaataaatgtaatgaatattttctctatattatcaaattaaaacaatatccattacttaagatatctaggatatttcagtttgtagaccttcaataattatgttaatgtgtgttggtcaagtgtaaagtaagcaataatgtaatatgagtggtggctataaaacatcatgtttcaacttttaacaaatattaaaaatgaaactttttcattttgaaagcttcagctttttaattttgtcacccctggtttccactttacgtctaagctcagataaattacataaaatggcccttataaagtcaattcaaattgttttttattttttaaattctggtataaaacataatttcataagaaaagcactacaatatagagtatatatttactctaatctttctagaatttgagtaaatcaatttcaaaatcatgtacatcaggcagcactgtttattatgtattaactcaattctaatattacttctgtggtgccattaacgtcttttgaaaatcagtttgaattataaattacgtgtagtgaaaataaatttactttgaaaaaaaatcatctgtttcattcacagtagtgttaatctatttcctatccctcatttagttcttcaaaggtcctttgtcctttgtttctcagattcaagtatctttaatattggagaattgatgatataatggctcagaaaccttagtgagacacatatcactttttaaataattattatagatttctaggtccatgaaagaccatttaaaacttttatcccattggattagtatttttaaatgtttgaatcatcaaatcaaataattagttcattgtatcttgtaactagtgcataaatgattatttctttttctatactgtctttcaaactagagtaatctttggtgaggttaggaagtgcctacctagacagcataattttaggaatgttttattactcctaaatatttctactgtctccacaattcccacataacccctctttctagaggagtttttcttggagagatataaaatgccatttatttatttatccattcacttatctattcattctctcaataaatatttattgagcatttgtaaagtttgctgaggctaaattactgaatgagaaatctttgctgcattttgaagataatgaaaatgattataataaacttgtaagtgtgctaacttgacagacgaaaaatgagtaatatgggaacattaatattgtctgaaaatattaggacagccttccataagatgtgaaatttcaggagaatgctgaaaaacaaaataagtttgataagtgaattgaagactaattacatttatttctttgaactttcttggggtttcaaaaggcaaacttatgtgtgcttctgcacataaataggggaagttagataagttataatacctttgaagaataggaagtttggtgcctttggggaatacacaaagcaatttggtccatgtggatggagtgtagagtgtaaaactgaatttgaggttaaaataagacatgagccatattaaaagggatcttgccagtttaagattcgagtatagattttatgcatattatttaataatttattttcagattttacctctttagattcttatcacagtgtttaatattacaaaataaaatttttcatgatgtagaaaattttggggag

SEQ ID NO: 474643 - DNA, 786 bp, Homo sapiens
ggaggggcagggccataagtggttttggaaaagacaacatttgatcaggaaaacagggatgataaaaagtatatggaaatatgtaagaccttggtcagaactagaacatcagcacttcagctgcattctattgggcaaagacacaaagaaagatctaagaaaatgagtaaagactcatactctgatggcttacttcccaggtcactaaaggagctcagagaaaaagaggacatgctggcaggggtagagatttatacttggactttacagaaccttctcttcatcaagataggttacactagtgccaaaactgatatttcagtgtgccaacctacagatcagacaagtgctaagcccctgatgcagcactatggtataggggctattagagcaaacaagaaacaaaaaaagttgatcttttctgctcttctgctatgtaaagaagagtgtttctcctctccagaggatgcagtatccaaggcactagactggaagcagagacgaggctcttatcagacaccagacctactgacacattgaaattggacttgccaggccctaaaactgtgagccaataagtttctgttcattataaattagctagtctgtggtattcagttcttgcagctcaaaaggattaagacatatggtaattctatttttagttttctgatgaaactccatactgttttccataatggctgtattagcttagattcctaacaacagtgtacaaggattcccctttctctacattctcaccaacactgttgtcttttgtctttc

SEQ ID NO: 474644 - DNA, 459 bp, Homo sapiens
tttttaatttccaaagggtacatgtgcacaacgtgcagaggggatgacagaatatttatgttattatttaatggcaaaattcacttctttctaggagcaatttttgatgaatctgccaaaaaggatgatgaggtatttcgcactgcggttggtgaccttaaccagaatgaggagatcttacagactgagaaaatcacattttcagtgacgtttgttgatggcaacaaccctttccaagcagttcaagaagtcaggcccctcttctgtagggctgctgtggtttgctcggggtccacttcagaccctattcacttgggcccctcccatacctggaggtgtcatcagtggaggctgcagaacagcaaagatggctgcctgctccttcctccgggatctccgtcgcagagggaaaccgacctgatgctagcaggaatgctcctgtaaaaggtatctggtgac

SEQ ID NO: 474645 - DNA, 811 bp, Homo sapiens
actgccaacactctcagctgcctgtggcctcacatagcccttatagttgcgttcccagtgccccatcagaatggtactgaaacagcagctcccacccttgcagcaagcagcgagcaagggggctgcagagccacaggacacagaagaaagaagaaagaagaagaaagaaggaagaagaggaggaggaggaggaagaagaagaagaagaagtagtagaagtagtagtagagagaaggaacaagaggaggaggaagaagaagaagaggaggaggaggaagaggaagaggaagaagaacaggaggaagaggaagaggaagaagaggaggaggaggaagaagaagaggaagaagtggaggaggaagaggaagaggaagaagaacaggaggaagaggaagaggaagaagaggaggaggaggaagaagaagaggaagaagtggaggaggaagaggaagaggaagaagaacaggaggaagaggaagaggaagaagaggaggaggaagaagaagaagaggaagaagaggaggaagaagagaagaggaagaagaggaggaggaggaggaagacaaagaagaagaaagggaagagggaagaagaggaggaggaagaagaagaagaggaggaggaggaagaggaagaagaagaggaggaagaggaagaggaagaagaggaggaggaggaagaagaggaagaagaggaggaagaggaggaggaggaagaagaagaaaaaagaagaagaaggcggcaaataatacatgtctccttttactactgtgatcacaattccatagagaattgcctggtatagcaggaa

SEQ ID NO: 474646 - DNA, 475 bp, Homo sapiens
acaaataagagaagcaaaaaatgaagatatacagagaggttcagagatacctgatagaacaagggcctgggcaggagaagatggcaagttcagatttgagtggaaagagcttccctacaactacatggatccacaaatggaaatcaggcactgatggaaaagcagaatggattctggagacaaacacaaatgtctgcagaatactccttaagctacccaatagccatacatattctcctttaaacacatgtgcacaatgcaaactgtcgatggatctactattcttgggtctggaggatggtggccctcttctcacagatccactaggaaatgctccaatggggactctgtgtggggactccaaccccacatttcctctctgcactgccgcagtagaggttctccatgagggctctgaacctgcagcagacttctgcctatatgttcaggcatttctatacatcctctgaaatct

SEQ ID NO: 474647 - DNA, 740 bp, Homo sapiens
taggtaaaggaaaaaggggggttgttctctggcaggcaggagtgggggtcacaagcgtcacacccagaagcgcgtgctgtgctgcaaggccagttcaaatgtcatgtgggaggatgctcaggtgcttatgcccaacaggagttgtcaagggcatcaggctcttgacattgagattgccagtggccacccctcaacatttgagtttcccaggaagtgtcaccaacgatcatttgagataggacatcaggctttttttcctactacttctgactggcatctttataagagtgatgttcacagaagaagaccatgtgaggacacagtgagaaggcagctggctgcaagcccaggagagttctcaggagaaaccaaacctgctgccatcatgatcttggacttcttgcctccagaattatatgtacacacaattgacaaattctgtgaatatgtttgccacaaaatgccttctaccacagctgaagtagagtttgcatcagcacccctaacattcatgggaaaagaaaatctagactgaatgtggccttgaacacaactaataagaaaaatgtcctgtcgtctatcatatttagttcatctttgctatctcaactgcagatgagctccaaagctgttccttttttaaattctgtattaatagtatttcattgcttaactacttcagttcacaagcataacctggagtttcctcaccccttgaaatctattaagataaatgtaaa

SEQ ID NO: 474648 - DNA, 701 bp, Homo sapiens
gctgctgtcattagtgctgctgccaacactgcaagccctgctgctgccagtgccaattctgctgatgccttgggctctccatgtcccagggactcaagcttaagcccatgaagcctgggatagaagacaattggagcaagatgaccaaatggaaacctccactgacttgtctacacaaaaaagcacctacatacgaactgaaaatcaggttaaccatcctagtttctgactataagcactggctcctggacagcatctctggacccacctggggcctggggaccttgcaacccttcagaaaagaacacaaatctggctgggttcgctacctgctgattgtagagccctggaccttgagcaaacatagagatagcatagtcccagtgggggtgaccacaggggtgcttgtgtcaccccttccccagctgcaggcagctgagcacagagagaaggacttcatttgtttgggagaaagtaagaacaagagtctctccctggtcatccagataattcttccagatcttatcccaaactgtcaaggtggtacctctctaagtatgcaagaactacaacataactgggcttgggtaccccctaatgcagatatggcttcagtgaacaaaactttagaccatatgcccaattctcttctaacacctggaaaaccttcccaagaagggtaagtacaaacaagcacagat

SEQ ID NO: 474649 - DNA, 598 bp, Homo sapiens
ctcttcagcccttgggaggtcgatgggatcgagcgccgcagagcagggggcggagctcattggggaggctcaggcccgcgcaggaccccacggcgggggatggggggaggctcaggcatggcgggctgcaggtccccgagccctgccccacggaaaggcagctgaggcccagcgagaattcgagcaccagcacgggctggtctgcactgctgggggacccggcgcaccctccacagctgctggccctggtgctaagcccctcactgcccgggacgggctgctgagtgcggggccctccgagcccatgcccaccgggaactcatgctggcccgtgaacacggcgtgcagccctggttcccgcccgcgcctctccctccacacctccccacaagcagagggagccggctctggcctgtgccggcccagagaggggctcccacagtgtagcagcgggctgaagggctcaacggcggccagagtgggcaccaaggccgaggaggaactgtattcacgaagaagactctaaacttttgaactgtagctatcttctccagttgagaaaaccagatttcctccctggatggctagtgatgttttt

SEQ ID NO: 474650 - DNA, 898 bp, Homo sapiens
attggtcttcagttatttttcttgggtcttctctacagctgacaggccaactcaacctactgccaaccaagacctgactggcacgaggaaaggtgcaataatgaagagttttcttctagttgtcaatgccctggcattaaccctgccttttttgtgccatgagaatgatgaaagaccattctatcagaaaacagctccatatgtcccaatgtattatgtgccaaatagctatccttattatggaaccaatttgtaccaacgtagaccagctatagcaattaataatccatatgtgcctcgcacatattatgcaaacccagctgtagttaggccacatgcccaaattcctcagcggcaatacctgccaaatagccacccacccactgtggtacgtcgcccaaacctgcatccatcatttattgccatccccccaaagaaaattcaggataaaataatcatccctaccatcaataccattgctactgttgaacctacaccagctcctgccactgaaccaacggtggacagtgtagtcactccagaagctttttcagagtccatcatcacgagcacccctgagacaaccacagttgcagttactccacctacggcataaaaacaccaaggaaatatcaaagaacacaacgcaggacttgctgaaaccaaattactacttcacactctccttcagccatttgtctgccttcagtcaacagaaaatgtgattttcacagattcagctcttctctccttacattttacattcatgccacattcaatattttgattcttgcacaataaagccaactgattgcaactgattctttgagaggagtttgcaaaggtacctcagggatctctgaaactttgaaacgctatgacaaatttagtgtgagtt

SEQ ID NO: 474651 - DNA, 545 bp, Homo sapiens
gctctgcagttcctgatgtctccaagcttccaggtgccaccacattcccctcatccagatgtgggtgactgcagcagaagctgtgtgcaagaaattgacttccgcaccatcaacatttcctccccgacccaggattcattcagcctttccaactctgaggatattaaatttacacttgctgaggcaataattatggcctcccccaagggagttgtcaggcaagacaatgctgattctactcaaaacccatacccaccactcctcttcacttctagatctgtaactagactcacgtcccagcagagccctagagatcttacagtgggaaccacagtcactcaattggaaaacttaaatgcaatgggaataattgaatcccaaggtggcaggggccaagtggtagcactcaattgtcaaaagtgaggtgggcatagttacaataatagcacaggcaaagcagcaatcagaatagtctgactcgtgtagacctctggcattggcaaattattttttatgtttttagaagtgaaataaataggaagcct

SEQ ID NO: 474652 - DNA, 737 bp, Homo sapiens
caaacaggccaaggattaaccagtaggaatgcagtggcactctgctacacaacaagaacttatatttgttttggctgtgtcctcacctaaatctcatcttcaattcccacgtgttgtgggagggactcagtgggaggtgaagatctgcttctggactcactcacgtcactgttggctggccacagaagatctatttctaaacgtactcatctgggtctcacttcagggctactgcatgtcatggcagtggctttctccagatgcaagggatctgagagaggaagaaagaaccaaagcacgcaagatggaagccacaaccgtctataatctaatctcagaagtgatgtctcatcacttctgccatattctacttattacaaatgagtcattaaatccagcccacactcaccaagaagcttccttgaaattaaaagccttttcattgtgccgcaaagaatttgtggataaggatgaatttgcaggtcaataacaattttaaaatgctattttatgtctgtacttgtgctttgtctatcaaggttcaataattaaaaaccaaatagtgctgcaactttacatatttttatctgcattatttatttttagggtttttttaaatcaaggagtggaatatttaacatatttcctggaaaaaagcggagatttctcagaactgtgatacaatctatttttataccgaacgtttgtgttttcagacaccaatcttaaggggtgag

SEQ ID NO: 474653 - DNA, 685 bp, Homo sapiens
acagctgggctgctgggggtgacatcacatatcggtctagaggcctagagggaaaaaatggtttcatgcactgggcccagagcccccctgctgtatgcagcctggggatttggtactctgcattccacctgctctagaactggctagaacaagccaaagtacagctcaggtcatggcttcagaggttgcaagccccaaaccttggcagctgccatgtgatgttgggcctgtgggtgcacagaagtcaacaattgaggtttgggaatctccgcctagatttcaaaggatgtatggaaacacctggatgtccaggcagaagtgtgttgcaggggcagaggctttatggagagcctctgctaaagtagtgcagaagggaaatgtggggtgtgagtcctcacacagagtccccactggggtactgcctagtggagttgtgggaagagggccaccatcttccagacctcggaatggtaaatccattgacagtttgcacaatgcacctggaaaagcaagacactcaatgccaacctgtgaaagcagccgggaggtggggctgtgccttgcaaagcagagctgcccaagaccatgggaaccaacctcttgcatcaatgtgacttggatgtgagacatggagtcaaaggagatcattttggagctttaagattgactgcccccactagatttc

SEQ ID NO: 474654 - DNA, 622 bp, Homo sapiens
gagggtggagactgagaggaatgtgaggatcgaaaaactacctcttttctgctctggtgtatccccatctttgtggttttatctacgtttggtctttgatgatggtgacctacagatggggttttggtgtggatgtcctttttgttgatgatgatgctattcctttctgtttgttagttttccttctaacagtcagatccctcagctgcaggtctgttggagtttgttggaggtccactccagacctgtttgcctgggtatcaccagtggaggctgcagaacagcaaatattgcagaacagcaaatattgctgcctgatccttcctctggaagcttcgtctcagaggggcacccggctgtatgaggtgtcagtcagcccctactggaaggtggactttggcaaccaaaagggccagcgagaatatgaagctcatgtggtacctcttatgctgtgtctttggtctctgcaacttttcagaaatcctgagagctattcaaccttttctaataaattccgtttctacttgaattagtcaaggttgtttcctgtcatgactgagaatcctgatgaacagagctctaaaatgacaaccttgaatttctttatcaatattccacatat

SEQ ID NO: 474655 - DNA, 848 bp, Homo sapiens
ctggagaagaaggccgtgcggctgtgtgaatctacctgatgaccctcggctgcttgggtactgccatggatagcgcatgtgttggctttgtccagctttgggctttttcccacattgattttaaaaagacaggagccacagattttggaggaataagacgtgtgatccatggcccgatggccctgatggacgtgaagatccactgttgtgggaggagtggaacactaacactgaatgatggaggctgtggtcagaaacaggtaagtgatggaggctgtggtcagaaacaggtcaatgatggaggctgtggtcagaaacaggtcaatgatggaggctgtggtcagaaacaggtcagtgatggaggctgtggtcagaaacaggtcagtgatggaggctgtggtcagaaacaggtcagtgatggaggctgtggacagaaacaggtcagtgatggaggctgtggtcagaaacaggtcagtgatggaggctgtggtcagaaacaggtcagtgatggaggccgtggtcagaaacaggttgaattggaggggcacacatttggtcatgaaaatggtgggactaagaagaatgaagtggcatgcaagagaccattatagaaatgatgtggaactcagggagtcccccagtggtgtttttgccatctttatgtccacgagtacccaatgtttagctcacacttatcagtgagaacacgccatatttgatttttctcttcctgcattaatttgcttaagataatgaccaaatctatttcttattataccacagatatatatataaatcctgtagctaaggactcatctttgtaccggtaggcagtatttacaatgcac

SEQ ID NO: 474656 - DNA, 541 bp, Homo sapiens
ccagttttcaaagggaatgcttccagtttttgcccattcagtatgatattggctgtggagatgccctgcccagagaggaagaatctagagaggcagtctggctatagcggctttgccaagctgcggtgtgctcctcccagtttgaactttccgagctctgtttacactgtgaggggaaaaccacctactcaagcctcagtaatggtggatgcccctctccccaccaagctcaaacgtcccaagtcaacttcagactgctgtgctggcagcgagaatttcaagccagtggatcttagcttgctgggctccatgggggtggaacccactgagctagaccacttggctccctggcttcagccccctttccaggggagggaacggctctgtctcgctggcactccaggcacccctggggtaagaaaaaaaactcggtgtctgcccaaacggctgcccagttttgtgcttgaaacgcagggccctggtggcataggcaccagagggattctcctggtccacaggttgtaaagaccatgggaaaagc

SEQ ID NO: 474657 - DNA, 548 bp, Homo sapiens
ctgagaggggagtgtctttgcaaggcgacagctgtgccagccgggctctggcaggctcctggcagcatggcagtgaagcttgggaccctcctgctggcccttgccctgggcctggcccagccagcctctgcccgccggaagctgctggtgtttctgctggatggttttcgctcagactacatcagtgatgaggcgctggagtcattgcctggtttcaaagagattgtgagcaggggagtaaaagtggattacttgactccagacttccctagtctctcgtatcccaattattataccctaatgactgctataacctttgtaaaggcagcgagaggctctcagaaagaatttagcaaactatccagggaggctgctaagaatgcactgttattgctggttatgcgggactcagctatgcactctgagcacagagagagctctgctaattatgttaacagaaagaaaatgagatctctgatatctcatggacctccacagaacactaaagccaaaagagtctaaaacagacatttatatctctgactttg

SEQ ID NO: 474658 - DNA, 764 bp, Homo sapiens
tgctcttacccacttctagcttcaattgctggacacctcgcctaccatgcctgcttctttaggcagcttaatcgaggctcattacagagagtatagtttaagtggaaaaaatgttgttaggtgtctctgggaagtatatgacaaaatgttgacaaaagttaattcagaagatcttgcagctgtggcatctgttcaggctcttctttcgtattcactcatcagccaatcagcaagttctgcctcatgggtgcccttcaaattcaactctccccctcacttacagcccatcataaaggatagatgcggtgaagtctggagtggaacaggaggggaggaggagcctgttggactatcctttgatgcaggcttaggccctggccagttactgtgtgagaacgggacctctgatgcctactcgcctaggcgctggccagttgctgtgtgagaacggggtctctgatgcctgctcccccatctcagctctgccacgacgttctttggtgcctgaaacaaaacattgaatttccctgcactttatttactagtgtctaaatgttgaaataataataatatactgtggaacaaacttatttcagcatctgttcatctcttggtagtttactggcagtaaagataaaattctagactggcttccccgctactcagaatgtttctgggccactttcctcaactgcttaaccggaagtgtttgaaaattgcaaacaaatgttaccattagccttagcaaaatgatgctaagttac

SEQ ID NO: 474659 - DNA, 537 bp, Homo sapiens
gaaattcctcctgcgccctgcatggcccattcaggagcgtctgtgacccaacctctctggctctggggagagggcaaagtgtggcatccagccctagccaggccagcgaggagccgcattcctgccacagtgaccgtggctccaggatccaggctgggcgggaggattcttcatgctggaggaatccattcctctcggtggccgagctgggaagaaatgtccccatgtgaagacatggccccaggaagagacgctggggctacagccagggccgcggggagggcagcaagggaggattctatggcagaaaagctcttcgtctggggctaccaccgcagagaatccaacttcagaagcagcacctttggccaacagatcaaggcctctccaagcatcgtcttcatcgttacagctaacagtgtgccgtattgcatctccagtgggccgcagtgagcacacctcctgcggcactgaactgcaggagggagaaggcattgctaaggatcgagtcctaaacaccaactgaacggggccacc

SEQ ID NO: 474660 - DNA, 1642 bp, Homo sapiens
gggaaggactgacgttccctaggctgagcgagtcgttccacatgcaacgctgcactcagacgcctgcaaatcagaacaagtgaactgtgtttcagggtctctccttgaggcagtggctagaccagcgcatgaatgcgggaaggcccttctcaggctgctcacctcctcctcctcctcctggcgctccacctggtctgccctgctgggcccaatccttccctgggcctgcccttccttcctcagtgccctctgtcctccgctgacctgatcaggagatttcaaccagggccggggccgtgggctgtcaggccacacactatttcatcctaacagtcctcagtgccttacataaaggaacgatgagtacgggattgtaccccagggtgggacccagtgaagaagaccttgttgctctcaagggtgaagaaggttccttcccacggagagtgccatctgacctggagcaggcgctggtagcagcgctcaggacctgggtgaggcagccctgccacctccctttgcctcctaccttagttaggccattggacttgacgtcaggctccctgggaagccttggctgctccagactcctgcagaaagaggggtctctccagagaaccccaggggaaaggctgcccccgatccgttccacagggctggggaaatggagtctgaaggagcacgcagaggaaagtgagtggcggggctgccgtttggggctgtctgtcccgtcccgcctgcgaggtccctgcactgggacctggtttctggccaggtctggagagggcctggcactgctggggctcctgctggccttcccagctgtgccagcccaactccccagagcacagtctgggggtggtagatttggagggaggagtcctggcaaagtaacgaagagggctccagaggagaatgccagagtctgaggtgtttgctgtagatgaaggggtttgaggtacgatggcagctacagctgtgaaagctgtaaattgcacaggatgccacatctatggggggcatcgtccgtattgtagacgttacagatttgcatatttgtgttgacaatttttggtccaagccaaaaaagtgttataaaaaaataagtgtatcaaaataattttctaatgggtggaagttatatgttttgaagaagaaataccttatcatcatcattattattattattttgcacaaaagcctatgggtttagtgacagctgtcattgattgtcctttaagttctcactaatgctctattttccaatcaggatgtagaagactgcccgagatgggaatacccagcaagaaggcagactctagacagagataagaggaggtcctaaaaactgagccctaattaagggcatttccctgcgatgttccctgggaatgatgaggaaacaagacagaataaagctaaaccacgccctcaaagttgtcatgaaaccaaaatcttgccccaagtccctgattaatgtttgaaattgtgaaaggcagcccatcgcccttgttgccgccttccccacagatccctgaggcagagattcagaaagccctgctttcctcagtcatgttggggggacttgcaagatctcagctgaccagattccatgctccctgtggagccatgaaaatggccc

SEQ ID NO: 474661 - DNA, 659 bp, Homo sapiens
tgtctggcacatagaagccacccaatccatgtttggttcagtcattcgacaagtatttactgagcagctgctaagggtggaaagggggcctcggggcaggagccacgtgacaattaggaagcgaaaagtggttgagagagaggacatatgcaggtgagagggagcaaagagcctgtcctggggaggaacagctgctgggagtcaggacgagggcagccccagggagagtggcctagtggagccagggagacctgccttcaaccccagccctacggcagaccagctgtgcagcacttgtactccccacaactgtccaaaaaccaaggaaagtctgatacattttcacagccaagaggaacctacagagccgtgatgactatgtggtattccagatgggctcctggggcaggaaagagacattcagaaggccaggagattgggcaggttcaggacctcggcagcaataatgaagttgccatgttgtggtcctgctcagggcatgtggatgccacggggccagtagagccaggagagcttcaagggagagctcttaaagtttggtcacccctatggagcaggcttccagtcctctctgccacctcctcattgtgggacagtcccactgccttgcctctctagagcatgattttcttctctgt

SEQ ID NO: 474662 - DNA, 679 bp, Homo sapiens
gctgcttaatgtttccgagtctgattttcctcatctgtgagatggcgacagtgatcctaccctgtgtagcatccagctccacatgggcatcctcacatcccattgctttggttaagtttttctggtcaaagcaagtttccatcttgaactatcatctctgccatcagctctcgctttgcatcccctccaaactctcaaaggatgaacaattttctccatggagtgtattcaagagaatattccccaggggtcattggcagctgccaaggatgtctttccccaacttttggaaaaacagtaatattggctggtacttaccagcaccaactgtgtgcagacactgcagccttcattatgccatcattgtgctgctgctgacactattttgggactgtgtctcctgtgacagtcacagtgccaggcactttgtgaacaccgtcttgacgccttgcttcaatactatgatcaccatttcacagctgagtaaactgaggctgagtggaaaactgacttgcccgacgtcacacgactggtgagaggttctgcgggatccctaggcatccgaacaacctgagtgtcctttttaataccacattgccattagtgatgacaatggagtctcactccagcggagtatctcagtattgctgcattgatcacagtgcctaatattttctgt

SEQ ID NO: 474663 - DNA, 561 bp, Homo sapiens
tcctgtgttctggggcagagtgaggaacagcagcggatgcagaatgaagtccatgcatcttctctttcaaggggctggcactccaatgggtttttgtttgtccttgcggctgccagaaggcctttttttgtcttttcctcctcaagaggctagcagaacttggaaacttggagtcttgagagtatgtattttgttacctttggggcagatggaagaggtccctgttcctgaaagcttacttaggagcctgagggctggaaggaggttgggggagactaggaggtgttgggaggtgctggaaggaggttgggggacactgagagcggttgggagggggctggaaggttgggggaggctgggaggggttgggagaggctgggaaggggttggggacactctgagggttcacagtatccacagagtatcacacttattcagcacttcctttgtgctgagcactgtgccaaggatttgatatgaactcatttatttttcaatctgaccctatgaggaggacacaattgttttcattttatagataagaaaatggaagcactgagc

SEQ ID NO: 474664 - DNA, 485 bp, Homo sapiens
ggcgtatgcttttgagtgggcaggcttgcttatggggtggataattcagacagggggatgccttccacagtcagaatcctgttctgctgtgtttttcaggtgcagcaggtggtccaggaggattgccaaggaccaaaggcacctctcccaggatgctgtgatgctggtggccaagccaaccaggctcaggttccccttgtgcgtgatgctactggaacctcctagccccagccgattagtccagcgtgggcgtctgatggggcagctttcaattcactggaagcccagcttggagtggcaggtgtctgaagaacagcagatggattggcagcaaagtgtggaggcccaggcaccaagccccaggcggggagagggttggggttcaagtgagtgttcaggacagtacgaaggacacgagaccctcgactgcagcaggctcaacctactccaactttctccttgataagaatcccctgggggagggc

SEQ ID NO: 474665 - DNA, 660 bp, Homo sapiens
tccctgcaagggtatagcctttgggatgtgactctgggcaggcttcttgatctcttgaagtctcaactataaaatgaggttaataatactcaccaaactcagaacctggatttgctggcactgtctttgtatatatctaggagccatggaccctggtcaaactgttttttcgaaggctaatgtcgccgatcacaaaggtccttatagaagggaggcaggagagtcagagtcagagagggagatgggtaggtggaagcacagagagagagaaaagaagaataggaaggaaggaaggaagaagggaaggaaggaaggaaagaaggagaaggaggaggagaaggagaaggaggaggagaagaagaagaagaaaaagaaaaagaagaagaaggagaaggaagaagaagaagaagaaggaggaggaggaagaggaggaggaggggaagaagaagaaggaggggaagatgaaggagaaggaggggaaggggaaggagaaggagaagaggaagaggaagaagaagaagaaagaggaagaagaagaagaagaaagcgggaagaggaggagaaggtgtagaggagaaggaggagagagagaaggggaggagggagaggaatgggaagggagggggagggagagagagagatttgaagatgctgtgctga

SEQ ID NO: 474666 - DNA, 746 bp, Homo sapiens
agatttcacaggatgtatgaaaaaggctggtatacaggcagaagtctgctaaaggagttgagccctcacagagagcctctactagggcagtggaagggaaatgtgggtttggaggccccacacagagtgtgcactgtctatgaagctgtggaaggaggtcactgccctccggaaccccagaatggtggtagatccactggcagcttgcgcccttcacatggaaaagccacaggcactgaactccaacctgtgagagcagccagagaggctgaaccctgcaaagccacaggggtggaactgcccaaggtgttgggagcccatcccttgcatcagtgtgtcttgaatgtgggagtcagaaaagattattttggaactttaaaatttaataactaccctgatggatttcagagttgtgtgggctttagcactggcctcactggagccaggacgtatcctaatgtggaaggcagggacctgctctgctattgacatccccatcttcaatgccttaacatatgttttatatttaaaagggacttaataaatattatttattttcacttataaaatacaatttatgatgtattaaatatgtattttgaaattcataagcattttatttacttttataaatattgcatatatgtttacttcaataaatatttaaagttaccaagtaaaatgtactcagtaaaatccccccctttcaaagttattctccagactataaaaaggtgtaacttgac

SEQ ID NO: 474667 - DNA, 487 bp, Homo sapiens
aataagctcacaactcaagccgttaaagatgtggaaaagaggagtgatgtcagctgatgtatatttcggatggaagcagagggaccacttaggaggtggttttgtcaagggcattccagagaaacctgaaaaactcgttcaggtcgtgatgggaaaggggacatgcttcattacaccttcctctctctggaattcaggcacaactgaccagcccctgcatgaagaccccagggtgggcaccacagccctttacagtcacttagcacctgctgctgaacacgagcatgcagacctggttggtgctgatgatatgataaagctcagcacagaaggccttcaggtccagtaccctggccttgacctccccataggctgtcttatctcacttttgcaccaacgcctggtaatccattacatgggtctccttggaggccttggccacagcatccccgtgttctgagaagtatttggaaatggttgtctggac

SEQ ID NO: 474668 - DNA, 2183 bp, Homo sapiens
agacactttatataattctcccatttaattctccccactacttaataaagcaggaagaagtccttgaatttgttcgtgtgcttttttttttttttgtccccttctgtgggcccggctcttaggtgtttgaccttgtctgcgcgggtcccgcggggtctggggttgtgagccgcctgcgcctttggggtgttgggccacgtccttgctttcgggggcctgcctcgcgggatgagaaaagatcttagtttatttacattttctaaaagatacacacagttgcaaggtttaagaaccactgagactatagatgttgtgatatctatttacctcactacatattctgggtaccacaaagataccagagatttcaaaatagaaaatgtacgcctagccttaacattggcccgtaaaactcctcaaattgcatcttgtaactctttttcaagtgagtccattgaaaagttccagtgcaaccaacaatgtggctgccgtagacatgaacgattgggggacatggtgatgttgattaaatttaagtctgatcatcgagaatgggttcagggagctagattcttctgtgcccaatacagtacatatttgcactttcctcagatgctgcgttggaaatttaatgttagttttatgtatttgtttgtgaactaggtgttttccaatatcctgagagactgctaaaaaaaaaatacaaacacaggtacttgtacatagtggagagacaaatagaccaaaacagcactgtctaatggagcatttggatgtattctgtatctatgccattcaatatggttgccactggtccaaatgagtaactgaatttttaattttattttattttaattttaataaatttaaatttaaatagccacacatagttaacaactatcagacaggacagtgcagctctagaatatgcctttctagttatcacatccagcagtacaatgcaatttcataaactccaaatttactattttggaaaccacagtcttttcacatggattgaactagtttaccattgacatttgtactttgaagaaaatgtcagataattgcattaataatgtaaaaaccattatagattaaaagtttaactttcataagggcatgagctagttataagaactagcataaaactattagaattatttataaattaatatagataattgataataaatttgttagataatgaatcacattagtgattcattaatgtgaagcaggtctaaaggaaacttgaagtcatcctttatttatttatttaaactgtatatgccagacacaggactagtgctgcagatttttaaaaaagactagccatcaagaaactcatttatatttttaaagatatcatcagtgctttatctaatgtattttatatttcatactttttatataaataggactgaacttttcccaaattagtacaaaataatgatgtttttaatattgtatttaattgaactttgcagtgattattatttatgtgactataagttattttagtatactatattaccatatagtacaatcctatggtatatctgtatgtttacaacacatatataattgttttaaattttctttacagatttaggtaacagttaaaaaaattttccagtttttaaaccctgatttagttttttttacagcacatagcatttatatattaatataagtatatatactaatataaatacggcattacttataattggaaaactcacaactttttgtactttattttgaagagtacatatttgacaaggagtcattacagaagatgtgtcccatgctgaaaacaatttttttcctggcagacatgtatatgaaattgaaaatatgggctttactcagtatgcctataaaaacaaagaatgaatatattaaacagttttaaaacttctaaggaaatgcttttgcaaataaatacaatcctagaaaggatgtaatatttgagaaaagctctgatccaaaagcatgatcagagattttcaagtagagcattgaattagatttctaaataccgccatgtattctgtaaacagatttagctgacaacacaaattaaattggaaaaactgaacatctcagttatgtcaatttgctcaggcctcaaagatatacatctttgaagtaatgtttaagtcaatactacggaatac

SEQ ID NO: 474669 - DNA, 1477 bp, Homo sapiens
ggcgcgccttcgccgacaccatagaggtgggcctctggcgacgtcagaggcgtgggtgttcggctacgtcactggggccctacggtgcctggagctgggcagtcttctcgtcagagtggggactggtaagagcgacctccccgccaggtcctgtgtgttgccagccgaagaagggtagctgaaaaattcagacccagcacagtgtttatgttggtcaaaaatagaaaactatgtctggcgccgccgaggcgggaggacccttcaggccaagagcagcctagcaacatggcgcaaccccatctctgtagtcctacctcagctccccccagctgaggggggctcagccccccagccctcaagtatgaacccaacggttcaaggctccagtgagctatgatcccatcacagcattccagcctgcgagattgaggacacaaagaccaacgagccaccacagccaccagtcccagaacccgctaatgctggggaacggaaaatgagggagttcaactctggcaagttctcagcgaaatccacgaccttttcctttatcttctggactctcaatgtgactgatgaaagttaccacatgctctgcagggggaaatggtttagcatgtattactacatcttaatcacatctttgtaaagccaggagcattttgaaagtcacgttacagacattcagacattgtttaaacatagtctgtatataccaaagtataggacgttgtatcatctcatattaattagttagttggctcaaaattagtgctaatgacttagtaattcagtgatttctgttagctttaaaacctttatttcagaactatttcacctcttggttttcatttttgctgtgtgtcactgcctgccagctgctaatttattaactcccagtgaatcacgtgtcctgtgaagggactgaatattagtggcaaattatgttgatgatttatattttgaataaatacagaccgttgtctccttctaggccctcacaatccagtggaggagacgaaactcatctgcctctgtccctctgggcacgcctcatgccaggtgcatctgtggacaggggccatgctcctgggcttccaaagttggagaaagctgccaggctcaggtgggtacatcacagcagctgctgccctctggacacagtaacaaaagaacactctgggcctggagccctgggcctggtaattggctggctctggcctgcatctggccccgagggtgtaggctgtctcctggttgtccttctgcctcgaggcctggctcatgctgctccccctcccactcaccaagacccacaaggaccactccacacccagctcagccccatcccctcagatagtcctttctctttcctcaggtggccaggtgcatatcttggtgtgaggaccttcactgtatctgggaatgcctactggtcacctcggtgacagagaccaaggcatttacctgatatgag

SEQ ID NO: 474670 - DNA, 1408 bp, Homo sapiens
gctgctcactctttgagtccacactgtgtttatgagctgtaactctcaccatgaaggtctgcagcttcactcctgaaaccagcaagaccacgaacccaccagaaggaaaaaacaagctgcgagaccaggaagaaactccgaacacatccgaacatcagaaggaacaaactctgcacacgctgcctttaagaactgtaacacccaccgggagggtccgtggctttgttcttgaagtcagtgagaccaagaacccaccaagatctttcgctatgcgagaaccttttggctctcgtatgtgcgcatgcgtctggatccggagccaggtgacccgctcagacgtggaccatgtgcgggggaggggggaaaggagccgcgaagggggtggtagacggaacaggtggagccgcggcggggctaggcggggcggggagtgaaacagcataggctccgcccctcgcggcgcttcccccggaatagcgtcatcagttctataagagagcgtgtgccgaaggcctcggcctttcacattcgggaagcgtcgggattaggtgaaagtacgtagttgtctttcgtaagttaaaatgataattgggccgaaacttactgccttacctaaaaggcagcgcagtcaggatattggtaggtcgggggcggctttggaaacccttaagtttacaagcatgcgcggacttgagtgctcattaggtcgccgggcgtccacgtgcagccctggaccctgaaccccggcgtgcgtgggccgtgggccctcggggaaaggttccgtgcactcggggactccggtgaagcctgttcagccgtctgtgtcatgtggccatcttgagtctactctgtcgctcttgtgccctagcaccccgagaactgtcagtttgagccagatggtgagtaataacctgtagcagtttggttgctggttaattctggattgtgaatctccatgtatctttgggacctgtcagccgtggcagtctcccttcctagccatggaagagcatatccttgtttattggcaaagctgtcaccatttaattggtatcagattctgacttgcacaagtaacattcactgttaaaaacctagagggtgccgggttattgggcaaaatttctaaaccgttgttcaatgtttctaggaagctgagctgaacacattacgatggatgatggaaacataagactatcaagaaatccaagtggtaatgggcgaagtttattcagcatccggcaatggacttatcgtagttggggaaacgggtgttccgaataatatcctggaagttatcaggacacctattttaaatataggcctgaattttgtaaagtaatatttaaggtggtccgtgataattaaataaaatgcttaattcatgtggctactcattgttccttga

SEQ ID NO: 474671 - DNA, 441 bp, Homo sapiens
gtctccagtcctgcaccttcagtggggcccaaaggagggagagactaaatggataaacagattatagggactgatctcactgggaaggtgacagggaaggtttccctggagaagggagaccaggagggaatactcctggaacttgtaggtggacggggagacgcaaaccatgccaggtctattcctgtcatcgtaaaggccacactttgtcccattcccctgatgcacagcacatgggatatttactgtcgtattagcaaaagcaagtcgtacaagctccaagtcaatgtgggtggggactggacaagagtatggatacaggaggaagccctggctccattggaagccatcactgtaactgccaacccacaagggaagtacatcttaaatggacttggacaccctaagctcagtgggatgcaaaccatgtgaatcagagtt

SEQ ID NO: 474672 - DNA, 810 bp, Homo sapiens
caagggccccgagggccaaatgcagcatgccacttccttttgtaagtgaagttttattggaacacagccatgcccgttcatttatctattgcctgtggcagcgtttgtgctacagtaacagagtggagtactcatctaaaatacgtgctgtctggccctttacagggcatagtttgccatcccctgcgttgtatgctggccatagtggagaagagagcgcaacagagcaaagcagtggggaggccccaggaaagcccccgatctgtcacagccaggcccatgtaagagagcatcctaaagtttcccttgctcctgcctccaaaatgggcacaaaatggccaaaagagggccgcagacctgagcagagcttgaggttgggacaagaagacacagtggagatggagggctttctaacaatggaggacttggcagcctccaagtatggcccctgggtgccactacgcataggtgctgatggccaaagaccaggtctgcttcaggctaaggatgcctgtggaccataccaccccatccctctctcagtcccccagaaccccgttttctacacctacaccatcctatatttccaggatcttaccagcaaccccaagaagaagggaagggcatgaaattttgaattgagtgactgaaaccggcatgactgcataaacactgaaataccagacactgttcatttaaaatgtatatattaactcatttaatcttcataacacacctttaaggtacttacctattagtatcaggagcatctgtatttattaagcactaggtactgaataaatcatcatc

SEQ ID NO: 474673 - DNA, 699 bp, Homo sapiens
ctcaggcatggccggctgcagtcccgagccctgcctcgcaggaaggcaactaaggccgggcgagaaggcagctaaggccgggcgagaagcgccggtgggctgcactgctgggggacccagtacaccctccgcagccgctggcccaggtactaagcccctcattgcccgggccggcagggccggccggctgctccgagtgccgggcccgccaagcccacgcccacccggaactccagctggccggcaggcgcagtgcgcagccccggttcccgctggcgcctctccctccacacctccctgcaagctgagggatgccgccaaagtgggagcccaggcagaggaggcgccgagagcgagcgagggttatgaggactgccagcacgctgtcacctctcaccagctgtgcctgaagcagcaggcgctaggggatgcgtgcagcagccccatcaagggacctgggtggggcaccaatagcatctactacgggtggtcagaaaagcactagagggctcatctgccatctttcccacccatataactgcactttcgaagcatgagatatattgacattagtggggaagaggaaggagttgtcctaatatgggttactgaaatgttattggcccatgttaaatacagaaatggagggtttagaaatgtttaaggtgattttactttgccacagtgtccaagcacctg

SEQ ID NO: 474674 - DNA, 794 bp, Homo sapiens
gtggcctgtgtcgtgctggacctcctggcctccagtactgaatgtgtggcccattcttccagcccaggcagtgccccgagtgggctgcagccccagagctctccccgtatcccccaatggctctccagtctgttcctggggaggtccagcccttgggcgtgaccgggcggtcaccttgtctcataacagcaagctcactgctatctatctctactctcatcactccccagcacacctcagtccaccctacatacagtatcgtctccagtcctgcaccttcaggacacacctgtgagtgccacatcggggaagaatgtttgacatccctgaactcatgctactcagcagcagagggcctgcagcatggtcgttacttattaaatatttaagttcattaacacacaagaaaagggctcctgaaaatagtctggaagcactcaggaccgactttatctctttcccagttttgccttgggccagctgtgtgctaaatttattcacttatttactcagccagtcaataaatgcagctctgtaaatcatgtgattgttattattgtaaacagtgtttctcaaaaagcaagtggaaagggcaattcctctaatgctttttccctaagagtttttgttccaagtagaaacttcaatgcccttatccaatcagcacaaatcccaaatgcactatctggccaagcgcatcgagtttttagctcgccaccccctccagaagtttggagaacatttccctgaagaaagccctacctcatcccttaagtgcattggcagttgcttac

SEQ ID NO: 474675 - DNA, 922 bp, Homo sapiens
tggagtgggtgggaggctcaggcatggcgggctgcaggtccccagccctgccccgcgggaaggcagctaaggccctgcgagaaatcgagcacagcgcaggtgggccagcgctgctgggggactcagtacaccctccgcagccactggcccgggtgctaagtctcccattgcccggggccagcagggctggctggctgcttgcagtgcggggcccaccaagcccacgcccacccggaactccagctggcccgcaagcgcggcacgcagccccggttcccgctcgtgcctctccctccacacctccctgcaagctgagggagtgggctccagccttggccagcccagaaaggggctctcacagtgcagtgggggggccgaagggctcctcaagtgccgccaaagtgggagcccaggcagaggaggcgcccagagcgagcgagggctgtaaggactgccagcacgctgtcacctctcaacaggactcacatgatttggcattagtttcaatactggcaaaaagtaaaaagaccaactgtatactctagatttcagcttgttacctattgattttagctacaattttagatcattctttgaaaaactgtaacatgaaatgactgtagtgaaagtcctacatagttactatacctacatattcataatctatcttattagagattgaagttttagagacttttaatctaccaagttttttttccttattcatcaagggaagccaagtagattatcgatcttatttaaatgtggaaagtgatcatttcagctgttcactgaccgtagctgccccctttttggtggaatttcccttggctaaacagtagccacctcaccagggacacttcatttcccaaaatgctgatgcaacctgccgccagctaatgaccaatggacatgggttata

SEQ ID NO: 474676 - DNA, 499 bp, Homo sapiens
gaacagccagagtgaagagcaaaattattagtttttttcctatgaagttgtttgagctccttatatggagctcaacttgtattctggttatggatcttttgtcagatgggtactttgaaaatactttctcccttctttgccactcttttgcagggctgctggagtttgctggaagtccactccagaccctgtttgcctgggtttctccagcagaggcagcagaacagcaaagactgctgcctcctcattcctctggaagcttctctgctgaagctgtgcccacagccaccccttccccaggtgctctgtctgagggagatgggagttcgatctataagcccctgactggggctgctgcctttctttctgagatggcctgcccagagaggaggaatctagagaggcgatctggctacagcagctttgctgagctgtggtgggctccactcagtttgaacttcctggtggctttgtttatgctgtgaggggaaaatcacct

SEQ ID NO: 474677 - DNA, 1338 bp, Homo sapiens
ctcgcctgatttttggttcttatgaaggtgtttttattttctgtgtaggttaacttggtgttaacggcagggggttggcttgagtcaggctgcgggaagaagacaggcacccccatcaaacaggcccagcgcacctccttcttgctttaagtgtgcctgagtcagagagttggggatgagggagaggttaagtgtggacctaggttccaccactacaactggcttccttctctaagtttgaatgtgattccctaactccctacaatgtccgaatgtcttggcgataatggcagctgtagcaagcataggaccacagccactgcttatgcgattgtgcagattccccaaccagtggagcatcctagcatggggaatgcccagaggaagagcagtgcccaatgtttaattaccttcagcagtagtttttacccgtggctgcacattagaatcactagagaaggagatgcatcagaggaaggtacctctgctggcttagaagtaagcaaagtttcagtcttccttttccaggatcctgtggtcttcatgaacaatttctactcgggccatagactccctaaagaacaaatatataatttgcatgcttggagcagtggtagactgcaggtccctggtgttacatgtagtttttggaagagaaccatgaatctatgtgtaccaagcattatctgtagactaaatgaattaataattattgcacaaatttgtactctgaaaatatatggaaatccattgtaattaaaggaacatttatttcaatgcattacttaataattagtagctctctgccatgtattactcaaagagcacataccacaaacagcaacatctggacgttttgttaggatgtttgagtcccttggtaatttactaaaattatatctaaaaaatcatttcagaaatctcctctctctctttatgttttcatcagaaaatagatagagctactggcctattcaagaactataatcaagaactgttgattcaagaactaaaagcaagttttagcttgaatatatcaaacgtttttaatattttaatatttttagtattggcaaaaactaacaaatatcagctaaaaacaaagcaataagtaggaagtatacaaatataaaataggctaagatgagagatgaacattattacctagatataaaatgcagattctgaaagtagtcagacctacgtatgaatagaaattaccaacttgtgtaaactctggcaagttacttaagccctctgtgccttcatttctttatcttaaaatagttataataatacttctttgttgtaatgtttcaaggattaaaatagatctgc

SEQ ID NO: 474678 - DNA, 828 bp, Homo sapiens
tcctccccagccatgtggattgtgagtccatggaacctctttttctttctaagttacccattctcagatactaatgatactagttaatgtagaagtagtagaagtagaaagcaaactaaaaatgaaaatcagagaagaggtttggaattttgaggacagtgacatatctgacagtgatcaaggaaagagggccaaaaaagaaaatgaagccaagaaacagattcaaattataaggcagcatgggggcccacttgagctcatagttgtgaatttagtaaaactagtcatcatggttatacattgtactttagccctgttaagctgcatgagaatgaatgtgactgccaacaaaggaagtatacaaataaacaaatatgttcttgcaaaaaacaaaaagtccagagaatcgaatgatcagtgcctcagtcgttacttccttttcacttatcatttcaagctgcgttattttgatggcttttcagctgtgagactacttggtactgatgcagaaataatgaaatactgaaaaccccaaacaacagaaacgtctataactggtaatgggcatcctccttcagtttattaactccagctgtgctgtttgactgttttttgtgaagaggtgccatatgagttgaatatcgaatggaagatagaggatctaatgtcacaagcaactggatcacccaaactctgtattacaagacaggcagtttgaggaaattgccctactttgaaacacagttccatgctcatcaagataaaatgtgaccaatataaattccttttggtggaggtgtgtcaccttcagtgttcacaatgacactc

SEQ ID NO: 474679 - DNA, 1016 bp, Homo sapiens
tgtcatttcaaagacggtgaggatgattgaccttcataaaatagcatctggatagaaacttggaaaagttcaaaaacaaagccatttggatttctgaggaaaatcgggacactgccacctaaacactgtgcttttccaatggtcttagcaaacggcacaccaggagactatatcccacgcctcgctcagtgagtaccacacccatggagccttgctcactgctagtccgagatctaactgcaaggaggcaagcctggctgggggaggggcacccaccattgctgaggcttgagtaggtaaacaaagcggccaggaagctccaactgggtggagctcaccacagctcaactaggcccgactgcctctgtagactccacctcttggggcagggaatagcctaacaaaaggcagcagatacttctgcagacttaaacgtccctgtcagacagctctaaagagagcagtggttctcccagcacggtgtttgagctctgagaacagagagactgcctcctcaagtgggtccctgaaccccctgtagcctaacttggagacacctcccagtaggggctgactgacacctcatacagccaggtgcgccttgagatgaagcttccagaggaaggatcaggcagcaatatttgctgttctacaatatttgctgttctgcagcctccgctggtgatacccaggcaaacagggtctggagtggacctccagcaaactccaacagacctgcagctgagggacctgactgttaaaaggaaaactaacaaacagaaaggaatagcatcaacatcaacaaaaaagacatccacaccaaaaccccatcttgcctcttctcctccaaaggattgcaactccttgccagcagcagagcaaagctggacggataatgactttgacgagttgacaggagtaggcttcagaaagtcagtaataacaaacttctctgagctaaagggggaggttcaaatccatagcaaggaagctaaaaccttgaaaaaagattagac

SEQ ID NO: 474680 - DNA, 595 bp, Homo sapiens
ttggtggagagtgaggaaaatgccctgagagaagcagacccgaaataaccatttgagggcgggtagatctttctgaggtgatttcaggaaatatgcatagggaatggaaaagtcagatggaaagggaagtggccaagaagcgtatgtttctaagcaagttaccagcgtggaagctggagtgtaagccctccagggaaactggggacacaggggacagtaattccccagcaggtcctgcctgccacacaagggcagagaaagctctcaggcaaagctatggtggcagcgggaagttgggccagcgtgtgctgaagtgggaacacaaagtgctcagcaaatatgatctcattagtgctcacgacagccctgagggaagaagttggcaagaattcccaccctccttggagaggagacagacaaatggatcaaaatctgaattcagacccactttccggtcaggagcagggtctgtcagcagcattctgtaccttcagcttctcatgccctcttatcaatggggctggacaaatgaagggcacatttgtgacctgtggtgaattcacagaggcgggacattggatagttaccataggaa

SEQ ID NO: 474681 - DNA, 1202 bp, Homo sapiens
aaacggaccaatcagctctctgtaaaatggaccaattggctctctgtaaaatggaccaatcagcaggatgtgggtctgcagtttcacttctgaagctagtgagaccacgaacccaccaggaggaacgaacaactccagacgcaccgccttaagagctgtaacactcaccgcgaaggtctgcagcttcactcctgagccagcaagaccacaaacccaccagaaggaagaaactccgaacacatccgaacatcagaaggaacaaactccagtcacgtgtcctttaagaactgtaacactcaccgccagggtccacggcttcattgttgaagtcaggcagtcagccatacctcttcctgaggtcactacttacgatggcctcctcattgctctctctgtgtcagtgagcctgattcctgtgtgccttctgcacacaaaacagccaggaggatttttcaaaaagtgtgaattatatcaagtcattccccaactaaaattctataggaacttcccttgtgcttagggtaaacctgaagttcttactgtggacatatgtctactcacaaactgtgaagtggttattgttagtatagaatctaaccgggggattgtattaatctattcatttcttcaactttatggacaaaagactttcagatgattgctgaaaaccaagaaaagctattaaaaagcaaacttgaaaaggattatactcttgttgtagtaattccacccctggttaggaatgcatacttaataactaatcagaagcaggcaagttttattcacacagacattaatcatcaagtaatttatgatagtaaaaaaattggaaaaaaaagagagaaatgattaaacacccagaattatggtacatccataaaattgaacattatactgccattaaacagtgtgtttccaaaggatttttagtgatctgtaataatgctcatgttatttgtgaaaaagctggatagaaaactgaaaatataccaagatcttaaattatgtaaagggaaaaaaacctcacacataaatagagaaaaaagaaaggaacatattaaaacaaactcttcagtgattgtatcttgagtgccttttttgttttttataatttttggtattttccaaattttctacaataagcatcttttacagtcagaaatataataaaatattttcaagttcgagattttagctgtgtt

SEQ ID NO: 474682 - DNA, 1487 bp, Homo sapiens
ctcccacttatgagtgagaacatgcagtgtttgtttttctgttcttgtgtttgtttgctgagaatgacggtttcagcttcatccgtgtccctgcaaaggacacgaactcatgtttttacagctgcatagtattccatgatgtatatgtgccacattttctttagcctatcattgatggacatttgggttggttccaagtctttgctactgtgaacagtgctgcgataaacgtacgtgtgcatgtgtctttatagaatgatttataatcctttgggtatatacccagtaatgggattgctggtcaaatggtattcccggttctagatccttgaggaattgctacactgtcttctgcaatggttgaactaatttatactcccaccaacagtataaaagcgttcctgtttctccacatcctcgccagcatctgttgtctcttgactttttaatgatggccactctaactggtgtgagatggtatttcattgtggttttgatttgcatttctctaatgacccagtgatgagctttttttttcatgtttgttggctgcataaatgtcttttgagaagtgttcacatcctttgcccactttttgatggggttgtttttcttgtaaacttaagttctttgtggattctggatattatctctttgtcagatgaatagattgcaaaaattttcccccattctgtatgtttcctgttcactctgatggtagtttcttttgctgtgcagaagctctttagtttaattagatcccacttgtcaatttgggcatttgttgccattgcttttggtgttttagtcatgcagtctttgcccatgcctatgtccttaatggtattgcctaggattccttacacaaaaattaactcaagatggatgaaagactttgattcttgatggctcgttctataagcatccagtggcatgacacatccagcaaagggatacttctccgttcattgccctgatctaccaatgaaggaagaaaatggtcctggaattgaaaaagggcctggaccagccatgcaagcagctcctccaggaacttcaacctgtaagttgtctctggccctccatgagccagaggtgtcctggaggggttatgtgcgtacatgcggtattgcattggcaggagctacagcctgcccttttgcagctcctagctataaggatgaagaactggatgatcaaagggatgtggctggagaatctggttcctgcccccctggtggtaggggatcagatgctgaagattttagccatgggggagagtgtcccctttgcattgcttcggatgtgcaggatgatgatcccattgcctgtcataggctaacctctgagcatccatgttggagactgaatttgctgttggctgaactccctgttcttgcaggccgcctgcactgagtcctgtactcaacccaccctctgaccttcaattctgtcagacttgagttacttgtgcatgaagagagctg

SEQ ID NO: 474683 - DNA, 471 bp, Homo sapiens
atgatgacacgatgctcattcagaccatcagctgcagacggattgcagaaatacgtgagggctgtgtcctcagaggagaagtctgctgtgtcctactaagaagattttcttcactggttaaagatgagagacacatcaagaaaagcccccttgacatagcttcctccatcttgctcctggagtctgaacttggtcatgatggctggagctataacagccatcctgtgaccatgagtctccaagggtataaagcagtaatattcaggaaggtggagcctttggacaaaaagataaaaggaatctggggcctcagctacatcactgagcctttccaagcccttgccttcttcctcttaaatcctgttatgttagataactaaatgtctttattgcaaaagccacaagtagtcaggctttctgttattcacagctgaaagcatttcccttattttcaaataatttcagacttat

SEQ ID NO: 474684 - DNA, 813 bp, Homo sapiens
agggctgaggaggtgtataatagaaatgaaggcagacctttctcgcggaacgttttaaactgtctgtgcatggtgctatgccaggtgctttcctcctggcagccgtcatcattcctgggcttcctgggcttgcggccgtgtcactccgatctctgtctctgtcttcacatggctgtaccctctcctgtaaagagtgtcaagatggcaagaggtacgcaaaggaacagtctggcataatcatcttgagagagaaaggcagtcttgatatagtggctttgctgagctgttgtgggctctgctcagttcaaactttcccgtggcttcgtttacactgtgagggtaaaaccgcctactcaaacctcagtaatggtggatggccctccccccaccaagctcgagagtcccaggtcgacttcagactaccatctggcagcgagaatttcaagccagttgatcttagcttgctgggctctgtgggggtgacatccactgagctagacaacttggctccctggcttcagccacctttccaggggagtaaacggttctgtcttgctggcattccaggtgccactggggtatgaaaagaaactcctgaagctagctcagtgtctgcccaaatggctgcccagttttgtgcttgaaacccagggtcctggtggcataggcagcctagggaatttcctgaacactaagttcaaagttgccatcaagggttacatggaaagaaagtcctattaagtataagacaaacagagacattggaaaaaagaagactgaataaaataagcagagccagtgcatgaaaggatg

SEQ ID NO: 474685 - DNA, 1148 bp, Homo sapiens
aataggaacagctccagtctacagctcccagcgtgagcgacgcagaagacgaacgatttctgcatttccaactgaggtgccaggttcatctcactggggattgtcggaaagtgggtgcaggacagtgggtgcagcgcactgagcatgagctgaagcagggcgaggcattgcctcacgcaggaagtgcaaggggtcagggaattccctttcctagccaaggaaaagggtgacagatggcaccaggaaaatcaggtcactcccaccctaatactgcgtttttccaatgatcttagcaaacggcacaccaggatattgtatcccgtgcctggctcggagggtcctatgcccacagagcctcactcattgctagcacagcagtctgagatcaaactgcaaggtggcagcaaggctgggagaggggcgcgtgccattgccaacgcttgactaggtaaacaaagcagccaggaagctcgaactgggtggagcccaccacagctcaaggaggcctgcttgcctctctagactccacctctgcgggcagggcatcgccaaacaaaaggcagcagaaacctctgcagacttaaatgtccctgtctgacagctttgaagagagtagtggttctcccagcacgcagcttgagatctgagaacggatagactgcctcctcaagtgggtccctgacctccgagtagcttaactgggaggcacgccccagtaggggcagactgacacctcacatggccgggtactcctctgagacaaaacttccagaggaacgatcaggcagcaacctttgctgttcaccaatatctactgttccgcagctgccgctgctgacacccaggcaaatagggtctggtgtggacctccagcaaactccaacagacctgcagctgagggtcctgatgttagaaggaaaactaacaaacaaaaaggacatccacaccaaaaccccatctgtacgtcaccatcatcaaagaccaaaggaatgcagctcctcaccagcaatggaaaaaagctggatggagaatgaatttgatgaattgagagaagaagccttcagaagatcaaactactccgagctaaaggaggaagttcgaacccatcaaagaagttaaaaaccttgaaaaaagattagacaaatgac

SEQ ID NO: 474686 - DNA, 628 bp, Homo sapiens
cgccacctgaggtgagctttcaagattggagacatctcaaagtacagatataatcaagttatgatgaggtcatcttgggtgggctctaatccaatgacctggtgtccttatcagaagaggcaaatttgggcacagagatgcacaaagagaagacaatgtgaagacacagacggaagaaggcatgtgacaacagaggcagaaactggagtcatgcagctacaagccaaggaaagccaaagattgctgtcttttgaggagttatggtcgagggcgccactggagagactcaactgtgcccttatatcttcaggagcaggccctgaaaatggaaaagccagtcagttcattgatgggaatagagaaaaggggatggctatgggaaacattctaaaggaagacccctacagcaagttacggctagcaggattggagagatggaatagaatgagtccaagatggcccttgctgcatggctggagggtggtggtactggaagtgacaggaggttaggagatatgagtttggtgagaagagcatgggttctgttcagaactgtgcatcattcagagtttcctgggagtacttgagctcttgggaaggaagattagtgcttactgggaacattttc

SEQ ID NO: 474687 - DNA, 774 bp, Homo sapiens
ataactctagggtaaatgtccaagtgtgcaattactggtcatatggccccacctccaacaatggggattacaattaaacatgagatttgggtggggacacagatccaaatcatatcagtcacaaactcaaaaaatgttctagagccagacaactacatcctgcattttcagcaaaacctatcaactcagatgctcttacaaaagccaaatacattttggggccccatggctgacgtagcttatttgggaattgaggtagataaagaaaatggaagcaacagttctgtcagatggaaccggccgtctggaattatcactatttcttttaacgtgatggcctatgaagatgtgttgcttggggttgctgcagcttcttgtgaccgtgaaggggacatgaagagaattacagagaagcttgctcagaactttgatgttgttgagctgctgagttaatagtgcaattttcagacttattttcagacttattacctggggaaaaacacattcttagggtttaaatcaatttaaatttaaatcaatttacatatattttattgcttattctccatcacagcttaacaaatgtggataggatccttgatttttcatcctcttttggtgaatgctggtgctccttggcacaagtctctcagcagagactttgggaacactgattcttttgttttccctgaaaacctgtataagatgaaaacctgaaataagatgacatacctgtgatggtgaattttatgtgtcaacttggctaggctatgg

SEQ ID NO: 474688 - DNA, 440 bp, Homo sapiens
gagttaatgggtgcagcacaccaacatggcacatgtatacatatgtaacgaaactgcacgttgtgcacagaggaagatcagagaatgttttcatgacctgcttcaggggaaaatggcagtaaagaggactaagaaaccaattgtaataaatagctccaaaacagaaacgacatttaaaaaacgttggggccatcttgcatcgaagttggcattggggagtaaagcgacagcttatacttcctcagtcttcccgctagccccttcagcctggagggggctactagcttcttccaggtgttctggccacagctcaaaggaagcaaggaccgaatggggaggtggtgctccctgtgagctttctcgataccggctgtttttctatatgcagtgggtcagagcattgccgttcctttattattcccaaacaagcaaataaaatg

SEQ ID NO: 474689 - DNA, 669 bp, Homo sapiens
tccccgcggcagcagcatgatggcagcagccattctggacagcccaccactgccatcacttccagaagatcaaaccaactacaaccttcccttaagccaaagcctaatccagaccaaggccttaactctcttaagttgtctgaaagctaagagagatgtggtagaaatagcaaaagaactagaattagaagtgaagtctgaaatgggattgagttgctgtaatatcatgatcaaacctgaagggatgaggaagtgtttcttatggatgagcaaagagaacaatttcttgaaatggaaactactcctggtgaagatgccaaattaccaaaaccactccaatcttcagcaaccaccatcccgatcagtcagcaaccatcaatatgcagaaaagccctccatcagaaaaagagtacaacttgctgaaggctcagatgaccactagcactttttagcaataaagtgtttttaattaaggtatatataattttttagacatagtgctattgcacttagcatactatactagggtataaatataacttttatatgcatgagacaccaaaaatttgtgtgaattactttattgcaatattcactttattgtggtggaactgaaaccccaatatctctaaggtttgtcaaagatcagacagttgtaggtatgtggcg

SEQ ID NO: 474690 - DNA, 2033 bp, Homo sapiens
aatactacttcagtgcgtgattatgggcaagtctctttctatgatggctgagaaacatgaaaaagctgtagaagaaaaattagaagctagcagaggttgggtcatcaggtttaaggaaagaagccatttccataacataaaagtgcaaggtgaagcagcaattgctgatgtagaagctgcagcaagttatccagaagatctagctaagattattgttgaggagggggtgaaaatatcgacattaacaggaatttgggagaagtggattccaaccctcatggaagactttaaggtgttcaagacttcagtggaggaagtaactgcagatgtggtgaaaatggaaacggaactagaattagaggtggagactgaacctgggcctgaattactgcaatctcatgttgtcctttcaccccttccctcacctgtcctgtggctggtagcccctgacactgtgacacttattcccctcaccctggattcctcagaatctgtatctaagtgtcagaccagctagacagctgttggcctaaagaattctgaggtatgcattactaatctagttgacatccaacacggattctgtcatacagaatgcattcaatgtatcttttatgattgagaaaatgattataacagatatagctactactaagagctatttcttaaaatatttatttttcattgcatattttcatcttcacttgtcgttatgtaatattgcaagctaggagaaagcagtgtatgagagcttccaacttttacagtgtatgggagtttccaatttttacagcaaaactgggttttgtcaagttttagaacttggaccattgatggatatgaaatggcattcctttactgctttaattcataagtccttggttttagtaatatcaggaatgtttctctgtgtttactgggaatttgggctttcttttctgtgactttcttgtttgtattcaatactcattgatttagttgtttcttcttttatcatttatttttagtaatatttcatatattttgaattcacattcttgcctattatgtgtttgatatatctcattctaggtcatggcttctctttgaactttgttcaccatattttatattgaagaggcattttacatttaaatgcagccaaatacatagaatgttttctttcatagatccataaacatttcaattaactcccaattactagaatcttattatatggacacatatggagcgtaaaaagaatgtaaaggaatgtaaaaagaaccatcaagtgtattataggttgaataatgaataaatcagataaaggtgaagaaaaaggcataatatactttaatggggaagttatggaatgatttaaattggtttaaggaaaggagctatataaatgcaaggtattattaatcagaatgattaaaaatgtcatatattgttcagagtgcacaccttagttaccctttttgttttatatattggatattggggtgcttgatattttaaatatcacatactttccttgatgttctttgacattttctacaaacctagaatccatttttttaagcaggacaaacttagattgtgaaatgtcacttgctttactttcttgaaatgtataacttaagatacatgaggtatatcactgtggtgcatatggatacaatggatacttacaaaatacctgcttcaaaagcttaatactttttcttgtacctaaatagtagtggtggcatttgtcaaaattcacttcttatacaaaggaaaattaaagaaccaagagttaatactcccaagaggtaaatctaatgaagataagagtgaattgctattgctatgtcaagtaaggatggttttgctctttcatcccccactctaataacagagcattttagctaggttgtagcattcataatgtctttacttgtgttatctcttctgattctcagagctttgtgagattgactgcagaataattattatcactaatttagagatggaataagtgaggcttaaaaactgtgccttgtggttcc

SEQ ID NO: 474691 - DNA, 530 bp, Homo sapiens
gctcatgttgctgccttggagggtgcaagctatttcagaggatgtatgaaaaagcctgcatgtccaggcagaagcctgctgcaggggcagagccctcacaaagaacctctactagggcagttgggcagggagatgtgggattggattctccatacagagtccccacttgggcactgtctagtgcagctgtgagaagagggccaccatcctccaggtcctgtgaaggtagatccactgacaactttcactctgtgtctggaaaagatgcagacactcaaccccagctcatgagagcagctgtgggggctaaatcctgcaaagccacaagggcagagctttccagggccttgggagctcactcctcacaccagtgtgccctggatgattcagaccttagtggagaaggtgtagttgcatccaactggatggtggagaacttcactgggttgtcccaggcctgtgttttttcagtcatggattaaacagtaaatacctctgatggtatatggactaaggtagcaaaaagggaa

SEQ ID NO: 474692 - DNA, 680 bp, Homo sapiens
ctgctgtttgctctaaggagggtggtcttttgagctgaggaaaatgggttcctccacgctgatatgtatgagaaatctaaaaggcactgtgtgactggctgttgccaagaaagcaagcatagtaatgaggagttccaatcaaggaacctcttagaggcagtgaggtgccatgaaatgagcagtagccttggaaccagagacctgggcttccctgctatgtttgcccctttgtttactgtggaagctctaccatctagaaatccaatccccagttctcaaattctaccccgacagctgttcctcaaggctttcaaagcttcaaaagatggtgtctccagcagcaggtttaaaactccatgttctatggtagacagtaggcatgcagagaagatcaaaccaggtcttggacttaggagctcacattctgataagggaacgagtcaagcaaatgaaaatattatagttcaatgtaattgatacactcatggatttatttccaagaaagtccacgtggctggcctccttacattataaaaagcatattatgtttctattacatgcacatatgtgcattttgtgtatacatgcatttttgagtgtttatattgatgtacacatactcctactgtgagtcagttgaactgtatgatactgccatttctattggttaaaaaatggtc

SEQ ID NO: 474693 - DNA, 500 bp, Homo sapiens
ctttaggtaacctaatgactatgtgccttggtgatgatatttttgacatgactaacattcgtggaactcatagcaagaatacaaatggaagcacatacgtgggctcaggagaagacagaaaaatgtgggaaagtttggaactccttagagacttgtcaaatggctttaaccaaaatgctgatgatatggacaatgaaattcaggttgaggtagcctcagatggagatgaggaacttgttgggaactggagcaaaggtgactcttgttatgttttagcaaagagactggtggcattttgcccctgccctagagatctgtggaactttgaacttgagagagatgatttagggtatctgatggaagaaatttctaagcagcaaagcattcaagaagtgacttgggttctgttaaaggcattcagttttaaaagggaagcagaacataaaagttcagaaaatttgcagcctgacaaaataataaaaaagtaaattccattttcc

SEQ ID NO: 474694 - DNA, 585 bp, Homo sapiens
ccgaccttccttggtcctctttgtggtctgggaggaaaactagtgtttctgctgctgtgttggtgagcgcaactattccgatcagcagggtccagggatggttgcgggttcttgggcaggggttgtttctgctgctgcatcaatgagcacacctattccaatcagtagggtccagggaccatttcaagtaaatgatataatgacagctgaagaaagggacagattccctactggtcagcaagccatccccagtatggatcctcactgggaccttgactcagatcatagggactggagttgtaaacatctgttgacctgtgatctagaaggactaaggagaattagagaaaagcccatgaattattcaatgatgtccaccataactcagggaaaggaagaaaatccttctgacttcttcgagtggctatgggaggccttaagaaaatatactcccctgtcacctgaatcactcaaaggtcaattgattataaaagataagtttattacccaatcagccacagatatcaggagaaagttccaaaagtaagccctgggccctgaataaaatttgcaggcattattaaa

SEQ ID NO: 474695 - DNA, 539 bp, Homo sapiens
tccactaggtgaagccagctgggctcctgactccctgtcaaaatggaccaatcagctctctgtaaaacggaccaatcagctctctgtaaaatggaccaatcagcaggatgtgggtgggccaagggaagctgtgacagactgcacctggagaaacaggacactcctaaccaaatactgcactattcccacagtctaagcaaccatcagacctggagataccctcccgtgcctggcttggtaggtcccatgcccacagagcctgatccttgctcactgctagtgcagcagtctgagattgacctcaaggcctactgcctctatagatttcacttctgggggcagggcatagtagaacaaaaggcagcagacagcttctgcagacttaaccatccctgcctgacagctctgaagagagcagtggttctctcagcatggcatttgagctctgagaatatacagactgcctcctcaagtgggtccctgacccctgtgtatcctgactgggaaacttctcccagtagaggctgacagacatctca

SEQ ID NO: 474696 - DNA, 887 bp, Homo sapiens
ccggcctcttgtgccttgctcctgtcattcgaagctgcccatctgaagccctctagcctcaacctgaaggttattgccatggatctggcccagatgcacgcctgtcaaggacctggaaatgacctttacattgaagcatctgctgctctgtgtgcaggctctgatttcagtgtgtcaggaggactgcagtgggtccagcttgtagctcatggaagtgctggtgatgataatggctggctcaggtgccacaggcctccatggcaaggtttaggagacaatgaactcgatggttgcagtggagaagtcaatgtcagccaggatttctgtgggaaatacacagatgtggtcaaccacatcacacaacgactggactatgtactctgcagaacttatgcagctcaacgtacttgtcactcaggctctgttgtaaaagaagtgccacaacacttggtccccacacccaatgcctatctccagccagccagagacctgcagatgtgtctaaaacttttttccatcctgtccaaagtgctgctgaggccaaaggacaccatcacctcccaaaggcagtttcacagctaccctgagacagtgataaaggacatctgcaaaggcatgtgggaggacagccattgtgtcctgcctctgggtgctccctagctgcaagacaagtatgttttatcatattcacttgaccaaacccttaaatgccttttaaaggttttaatgttgtgctttaaaaagaaaagaactgtgtatgattccagagtatgtaagagaaatataaaatgtgtgaagtgttgtgttctttatctttcagtttatttaaaaaaatatagttaaatgacccaatcatttatattttctgtattaattttataggattt

SEQ ID NO: 474697 - DNA, 707 bp, Homo sapiens
cacgaggaccggggtgtaggtgtgggaaatggcacccgtggtggtggtgctcaccacccactccaagttcatggtctttaagggcaccaggaccatgctgacattgtcccccagctcccggaagctctcagggtacaccagatggtactgctctgaattccttgatggtattgttgatgatattgggcttcttctcctgctggagcctcagccaccattggtaggtgttgtcctccaagagcgcgttctgggcagtcagcagcagctgcactatctggttctccaagagctccaggaccatcttcttggggaaccaggtggtggccaccatggcgtgggagtagttcaggaaggaggtgaggaagatgaagagcacgaggaagaaaataaagtagcctattcttctgcaatccttaaagagctgataacgtctcttgataaagctttaaccagtgatttccattcccatccgaagaagctaagaggaagggtcttggtatagcagggagggaagctgtctctgccgccctcctccgagtgtggtttctgatgatccttaattagggctttgtctttcatgctgtcaccagagacatggtgggttatatgacaagcttgatgaaggccacagaaggttggctgtcattggctgtgtgactttagtggagtctcttaacctctctgagcctcagtttcttcatctccat

SEQ ID NO: 474698 - DNA, 3157 bp, Homo sapiens
aggggtttgtggccccttttttggccaatttctcccatttggaatgggaacatttacccaatgcttgtaccctcattgtatctttgaaattcatcatcaaataccattgtgtccactaatcgtaaggacagaacatctggacctgctcgaggcattccttcctcatccttatttaatgttggagaccacatcgattaatagtgaaacccagctggaagctggcctgcaaaggaatcctgataatactatccataacagtcagacaattgggcagagaagattgagcatggatctgttgaaaaagggcaacagaaaagccatccagagactcctttctattgattccaggtcagaatctggcaaccaattgccagtcagaaagtcttttaatccacctgtgaagtattatctaaagagaaaccagaaaaatatgggtcttgattcatcactgtaacaaaaaacagtcacaataaaagcaatgtaaacacttgaatcaagcataaataatgtccctgagagactaatactgaaatagttttcatctaaaatcccattatgatgggtactaagtaaattatatttcaactatgtgatggggaggtatagtctaccaaaataatatttataactggtttagtggcttaagtgataattttaaggaaaattatctgaataaaaattagatgcatttacctgtgatctcatactacatacaaataaacaggtatatgactgaaataaaatgaccatatggattttaccagtgcttatatctactcaggagagccttggtatcaacagtttttttgttaaaataaaaaataataataatcatacaatacatttatgtggagaaataaaataacaatatctgatgtggtacagatataactggctagttaattttattcttgcagataaacaacttgaataatgttccaatagagcaaaatggtcaggaatgtgttttctacagcgagaatgtgtgggcttaaacttttggtgttgacaatgggcaccatgaaagttacatttcagatggtcagaatataaaatttttgacaatcttggcaaaagtgagagtaagagatttaaaaaaggcagttatctgcttatgtgctgtaacttagatttcatgcttggatccttgaattttccaccaaataaagtagaaaaatttggctttgagtttccttaaatgcaatacaaactccagaacataatcagctctacattagtgctatttgaaataatgaataaataaaggaatagatgctaaatggggtatgactccattgtccctaaaaatatccagttaaaatatagaagctatatataaatttattttttgattattttatcaatctaacattaataaagtactaaagaattaagacatcagagcaagcgaaatttgatcagtaaaaataaatttggagaatcccaaggacagtttatattaactgcatacctgcgtagggaggcatatttaagtgtagaagattgagcacacttaaacaaaatgctatagggccggtcatgacttgaagcccagtcatcaaaaacttgagcatttctgcaaatcagtattagtatatttcaattacctttaatgttttgcttagttgtcccccttagatagttatatttgtacattttagaatttaggttaaaataaaaaataatacattcattttattaaaaaggtaaactaaagtcaaataacattttaaagagtttatttgagtaaacagcaatttatgagttgggcaactccaaagcagtaatgatttaaagtaaaggctctagtgaaaagtcacaagggaccggcttttacagggtgaatacagaagaaaatattagattgtttccaattataaagttaccttatttggtctatcttgctggaaagttgtgagttacataagtttgctggctgcttctgattgattgagcttaagttctgttaatatgataggatgctattctaaagtaataaataagttgttttctggttgttttttgatacaaccatttacaaaaaaaagctcaagttaagtttcacctgtatttgcaaaccaagtaagattaaattcacttgtgcagactaactagctttgtctgctcaaggattcttcatgtctggtctccattgtaacttatattagcaacctttatatatcatgaaatatgcactgaattctattctgaacattttaattgaaatacatattttactctgatattcactctatgatctattctttttttgtagattagaatattgaggtacagaaagacttagttacttgtccaaatcccggtggagccagcatttgatcccacaaattctagctgtagaaaacacattcctgaccactttgctctattcttgcattctattttattttactgtctgattaaaaacattggcaaaatgaagttctgtgtaactcagcatgtttgaataatgcatgctccttcgtacaaatttttagttacattttagggaattgtttgtaatgtagaataaatggaatattcagatgatctggaattagatatattcaatggttacaatcaaacaatcttgtatttttgaattttaaaaacctccaaaatctgtacattataaagcttttattttttttaaactgactatacctttttaaaagaaaattaagagctattttctagcttgcatttcaaacaacttgttgttttctcttttcaaattgttaaatttcaaagacctacttggagaacaaagcagctgttgctttagctaaaaatctttcagttcaacttcaacctacagaacattacccatgagattaagtaaagttctccctaacattctagtgtgttgaattagaatgtatctaataaaagaactttttcttagcattttagcaacctaaaaagaaaaagagagaactaaatatttttaatattcagtgtgatagttaatactgagcgtcaatttgattggattgaaggaagcaaagtattgatcctgggtgtgtctgtgggggtcttgctaataaaagaactttttcttagcattttagcaacctaaaaagaaagaaaaagagagaactaaatatttttaatattcagtgtgatagttaatactgagggtcaatttgattggatt

SEQ ID NO: 474699 - DNA, 590 bp, Homo sapiens
tctgctgctgccatcacaatacagatgaggaacttgtgggaaactgaagcaaaggctgacaatgcaacagaaaagaaaaacccattttctgggaagaaactcaagccagctgcagaaatttgcataagtaatgaggagccaaatgctaatcaccaagacaatggggaaaatgtctccaggcatgtcagagaccttcacagcagcccctcacatcacatgcctgaaggcctaggagggaaaaatggttccctgggctgggctcaaggtcattctgctgtgtggatagtaaggaattggtgccctgtgtcccaactgttccagctgtggacaaaaggggccaaggtacagctcaggccatggtttcagagggtgcaagccccaagccttggcagcttccatgtggtgttgagcctgcaggtgcacagaagtcaagaattgagatttgggaacatccacctagatttcagaggttggacggaaatgcctggatgtccaggcaatgctttgctgaaggggcagagctctcacagagaacctctgatagggtagtgtggaagggaaatgtggggtcagagcccccacacagagtc

SEQ ID NO: 474700 - DNA, 852 bp, Homo sapiens
cctgccttctgcattggtctccctgggagctgcagaccggagctccacttcccggagagggagaatggcagaagaggcttctgaatggcttggtcctgctggttctccgaggccccggactgcagacctgacttttcccagaagacacgatgcccctttgggagacatgaaattcacacaatatcccttcggtgtagcaatggaaagggtagaagtatgttttgaagcaaaagaggaggagagaagagaagacaaagaagagaagagaagagaaaaggagaggagaggagaagggaagagaagagaagaggagaggagaggagaggagaggcagggaggagaagacaaaaagagaagagaagagaaaaggagaggagaggagaagggaagagaagagaagaggagaggagaggagaggagaggcagggaggagaagagaagagaagaaaagagaagagaagagaagagaagaggtgactcactataaatccctttcacattgaatgaaattatgattttataaaattaggaataaaatactaaaagacctctcttacagatgtttatactgaaataaaacgtaggcagtttctagttaaaattcatcatattataattgtccagagaacattctataggttagagctgtttaaaggttgaattggacttcttcaggaggtatcttcccctttgtaatgtcgtattctagctctcccatcaagagtctatttatttatttgtgaatctgggcttggccatcttatttgctttgtacaatagatccttagcaaatgttgtaagcagaggtttgcaaactgcctgtgcattagagcttactcttttgataatctc

SEQ ID NO: 474701 - DNA, 619 bp, Homo sapiens
gaggctccagagcctgccgctgctgcagacactggagctcagagacggcatgtgtgggacacagtgccagctggcggctggagaaggctccctggagagtggagggggagccaccccagcagctgcccatgtctccccaagggcttggctttcgaagtggggagaccaggtgtcactcttgttgccgccagagccttctgcagacgcgccagttgatgaccaggcctcccctctacggctgctcccacccaggcccgagtacccaggccccggggcttctgaggctgcctggtctgctcagggccaagggtgcctccaggatgtcattggcatctttgtgctggggctggagctctgcagacaagtggcagggggccctgccctggaggccttaccttctaagcgggtccttgtttcccaagtcattcctgcccatcgcaccctccctacacccccatgccctaactgaaaaactaggtggcttgcctcagaactctgaacatatattcttctcagaccatggggtcattctcagggtatgcttcagttatgctgtttctctcagggtcatctaccacccactgctccgcaaccttccaaaaccccaggggtagctgtt

SEQ ID NO: 474702 - DNA, 701 bp, Homo sapiens
aaaccacgactcaccagtgtcatgttctggagattgcatcaacagcccgagtcggcgctctgccccgtttgcttagcaaaacttcctgtcaccttcattggattgaaggatgcaaagtattgttcctgggtatgtcttcgagggcattgccaaaggagattaacatttgaactgcaagttcttcagcttttggactcttggactaacaccactggtttgccaggggctctcgagccttcagccacggctgaaggctgcactgtcagcttccctacttttgaggtatggactcagactgatccactaccggcttccttgctcctcaacatgcagatggtctatcatgggactttacttcgtgatcatcaggggaatacatgttacatctatgaagtaaaccaaaatttactgtgcaccaaggcacagggcagcaacgataacagtggagaagaaccatactagaaacaggaattaaggttcagcaaacattttctatacttttagatcctttagaccatcgtgcctaaatttggattgtagacttctggtttccaggtctatgagagaatatattgttgtggttttaagacatcaagtttgcagtaatttgttacagctgccctaggaaatgaatatacttgattaaatatctttaaaatttaagtgtagcatataaattaatttgaaatgatgataatggt

SEQ ID NO: 474703 - DNA, 4218 bp, Homo sapiens
ctataccatacacagaatctcctttatccaatatgactggtgttcttataaaagaggacattttgaacagaggcacgtacaaaggagaagactgggtaaaaacacaagaagacagctgtctccaagccaagaagaaaagctgtccaaaggaaccaaccctgctgtcacttttactttggacatctagcctccagactacatcaatgaaagggcccatgacagcagaggtgatgcttgtttgtgccatggctgtggtctggtgtcctctggcactaggaacagcctcagagctcaagagtacacaactaaattggaagaaaggcctggcactgaatcatattttgaaatggggattactggagaccttcctgtttgtacagcttgcctcgttccacaactatacgcgaagaacaaatgtttcaaccactggaaagtcaggctccacatggagtaacagctgagtggtgggaaggaaggagacccctttattcatcgcagcatctccagacataacataatgcatgtagccaatggtactcaataaatgtagcattaaatgaactactatatacacctgaccccagaacaccttctctccctagtaaattgtgtttctaaagtcagaatttgtattatgcccaagttaaaataaatatttcagttgtcacccagaagtaacttttggtatatttttagcagttattacctaggcatgggcaaatttaaccatatgaagttaatgtcaacctacacagccatcaactgcattgaattttttgcatcaacatcaccacatatgcatttccacttaaattaacataacccaaaattgctttaagtgttttaaaagatagcaccccatggtgcagtattgaatgaattataggcctgaagaagattgccatcaaccaggcaaagcaactaaaggcagcagacatttcaaaatcgttcaaaatagagcgcagaaatgtcatggctagaagcccatgttattgaaaacaaccaagtttgaaaggacaaaagtaacagaaagatgagagacaggcaaattgacagaattgggcaagtgggcaaggagtgtagagagtttcaggggtgacatcaccaataaactgaagaggtaactaaaatggttaaagactgctactgtaaaacaaaacaagatagacttgtttctaaatgtataatataacataatacagtgcactgataatttaagaaatgtagaactataattaaaatatattaaaaatattcatctgcagctttcaaagaggtaaccacattttgtgaattcatcttaaaatattgacacaattggaaactcttactaaaacgcattcatgattaacattaagacagccagttatgggtaatggaaagaaaaccctttgttaataataaaacaaataatgaaggtaactgaaacaattacactatatattattggaaagatgaattaacccacatgtactggttgaacagtgtgtgtgtcattatgtggattatagaagtctgtgccatgttgacaagaaagtaaagttcttacctacataagattcaattgtaagtgaattcttatgatttgggaatggggattagcattaagctctgtatgtctatatctagaatatgtaaagacatattaaaactcaataatcaaaacataaataactctataaaaatcagcaaaaatcagaatagatattttcctaaagaagacacacaagtgtctaaaaagacacatgaaaaggtgctcgatatcattagcagtcagggaaaccttattggaaaccccaatgaggttctttacgcccacaaggatggctttaataataaaaaactgataattacatttgttggcaagtatgtggagaaattggaacctgcatacctcatcccagttgggactgccatgttggaagacattctggcagtcctcaaatggttaaactgtatgacctagaaattccactcccgggcatacaaacaaaataaatagaaaacatatattcaagcaaaaatttgcacaaggtatgcatagcagcattatttataagtcagaaagtcgaaacaaaccaagtatctatcaaccaatgaaagtttaaataaaagtggagtatctctgcaatggaatattatttgccaataaaagaaaattaaatattgatacatggtacaataaagattaaactgaaaacattattcttagtgaaaaaaatagtcactaaggaccacatattgtattattctatttatatgacatatgcagaaaggaaaatctatagatagaaaaagtaaattaatggttgtcaagcgttggggaatgatggctaagtggagtaaaatttctttttggggtaatgaaaatgttctaaattgattttgataatggattcacaacttcatgaatggactaaaaccactttatggtacaatataaatgggtggattgcatagtatgtgaattatctctcaggaaagttaagtagtgtgtttggatgaatgaatgaagcactgactttgccctgtgcacatcaccaaattatatctcagatttgatatgaagattttgattgggaatacactttttatataacatggcataaaaatggtaattaccaaataatcagtggtcttgtcactctaagtaagaaaaaatagattaaatggcactacagtaggtggttatgttaattataagcagaatgataaataccaacttcgatgcaggattttagactgaatgaagtagtgtaggttttaaaatagaacatcttattcttctgaagttcttcatgacctaattgtagttcaatttgttgtgtttgcccagattgagttgtcccaagatttcacattggaaatccataccatgggatttttaggtatgcacaacccatgggccatattgttgcaataaagtgtacgggaagtttgcatgcagtatcttttaaacaataataattctaattttcataataaatactttttaaagttctacattttactattagtttctaaatattttattttaaaattttatcatacatctgctgtagagtaacgaccatatccaaggtttttagctttctaattttccatgtgtcaaatgaacaacttgggattgtgttaagcatcaaataaagtgtacaattgcccttcaattgtgaattagtaaaataatacggtaaagcagattattcatcaccttgagtcactaacattgtatgatttttataaaaatagaattttttttgcatatgatttggactgtttgaagtactggaggacaccaactcccctcactttatggctggttaattttattttgggcagctttccatgaaaacaattatttcgtttttttccttttctctattgtttttgttttacttgaaagttctagattccacatctatccttccaaatgtttgttgataatttaaatatatacacttaacttttattcttaaactaagaattaatcaaatttgatatttttttgtcctagaaaatcaatagattttcaataacttttaatctcactgttacctatcaatatttgttgatattaatggtaatttatacatatataattctagatataatttattattaacatttagagttaaaatgtattttatttattttcacctttattatattttatgttttactttctttttaccatagtagttcttttcaaatagattttattaaaggaagattttgcttatacataagctaaatttattattttcaaatgtttgtatttcactttcaagcttgagtaataatttttttatatatgaattttatataaagtttttatatgtagccctttgaagacattttcttatttctctttgtattgaatagtacggaaagagacaagatgcaaatagtctcattttcgttccattactggtgttttgtctttcactcgttgaagcttttagaattttgttagtcttaatgttttttgagcagttggcattgttctgtgaaatgataaactacaaactagagagcctgagcatattttgttgaggagcagaattcaatttagttcacactttaggacccagaggccaatacttaatacttaattcctggttcatcctctccaaaccacaggaaaaaagtgtagaaaaatttagagcgataatatgtcagtgaatcagagagcccctgggatagggagagcactggtta

SEQ ID NO: 474704 - DNA, 1571 bp, Homo sapiens
gctatgacactggctgctgaggcactccagggatctggcaggagtcaggaataggaagaaacccctccccgttccaagttggagggatgggatccctgccctcccaggcacacctgcacctgcaggtggctacagacctgggcatctcggcattctcgtgggccaggaagcccctgctgctcccacaggatcggatgtgcctgctcctgctgactggcgtctcccctctcctggtgcctgctctagtttcacagcaaagttgtggccagacccaggcgctgtcatgtgcccactccaatttcagagaaaagttgtggcccagcccagatgctgtcatgagccagccaggacagggatggcctgaggcctggggtccaggctgccagttcagcagaccagagccagaaattatggtgctttttctgggcccacccatagctgcccatggaccaatcagcatgcacttccttccctctgaagcccataaaagtcctggactcagccagattcaggcagatgagaggctacctgcctgtggagagaagctatgcactgtgggtctcctctctaatgagagctgaatactcattgggatgacttgcctgcagagagggtgtgcctaccatgggtctcctctgagctattctatcactcaataaagcacctcttggctttgctctcccaccacttattcacgtacctcattattcctggacgcaggacaagaactcaggactcgctgaatggtggggatgaaagagccataacacaaacagggctgaaacacactccttgctcaccaagttgcgggtaacaaggaggaagacagaaggagagaagagctgcagcccttcagggagcccagacctaggagctccccaagccagggctgtgaccttctttggggctctgcagttcctggtgtctccaagcttccaggtgccactgcatttcctggtgccagccgtggaagctacttgccatatatctggtccagccacagccttgcagggaacaagcacccgtgccagtgcctggagctgcctgccccaccacagccggcatgcctggttgtgtgcagtggccagaccccaccctcgctcactcatacaccccttgcttggcttgcccttggcaggtgtgggatccaggccagtggcacaagccaaatgcagcctgccaagcttggtgggcagaatgagcccagcaggccagagcaaaactcgagcaaaggctccaccagccacagaggtttctggccagaaaaatgacaccgcaagaatcctgtgacattaccagtgaagtgaaatagtttatcacattttaaatatctgtttgaaagaatgatgagcaaaattctatggctattttcttcaagctgtagggggcttaagatttttcttacctgtgtctaggaagcctttatattttcaggagatgagccttttttttggtcatatttgctataaaatttttcttacttgattgctctttactcatttgctgtttttaatagtaatagttttgttcttttcaatttttatgtagctaagtcacttttttctttgtga

SEQ ID NO: 474705 - DNA, 1138 bp, Homo sapiens
ccttgggaacctacccctcgcatcagtgtgacctggattgaggacaaacctctgccctttccatgatgcaagaggtccaatataacctgctaccaggtagctggcttattgcccccaggaatggtgccatatcacgggctcagtgttggactctgctgatggcaaattgggcactcagtggtggccatagccaggtcagccttgctgaaggcacattgattctggtgggccttatggacaggaatggagaaaaaggcattttccaagtcaatggctgcataacagatctgacgtacagagaagaccaatcgctggctcgtcaaagatgcaagtgctgccctcacaaatctgtttcacaaggcattggtcaaatgcatatcttctggaccctccaagctgagatgaatggtaaagttcaagccacaggagaaaatggaggatcaagaacagatatcaattattgtaaggaggaacagaagaaaagggcctggggaaagaatattagatttgatgagaagaaagctattcttgggaatgcaaataaattaagatatggaaagttcttaaagatggtgtgtccagagtgtgatccttcagatgttcagatgtgtcaggagtttcttccttctggtgggttcgtggtcttgctgacttcaggagtaaagccgcagaccttcacagtgagtgttacagctcttagagttggcgcgtccggagttgttcgttcctcccagtgggttcgtggtctcaatgacttcaggagtgaagctgcagacctttgcgatgttcagatatgtccagagtttcttccttctggtgggttcgtggtctcgctgacttcaggagtaaagccacagaccttcacagtgagtgttacagctcctaaaggtggtgtgtccagagttgttcattcctcccagttggttcatggtctcactgacttcaggagtaaagctgcagatcttcacagtgagtgttacagctcataaagctagaaatttgcatatgatgaggaaacttgctagaactgtctcatttgtccaaatcccttcaatttaaagatcagaaaagaaggacttgagcactaagaggctttgccaaggttgtacagccagttagtgagggagctgaggttgag

SEQ ID NO: 474706 - DNA, 1711 bp, Homo sapiens
gccgcggccgccggagacgtcccgccgccgcgatcgcccgcgctcgcctctgcctccccgcgccgctcctccactcaccaaggcacagccgccgagctcggcagacacagtcccgggcacaacctacccccctccgccgccgccgccgccgccaacaccgcgcccgcctccgcctcctccccttcctcctcccggcccccgcctcttgcgcgcctgcagcctcctcctccccactgagcccgcccccgacctcccgccccgacgccggagttcctcgcgttcattggctagagggcgcatcactcagtgccaggtggcggcctccccgcttgtcccgcctcccgctcctcctcattgtccccgccccttgctctgttttcttccagctgccggaccagcgggcctgccgcctctacggaccagtccctgctcaggtgtcacttttgctggcaggccgagattagggcaggagagtgggcaaggcgtcgcggccaggaggagaagggctctaccacgccaccctcctttggcctccgaacgcggaccccgcacacacacacccgcgcctctttggcaagcgtgccttgtcggctgggttaagccgcagtgcgtgcacaccgagcggcggggcgctgtggaacgcgggagcggactagcggaggaggatgcggaccaagccccagcgacccagggcaactcggagctacctcgggcagccctgcgggtctccgaggagaaccgaggagacgggagaaacatgggagagggtggccttttccctgttcacacacacatgcacgcagccactggccgggacagttgacacccatcttccttccctgctccttccagtcattctacacccgcttggtgctgccagtgcgggcagggccttggagcccaaagcggatccccacacttgtccctacggtcggaaggaaagtagaggagagaaagtcaggcgcggcagggctaagagcaatagtggcccaaatgttcctggcccgcctgctgcgccacagagtctgaaaagcgggtctccgtctaccagaaggtgacctccacacagcccctctccccgaccaactgcagcacccaaggactggcaacgtggttggagcttttggggggaattatgaagaaatctgaataaatttctcacccttcatgtttcctgttttatttccaaagtccttcatgatcagcactttcactacaagttatttagattgtataaagaatttggaagtcctagtcagaggaactaggcaagagaaagaaataaagggcacccaaattggaaaagaaaaaaatcaaagtgtctctgttgccaatgatatggtcatttacctagaaaaccctaaagactcctccaaaagattcctagatttgataagtaaattcagtaaagtctcacgttacaaaatcaatgtatgcaaattggtagcctttctatacatcaacagcaacaaagctgagaatcaagtcaataactcaatcctttttataatagctgcaaacaattttaaaatacctaagaatgtacttaaccaaggaggtaaaagatttctacaaggagaactacaaaacataactgaaataaataatagatgtcacaaacaaatgtaaacagtttccatgctcatggattggaagaatcaatatagtgaaaatgaccacactatccaaagcaatctacagattcagtgca

SEQ ID NO: 474707 - DNA, 559 bp, Homo sapiens
ggcctgacctgtgaatttcagacttgccagctcccacaattgatgtttgcgcttgggatttacccaccatattgtgaggaagcctatactacatggagaggccatgtgatgttccagccaacagtaccgtgtcagatgccagctgccagccagcatcaactccagacagatgctatctgtttgccaagtcctctggggatggtccctgcctcttcttggaagagacctctcttctgtgggctttaactgctcactgccttctctctgctgttgtcttttgtgggtgcaccttggctttctgtgtgtccattatccttcgtgggaattcaggctcgtttgagaataaggaccgccagcatcatcctgataccaaagcctggcagagacacaacaaaaaagagaattttataccaatatccctgatgaacatcgatggaaaaatcctcaataaaatacttgcaaaccgaatccagcagcacatcaaaaacttatccaccatgaccaagttggcttcatccctgggatgcaaggctggttcaacatatgcaaatcaataaac

SEQ ID NO: 474708 - DNA, 667 bp, Homo sapiens
tcccaagtgttatgggtggaacctggtgggaggtgattgaattatgggggtgggtcttttctgtgctgttctcatgttagtgaatgagtctcatgagatcacttgtgcaggagtttccctgcacaagatctctcttggcctgctgccatccatggtacatgtgcacaatgtgcagagagcacccagtgaggactctgctggactgtggctccacctccatggctggtgcaaagtttgctgccccttggctgcaaacccctccatagcttcccacttacatgcctgtacttctgtgttccatcactatgcacctgcggctgctaccactactgcttctgctaatgctgtcgttaaaactgatggctaccacgcgtggtcgattatgtgctacgtcttgtgcaaggtattctatgtgcttacatagatgtttacaataagcatgtgaaaagggtacatgtgcacaatgtgcagaatgcatacttatgtttgaaattgaatattaagatattaataataaattagaatttaatttatgttaatttcatggacactgttattcatattaaatgtgatggtaacctatgtaattatgtaataattatccatgcaaatatcagtgacaccagaaattatattaaaggactagttagttacttagtttttaagg

SEQ ID NO: 474709 - DNA, 621 bp, Homo sapiens
gagagacagtgctatctacgaggaatgggctttccacacatggaatctgccagtgcctggaggttggactttctagactccaggacgatgagaaagaaatgtttgttgcatacccagtttacagtacttttcattgtagcagcacaaatagatcaagatacccaccctcagatcctggcaaattctgagctgatcctgaactgggtagaaaatgtgtcagcaacctcagctcccctgcatgagggggtctggaagaagccttgctgctatggatacagagtcacaagcaacaagaatgagccctgcctcaatccctctgagggaccgtggttgcttatctctcttgcttctctcttccagcccactctgctcacgtgggagctcttggagggctgcatgggagggtggtgtggcccagtggaagcagccaaagattttgagtcacactacctgaaacttaaatctcagtccatgcgttaaagttcatgatactgacttacataagagatctgaagtgtttttaaacttctctaattctaagtaccacagtgagttggtgccagtcacagtagaatagaagctgtaaaccaggagggcagcaaaggatcggccaaatgacac

SEQ ID NO: 474710 - DNA, 695 bp, Homo sapiens
atctgagtgaccaaagaaaggggtcgctttctctgtgctgggctgcctacggttggaggatgggtgacacaagcactcccatggccactagagctgacatctcactgggtcacgttcgctccaagtccactggctgtggtcccactgcagcaccaggacttgcccccagttttcttcatttccttggtgctcttcacgaaaagccaaaggctaaggatcctcgatggaataacggctgttttgccgtgtcctcacttggcagaagcagggaactctggtattttcaggctcttataagggcactgattgacagagcaggagtatcaccatcttggacaagcactgtcattttaaaaatcaccttaatcaaataccgcctaaatccaaagggcatcagcctaatggctaagggaaatcagagttcctataagcaaactctaactcataagacccaggaaagctgagctagctctaagagttgaccttgatagaagactgcagactactgagtttctctattgaaatgatggctcctattgtttaaggactgaataccactttatttcacttgtatgcttcagaattggaatttgtgaacacaacttatttccttacaccaatgtctggggaaaaactaaatatgccttgatctctcataaagaggtggttttaaagagtgccttgccatggactga

SEQ ID NO: 474711 - DNA, 629 bp, Homo sapiens
gcggcagagggctctgagtgttagaaggaaaaccaaaaaccagaaagcaataacatcaacatcaacaaaaaggacgacaatgcaaaaactccatctgaaggtcaccaacagcaaagaccaaagggaaaaaaactggatagagaatgagtttgacaaattgacagaagtaggcttcagaaggtgggtaataacaaattcccccgagctaaaggagcatattctcacccattgcaaagaagctaagaaccttgataaaaggttagagaaattgctgagtagaataaccagtttagagaagaacataaatgacctggtggagctgaaaaacacagcacaagaactttgtgaagcatacacaagtatcaatagacaaattgatgaagcagaagaaaggatatcagaaattgaagatcaacttaatgaaataaagcgtgaagacaagattagagaaaaaagaatgaaaaggaatgaccaaaggctccaagaaatatgggactatgtgaaaaggccaaacctatgtttaattggtgtacctgaaagtgatggggagaatggaaccaagttggaaaacacattttgggatattatccaggagaacttccccaacatagcaagataggccaacattt

SEQ ID NO: 474712 - DNA, 524 bp, Homo sapiens
agtccaggaaaaatgaggtagcatgaacgaattgaaggatggtagatgcagaggattttcttgccaccgaaagtggctctcagcagatattccctctatggaaggcaaggtcttcctatatacaagacagctggccttctggagaaggctggagaaggggcagagaaatttagagagacatcactctaagacagggatgtctaaccctcaagctgtgaaccatactgtctttattagtaacaagtcagaaattgctattcaaaagaataatgcaagttttggtttctggctttataacaaattggaagtcctcactgtcatcttcaagatgataaaaaagctgaacaaattgaaaatcagcatttattacatccatcagagatctgaggtcacagggcaaactgctgcccttcagactagaaagatagacgggggagtacagagcagcacaattttccaagagcagaagccctggagcagttgaagccagtactgaaatagtctgtgtcttgcaagtctttcag

SEQ ID NO: 474713 - DNA, 533 bp, Homo sapiens
ccctcaagtataggacatctctactccttccctggcaaccgatcacatgcccattaccatcccattaaaacctaatcacccttaccctgctcaacgccaatatcccatcccacagcacgctttaaaaggattaaagcctgttatcactcacctgctacagcatgggcttctaaaacctgtaaactctccttacaattcccccattttacctgtccaaaaaccggataagtcttacagattagttcaggatctgcgccttatctaccaaattgttttgcctatccaccctgtggtgcccaacccgccccagtctcattccagacgccagaccaacttaaactgtgccccaaaaaaacctatcatccctactatattctgtctagtcatactcctattcaccgttctcaactactcacacatgccctgctcttgtttacactgccggtttacactgtttctccaagccatcacagctgatatctcctggtgctatccccaaactgccactcttaactcttgaagtaaataaataa

SEQ ID NO: 474714 - DNA, 659 bp, Homo sapiens
tcattctaaaaggtgaaggacaacaagtttataatgcgaacgaatgaaatactctgtacaaagatcaaataaaccacaacaatctggtgaaaatgcaaacaacaaagctgaagccagtacaactcagctgccagtgtggctagaatataagcaggcagaaaaatgtgaaaagagagactggcctagccccctggcctacatctttttcccatgctggatgattcctgtcctcgaacaatggactccaggttcttcagttctgggactggaactggctctccttactccgcagcttgcagacagcctattgtgggtccatgttattgttcaggctatttcagggaagccttttgcaaatataagaagttgccataagacctttaaaaacagtcgctggctaatgaatgcaatatctgtgaaaccacttgtactactctgcccctgtagagattaatgttactaaacatactgtactatcatgagaggaaaagtgatgtatgtacgcgtgtatttatcatatataaacttaatgctggaatagctgtattaaaacttgaatagcattttcccaagatgacttagactttgtgtattttagcaactttctggttttatgtcactttcaggtagctgatacagacttccgaatgttaatatta

SEQ ID NO: 474715 - DNA, 750 bp, Homo sapiens
agctcctatgcaacccaaaaggacagtctcactcccaccatgcttcctccaacagcactgagtttgtttccaggcagtgggcgagcaggactgagaacttgccccaggctacaagccccccagcttagaaagcaagcagggctttcaggttttgtccctccctgcctgcccacttccatactccagatttatcccctcccctgggttctgtccaggaaacttcatgttcagttggaattgttacaaagtttagctggaggtttccttctccctgaggtctttttcctgttcctttggcagccctccccaaggacccctgtgagacaaatcagaaatgtcttccctgaggaccaagagagcttcctctactcttgtatttcactgacctctctaaattatctcagctccagaaatctaacagagaactcaacagagaagtcacaggaaatacctgaggcactggagaacaaggaaatgaatggcagatcatctgagattagccaggagccccaagggactcagtatggtagcgaaaggctaagtgggagaacatcagtggtttacatccccagaagatttagtatcaagcaaggaccagaaagggaaggggagaaacgggaaaggcagactcaacaagcaattgatgaatactgaccctatgtaaatatggtttgggaattctgagaaacattccgatagtttgttcaagtaaaatattaggtatatagtaggttgttaataaatatttgt

SEQ ID NO: 474716 - DNA, 504 bp, Homo sapiens
gaatgagaagcaggggatggcacggagagcctttcctgagggctccctccccaacgatcccacaccaccgcccccccgcccccccgcaccaggcccgactgcaacgctggtgaatcacatttcaacaccagctttggagggggcaggcatccgaaccatatcaccacccctgagggcggggggatggaggttgcactgcagccagagggcaggaacaggttcgctcacctggggtctgctctgtgggctcttctgggggcacccattctccctgagtttccatacccagactccatccagccgtcatctgtgggtcctggggtggggcccatctgcccgtggcttcacctggaccatggaggacaaccttgttttgcacagcgtccctggggcggctgctggaactgagcacaacggattcatattcatttattgaaagatgggctccatattgtataactggaaggtatggccacagctaggccttgtcagaaacacacaacc

SEQ ID NO: 474717 - DNA, 686 bp, Homo sapiens
gggcgggtcccagaacacagaggggaagctgaagtgatgaatgtctgttgagcgcctgctgggaacgtggcatgtggcttcatgcggtgttcccttccaccggaatcagacccttggcagaaggtccgatctgtccccccctgtcacagccccagttctggaactgggcaaacacatctgcttgtcaacatttgaagctgtatctagcccgaatcctagtgcagagccggtcttcaggctgcacgtgactgcaggccaggctgctattaccagtgacacaaagctggctcaggctggttctgggcagccaagcctgaactcagatgttcctccatgcaatcgaggaagtgcaatctggcatctcacccatgcatatgggcatcgctcccatgactggacatgcggctgctgccaatgctgccagcgtggcacccgattttcattgcaacgggagaaatccaccttgctcatgatgtgagcacgccactttcagacccgggctggtacgagctcagctttgcactgcccttctccctctctcacatgggggaggagcatttccccacaagccttgctgggccaactcagtccctctcccaagaaattatcccacatctctctttccaatactttagtcattatagtggttcccacaaatggtgctgatcaattgaacgtctctctgc

SEQ ID NO: 474718 - DNA, 693 bp, Homo sapiens
acacgggggaatcagggtgtgggaggactcggctggtcccaggcatgtttctgcccctcacctcagtgtccactctctgctcaaactgccctatcctctcccatgcaaggaaactccccactgccctactccccttctggaattcccagcccctgatgggggcacattgccctccagtgggtctcactagggctgttctgtggacccaggtgatgaaggagcagagcagaggctgcaagaaactggaagccttgggctcccctccaacagggcctgtcaaccttcctcgtggagcagagctagaaggaagtcaggtgctttgggtgtggagagctgcccccatcttgaggacttattctacgccgtgtaccaacccactcaacactagtgtggggacagggacgccgaccttacatgtgaagaagctgaggctcagacatgtcatcggctttgcccggtgtcactcactgagcgagtggtcaggcaggaagctgaacccaaacccagctgattccaacgtcccaggccttcactttggcatgacacccaaatgcaggaggccccagcaacgatgtggtatgggcccttgtgactccctgaggcccatgctgccaaccagcccacctcacgtctgagggcgactggcacgtttgccaatgttgcagacaggaggaccaggacctctgccctcct

SEQ ID NO: 474719 - DNA, 812 bp, Homo sapiens
ctgcacagtaatgccctgctggcctaaggaaccaagagtggaggtgcaagagctgtcattttcctttcaaaccgagggcggttttgtcacttccccagtcgatgctgctggtggcagcgtggggtgctggttgagcccacagaagctggcggcagctcctggatttgactctggctctgctgagcgccctggcctggaaggagtctctcaacctctccacgaggctgtcatcctgctgctgagtgcacgcaccaagctcatctgcatcatctccccaggtccccaggcccccttgggtggggcggcctgggacagcggagaggctggaggcgctgtgacccaggccctggtcaggggccagccaagcttccgcaggcccagtgtccggggcaggaagcgctgccggccggaggtgatcaaggaaacggagacttccagggaaggaacattcctgaggtctctcagtgaacgcttggcaagctagggtgccccctaggcacacccccaacacctctcccaccacgtgtgttccacagacgtggactcgcggccgccatggacaggacgctgtcctcagtgctggcacatctgtgaacaaggctcgctgccacagcctgcaggcgctcaccctcctgcgagggagaggaatgtgggtgctgaggctgggggtgagaagatccaggcacaatattttcaaggtccagtcacgtcataccatgtgtcaataccccattcctttttcatggctgagtaatattccgtggtgtgaatagaccacattttgtgtattccttcatttgttgatgaacaat

SEQ ID NO: 474720 - DNA, 1995 bp, Homo sapiens
tcgactttaaccttccagcagtgtgagtgagggccctgaccctagaatcaacgcccaaagagctgtggcgctacagcgggcggggacatggggtgcgcatgcgtgcgggggggtacgcgtgcgtgcaatggcagcgtcctggccgacggctagtagcccattttggataccgtcctcgctgcggaaagttggggcaacctgttgctagtctggtcgttggtgacagcgaggcttccgcgctcgctgctggtgagcagccccggcgtgccccgcgggctggaagaggcggcggcgtgatgcggcccgtggacgcggacgaggcgcgggagccccgcgaggagccgggcagcccgctgagccccgcgccccgcgccggccgcgagaacctggcctccctggagcgcgagcgcgcccgggcgcactggcgggcccgcaggaagctgctggagatccagagcctgctcgacgccatcaagagtgaggtggaggcagaggagcggggcgcccgggccccagcaccccgcccgcgtgcggaggctgaggagcgggtggctcggctgtgcgccgaagcagagaggaaggctgcggaggcggcgcggatgggcaggcggatcgtggagctgcaccagcggatcgccggctgcgagtgctgctgagccggcgaggccgcgcgggtctggagcggagcgcggcggggagtgtcccgcgtggaaggcgctgggtaggcagggaggggagcgcagagccgtgccacgctctccgcggagttggtttcattcttttttcataggtggccaactgacgaactgtgttcacctgataaggagtcgtggctgcttggacaggctcaaaccaagagagcctttcgttttgtctcccctgtttttctgcctgcgttttctccacattagccactcaatttccagtaccatcctggcggatgacttcagcattagatggtcaggtgtatttttttattaataggcgcattcagtttggaaaagacagcttttcattaatgtcccacgtaaaggaatatggcctatacagtacgtacgctgctgcgtggtcatatttgttcctgtgatcttattgtattttcaaagtttggaagtatactcgtgtgctttgctgtttttttatgcttcctggaatttggggactcatgagagacttgaggttagagttctgcaagtgagaagacactacatggttgcagctgccacatgaagaacccaagctcctgtcaaagttgtgaatgcgactttggatgagattaagaaggcccagtggacggttggtcttgaagagtggcagtgtgtggatttgaggacctctgcagaccatcagatcaaaggagggagagctgttttgggtgttttgttttttttgtttttatagcattttgctttttcttggaatgtaattttcctatggcatgttaactggtgcacatcgtgtaacctgtctggtgagcaacctacaattgggatgagttctaggtacatgtgtttgctgactttggggtaaacaactttgttataatacagtctctgccacagatgcatgtgacctcttcaggggcccagagtggctgaggaaggaaagcttcaagctggccatgggggtcccaaacagtcattccaggcttagatgatgactagcctaggtcatcagagcccagactccacagagactaaaatcagagctctgtcttgttatgataaatttcatttgcttggaaaaagaaatgctgaaagccagtgtttagaatctttgtgcagatgaccaaagcaattgacttggccaagaaaaggtaaggtaaataaacatttttcaaaatgagtttctccttgatagtggtcactgtcaaatggaggagaattgcttctgactcacgagttgttcaaagcctgtagcccagggtggggtttgagctgcagaagaagaagaaggcagacctagagtaggaaaggggtgcctcatgaagccata

SEQ ID NO: 474721 - DNA, 1325 bp, Homo sapiens
accccgcccaagcattgcatacagcagcatcaagcatgggcatgaatgaatggatgaaccaacaaacgaacaagcgagaactggagagaacacaggaccagcgcagctccccctgcaagggtgaacgcagccgtggggagctgccacttgacgtttatttctggaacgcagcacactggcgggtgctgcacccacacgcgtgctgtcagctcctggtgccgcctgctctgcggccccgttcacagagaatgacagtgccatcctcctgggacaccaccagcaccctggcatcaccggccctcatcccagcactggaatgtaagctcctccaggccctcaggcctcttgcccagcccagcacagcacagggcctggcagaggtgacgccctgcaacgctgatgctgaatcggctgcctgtggggctcctagacctactcccgtcaacctcaacccccgctctgccaaccaccaggccccagcccatgtgcttctagaagtctccttcccaggccaggcctcctccctggagcctgggtggtcacccactcgtgtgtgcaaagccctgcaggctgccctgggctttactgtctgcatggcccctgatacccagcaggacacacatgggccctcggaggtttgcagttaccactaataacagcagtgcctgatcctggcagcctcattaacgacggcacctgatctggggtggccatcggcacagcttccttcagtttgacggccccattgcatgctggatgacgagggatgggagaggggttgagggattgttaagtggacgacaggaagctccctgtctccctccttgtcaattactttccaggaaaaggcctttgacaactccccacatgctccccactaaggtaaagggttgaaaaactcaaggaagcatcctttagacaatgtggcaggaaccacagggatgttcaccaaaggacagaaaccttcatcccttcactcccacttacttacagctccctctcacagatgcaatgaattcagcccagagggtcctctgaatccagggatcctccaaggccatggactgccccacaaggggagaagggagctccaggggcccggggcccaccactcagttcacacctcaggctgtgtagacaaccagaaccccacccacaaaccccaaaccccacacagccggcaccagcgggcctgcatcttccggctccagcttcctcaaggctctgccctcaagtaagcaggtgttttgtgctaagaattgaaaatcagcatccacgaatttaacgcttaggtaaaacagggaagaagtagttataccagaagg

SEQ ID NO: 474722 - DNA, 588 bp, Homo sapiens
tcctgcagcagctatgacgtcaggcggctgctgtgtacctggctgtggggaggtgtggagggagaggcgcgagcgggaaccggggctgtgtgtggcgcttgcgggccagctggagttccgggtgggcgtgggcttggagggccctgcattccgagcagcaggccggccctgccggccccgggcaaggagggacttagcacccgggccagcggctgtggaggctgcctttccgcggggcagggctcgggacctgcagcccgccatgcctgagccttcccccgactccgtgggttcctgtgctgcccgagcctccctgacgagcgcgaccccctgctccacggctcccagtcccatcgaccacccaagggctgaggagtgcgagtgcatggcgccggactggcaggcagctccacctgcagccccggtgcgggatccactgggtgaagccagctgggctcctgagtctggtggggacgtggagaatctttatgtctagctcagggattgtaaatacaccaatcggcactctgtatccagctcaaggtttgtaaacacaccaatcagcaccctgtgtctagctcagggttt

SEQ ID NO: 474723 - DNA, 2657 bp, Homo sapiens
gtcgtccacagccagtgagtgctggagccagggttggagcccaggtctttgccagccccgcctgcagcatctgcagtgcagagacgcggccacgtgggcacctccatggctgctgtaacagatgagcacaccgaggctcagagcaataaacattctatccgctcatggttctgcaggctgtgcccacagcccagccctttctccacctgccactcctctccacggtggagagtgtcactatggatgatctccccagcggctggtgtctggaggcctcctcagtggaggatcagcagcacggggcagaggtccgctctgtcttccactgtctcagcagctccggctgccgaatgggcaggcaccctgactgctcctgcgctgtgtgctcccctgcccccatgcgctgccccactgtgcgctggcccctgtgcaccgtcccactgtgtgctggcccccgtgtgctgccccactgtgcgctggcccctgtgcgctgccccactgtgtgctgcctcactgtgcgctgccccactgtgcgctggcccctgcgcactgcctcactgtgtgctggcccccgtgtgctgcccccatgcgccgccccaccatgcgtgcctcactgcgtgctggcccctgtgcgctgtgccactgtgtgctggccctattaagcccagcatccattagctattcttcctgatgctgtgccttcctttgctcccccgtcccgacaggccccagtgtgtgttgttcccctccctgtgtccatgtgttttcatcattcagctcccacttataagtgagaacatgtggtgtttggttttctgtttctttgttagtttgctgaggataatggcttccagctccatccatgtttctgcaaaggacataatattgttcctttttatggctacatagtattccatggcatatatgtaccacattctctttacccagtctatcattgatgggcatttggattgattccatgtctttgctattgtgactaatgctgcagtgaacatacatgtgcatgtatctttataatagaatgatttatattcctttgggtatatacccagtaatggaattgctgggtcaaatggtgtttctggttctagacctttgaggaatcaccacgctgtcttccacaatggttgaactaatctacattcccaccaacagtgtaaaagtgttccttcttctctgcagccttgccagcatctgttgtttcttggctttttaataattgccattctgactggcgtgagatggtatctcattgtggttttgatttgcatttctctaatgatcaggaatgttgagctttttttttcatacgtttgttggctgcatgaatgttttcttttgaaaagtgtctgttcatgtcctttgcccactttttgatggggttgtttgtttttttcttgtaaattgtttaagttccttgtagactctggatattagacctctgtcagatggatagattgtaaaaattttctcccattctgtaggctgcctttcactctgatgatagtttcttttgttgtgcagaagctctttaatttaattagatctcatttgtcattttttgcttttgttgcaattgcttttggcattttcatcataaaatctttgtccatgcctatgtcctgaatggtattccctagatattcttctagggtttttatagtttcaggttttatatttaagtctttaatccatcttgagttaatttttgtataaggcataaggaaggggtctagtttcaatgactagctagttgtcccaccaccatttattaaatagggaatcctttccttgttgcttatttttgtcaggtttgttgaaggtaagatggttgtaggtgtgtggtcttagttctgacttctctattctgttccataggtctatgtgtctgtttttgtaccactaccatgctgttttggttactgtagccttgcagtatagtttgaagtcaggtagcgtgatgcctccagcttttttatttttgcttagtattgtcttggctatttgggctcttttttttggttccataggaattttagaatagctttttcctaattctgtgaagaatgtcaatggcagtttaatgggaatagcatcgaatctataaattatgtttagcagtatgggcattttcatgatattgattcttcccatccatgagcatggaatgtttttccatttgtttgtgtcctctctgatttccttgaggggtgggttggtttctcactgccacgaacatctgttggaattttgactgtgataggattaaatgtatagattaatgggggagcattaagcacctttataatatcaaatcatctcttccagaaaaatgatatcatttacttttattcctgtcttcttaaaaggtttttagaaaaggttttgctgtgttcctgcacatctttttctttagagttatcccagggcaactgtcactatcatttcctgtgggtgcctgtggagatattttatataacagtcatgaatatgtatacaacacccacgttttttcacaaatgttgcattttattcaggcttttctgctcctcattttctttcccttttactacatgagaacttagctctattttttattttatttatttatttatttatttattttttgttttttt

SEQ ID NO: 474724 - DNA, 780 bp, Homo sapiens
agcagctggggaccttgcgttgtgatgtggaggtgaggaggaggtgaggtggaggtgaggaggaggtgaggaggaggtgaggaggaggtgatgtggaggtgaggaggaggtgaggaggaggtgaggaggaggtgatgtggaggtgaggaggaggtgaggaggaggtgaggaggaggtgatgtggagcctccatttcgtcacctaaaaacaatgggggacatcacaggcccccaggacattgcatgggttcagggagtgacagccctgcacggggctcatagtgcacactcagtggtagcgggcacagttgctagtattgctcctgaaagggcactgtactggggtgaagacgtggacaccctgttccaggaatgtgcgcacattgagaagctggcatctccttcaggaaaggccctggcttttcccactgctccctgtaggccacggtcccaggccctgcagcttcctcctggtagagtggggaggcctgtgctgagctgccagggaaaccacagcctctggaaagcaaaccccaagccactggcgaggctccttcggcccaaccacgggagtgtccgagcaaagatccagccctccacctcccttccgaccccccacagacagagccccgtccccaggaaggcctgaagaggggcatatatttaagcccctggttttagcgtcaggtttttgttttaaattgtggtaaacacctaacataaaatttaccatcttaaccatttgtaagcatatagttcagtgaaattaaatacattcacg

SEQ ID NO: 474725 - DNA, 1350 bp, Homo sapiens
tctcatgttgaattgtgatccccagcgttggatgtggggccggtgggagaataagtgacgcgtttcatctggaggagacacagaagggtccgtttccaccccatgactctgcagatgcgccactgacagtgtgtggtttccttcttggcagcgtccagctctccggcaagtggctgcagatcaaagaaagcagcggaaacctctaggggacacagcctcccagggactgtgaagctgaacagggcgtggcgggaggagccctggctgacagaaatgcaccccctccccttttccagggtcaagccccactcccagccctgtgggaggagggagcaggaagaacccagtgtgtggcgccagagtgcctggctcgaaattaatcctggttcccactgtgtggccttcggcaggtcattcgccctctgcaagccacccttttctcctctgtaaaactggagttttagcacccgggactgaggggcctggcacacatgggtgctccacaggtgccagtttcttcctcggtgccccctaaaatcagctgctcaagccataccagaagtatggtctatcagaatgtgaacttcagtgtcacagctgggtttggctgggatgggtatggcgatgtgggaagaaacgagaatagagggatggctggggcaccttgaatgcttcctggcggcatctggatttcaccctggaggcagcagggggcacaaaaacgttgtaagcaggggcaccatttgtgtcctgggcaagcagtggtctccgagttggatgagctcactgtacaaatgtgaatggagcactgggctgctgactgggcatgggtttggcctggtgcagggatggctgagctggggtcctgtgcaggccactgccctcctctgccctgagtgtccttgtctggagaaaatggagatcacccaccccagctccagcgtggcaggaggggcagctgagtctgagtctaggctgaaggcaggtgctggtgatgaggagaggcctgagctccgggggcggaggctggaggctgggttggctgtgggtgtgaggagcctgctgttcctgggcctccagggaaggtgcttggtggaccctcagggaggcgagtgccacctttggctgcacccatacctttaccctttggtgaatgcgcggctactaggagttctgcctccctgaatttgctgctctgaatggactgcaagctaggacacaggtaagtgcctttgttaaccgtgagatgccagcggctgggctctggcgtgcgggcctgagtgctgctgcttgccgccaagtgcagaggttctcggaggctccgctggctatttggcacttttccatttc

SEQ ID NO: 474726 - DNA, 962 bp, Homo sapiens
ccctgagggcagtggctgcctactccagtggccgcccacctccgaaggacgtctttggtgcagctgagctgtgggagagtgagggcaggcgtgagaatgtgggagtgtgccagggtgctgcattcctgtgcgagcgatggcttccgtgtgttttggcagggctacgcaggcccaagggccctcagcgtccaggaaggccagagttcagcccagtcagcccactcggccccactgttcgggctgccctctgagcatgtgtcatcctgccagggtccctcccactgcgacctgtcttcctggcagctgctgttcaggagttctgcaccccgccctgggtgtcctgccaaagccaaggtggccgtgcgactcccaccctactgtcacaacctgccaaagaggcactgctccaggcagctcctggactcgcccagatgcagccagaccctctgctgcgctcactgcatcgtcgtggatgtagctgtctctctgcctttctggacatcctgactgtggcagaggtccccagccccacgggaggtggggtgggcagggtcggggggtccatgtccccttttcttagctgggcccaaagcacgaacacccacgggcgtgggctgggaacatcttttttttcctgagaatccctttctttctgaattcaaaagcgacatttgttcataataaaaataagattggaaaagctaggaagataccaaaattatatgaaaaaaaaaatcacaaaatcaccccatccagcccccctgagacgaacgctagtaatatgttggtgaacagtcctctggctgtttttctgtgcaactttcaacctggttgggaccaagctatgcatagaattttgtgttgggttctttttgtttaacatatggtatgccatcacctagaattatgtttatggtttctttctgattacaaaattaatatgtactcactgtgaaaacaaa

SEQ ID NO: 474727 - DNA, 1100 bp, Homo sapiens
cagctccagccatggctaaaacgggtcaaggtacagctcacgttgtggcttcagagggtgcaagctccaagccttggtggcttccatgtggtgttgggcctgcaggtgggaaggagtggagctgtgagaagagggagaccatccgccagaccacagaatggtaaattcactgaccagcttccactgtgtgcctggaaagtgcaaactctcaatgccagcctgtgaaagcagccatgggggctgtacccttcaaaaccacagggcagagttgcccagggccttgggagtccaccccttgaatcagcgtgtcctggattatctacgtttcaacaaggtagacaatgagatcaataaagtccaccctggaaaagtggcaggccattttgttgaggcatggaaaataacagaccagttatgcctaaaatgggacctggggagtctgctccaaacaatggggccagtgagaacagatcttagggtcaggaaagaacttagcgtcgttaatttcaaaactttgttacacaggattggaggatctgatggttttataagcgtctggtgtttcccctgcttgcactcattctctttcccgctgcccctgtgaagaggtgccttccaccacgactgttctagcttctgcatcaagccaagtccccctccttgtacctgtcagagaatggtcagccaaaaatcaaataagcacatctcatttttattacaacaaattccttaggttatttaaagaagaccgatactaaaaattaaaatttcattcggaatttaacctttcatttttttttattttttgcctcatgagaatatctacatcttagaattctgctaagaaatcaaacatctcattgaataaactaatgatgataaatcacaaagctataacaaattttaagatgtcttcagaccctttcaatgtatgcagtgaggactatttacacatggacccaaaaggattgtcagtaatttaaaaataaagcaaaataaaacaaaacaaacctaaaactacatgaggcaaatacttactatctgtctttattattaatgaagtagtagtccataatccttgatatgacactaattactac

SEQ ID NO: 474728 - DNA, 566 bp, Homo sapiens
ctttatgaagctggggctgtgaacctcaagttcctctcctcaaatatagttactcttcgtatgaggacctgtgaactaaaaagacaaggacatttcagagatcttcacagcagcccctcccatcacaggcctgggggcctagggaggaaaaaatggtttcatggaccaggtcaaaggccctgctgctctgtgcagcctcaggacatggcaccctatatcccagccactccacctccagccatggctaaaagaggccaaagtacagctcagggaattgcttcagagggtgcaagccccaagccttggtggcttccatatggtgttgggcctacaggtgcacagaagacaggagttgagctttgtgagcctctgcctagatttcagaggatgtatggaaatgcctggatgtccaggcagaagtctgctgcaggggcagagccctcatggagaacctttactagggcaatgcagaggggaaatgtggggttgaagcccccacacagagttcccactggggcactgcctagaggagctgtgagaatcctccagaccccagactggtagat

SEQ ID NO: 474729 - DNA, 744 bp, Homo sapiens
cagacagtgcctctcaggccacatctgtagcatagcagcgccgggaatggcacagtgccccatgctgtgctctgcagcagcggctgtatggacacgtgctaggagactaaacgtggtgacggatgagcaggcatccacgggagcgtttccagtttctaatttgggtacctggtgggatggtagaatgaatatttgttttggacaaattgacttgaggttcctttgtaaaggaacagaaaagaataccatcaacatcaacaaaaaggacatcccctcaaaaactctatttaaaggtcaccaacatgaaagatcaaaggtagataaatccacgaagatgaggaaaaatcagctcaaaaaggctgaaaattccagaaaccagaatgcctcttctttaaaggatcacaactccttgccagcaagggaacaaaactggacagagaatgagtttgacgaattgaccagaagtaggtttcagaaggtgggcaatagtaaactcctccgagctaaaggagcatgctgtaacccaatgcaaggaagctaagaaccttgaaaaagggttagaggaattgctaactggaataaccagtttaaatgacctgatagagctgaaaaacacagcacaagaactttgtgaagcatacacaagtatcaatagctgaattgatcaagtggaagaaaggatatcagagattgaagattagcttagtgaaataaagtgtgaagacaagattagagaaaaaagaa

SEQ ID NO: 474730 - DNA, 515 bp, Homo sapiens
caatggtaattgtgggacttaacaaagagtgagtacagctgaaggagccggggagcagaaagtatatgcatcaggtatgaggaagaaaatagattttggaagttatgagaaatgtagagacttggcatccgtgatggtctacggggcttccgaggcgacaggacagtgtcagtcttcagccactaagccgagaaggagtcagagagccttgggccagagttccaggggctctgggagtggctgccaggaggaatcctgggctgcaggcattccttggcctggtggtcagatttctggcacttgtagcaagctcctgggggaggaggttttggaggaacacctggctgctgcagttcaggcgtttggaagttgttgtgtgctggagatgtggctgggggtggaggagcggaggctgaggaagaattgggaccgggctcggcctggcgaggagcagcctggggaggaggggagaggtcagattggtctgtagaaaaggaagattagaaagactcagc

SEQ ID NO: 474731 - DNA, 513 bp, Homo sapiens
taagtcgggatctactgctcaatatgctcccagtgggggtgctcagcagtctgctgagtcacagccaccagctagatcagctcagacttcaggaacttgaggatgtagttgtagtttttatgcaggaagatggtgctcagaagcacctggtcaaactcaggcttgctgtgcttaggccctgcgggatggagaagacagtaagcaccatggaaaagttgtgtcaaatgatggcctctgagcaggagacaatactctccccttcaggtatcagcccatccagcacatcctgtatcagagtcaaaggtcttctcctgatggtgctcagcgatgatgtcagccagcaactgacactcactctaggtcagcttgacaaaggtactgacacagtgaacgtaggcatcagtcttcatgtccaccatctctcctggccagcagcctatgcttgtcattcaaggcctcggacaggtgcttaactttgaaattattctcttgaccttccaaaggaaggaggtt

SEQ ID NO: 474732 - DNA, 706 bp, Homo sapiens
atatagatttgtctttggagcctacttgggtggcatcaatatttgctttcagatggataagtatatccacaaaaagaaaagtggtgatatctatacattaaacctaaaatggatctggagaaggttctttatgaatctcaggccattgtaacaattgaaaacccagcagccattattctccaggacagctcctcctatcacagacccagagacctaggatggaagaatggtttcaagggccaggctcaaggcactgctaccatgctcagcctcaggacactgctccctgcatccagttgctccaactccagctgtggcttaaagggccccagatatagctcacgctgccacttccgaaagtgcaagcctccatatgccttggtggttgctatgcaaaaccctgctggggggatgaagcccccacagagacactctaccagggcagtgctaaggggaaatgtggagttggagcccccaaacagagtccccactggggcagcccctagtagagctgtagaaatggggccactagctacagatcctagaatggcacagccaccagcagcttgtaacctcagcatggaaaagccatgggggcagagctgcccaaggccttgggaacctgtccaggacactaatgtgcccaggatgtgggacatggacccaaagattgttttgaaactttaagatgtaataactgccctct

SEQ ID NO: 474733 - DNA, 555 bp, Homo sapiens
gtgtgtctgtgtggggtgttgtggtctgcaatgacggaaggactatctcaacaggcatggaggcgaatggtaggagatcctgtcacagaaaagagaccagggtctaacacgggaagcttcaggagacctgcaacaagaagcacagactctttgccagagcatgataccaacttggacagtgatgaatgtcagctgggtgtagatcatatgctgaacggatacagttacaatgggatgagaggtgcagacagtgaatcaagacagagcggctgcagatgtgtgccggccatggataaaggagagcatatccatgcgggggtccccagcagacttttagactgccatggtgcctggatcctcagctgtcacactccacagagagtgtcggagctgttggcactggtgagaagcaggatgctggccaggatggacaaacaagcagctgggaatggcagctcctatatttcagccagcaaaagccttttcaaagcctactttgcataagacagttccgctgaccacattagagtcacaggggaatagttacctctggaa

SEQ ID NO: 474734 - DNA, 779 bp, Homo sapiens
ggtggagccgcacgaccacatggcaaagccacaggctccctctcgcctagcaaaagaccctattgaattttctatgttctcatcccacttccagccctactgttgcggtggactcactagtgattgtcctgtctcccctgcctgctgccaagttggtaaactctacagacacagtgtgctgcagagaacatttccagacaacaagagaaatagctccgtgctagtactcagaggagagccagggctgagagaaaaaagcagagccctgatcagaccattcctgaagactgaaatcaccctggactttttcatttatgtcatccaacagctctatgagggcagggacttgacttactctctgctgtgtcccagtgtctacgtctttaactcagcacaatgggctgctgccactcatgtgagcttgctttttcttctgaagattattctgcagttccattcaaatggcctctgtatagttgggcgtctgatgcctgatgctagacagagaagggctccgtggctaatcgcctacattcctgtgaagactgaaggaaaagataaatttcgctaacagtcaacatttcagggaaggcatttttttttaacagaaaatggtaaatatctgaaaatatagaaacctcaggcagtttgaaatttgcaaggaaggagtgcctggcagttcaactgctttaaaattccacttccgaagataccatatgaatctaaataaaacctgaatgattatggtaattattcacactaataaccttgctctgaaa

SEQ ID NO: 474735 - DNA, 563 bp, Homo sapiens
tctgagagctccatgagtattgtgtatgtgtgtgtgaagagggaaagtgatgtgttaaggagctggacaaatatcctgtcaaacatccatgattttttttattctcggaaatgttgccttgattctagaaattatgactttgaatacctactaacatgtactgggcacttctatgtgcccggagctctgccaagtgttttacattcattatctcatttgacctttatgagggccataggaagtagatgtgacttagagatgttaaataacacctctattccagcagacaaatatgtttccttcatgtttctttgcctgcatgcagcaaggagcatgacttcaaagtctcagatctcgcatagaaaaagaaaatatgaagataggcaatgcaaacatcaactataatcttatgcccaaatattactattattattgggcatatttttcagcagtgttttttctatgcatgttaatgtatacatgtgtaattttttggttctgttttattgcttgcgaatgtattatattaacagttttctatgcaacttttctcaccaaagcat

SEQ ID NO: 474736 - DNA, 664 bp, Homo sapiens
gcactagcagaagtctgagacaaagaacattatctcatgctttcctttactagcggaaatccaatttatgttctaaataaaagctgctttgtgttgaactcacagcaatactcagaacccagcaaggattttgcttggagtattgttttaataggtagtgctttacaaggcttgcatggaatttccccatcgcatcttctggctgtcagacttaaagagtatgaacagctggcagggaacatggctatgctgacccactttgctcccaccaagagccactcactggaggtggtggacctccagagaccctccatcctgtggcctgctccagaaacaaggagcctggaggagagaatgaagccatgctccccggaacaggtcatgtcccaagggatagaagtgagcagatgggcagagattgtctggtttcttcttcctttgctttccagttctgggaaggttaaatgaggtaaagggagtccaggaggtcctcgttacatcacagcccattacctcatataaagaagacaatgaggtacaagctactaaagataatagcaggaatgatatacatgtatctgtacacatgtttcagatattcagtatcagaatacatccgtaagcaagaacttagattattgagtgtaaaccacctttctgatgt

SEQ ID NO: 474737 - DNA, 1764 bp, Homo sapiens
cctctttcttttgcaaattgccatctcagccatgctctcgctttgccttccgccatgagtaaaagctccctgaggcctccccggaagcagaagctgctatgcttcctgtacagcctgcagaaccgaaccactacaatcaacacagttttgccaaggagaaataagtttgtttattcctgtagcataaaaatccatgctttgggatccgacgaacccttggaaagcattttctgcatcctgctggttgtggaagcattttccctgcaaaaagttgttgagatgcttgaagaagtggtagttgaatggtcgacattgactccttcagcaacttttcatgcagttgtaagagcatcagctttgatgattgctctcaattggtcactgtcaacttctgatggccggccactacgctcctcatcttcaaggctctcgtctcctttgcaaaacttcttgaaccaccactgcactgtacggctataccaaaaattaaaacaagatgccgtggttgtgaatgactgggtggctgccataatttgggtgaaggaccttctgaggtattgacatctgatttgcaagaaggaacttgtgtcatactcattttcataaactgaataatcaataatcacaaagtaatggattaggcctggaggaattgacaatctggctcaagatataaagaatatgtgaacagtcttccttctggctcttgttagaggcaagaaatttcaggaaagttttcaaacattaaccatttgttcactcaaatcaatgttctggaaccaaggtaatacttgtaaaagaataaaggtgaaaagtgatatttctatgtatttataactttaaagatattgtcaaaaggacacacagagaaggaatatatttgacttcaagcaaatgaaagcaatagtttcaacaattagtctatttttctcactcagtgagaagcctagaattaagctaatgatagaagcaatagctctgcagtgttatcaaggatttagcctctttctaactttctccaccatcctaaatgtgcaactgttatcctcatggctgcaccaaaactagatattatacctagctatcaagcagaaagaagtaaaaataaaaagcaaaagaagctttgcctttttatttcgaagggatgccctctttttgggcaagcactggcatcacattggttagagaaatgagttttcagtgggacaccttactgtcccaatcaaaatctaggttttatttataaggaatatggggaaatagatactggataggtaataacagtgtaagacacaacagtattcaaacttggcccccatacagtttagagccacactctggggatctgatcataactgtatttaatcatcatatttttggtggggggagctctcagagtactcacttgtgtactgctcaaatatttgatgcatactaagcatggcataggcactggtggcacaaagattaatgtgacgctgcagcgtgagtatgcattttaattaacatgtttgttaaatttgtcataaattttattcaattgaattacttactaaattatagtatattattagcaactgctggttggtgcctagcttcctataagaacataacttcaaataataagtgaataattcagttcagtataacaaataaatatacaaaaaaagaggtaacaaatattgaatattatgttttcaactagattttggggcatcatgaaatgcagactttgtttctaaaatctgatagtctttgccagtt

SEQ ID NO: 474738 - DNA, 1818 bp, Homo sapiens
taagaaacctagaggcttaatccatctctcctctccccaaagtatatttgtttacattcacaggtacatgtgcacaatgtgcaggttagttacatatgtatacatgtgccgtgctggtgcgctgcacccactaactcgtcatctagcattagaggttacatttctctaccctagatgctttctgcagtcaatgataactgatgcaaagcatgagctcccttgccttacattgagatcaattctgacaaaattttacaataccaaatataccatttacaataaattatgcaacactgaagaatcaccgatttttttcatagaatataatgaaagagctgtatatacaaagcagcccccaaatgttgaagttgctgagaaaccaacgaacaaggcagacgaatccagtttgtcgacaaagggtgtttgcagattggcaaagactcaaaaacttgcaaacagcttttattgtggaggttgtgaaaatataagaattctcataaatgctgttgggaataaaaaattttataaagtctacagagggaaatttttcaaaacagtggcttcttgctatcagcaagggatcggcttcagaatccctgtggttaccaaagtctgaggatgctcaagttccatatataaaatgacacagtgtttgtgtataacttatgcacatcctcccaaatactttaagtcatctttaaattacttgcaatgcctaatataatgtaaatgctatgtaaatcattgttatactgtattgttttaatttgcattttttgtattgttatttattattacttttttttcccatccactgattggtggggtccatggctgtggaacctgctgatacagtgggccaaccatatctaagaaaactaatatgcgctttctctttgattaagaaatgttatttctgagaatttatcctaatgatatatatccaaaaatatgaaaatccatatatacatttcatgttttttgtgatggcaaaatattagctgttacttaaatttccaaacacagatttctttcaagcatagacataaacactgaagtacttattacacacaatggtgtattatgcagcagtaaaaacaaaagaaagcttgctctatgaactttatagggtcattaccaagatatattaaatagcaattattaaggtgaaaaaagtgaagagtagatgtatctttctatatcaatataaatatagatatataatgctatcttttgtttaagaaagatgagtaaatgaaaaactataatctgataatctttacaaaaatgaaccaggaggataaataagaaaacaatgaagttgcttacctatagggaataatgagaaaacttggtggagggatgatacagttctggatataacttttctatactttgacttttggaagcctgttaatgttctacatattcaaaacataactttatatcataaggctggaaaaatactcagaaaataagctgaaaacaaactcattcttttcaaataaataaaataatcacactgaaggaagaaaatgtatgaaagagtaaattcaaggacatttttacacaaaatttgactaaatactcactcttgcagtcagggaaaaagagtaaacaaaacctggaatcttttgggtgggtttgtcatagtggtgtaggtgcagcaattctaaaattattgtaggtatattagtggagtaaataataaatgaatgttgaaattattagaagttctattttttatgtttaatttttaacttttgtggttacatagtaggtgtatatattcatggtttacattaggtattttgatat

SEQ ID NO: 474739 - DNA, 486 bp, Homo sapiens
atttgttttcgatggagtcataatgagagcaaagcaggagctggaaatcaagtgtgatactgaaatgagaaagctaaacaaaaaagtgctgcaggaaggagtaagacggttgaatgagcagaagaaacacttagagggcagtgcagatgggaaatgtggggttggagctgccacacagagtccccacttgggcattgcccagtggagctgtaaaaagagggacacagtcctccagacccagaatggtagacccacagacagcttgcactgtgtgcctgggaaagctgcagacactcaatgccaaccgatgaaagcaaccaggaagggggttataccctgcaaagccacaggtgcagagctgccaatgctgtgggagcccacctcttacatcagcataactcggatgtgagacatggagtcaaaggagaatactttgaaactttaaggtttaatgactgccctgttggattttggacttgcattgga

SEQ ID NO: 474740 - DNA, 861 bp, Homo sapiens
ttttttttttatcaacctttcttaaatatgaggggacaaaagtacagaaaagtccagtaacaatgccctctctggaaagaggcaccaagcagttttcagagagaggggaagtaactcagagaagagaggaaaaggggaaaggaggggaaggggaaggagtgatggaggaaatgaggagagaaaagagaagacaagatgaaagtacaacccctaagaagtctggggaacctgtggagaaaatcacagttccttctcttggtcctggagactgtgctaaacccatcagagttccaggactcgcaaggaagaaaccagtcctctgggaagccttctcagaaaagttggggcactggatatataaactgacgctttctttcccctgggtgaagctggtgctaggggatcttatggccttccaccagggacacgatctccactaccgccatgtaacatgtgcctgtttccccttccaccatgacgtgtgatttttagcttcatctcaatcaatttgatatatagtgtttcaaaggtatttaattctaaatataattaaattttctttacattttctgtttatcccatgatttaaagaatgttatttttagttagatttttgtaattcattttatttaatatacatttttctgtcattaaatgccttttataaacattttttataattactacatgttatatgatgcagaacatatatttaattataattctaaagtaaaatatttaggtatcctcaatttttaacattttaaataaaaattgatttatatttaattgcttatttctagccactttattaaagtatgaatgacatataaaagctgtacatatttaatgtatacatat

SEQ ID NO: 474741 - DNA, 699 bp, Homo sapiens
tcctcaaggttcattcacatacctcctgctgcacaaccagccatggtaacaacaactcaggaacccaacaataaaactaggtacacatcatcaatcttgatgttaagcttgagaagctcacatggcatagtctattctccaggtgtatacaacagaatcatcaatcgtcaacataaagagtcttctgaggcccagattaccagaagttggtcaaagagtgggaacaattctaatatttatgtcatagtgttgttaagattaaatgaaataaagcctatagtgtcctgcacatctacaatttcagagtccatggaaagtggaggtgtctttctccatgaaaccagtgtcttccatgaaaccagtccctgctgccaaaaagatgttaaaataaagtttctctatgggcttgatggatcacatgggcaaaaaatctatataaagtatgtcattaaatatatatttttctacattgtttaggtatcaacaggtagatactctttggtcatacaagtgtacattaaattgaatccagttgatagaatgtttgatttaatcaactgaaagggctttgaataattaacagaagttgtgctcttctggctgggtttattgatgtattttgcagaagaaaatcaaatgcctctgtgatggttaatattgactgtcaacttgattggattgaaggatgcaaagtattga

SEQ ID NO: 474742 - DNA, 661 bp, Homo sapiens
atacattacccagtctcagatcctaccatcttgtaggttacctgtcattgggtcatcggcccgctgtgaacctactactacatgtggttttgggggtggtttatgaggtacagaacagggccatgcctgcagctttgctcaactagtaatggaaatggaggagtttcccagagaacagccacagtgcacatctacaattctacaattcagtggtcaagtcaatgctcctggtatccccgatatctctatgaccacaactgcacctcatccccaatgatgctggtgacaacaccagccacatgggccaggcagccacagagtcctgtcattgccatgacctgtcacagatggcctatgtctgactttcacctgccaatcttggcacaagtaatttctacctccatccagacacaagtatataactttagaaaagacaaaaatgatcatatactcacttcagattgagtatgaaaacgctgtgttgtcacagaagttctgcaatcagattgtaaggaaaatgctttcccagcatcattctcagcctgtggaatgtgctacatccgtgtacaattaaaatgtttatagatataaggtagttaatatgattttcaataaatcccatatggactctttcatctatcataattttatgtttgagtct

SEQ ID NO: 474743 - DNA, 930 bp, Homo sapiens
ctgcaacgaactcattttcaacaaagcctggccatctgatatggtttggctgtgtccccatctaaatctcatctcgaattatagttcccataatccccatgtgtcatgagaggtacccggtgggaggtaattgaatcacgggggtgtttaccttcgtgctatttgtgtgataggattcccagagccacctcacaactctgctctctgcattccggtgcagtgtacctcaatgtcccagacaaggctcaagccaacacagttgcagatcagtgcattgctccagagggtgcaaaggataagctttgggttggggccacaacggacagccctgattatgacaatgtccaagaactctgggattacagctgcaacagagtccctaaaactttagagctacccatgtgcaacatcagcgtggaaaagctacaggaatatgactccaactctagaactgctgcatgggctgactatagcaaagccataggcatggggctatccaaggtcatgggatcccaacccctgccccagtgtgtccaggacgcaggacatggagtcaagaaaaattattctggagacttaagttttgatattgtttaccctcttgtgttttagacctacttgtggcctgtttcctccttttttttgtctattactcccttttggaataggaatatctgtcctatgcctgtcccatcattgtattttgcagattatttataataactaatacaatgtaaatgctatgtctgtaggtattatattgttaggaaatgatgacaagaaaaaagtttgtacatgtgcagtacagatgcaatttttttctaatatttctgatctatggttggttaaatctacagaagtggaagccatggatagagagagccaattgtttagttattcttactaatatatttctggaattacatacac

SEQ ID NO: 474744 - DNA, 557 bp, Homo sapiens
gcctcttgataagctgccaaagaggccctctggatcctccatacctttttccattgtgacggttaatatgagatgtcaacttgactggattgagggatgcctagatggcagtgtattccttcttaaaattgtaaaacagcttcaggtaggtctttcaggaggtattacaggagaaggcattgttatcatagatgacagctccatgcacattactgtctgtgatgaccttccagtggggcaagatgtggaggtggaagacagtgatattgatgatcctgaccctcaagacaaacttccccctcttcctcttcttccttgtcatcctactcaaggtgaagacaaggatgaagacctttatgatgatctacttccacttaatgagtatcagcaggcaacatctgagttgcagctttctgataataaagcagcttccttggctactcagttctgtggtgtggctctgggagccatgcctggacacatgctggaggctttttcttccctcagttctgtaaaccatttgacaggcttttaagtttcttcctacttttatgagc

SEQ ID NO: 474745 - DNA, 491 bp, Homo sapiens
cgccgcctttaagaacttcagatggatagcaggaaaacggaaaaacgtctaggagagaagccagcactaaggagggaaccagatcgtgagacaaaagaattggaatccaaggccatgaataacttttcagttgtcatgggattagtggctaacgaggtctttgggggcatcccagtgattccctttcaagaaagggcttgcagtggagctatgaggagagctgttgacggaccttctctctgtggtgccctgggcagctcccagccatctcccactctggagctgaacaggaagctcagaccactgtgcaccccacagattgccagaggcaacagagcttctcccagtaaacaaagatcaggtatatgcacatctgcattggctgcagctggcttttacctgtataagatacctactggcctggaggttgaatggcacaacacaatagaaaatctgcagacacaagtgctcaacagtggggaatgagaaaa

SEQ ID NO: 474746 - DNA, 688 bp, Homo sapiens
gatgagagttagtgtctaaattccctggctcccttggcgctcaggcatgatggagcagatattgtgcggaaaggaccccagtggagaagtgaaaagagaaaggctgtgtccctgtggtgcaatcctttgtggagcaaagttccccatttcttcagggactcagcccacttgcacccaggtgattaaaaagttttactgctcacacaatgcctatttggtggtctcttcacatggacgcgcacaacattgggattccaagacatgtcccaaatcttcatttaaagttaagagtggcaactctccacacaaatacttactggcattgttcaaagtccagtcagagacttttcacaaagggaaggaagatgttgcccctacatggagaagtggccacgagacttctagcttgatagcctgtttgcagtctcccattgtctgggtgccccatagcagcacacctggccaaccatgttctttataaccccctttgtcacctcttctctccaaccgtttctctttagtttctaacaaccagccattttacttttctcctctcagtgccaaaatgcttgcttatgctcatgtcattgtggcatttattgtcttcttttgctatttgggcaattgtttaaggaaggatgctttcttgtgagaggtcccccattctattgaccctaggatgcgagag

SEQ ID NO: 474747 - DNA, 547 bp, Homo sapiens
ccgcgagggtccgcggcttcattcttgaagtcagtaatcatgtctccatactatgcgacactcccctcagatgcatcctccaaactgggaaaactcaatttcccaaaccttaaactggttggcttaggattgggcctggggaatggaacccagaagactgacatcctggcaaaaggagttggtggttgttaccagattccaacatatgtagacaatgaaatcaacagaaggaatgtggacttttggaacaccaaccaaactcagaaaatttcaaggctttcctccattccctccaaattcaagaagaagggtactgagttctcctttcccttgatcccagaggcagctgcaataagaatacaaatggctatggggctttgttgtcacttcaccaatgaaacagcacacaaattcttatttgcattgaccgggtcctctgactggcagagaaagctctaggtgcttatctccatcaaggtcctttctaggccgttataagtggcacctgttagcaatgaaggataaccatcgatctataaggtactct

SEQ ID NO: 474748 - DNA, 615 bp, Homo sapiens
acactgacactgtgaaagagctgctgaataaagccatgtctcatctacctgctctctctcgagtaagatcaaaccacctacaacattcccttaaaccaaagcctgatccagagaaaggtcccaactctcttcaattctatgatggcagagagagaaatatattttgtaaggctacagaagccatagataatgattcttctgatggatctgggcaaagtaaattgaaaatctggcgaggctacagcatcctagatgccagtaagaccatttgtgattcatgggagacggccaaaatatcaacatttacaggagtttggaagaagttgactccaaccctcaaggatgtctttgaggggttcaaaacttcagtggaggaagtaactgcagaggtgatagaaataagagaactagaaatgcagcttgaagatgtaactgaattgctgcaaccacctgataaaacttgaatggatgaagagttgcttcttagaaacgagcaaagaaagtggattcttgagatagaatgtactcttggtgaacacagttgaaatgacaacaaagaatttagaatattccatagatttatttgataaagtagcagcagtgtgtgtgaggacc

SEQ ID NO: 474749 - DNA, 576 bp, Homo sapiens
agttccctgaccccttgtgcttcccaggagcatcaagccccagatgccattctcatcagtggaatttttattggctttcttttcttccctatttattgaagattgggatccccaggcagctgactctgagaagggcattagtgttcaagagatttactggaaactgagggaaatttttggagagggcaaacaactaaggagggctagccagaacccccagcagcttgagaataagcccttcagtcacgaagagggatctaggcagtgcatcaaggcatccactaaagtccactccttgctccattcagattcacttcatctgagttttggagaagctcctctagaattctggtgggcctcctctcctgtggaatactcttattccagaaacctgagaggcccaccaggggatgatctggcatgttccagcccactggctcctaaaaaattcctggatagggatgactcctgaatcttcatagctttcattttaccctttctggaggacatgtgtcttcctaaggtcatgaacatacttgccacttgttgctcaaccagtcagattagcatgatgcc

SEQ ID NO: 474750 - DNA, 539 bp, Homo sapiens
aggtagataaatccacaaagatgaggaaaaaccagcacaaaaatgctgaaaattccaaaatgcttcttttcttccaaaggatcacaactctttgccagcaagggaacaaactggaagaagaacgagtttgacaaattcatagaaggaggcttcaaaaggtgggtaataacaaactcctctgagctaaaggatcatgttctaacccaatgcaaggaaactaagaaccttgataaaagattaaaggaatttctaactagcataaccagtttagagaagaacataaatgatctgatggagctggaaaacacagcacaagaacttcgtgaagcgtacacaagtatcaatagccgaatcaatcaagcaaaagaaagtatatcagagatagaagatgaacttaatgaaataaaagaaaaaagaatgaaagggaatgaacaaagcttccaagaaatatgggactacgtgaaaagaccaaacctatgattggttgttgtacctgaaagtgatggggagaatggaaccaagttggaaaacacttcagg

SEQ ID NO: 474751 - DNA, 826 bp, Homo sapiens
tatccacagctctgcatcaccactcggcgtcaccactgtgcaacccatcagtcctgtgatgataccactgtctgactgcctgaagtctctggcttctctgagctttctggcccttctgagatctgaaggaaacaatatcttaagcataccctctaatccattcccagtacaaccactgggaaagtctgccctacatgtgaccacagctttgatgcggcctggaagaattgatagaatcatctatgtgcctttaccggatgcagcaacaagaagggaaatatttaagctgcagtttcactccatgcctgtcagtaatgaagttgacctggatgaactcatccttcaaaccgacgcatactcaggagcagaggaagttactagtaaatgtgttccaccaaaaaaacaaggaaaaaacatgggatccaggaagcaggtcgttcagcacatgagaatagtgaagagaattcccagagcaataaagagaaatcctggaaaagatatttttaagcttttctataaatctggcaaggaaattcattcttatcaagttgtcactatttgactctatttttcaattgagaataaataataagaaagactaaactgtttctccatgaaagctttattttagaattcagtgttactgttttctataatttttaaaacttcaaatgtgtagttcctgaaatactttaatagcagaatctttcccctccatcaaataaagccataaggttctaggcactagcatctaatattagcaacgaaaataaagaagtctattttgtgagaggcaacagaccatcaacaaaataaaatatagtat

SEQ ID NO: 474752 - DNA, 1587 bp, Homo sapiens
gagaacgggccatgatgacgatggcggttttctcagtggtgatacacgaagaaaaagatactgttcctataaaagaaaaactacatctagattcagaaagattaatcatgtcacaatcaaaattcactcaaaagaataaagttaatatatattcaaatgaggacatggatgaagctggaaaccatcattctcagcaaactaacacaggaacagaaaacaaaacaccgcatgttctcactcataagtgggagttgaacaatgagaacacaaggacacagggaagggaacatcacacactgggtcctgtcacgggctggagggctaagggtgggatagcattgggagaaatacctaatgtagatgacgggttgatgggtgcagcaaaccaccatggcacgcgtatacctatggacattgatgaaattggaaaccatcattcacagtaaactatcacaaggacaaaaaaccaaacacctcatgttctcactcatagaggggaattgaacaatgagaacacatggacacaggaaggggaacatcacactctggtgactgttgtggggtggggggaggggggagggttagcacgagatatacctaatgctaaatgatgagttaatgggtgcagcacaccagcatggcacatgtataatatgtaactaacctgcacattgtgcacatgtaccctgaaacttaaagtataataataataaaaaaaaataaaaaaaattaaaaaattaaaaaataaaaaaagaagaaatatgcaaatcgaaggtaaattaaggagaagaaaatttaaggttgactttgttttttgcttttaattcacatttatttgctcttctttcggttttacttggatatacatacataaagtaactgtttagtttctagtggaaggcttttatttggttctctgaatagtcattttgcttcctaataatttccaacaattcattattttctgttcatttaaaacataagctacttttgtcaataaatgatagagtgtaccagccacttaaaaatggattggtttggtttacatctgataatatagagagccgtaagagctttaagtttcctggccaaaaattaaagaacagttctgttactagaatgctagcaattggacataagcaaagagtaatctaaccactttaatacaatggtttgatgtgctgcaggcaataactactagatgtgaaactagtgttcaatttgtgatgtgttagaataatagggctttctgtagtattagtaaactgaaccactaatttctaaatgttatgtctaaatattcgttgaacattggcttctgttcttagcataagtgcctatattatacttgatcatttatattgtagatagactactttgctgtaagataagtttctgctcacacattatcaatagagtgctcttttactgtaattttatttctatattgctcttaaagtcttttgattatcactttggttaaatgaatattattttgtaatgacctgtgattccattttgagcaaatgttttgaggctttcaacatctttgataaacatcttatcaactaatccttgtgttgtaat

SEQ ID NO: 474753 - DNA, 589 bp, Homo sapiens
aggccaaggtggctttctggcatagcatgactcagcgggtttggagcacaggcacacaactctgcacattatgtggaactcttccactgtgattcccagtgatacagaaaatgcatatcttctatcagcaactttccctgattttcccattgtctgctttacagcatattctaatagaatacctcagccccataaacactctccttatgcaaaaattaaagtagcttttagctacttcttgaccaagtgcttcacaatgggtctacgggaaacaagttactcagcctttgtcatcagattggagtgcagttactttttgggtgttgccctacacccagctgccacggacatgacaccctcatttgttgacccaagaaatgttgtgagtgaaggtcaataccagccagaggcaaactctcccttgccatcgcagccacgtctattaaaactttctccatatcagcaaaagggctgttcacattcttatcattagtgtgttaactaaagtagcatctggaattttctccgaaagcttcttttgtttcacaagttggccacatgtactgtaaggagcagacaagatggcacc

SEQ ID NO: 474754 - DNA, 1457 bp, Homo sapiens
cacttctgagaatcttgaaaacttaacgatttgtgtgcctaccggccatgtgttttaatgcctgtttcactttattctcagccatatatttcattaagtgtccctcagctgcaggtctgctggagtttgctggagttccactccagaccctgtttgcctgggtatcaccagcagaggcttcagaacagcaaatatggcagaacagcaaatattgctgcctgatccttcctctggaagctttgtcccagaggggcagccgcctatatgaggtgtctgtcggcccctactgggaggtgtctcccatcaaaagagacaagcttacccgttacatcagctacaatattcagctgaaagggcagcaacaccctaatggacaagagacatcacttcaaagggagctgagatatgtttgcaaggttcttgacaccttctcagaaaagttctcactaaatgctaacagtatgacgctatgatgataaaaatcacaattttgcaagtagtgtgatcatctatttttcagttcatccaacgcaccacttgtagattaatttcctggaggttgccacaatatgcttaataccagcaaattgacttcatttcttaccactacttcatgaagcacatggactccttattcaccaaatggtcttaattctgtcatccttatgtgtaggtacatgtgttgtgcttgttcggtcatcactgccttaatatctacagctcattcttcaagtgctatgttatcctttgctgaatcctataactaaatttgaacttttatttttctctgaacccccttagcctcagtgcatattttttaacagcatgtattcagccttctgacttgcttatgtaaacatttgtgttgttttctgcctcccaacacaacttagccattattataaactccttgagtgtcataactataacacatatatttgggagctttttagcacctagcaacatgcttgtacatagtaatagagcagtggtttttaatttgaatacaggaaaatacattcaattaccatagtagcatcatactgatgttattctctattttaatacaatcctatgaagaaagggttaattttcctcatacaaaatagttataacaaaatagttaacatattttgttctctatggatggcagaataaagactactaccatcccactgatattcattctggtttttttcttaatgaagtttctagctgagtacatgtctgcccaaataaaggctagacttttccatttcccttgctgccaggtgtgtcaacataatagtgtttgggccaatgaaatggaaacaaagtgatatgtataatttccaggtcatgcccttcaagagaagatatgcaccctcccttcccttggattcttttccagtggctggaatatagatgtgaggatgagatttcttggaatgtgcacatgggggcaatacctaggggac

SEQ ID NO: 474755 - DNA, 642 bp, Homo sapiens
gagggctgccagcatggtgtcacctctcaccggcaccccagcacctctctgcaccatgctgctgctgccagggactcctcatgagcaccagggctgcctgattgtttgggtagagttgcagactttccccactgatcccagcattacactggtgcctctgttgaaagaaacttcccacaagtggaaagttctgggactcaagccctaccatctggattctcttgtcccagagggtgatcccttgatgtggtacactcttccctcccctaggagtgggagtccctatggtataatggactgtgtacctgcagatgctgtaatggaatgtgttggctgccctccagccaggaggtggcacttgcaaaagagtggcagctgcagggtaccaatgggatttatgcctgccttattttaccctgaagaggttctctggtgtctcagtcaatgtgcagagccatagagctcccaaaagtttctgtcctttgtgttagctacaaggataactagttcatgaagataagacttgtctgaaaaaaaaaacctgaatgtttgattctagatttttgttgttgttgttaaaagttctagacttcaccaagtagtcttttaaaatattaccagaaagcttagcatcacttttct

SEQ ID NO: 474756 - DNA, 645 bp, Homo sapiens
ctagttgatgggtgcagcaaaccaccatggcacatgtatacctatgtaacaaacctgcacgctgtgcacatgtaccgaagaagaagaagaggaagaggaagaagaggaagaagaagaagaaggagaaggagaaggagaaggagaagaagaaagagaagaagaaggagaagaagaaagagaagaagaagaggaagaagaagaagaagaggaagaagaagaagaagaagaagaagaagaagaagaagaagaagaagaagaagaagaagaagaagaagaaagagaagaataagaaggagaagaaagagaagaagaagaaagagaagaaagagaagaagaaggagaagaaagagaagaagaagaggaaagaagaaagaagaagaagacgaaacaacttccaggctgtctttcaaagtggctgtaccattctggattcctaacagcaacagtttgttgaacatttactgcctgagcattggaagttactgtgcttttgatgagattggagtgttaatatttgtgcagaagctgcaaggacagggcttaaggaaagatggggaaatcagcactaggtttcagcacttccctgggcagtgcctctctatttttgcttgatggctacagctgctgcttcttctgctactgcca

SEQ ID NO: 474757 - DNA, 541 bp, Homo sapiens
tgcctctcccaccgcagctgatgtccttgcagtggctgctccatttgggccgccaccaccatcacaagcaaaatcttttattttctttgttctgtttacttcacttttctgggcccaaagaaacaatcaagaaaaatttttatgataaatttcttaaatatcataaagtggaaagaagctggttgctagcaagagtagggaagcatagtggagaaatatatctagcagaaaagaggatgtcactaactgctgagcaagaattgtcaggcaaggtgtgcagaaagccagacaaatccaatatacgaggtgaagaagcagtcaacacaacaaagaagaaaggaggaaagcaagtagaggaacaaggaggcaaaggcttaattcctgtatatagcttcgcacttctctttgctaaccccatcctccaactcacacaaagccaaagatgaaacaaaacgtgtattcgctaagtttttctgttcctgaagaacgtttagttcatttacatttagtgtaattactaagagggttgttatttgatttt

SEQ ID NO: 474758 - DNA, 710 bp, Homo sapiens
agacttgtggttcaagagtttgaaatgaagaggctacacgggggtcaggaacccgcttgaagaagcagtcggtccattctcacagctcaaacgtcatgctgagagaaccactgctctcttcagagctgtcagacaggtatgtttaagtctgcagaagctgtctgctgccttttgttctactatgacctgaccccagaggtggaatctatagaagcagtaggccttgctgagctgtggaaagggaaatcccccggccccttgtgcttccgggataaggcgatgccccaccctgcttcagctcgccctccatgggctgtacccactgtccaaccagtcccaattcttccagtgaactctccaataggctctagtactctcctcttaacacaatctttgggctatgatttttcccctgcaattttgcttcttccttctgatgagaactggtccctgaaatctctagtcagccatctggagaagctcttcaatgccttaggcaatggattggtctgcaggatgtctagtggcttagggtccaatcttagctccagatggctacaacgttgggtgctgctggaccaggctgacctgtccagcaatacccaacatgtgggtcacagagaagtggcatggactttgtaagatttcctgggttataaatagccttacagtggtaactttctcaattgccagttatagtaataatgtat

SEQ ID NO: 474759 - DNA, 861 bp, Homo sapiens
aggtaatgtcaccagttaaggcagaaacaggccattttcacttcttttgtgattattcagttacttcaggccatctggataggatgtatgaaaatgactggatgtctagtcagaagtctgctgcagggtcagagtcctcatggagaacctctaacagggcagtgcagagggaaaatgtggggttggagcccccacacagagtcacctctggggcactagctagtggagctgtgagaaaagagccaccgtcctccagaccccagaatggtagacccactgacagctctcactgtgtgcctggagaagccacagacacagaaggagctcttgtggtccacatgccggcacagtgcaggaatctggaagagtttatgccccagacgactcttgctgcgtgtatgtgtatgtgtgtttgggtggggatatgtgaagtgagaggggcattaacagaagttaagggcatctttcagagtccaacagcccatctagtgtctcctaccccgctgctgatgccttttggtgacttctacaagctgataattgttttcttagttgtacattcacttcacagtagaagtccctggtgttctgggcttttcagctgctcataagctaccagttgccattctgatcttcaggtcacaaagatattgttctatgcttttatctaaagattttatacttagtattttagattttgtaaatccatgttccattttgagttaatttttgtataaggtatgaggtagagatcaaattccttttttctgccaatggatctccaattgtctaccactaatttgctgaaaagttatctattcaccattgaaatatctttgtacatttctcgattgaccattt

SEQ ID NO: 474760 - DNA, 904 bp, Homo sapiens
gcgtttctgctgctgcgtcggtgagcacaactattccgatcagcagggtccagtcagcaagccatccccagtatggatccccactgtaaccttgactcacatcatggggactggagtcgtaaacatctgttgatctgtgatctagaaggactaaggagaattaggaaaaagcccataaattattcaatgatgtccaccacaactcagagaaatgaagaaaatccttctgccttcctcgagtggctacgagaggccttaagaaaatatactcccttgtcacccgaatcactcaagggtcaattgattctaaaagataagtttattacccaatcagctgcagatatcaggagaaagctccaaaagcaagccctgggccctgaacaaaatctggaggcattattaaacttggcaacctcagtgttctataatagggaccaagaggaacaggcccaaaaggaaaagcgagatcagagaaaggccacagccttagtcatggccttcagacaaacaaaccttggtggttcagaaaggacagaaaatggagcaggccaatcacgcagtagggcttgttatcagtgtggtttactaggacactttaaaaaagattgtacaatgagaaacaagctgccccctcatccatgtccactgtgccaaggcaatcactggaaggtgcactgccccagaggatgaagtttctctgggtcagaagcccccaaccagatgatccaacaacaggactgagggttcctggggcaagtgctagctcatgtcatcaccctcactgagccctgtgtaagtttaaccattgagggctaggaaattgacttcctcctggacactagcgtggccttctcagtgttaatctcctgtcctggacaactgtccgcaaggtccgttaccattc

SEQ ID NO: 474761 - DNA, 492 bp, Homo sapiens
tggcacccatatgcatctccttaaaccatacttaatttccaaataatgacagtaacgagaggtggagtctacagaggcaggcaggcctccttgagctgtggtaggctccacccagttcgagcttcccggctgctttgtttacctactctagcctcggcaatggtggccgcccctcccccagcctcgctgccaccttgcagtttgatctcagactgctgtgctagcaatgactggagtcttgctcctttgcccaggctggagtgcagtggatccactgctgtctttggagctggcaagcaagaacctttaagtccgctgaagctgcgcccacagtctccccttcccccaggtgctctgtcccaggtagatgggagttttatctataagcccctgactggggttgctgcctttctttcaggcatgttctgccctgtgaggaagaatctagagagaaagtctggccatagtcactttgccgtgctgtggtgaatt

SEQ ID NO: 474762 - DNA, 771 bp, Homo sapiens
tccaacaacaggactgagggttcctggggcaagtgctagctcatgtcatcaccctcactgagccccagactcatcaatgaggcagatattcctctatatccagttgtacccaacccctataccctgctctctcaaatacaagaggaagcagaatggttcacagttctggacctcaaggatgccttcttctgtattcccctgcactctgactcccagtttctctttgcctttgaggatcccacagaccactcatcccaacttacggggatggtcttgccccaagggtttagggatagccctcacctgtttggtcaggcactggcccaagatctaggccacttctcaagtgcaggcactctggttcttcagcatgtggatgatttgcttttggctaccagttcagaagcctcattccaggaggctactctagatctcttgaactttctagctaatcaagggtacaaaatgtctaggtctaaggcccagctttgcctacagcaggtcaaatatctagacctaatcttagccagagggaccaggaccctcagcaaggaatgaacacaatctatactggcttatcctcactgtaagatattaaaacagttgtgggcgtttcttggaattaccagcttttgccgactgtggatccccagatacagtgagatagccaggcccctctgtactctaatcaaggaaacttagagtgcaaatactcatcctagtagaatgggaatctgaggcagaaacagccttcaaaaccttaaagcaggc

SEQ ID NO: 474763 - DNA, 1014 bp, Homo sapiens
agcaaacggcacaccaggagattatatcccgcacgtggctcagagggtcctacacccacgtagcctcactcattgctagcacagcagtctgagatcaaactgcaaggtggcagcgaggctgggggaggggcggccaccattgccgaggctagagtaggtaaacaaagcagccgggaagctcgaactgggtggagcctaccacagctcaaggaggcctgcctgcctctgtagactccacctctgggggcagggcatagacaaacaaaaggcagcagaatcctctgcagacttaaatgtccctgtctgacaactttgaagagagtagtggttcttccagcatgcagctggagatctgagaacggatagactgcctcctcaagtgggtccctgacccccaaatagcctaactgggaggcaccccctagtaggggcagactgacacctcatatgtctgggtactcttctgagacaaaacttccagaggaacaatcaggcaacaacatttgctgctcaccagtatccgctgttctgcagcctccgctgctgatacccaggcaaacagggtctggagtggacctccagcaaactccaacagacctgcagctgagggtcctgactgttagaaggaaaactaacaaacagaaaggacatcctcaccaaaaccccatctgtacatcaccatcatcaaagaccaaagcaatggaacaaagctggacagagaatgactttgacgagttgagagaagaaggcttcagacaatcaaactactccaagctaaaggaggaagttcgaacccatggtaaagaagttaaaaaccttgaaaagaaattagatgaatggctaactagaataaccaatgcagagaggtccttaaaggacctgaaggggctgaaaaccaaggcacgagaactatgtgacgaatgcacaagcctcagtagccgattggatcaactggaagaaagggtatcagtgatggaagatcaaatgaatgaaatgaagtgagaagagaagttt

SEQ ID NO: 474764 - DNA, 1156 bp, Homo sapiens
ttcacacattcactcaccacttccctgggaggggacgttcccctgactctgtgtcactcctggaggccaggataccgctaaaatccacttctgttgaaggcggcactgctgccatctggcggacttcgaaggagagacccataaggggagaagtcggttcaattctggcatcttgccgctactttctaggaagtcgggaattaaacaggggaaacagacctcactcagaagaatatgggaagtttggctctaatgggagggccaagagatagtggaatccactaccatgaggagtgtcaggaaaagatttacagaagaggcaacaccgaaggctctctggaaagaacttgctgtgaagcctactcaggttttggcaaaattgagtttcctgagttggggataagggagaataaatcacttcgtgctgatggatcccatggaaagggtactgctacattccaagggaaggagaaagctatttgtctgaggagaaaccctcagacaaatcggagaagcaggaatctcaagcaggaatcccgtgtgaccaactttcccatacaatcccaggagctaagggaagacttgttcatcacttttgctgtccagctaatgtatatggataatttgtctgatcaattgcatatcaaaattgacctcaattagaacacagttcacataaatacttcagaaaaaaagattatctagtgttcttgctgtgggcactgccagtattgcgatacatactactctggatatttattttctgccagtgtggtgatacatgaaatactatgaaaaattagaagatctatgaggggaagaatgtggatccttatctttttccggaccaaagagaattttgaaagctaagaatttatttatttgaagatgaaactaatgtaggccccatgaataacttaagactgaattaatctaatcattatctgttcaatccacactgaaaatcttgtcttctatttctttttcaatattctttattcaaaagtgcttataccatttcatattcttaccagctgtgagcgttcaagttgtttcacatccttgcctacacacttggtgctatgggctgaattgtgtctgtgatggttagtattgagtgtcaactcgattgggttgaaggatgcaaagaatattt

SEQ ID NO: 474765 - DNA, 540 bp, Homo sapiens
cagcacgctgtcacctctcactattgtgagacttcacgttgtgatggtgtatatctcctaatgctatccatcccccagacccccaccccacaacaggccctgttgtgtgatgttccccttcctgtgtcccagtgttctcattgttcaattcccacctatgagcaggaccctcagctgcaggtcttttggagttcactgaggtccactccagaccctgtttgcctgggtatcagcagtgggggctgcagaacagcaaatattgctgaacagcaaatgttgctgcctgatcattcctctggaagcttcctctcagaagggtacccagccgtctatgccctgcccccagaggtggagtctacagaggcaggagatgaattaatatcatccagagcttctacagtgtttcatatgccatgtgaagtattcaacaaaagtttatcagacatgctaggaaataggtccaaacgattggaaacctagaaaacaaatgctagaagtagaattgcagatgactcagaaattgaaataagacatggactt

SEQ ID NO: 474766 - DNA, 1637 bp, Homo sapiens
ggtggagcgctgcgggaggtgcgtgcgcgccccggccgccgaacaaaggagcaggggcgccgccgcggggacccgccacccacctcccggggccgcgccgcggcctcccgtccaccgccaccatgaccgccaacggcacagccgaggcggtgcagatccggttcggcctcatcaactgcggcaacaagtacctgagggcggaggcgttcgggttcaaggcgggcagcgcggccgtgtgcctgcgcagccacctgggccgctacctggcggcggacaaggacggcaatgtgacctgcgagcgcgaggtgcccggtcccgactgccgcttcctcaccgtggcgcacgacgacggccgctggtcgctgcagtccgaggcgcaccggcgctccttcggcggcacggaggaccgcctgtcgtgcttcgcgcagacggtgtcccccgccgagaagtggagcgtgcacatcgccatgcaccctcaggcgcacctgagcgcgccgccggccgacgagatcgcagtggaccgcgacgtgccctggggcgtcgactcgctcgtcaccctcgccttccaggagcagcgctacagcgtgcagaccgcggaccaccgcttcctgcgccatgacaggcgcctggtggcgcgccccgagccggccactggctacacgctgcagttccgctccggcaatgtggccttccgcgactgcgagggccgttacctggcgccgtcggggcccagcggcacgctcaaggcgggcaaggccaccaaggtgggcaaggacgagctctttgccctggagcagagctgcgcccaggtcgtgctgcaggcggccaacgggaggaatgtgtccacgcgccagggtatggacctgtctgccaatccggacgaggagaccgaccaggagaccttccagctggagatcgaccgcgacaacaacaagtgtgccttctgtacccacaggggcaagtactggacgctgacggccactgggggcgtgcagtccaccgcctccaccaagaatgccagctgctacttcgacattgagcggcgtgaccggcgcatcacactgcgggcgtccaatggcaagtttgtgacatctaagaagaatgggcagctggccgcctcggtggagacagcaggggactcagagctcttcctcatgaagttcatcaaccgcgccatcaccgtgttgcgcggggagcacggctttatcggctgccgcaagctggagttcaacaatggtacctacaacatcaaagactccacaggcaaatactggacggtgggcagtgactccgcggtcaccagcagcggcgacactcctgtggacttcttcttcgagttctgcgactacaacaaggaggccatcaagatggacgggcgctacctgaagggcgaccacgcaggggtcctaagggcctccgcggagaccgtgcaccccgcctcgctctgggagtactagggcccgcccgcccttcccggttcctgcccacgtggcggctccttccaaccctccctgctaaccccttctcctccaggtgggctcccccgggcgggaggcaagcccccttgcctttcaaactggaaaccccagaaaaaacggtgcccccacctgtcgcccctatggacttcccagtctccc

SEQ ID NO: 474767 - DNA, 618 bp, Homo sapiens
aacagaccaattggctctctgtaaaatggaccaatcagcaggatgtgggtggggccaaataagagaataaaagcaggctgcccgagccagcagtggcaagtcgctgtaacactcaccgcgaaggtctgcagcttcactcctgaagccagtgagaccacaaacccacaagaaggaatgaacaactccagacgtgccgccttaagagctgtaacactcaccgtgaaggtctgcagcttcactcctgagccagcaagaccacgaacccaccagaaggaagaaactccgaacacatccgaacatcagaaggaacaaactctggacacgctgcctttaagaactgtaacactcaccgcgagggtccgcagcttcattcttgaagtcagatcaagaacccaccgagtccagacacaatatcaatcatcattcagcaggacggctgtaggcatggagcaggagccatttaaccaagctggtggtctaaccaagaaggggacactagagcaaatctaaagttatccttgctaaagaagtagaaattacttattttagtagtcaagataagagggatcttttatatctggggtaacgcattgaccttatttttgtctgtgcttagac

SEQ ID NO: 474768 - DNA, 527 bp, Homo sapiens
taggctcggacactactgccatcatgtgtgccatgatgaaagccacagcagtttggtgctctgcgctatgtcatgactccagccttactctctggaacctgttctctcgctgtctcagtagaggaggaagtccaggtgaggttagtcaacgtttggaaatacagttgacccttgaacgacatgggtttgaagtatgcaggctcattacagggtactccatggaaacgattgtcaacactatggaagagaatcccaacagagagaacatcacgaaagtgctggaaggattacaccatttaagatgccattttgttacagaaaaggttgtgaaagccatcaagcccaaaacaataaattcctgctggagaaaactctgtccagatgttgtgtgtgacttcacaggatttacaacagaaccaattaagaaaatgatgaaagcgactgtggatatggcaaaaaagaatttttttttaagtgaggggtgaaggatttcaagaaatggatcttggaaaaattcaagagctaat

SEQ ID NO: 474769 - DNA, 734 bp, Homo sapiens
tcagagcaaaagataatagacaaactggcttcgtgtttcccatgggcctaactcctaaattttctgatgggttctcagcaattggtggtttccagatgcatttaaaatgtgttaattgcctgcaggaattggcttttaaagcatacacaattcttcaaattcttcaatctcaagattctactattccatgtggatggctcatgaacaaaaatgagaaacacgacgataaactggtaatgttcaccaatcaatctgaagattctgaaagggaagtgggaaagaagaataaagacaagaggcgagagccaacaggacaggaagagaataaaggcttcagagtttatgctgaaaacatctctgagttgataattcaatatacagaccctccatggcagtacattccatttctgtggcttaaatttgaagcagtttcaaagccagttaatataatagaagctacacgaagggactgggaacgtgccatcagagatgagaagggacgttaacgctgtcctatgacattttgtaagctgttatgacgtcttccaaatatttcaagcagaaagaatgtcttcaataatttattccattatttcttaacattccttaacacccacagacagttcaggcgtcgattgagattggcaaactgcttcagcggtcagacttggctcggcatctcttttttgtatgcacacgaacttaaaagactctggtgaggtagaatcaagact

SEQ ID NO: 474770 - DNA, 446 bp, Homo sapiens
tggcttcaggctttagactcatcatgatagaccaaaacaccaagctaattccagtgccaggttggcccctgcgactcaggctcaagatctacctcagcagtaggtcagcctctttggactcaggctccaggtttgcccctgtggacacaaattttatacctgtccccacagaccgaggccatagccatgcccctgaagacccagttgacaggctaacctcagtggacccaactaaaaaacacaatgacagtagtgaaaaaaatgtcgtggagagcttaagcagcagattgaatcaatcagaagaaagaatcattgacctaaatgacaggtcatttggaattacccagtcagaggaacaaaaaatgaaaagaataagaaatagtgaagaaagccatggaagttttgagtcaccatcaagaaagccaatgtatgtattatgagagtca

SEQ ID NO: 474771 - DNA, 677 bp, Homo sapiens
aattaccagagcacagaagtaaatgaattcccgtgttctgagtctcgtggcttctgtcactatgccagaatccttggctgctgccgctctgcccacagcagaccacagtagtggaagaattaatgatatgtctccagaagagttagacatcactgtctattccatcttctgccataaattgaatggctaccaggaaggtgtttattcctcagtgcttaacattcccatcccaaatatacacatgcatttcttcttgaaggaaattaaaggagtctggggagatattggcagacacctcagtcacaatcaaaagacaaaggtgctccttgattcagacacggagcacagtggtgcagaaagggtggacaaacagaaaatatccagtgcttgtgtgcctgaacatatgttaatcatggaaaatgatgagaaaacaggaggagatagtggggaagatgagagcgaatatggacaggaatgagtaaatatgatgggttaatctatgttgtaaggcacagataatagggctggacacagtaggaggtattttattctcttagtagcaattgtgaataggagttcactcatgatttggctgtttgtctgttactggtgcacagaaatgcttgtgatttttgcacactgattttgtattctgaaactttgctgaagttgcttat

SEQ ID NO: 474772 - DNA, 819 bp, Homo sapiens
ttctctctcctctcctcaagcaaaaggaaggtgtcatttttgttgctgcaagctgcgctgcctggggttgtgggaaaggcagtataagcattccctttcctgtgacatctgttgtcacactaggtcccctgatgggaggcacaggcaacagccctgagggagaacccagagatgtgcctagttgtggagctgggaaacctccttgacccaagctctctgcatgaggatggggggcagcctaaactcttactccaagagagtgggtgctccagaagcttggagatctgcctgggtgtggagtagagagagcccccctgtaccaggatctctgaacaggaagggtggagtgactcaggctgctattccaaatgagcaggtccttcagatgcctggagatcttcttgagcatgaagcagaaagagaccccctgcacctgtgtctctgcacaggaagggggagcagcctggggaacccagcaatgacacacacagactggttccaggtgacctggaactgcacatctggccctggctgcacatctcatctaggaaaaactgctgctgtagcagctctcctcccaccccaggcttatgacagggagagcacaattccacaacctaccgctgaggcactttccacagttctgtctatggaggcccctaccacactccagagcagacattccaatctctggcccaagacaaatgtctgcgtggccatactgctgaggcaccaaagaatggctgactttgtatcagcctggattaaaagtggccttctgcttttggtcctaaatcttggaaattgcctgtagctttt

SEQ ID NO: 474773 - DNA, 793 bp, Homo sapiens
ttgcctgtaaaggattcacgtgtttattatgtacctgggtatcactgaaagagctcttcagttaacaggtaatgaatgctgccagaactggattctttccttcaaggcagcaggttcccttctggcccagagtgtgtctggaaatattgtcttctccaacatgaatcccaaagctcgcacaaaggcactttgtcgctcggtagctgccaaattattgttgctgattttcaaatttgaatttcctgctgtgagctctcttgctgctcagttgaaattagagcaggatgaacttcttgaactgtcaccaacttggccacaagctgactccaagacctcctgcaaggaaagttccctgaggggacatcatgaaatgtctctgcaggagagattaaatggtttaataatgttctattaaacccacagctttcaaacaaaacccagcctttcaataacacttatcaccccaaagctcctatttaagtgatttttatctcagataaggattttaccaccaggaaagaaggtacatgctacattatcactttttagcctttttggggtgaggctttaattgctcttttttatctagtttcctaaggtagaaatttatggcattgattttaaatcattcttcttttctaatatacatgtttaatgttataatgattccttccagtactgttctagttgtttctgataaattttgatttgttatatttttatttttattcagttgaaaatgttttctaatttcactgtgatttattctttgacctttgggttatttagaagc

SEQ ID NO: 474774 - DNA, 1708 bp, Homo sapiens
ctctctcccctgccaccttgtgaagaagttgcctgctttcccttcaccttccgccatgattgtaagtttcctgaggcctccccagccatgtggaactctgtcctggtgcctcctctggtgtcctgcggagccttcatcctgtgccatctttctgcctggaggtttcacatgaccctgtgtgtgtacacgtccttctcatgtgctattgaaaatggagatgcctttacacttaaccctattatccaacccacactggcaacttcccagaccctcaccttcaaatgtgctaataggagtgtgcttcctgtccctgaggacctgccgtatgcctgcacattgcctgaccctatgtttgccattgggacacaaagagagtcttgctgccccggatgtgatgacgtgctactggaagcttccatccagcagacagggaaccacagggcacgaacaaaagaggtcatgtggtggcaggcacgctacgctttcagaaatgagctcttgaattcgaccttgcatgaagttcttctgggaatgctgggaatgaacatcacagcaacagtaagaagatttggctgtgtaaagtggaggataagggacaactactgtacatactaattggctttcttttctatctcactttgtgtattaggcagatgttcctgcaataattctgtgtaacaaacaactctaaatctcaatggctacagcagatctgatgcttaaaagccattaattagagccttgttaaacctacaacactcaatctctacgaccctaacaggcctctgctgaaatctcctctgacgtcaacccatcagcagtggatttctaaaactcttaggaagtcgttttgacttgctcagaatttctcttggctgctgaattatttatgtgccttgatggattctgaagtcagcctcccccataggaggtgggtttataaatgaggcctggagcagtctgatgttccagtctagaaggtggtgcagatgaatgtgtatgtgtataaaagacggtgaaaatatgtgatatggagtatgtaacataacattcttgtttatgtacacactatccctgaaaggatatataagtaaccttctgtgcagggaggtgaggggaaggggaggggaggaaccatttaccagatttcagcctgacagaacagttcaggcagatccttggtgtccccaagggataccacattttgttggatttggggactttggttgccagacactgtggctccatgtgaacatgccaaagtgcccttagacattgtgagcccaccatgtggtaccctctctgctaccctcaccctgaatctgattttgtgttaattttgggtgggcaccttggaagcttgcccctaaatttcctccagatttcatcccatgcacgtttccttttagctgattttactttgtacctttcactgtcataaatcatagccccgagcatggctatatactgaatcctctaatgaatggttaaacctggagttagtctcagggaccccaaacaggtactaatagatgctgttacagataaatgccaagatgtcagaggctcaacacggtagttattgccataaagatcaatgacagacagtgttcctgagggagtaggtggccttctccctggtccttcagggctcggatgccttccatcttgaactctgccttcctctaaggcctctgactcctctgca

SEQ ID NO: 474775 - DNA, 771 bp, Homo sapiens
gaggagggggatcctcttcctgctggctgcaaccacaccttttccaacaagatttcagaggatgtatggaaatgcctggatgtccaggcagaaatttgctgcaggagcagagccctcatggagaacctctcttagagcagtgtggaagagaaatgtggggttggggtccccacacagagtccgcactggggcactgcctagtggagctgtgagaagaaggccatcatcctccagaccccagaatggtagttccactgacagcttgcacagtgtgcctggaaaagccacaaacactcaatgccagcccatgaaggcagctgggaggggggctgcgccctgcaaagcaacaggagaagagctgcctaaggctgtgggaggccacctcttgtatcagtgtgacctggatgtgagacatggagtcaaaggaaatcattttggagatttaagatttgactgccccactgggttttggatttgcatggggcctgtagtccttcatttgcgccaatttctcccacttggaatgggtgtatttacccaatgcctgtacccccattgtatctaggaagaaaaaaattttaagtattagcagttatcaagctcatgatgtcagataaaaggtttccaaaatgctaagattcacttgaaatctgaagtttatcattggcaagaatatgtttgccaaataattaagtctgaataactgtaatttgtctgtcagtcatcctcataaatatgaaatttttaaaaaatggaaaagtagctaattcc

SEQ ID NO: 474776 - DNA, 778 bp, Homo sapiens
ttttctccctggtcgccgctgcctcttctcgctcccctcaggcgacggcggcagctacagctgcttctttatacaagagatgaagaagaagatgaagatgaagaagatgaagatgaagaagagatggcagaagaagattaagatggtgcctcttgctgcatcttcacatggcagaagaaatgaagaagaagatgaaaatgaagatgatgaagatgaagaggatgaagatgaagaagaagaagagatggcagaagaagatgaagatgatgaagaagaagatgaaaatgaagaagatgatgaagatgaagaagatgatgaagaagaagaacagatggcagaagaagatgaagatgaagagatgaagaagatgaagatgaagatgaagaagaagaagaagagatggcagaagaagatgaagatggtgtctcttgctgcatcttcacatggcagaagagatgaagaagaagatgaagatgaagaagatgaagatgaggaagatgaagaagaagataatgaagatgaagaagagatggcagaagaagaggaagatggtgcctcttgctgcatcctcacggtcatggccaccccactggcatcctgtgagtctttcctgtttgctagagagatcaaaagctcaggtggtggtagtggtggtagtgcggaaataagcataattctcttacgctacaggaagtatgttcagcatacatatgaagctctcttactggccaaactaggtgtcctggggttggagcttatcacataagcccaggcgtct

SEQ ID NO: 474777 - DNA, 688 bp, Homo sapiens
gtatgttatggtgaaagccaaatttgaagaaggatcaaaagaatttgttgctgacgaagaagaggaaaatagtgattatgatgtggaactattactgaatttagatttgtgcctagtgataaatcaacattggaggcaacattcactgcaatgtgtgaatgccagtacttgcatccagatgctgaagatgaagattcagatgcttacgatggagaagaatatgatgtggaagcgcaagaacaaggacatggggacatccctacattttacacctgtgaggaaggatttatctcatctaacggcagagggccaaacatgttggagattagaaggaacgctttctcagtctgtaagctgccagtatcatatggttggggtcaggacagaagactcaataggagatgatgaagctgggatggaggtggataccacaccaacagttgctggacagtttgaggatgcagatgttgatcactgaaaatgatttatgcaggtttaagattggcctcctctgtggctttcagatataggtacttaccactaattaaagtgattgtgttcatgtatttgtttcctagttcagtgcctaacattcctcactgaattgtaagctccagagaataagttccttgtctattattcaactgtttatgcccattgcctagattagtgcctgactcatggtggg

SEQ ID NO: 474778 - DNA, 525 bp, Homo sapiens
acccaacagctcactgagaacgggccatgatgacaatggcgctcagccctaaggtgacacagtcttgtatcatgactccaggggagcagttcccaacctttttggcacgagggactggttttgtggaagacaatttttccatgaaccggggtctaagaaacaaagttcagatgcaagttcttgggtgtcagtttcagttcccagacattgctccaccttctccttattcccaagaataccaaattatgcacatcctgtctgctctccccaaacttactgagcatgttgaaattaaattgtaccctgacaacttgaaaatccttttcatgattaaacaaatatttatggaacactttccagggagaatgcctcatgaagactggagtgatgctgccacaagccaaggaaataccaagcctaggagatggcctggaacggatccttccctacgccttcagagggagcatggccctgcaggcaccttgatcctagacttcaagattccagaacggtgagacaagaaat

SEQ ID NO: 474779 - DNA, 1266 bp, Homo sapiens
ctttctctctctctctctctctatcacctatcacattttctttatccattcatctctgttgggtacacctcccagacggggtggcggccgggcagaggggcccctcacttcccagatggggtggccaggcagaggtgccccccacctcccagacagggcggctgccgggcgggggctgccccccacctcccagacggggtggctggccaggcgggggctgccccccacctccctcccggacggggtggctggctgggcggagacgctcctcacttcccagacggggcggctgccgggcggaggggctcctcacttctcagacagggcagccgggcacagaggctcctcacctcccagacggggtggcggttgggcagagacactcctcagttcccagacggggtcgcagccgggcagaggcgctccccacatctcagacgatgggcggccgggcggagatgctcctcacttcctagatgggatggcggctgggaagaggcgctcctcacttcccagactgggtggccgggcagaggggctcctcacatcccagacgatgggcggccaggcagagacgctcctcacctcccagacagctgcagggcctgagctggtggcatgctggcacatggctgcagggccagatgcaagctcagtgatgagggtgaggactggtaggcgagaatggttgtgtgcttatatgcagctgttggggcagaggccagctgcaagcatgtgtatgccatgggttgcaagctggttcctcgaacctgtgtaaggactcctagagctatttctgttttgtctgtgacatataaagaaaagtcttaccctgttgtcaagcttaatactggggcttggacccatttccagttgttaaagtactgggccatcagttctaaggccctggccaaggagccaaggcttggagattgtattgctgaggggaacaatgatgaacctttagcccgaatgggagtggcaatgggtgcctcactggatcaggagcacagtggacaccctgccagatctggagggtggaagtcagtggtgggtctgcaacagcggcaaacagcagtggtggatgtcttctatatccagaggacttccagtcactaaaaaacacaattaaaagcaaagtgtcattaatgcaacattggtttttgagaagctctagtgcaatgtgaggattgagtccaggtaaacttagatgaaattggtgctccttaagagcaaaagttattgcttttaaaagctggaggtatc

SEQ ID NO: 474780 - DNA, 625 bp, Homo sapiens
agctccgcctttcacctgtgaaatttccggcgtttaggtgttcggagaaagcagcagtttttttttttggcggggggagaaatggctgttgctttagggaagaaaagcatgggttaccgccctccttgctcctgtggggtaactaatatgcacgaagcacatatcgatcacactgccaagcattgtgtttgggatggagagtcacagatgagacgaaatggcctttggggaacatggagtctcatgggagcaggagaggtgaaagcagttgcagccgatgaaattcggggctggacaccacaaaagatgccagtatttgtccttagaacaggtccagttgacaaaggcgctgcaggatatgaaagattctcattacaatgtcacggcaacatgactgaaattattaactctccacgtgggatgatggatggtatagggtggagatgtccttggcagaacatattgcttaattatcttcttttatagcattctggttttccagatgagaagtacattttatgaacaggaaaaaccgaccacagggagcttcaggagtgcccatcccaggcggtttccagggaatcctgaagtaaagtatcagatccagaaacagcatagctctgcc

SEQ ID NO: 474781 - DNA, 783 bp, Homo sapiens
ggaaaggagctgctgatacatctacaggaaacagtaaatatatgttttctatatttgagcaaattggtgtagagcaacaaatcccctggctgcccaagactgcagcttgcgatttaacattcaagagcctaacaaatgcattcagtgaaaatcgagccttattaagccctcctgactttgacaaagtgcttcgggtgcagagagatgcctctgacactagacttgaggcactgctgtctctgataatgaaagaagagcaacacccaaagatgtataaacacaaggaacttttaaaagagaaactctgtaactttctatttcaaaaaagtctttgtcttcgaagtttgtctatcacgtgtttctacatgttccatgaatataacaatgcctacattcagtgctgcaaagaaatcaaaaacactaaaacgttgaccctcagagtttctcaagtggtaacgccaataatcttcactagcagatatagaaaataccacagagcaagaaggcctttgtcagatgccggcccctcaattctggattttccagcctccagaaatacatgactttgcttctatccctgtaaagttgtacctggttgatctccccttctattctaacctaaaaatctcattctgaatatctacctcttcagctgtcattatccaataagcatactgttcatattttatataaattgttcattttctttttcaatatgtattgagtactttctctttttttattatactttaagttctagggcacatgtgtacaacgtgcagg

SEQ ID NO: 474782 - DNA, 543 bp, Homo sapiens
gaagcgacgctcgcatacttgtgctcagtgagatgaagagctcggagccaccagaatctggaagaggcgaggaagggctctcctctggagcctcgagagcgagcacggccctgctgcacctgactccacacttccagcccccagcaccgggagaggggaaactgctgttttttttagatgctgaatttgtagtatttgttgtgccaccacgggaaaccagtgcagcagggaaagccctgaacgatgaggacggcatagtgtggccagggtccaggacagccgctgacgccagatcccccataagtaacatctaccctcagggacgtgtctgcaccagtgagactgctgctctggattcgggagtaattgaattcttattgaaaatacatcattggcgatgtattagaaatagcgggagaaagaatgaagttagtaggtggaaacactaaaaattgagacaaaagaacggcatgaggcataagaaaataatttagaaagttgtcacttgctgtaagttctattgcatttcaactgggagattag

SEQ ID NO: 474783 - DNA, 553 bp, Homo sapiens
cacatgcactgtgacagctccatgcatgttatcaccctgaagaccttccagtgggacaatatgtggaggtggaaggcagtgctattgatggtcccgaccctgtgtaggcctaggctagttgtttataaaggggtgtacaatagcgtcccaggcctccacatccactcgccattcactcagagactcaccccagcaacttccagtcctgctagctccattcgtggaaagcatgtatgtactgctgctggtgcctttgcagactttgagtgtgtgtgtgcgtgtgtgtgtcaaactgtgggagtcaactgcagcacagaaatcaccacccagagggggcttctccaagtgcgcaagctcagcagaggaagcctcagccctgcggaagctcagggagggccaaaagtcaccaagggtgcaatgggagctggactatgctgtcccctttgacaacatgatttcacagagtgcttcctgcgccgatgcagagaactgtcgccagattcgtgagcaataatggtatgaacagccattaattagagagggagattagctt

SEQ ID NO: 474784 - DNA, 1568 bp, Homo sapiens
cgggctctgacagtgattctcaggaagcgaggcccattagtttctcacctgaaagggtgaatacattcatgcagtaggtgtccaggatcctcatgtggtcctccttcatgcttaggaacagacactcatcttcactacgcaaaccagagcctgcatgcctttcgtggtccttcatgcttagggacacagtcgctcatccacactatgcaaaccagagcctgcatgcctttcatcactgggtgacagctctgacggaaacgaatagcagcttggtgcattttgaagttgggttatatgatgcctgcggcttggtgcattttgaagtcggactgtatgatgcctgcggcttggtgcattttgaagtcggactgtatgatgcctgcggcttggtgcattttgaagtcggactgtatgatgcctgcggcttggtgcattttgacatcgggttatatggtgcctgcggcttattgcattttgacgtcgggttatatgatgcctgcggcttggtgcattttgatgtcgggttatatgatgcctgcggcttggtgcattttgatgtcgggttatatgatgcctctggcttggtgcattttgaagtcgggttatatggtgcctgcggcttggtgcatgttgccgtcgggttgtatgatgcctgcggcttggtgcattttgaagtcggattatatgatgcctccggcttggtgcatgttgaagttgggttacatgatgcctccggcttggtgcattttgaagatgcctctggcatggtgcattttgaagtcgggttatatgatgcctccggcttggtgcattttgaagtcgggttgtatgatgcctgcagcttggtgcatgttgaagtcgggttatatgaagcctgcagcttggtgcattttgaagtcgggttatatgatgcctccggcttggtgcatgttgaagtcgggttatatgatgcctccggcttggtgcattttgaagtcgggttgtatgatgcctcggcttgggataccaacgtgtcataggtatggtctctttacacaatcccatatttcttggagattttgttcattctttttcttttccttttctttatttttgtctgactgaattgatttgaggtactggtcttcaagctctgagattctttcctcagcttgctctattctgctgttaatatttgtgattgcactattaaattttgtagtgaattttctagctctatctgatcagtttgattctttcttaaaatgcctaatttgtcttccagtgcttgtattgttttattggataccttagtctccttggattgggtttttactttctcctgaatcttgatgatcttcatttttatccagattctgaaatctatgtatgttattcgagccatttcagccaggttaaaaatgcttgctggggaatgagtgcgattgtttggaggtaagatgacattctggctttttgagttgccagaattcttgtgctgattttttctcttctgtgtagtctgatgtttctttaaactttcaagttaccaaaactaagctcatcactcctgagctgcaagctctaaa

SEQ ID NO: 474785 - DNA, 654 bp, Homo sapiens
tctgctgggtcacagaggggtcatggacgtggatctggcaattttatgcattgtggaggaaactttggaggtgatggagataattttggctgtggtggaaactttggtagaagaggaggctatggtggtggaggtggtggcagcagaggtagtcatggaggaggtgatggtggatataatggacttggaggtgatggtggcaacttcccgcagtggtcctggttatagtagtagagggggctatggtggtggtacacgaggatatggaaaccaaggtggtggatatgttggcggtggtggaggatatgatggtcacagtgaaggaggaaattttggcggtggtaactatagtggtggtgggaactataatgattttggaaattatagtggacaacaacaatcaaattatggacccatgaaagagggcagttttggtggaagaagcttgggcagtccctatggtggtgggactggtgttggaagtggtggatatggtagcagaaggttttgggtgtaaagaatgtttaccgccctccatttaaattctgaaaagggatagtggatgttttccctctcctgtattagaaaccattcttaaagtcttttcaaaatatagaaccattaagcctgctatatctgagcaaattagtgggt

SEQ ID NO: 474786 - DNA, 1749 bp, Homo sapiens
tgtctgagattcttaatagagggggagttcctcctccgaggcttagggagctttctccctttcccaaaggaagggtggggcggcgccggccagtgcaggagctcctgcgggccactggcatctggcagcagcgactctcccgggtcagtcagcagagcgaggcgcccgcctttccacctccgtgagtgctgccgaggggaaaactggggaagtgggtcagcccggcggcttccatccacagaccctcccccgccccggccgcccgctctccctcggagcttaaggcgtctgctcccgcccggcagtgttgcaagagtggccctgcccaggcgtgggtcgggccggtgtctgcgccaaggcgctgcgcccgccggctgcccttgctcacgcttggcgcccatcctgaggcgccgttggccctcccgccaccccctcggcggggcccttccctttactatggtaatagtgacattcagaggaaaaggctagcgcggcgacggcgccccggctcccgcagagcggaggctcgggctgcggacggggctgcgcgcactcgcaccgctggacgccgcggggcgggcggccgccgagctctccccgcccggcccagcccctccgccgcagccgcggggcagccccgagccacggccccggctggcgggcgggctgcgggcaggatcctggcgctcgggctctggcaaggggaaaggacagaaacggcgcatcgggagggaccctgcctcaccgcttgtatatggcaaagtttctcgccgagctcctgggctgcacgttgccgagcaagggcgcctctcccatgtttgaggtaggtggagggtgtgtcccctcagggacccctggcgggcctgggggtcttccgctagttgacacgtgtgctggctcacctgcctggtttccacctggccatcgggcgggacggggcaggggaggagggctaggcggagacctggacctctggagacgggtttctcactcctggacctcagagacggctggctggctggctggctttcctatattgaccactcagtcgggagagtttcatactgtacaacccttccccgccctccttatctctacactgagctcctttgtctgtttacgtgaatcttatacactctcatccacttggttattccgatgggcttcaagcatctagaagatgaaccatgtgatcaggctgttttgaaagcaaataacttggacaagtatgactgtagcttctctgattggatgctggtgggtgatcataagagagaagtttactttgagaataatagctcctattgccacagctgggctttctgtttaagaatgaaattctatcaacataggggaggagagatatccgtgacagaagaccaattgcaaggaacggctgctgggctagacccagaaagagaccaagtgccctgtgccaggaaaaatagcttaacatatcatgatccaagccaccctgctacagtgccctttcagagagcagaatcagaggaaagagctttttcaatgcaaggggagcactggtggcctgggcagagcggtcatggggagtttgctgcaggggtagtctaatctgtgttttatccagttcatagttgctaggctagatggcttatgcattggaactattattttgctatatattgtgtgagagagtgtggtgataattttttctatttcggtttgcatctagaaaacccaattggattatcaattcaatattagctcttt

SEQ ID NO: 474787 - DNA, 657 bp, Homo sapiens
caaagccctaacttcaccactatggaatctttgcacataactaaattgccctttcttgctctgtcacccatcctggagtgtagtggcacgatctcagctcactgcagccgctgccccccgggttccagcaattctcctgcctcagcctcctgggtagctgagattacaggcacactccaccacacctggctaatttttgtattcttagtagagacgaggtttctccatgttggccaggctggtctcaaactcctgacctcaggtgatccagctgcctctgcatcccaaagtgccgggattacaggtgaatggacagttggagacaactgggagttaaggtttaaagagccatgcaggggaagtagagaagacctacctacccaactgtggattcaggctgagatcatagcattaagtgggcctaaggcgtaattgtgtatgttttagcttttgattctatatgtctgattttgttctatatggaagaatgtttgtgtaagtagattttatgtcgacttttaatttaactgtatttgtaaaaaattgcttttggaacttgcggggtttgaataagcctctgagataatgtgtttaggatggtactcagagctgagagtaaatgtgttgtgcttgatatatgttttctgtttagcagta

SEQ ID NO: 474788 - DNA, 669 bp, Homo sapiens
caaagtacagggctatgcagttggaattccttacacaaaagccaggaccgtgccctgtagcctttctgtccaaacaacttgacctcacagttttgggcaagccctcatatctctgtgtggcaaagggactatgtgtcaatatctacactgattccaaggcctcagaccccattgctcaaggcaacaattatgctgataagatagctaaaaaagcagccaatattcctacttctgtccctcatggccagtttttctcctcatcagtcactcctatttactctcccactgaagtttccacctatcgatccctcaccactcaaggcagatggttcttagaccaaaaaagaatctccttccagcctcacaagcccgttctattctgtcgtcatttcattacctcttccattccaataatggaccggactttattagtcaaatcagctaagcagtttctcaggctcttggtattcaatggaaatttcataccccttaccgtcctcaatcttcaggaaaggcatctctccttggcttgtagatggctgtcttctccctgtgtccataattttccctctgtgtcctaatatcttcttaaaaggacactaatattagaatagggcgcaccctaatggcctcattttaacttaattacctctttaaagaccctatccc

SEQ ID NO: 474789 - DNA, 837 bp, Homo sapiens
tcctcttttctgaggaagaatgaagtatgattcggagggctgctatggcactttgggaacgtgagcaccctcctggtcaaaatgttctttctgtgggctataaatttcccactcaagacccccattgggacagtaacaatgcaaatcactgggaaaatatgcaggacctaagggagatgataataaaaggaattcaagaatcagtaccccaaactcaaaatctttctaaagcatttgatattcaacaggaaaaagatgaggaacccactggattcttaaatagattgagggagcaaacgagacagcatgcaggccttgatttggaaaacccctcagacaaggaatgtgaaaacttcactttggaggctcaaaaagtatatgcaagaagagacaaggaaaaacaaaaacaaaagacaaaacttatgttatccaccttccaacagatagctccaaatccgcatatccctaagcaaggctttcaaggggccagagattataaggggcctaaaccctccttgagaggatccaagcctccatctggagggtcaaggccctcatttaataagccccctaaggggtataggggagcaagggcagagaatgctaagactgagaaggaggaaggacaagatagatattacagatgtggaagaacaggccacttcaagagggaatgtcctgaactaaagaaagagagagaaactttcacactcatgactttggaagaacaataggggagtcaggggctctgcctcttttattttgagccccaccaggagcccttgataaatttggaggtgggacctaaacatgaatttatcacctttttacctgatt

SEQ ID NO: 474790 - DNA, 1961 bp, Homo sapiens
gtgtaggtctaaaaaggcagatatttgaatagggcaaagatatggcttcaggcttccatgacctgtatcttctcctttttttctccctcatcaatgctgtaaaaatgagtgcatctgtcaactactggagcatgttaactcatgtatgttgggatttgacagccactggctgtgaattttctcaccataacaaccaaatgaaaatgtcagaaatgaatctttttgctaagactactgattgtttggggacatccgaaatcactcaggattgtggtgaccagttgaacagagatatgccaaaagcaggcagtgatttatatccctgcagaaggagtctcgccctgtcaccaggctggagtgcgatggtgcaatctctgctcactgcaacttccacctcccgggttcaaatttctcctgcctcagcctcctaagtggctgggactacaggtgcctgccgccatgcctggctaattttttgtattttagtagagatggggtttaggctggtctcgaactcctgagctcaggcaatctgccctcctgagctcaggcaatctgcctgcctgggcctcccaaagtgctaggattacaggcatgagccaccgccctcagccactatcttattttttagcctatctgaattaaaaacataaagtcttctctatgtatgttgatgataaactttgggtttcaaggaaaagagtcactcaggcaacttccaagaatgggaggggagaaggggttgttataggatacagtggaaataaatctgggaggaatctcaatcatgttccaagagcttgcaggggcccagagaaattctcacaatgaggcctcacaggaaaagcaagaacaccgacagcaggaaagcttggaggctaagagttcccttggaagttgaactactgcctgagaatattaaaacaaaaacagaaacacgtaaatagccagccctgaaacgagcctctcaacttctgataggttatatttacatttatgtactttcctatcacagtttataatcaagctaaggctagtagccttgaatatttttagggctgcaatttgtacatcatctaagctaacagatgaaaagtgcaagtgtagttgcctaagcacaggtacattcgttcaacaacaaatctttacctgaatgtccattgtatgtccgacgctgtcctgtatcctggggtggcagcctggggacctgagaggactttgagtggagctaaagaaacagaaaataacttcaactaataaatgtcttttaatatctcttgcaatggaaattttcagtggcttaatttttttacttgtctacttcgaaggtgaagttactcacaggcaggtttcttagtttacagacttagcttttcttccactcccagcgtattatcatttatcaactattgtcattgaatgtccttacaccaggcatggtagatggcttttcagcttccaggcatcatgttgtgtctttttattcttcaatggtattgctttaaattgtaggcatccttgtaatgggttttcttctttttctgacccataaaaaatttctgataatatttgttgaactctgatcccattaaattaaaattttagttattaaaagacaaggtgtcacttttctcaatcttagaaacagatgaggtcagctgcactccctgccctcagaggcatatgttaatcaaagtagtacaaagttagatttttaagccacttccaatggacaactggtttaatttgagcagtcatcaaactgattgtcatgtacttgatcataagcatttctgaataaagttcagtgctggtcttcctttttttttcttgagctgtgccatccattgatgtaagacttgcactgcgacttttgcagagaagctaagagagagggagcatccataattagggaagcagtgggttgtgcatatacaatttatttaagacacaattgctgg

SEQ ID NO: 474791 - DNA, 629 bp, Homo sapiens
ctcctcaagcatggccagagtgggcgccgaggccaaggaggcaccaagagtgagcgagggctgccagcatgctgtcatgtctcataaggacttgctttatgaatctgggtgctcctgaatttgctggaggtccactccaggccctgtttgcctgggtatcagcaatggaggctgcagaacagcgaatattgctgaacagaaaatgttgctgcttgatcgttcctctggaagtttcatctcagaggggtacctggccgttccaaacaaatgccacagaagaggagaccaaggcagaggttagggaagcacctaaagacaagtctggactctgcggatattcttttctcttctccattttggagaagtctttccccatcgctgcctggatttctgatgcctcctggcaaatagaagctgcctatatatacttattaaagaacctcaatcatttcaccctgaaatccccagtgctatattgacccatctgaagggtcagaaagttgtccagcagcagcagaaactatttaaaactcttccctgtttgtgattttttatggctgattgacaaaaggagggcagagaacagcaggcgaagtgaattctgtttgtgattggggtgggggcagggg

SEQ ID NO: 474792 - DNA, 969 bp, Homo sapiens
ataactggctctgagatgtattttcctggcatgttagcctttctgcagatctggtggtaacaaattccctcagttctgggatgagctcaggctttatgttccctcttcaacttgggggaagcagggacagggaccttggcagtagcaatggcagagggcctttcacttctctcttggggctccaccccagagaaatgcagggccgctaccaatcagagcattctgccaaggggagactgtggcatgctggaagtgtgagtaaagcactcagtgcctttgctccttcccagtctgagggcagcaagggcagtaccattgtggtggcagtggcagagggactgtcagttgcttctgggagctcaaccccagagaaatgcagatctgcagccaatgggaaggttcagccagggaggcagcaagggcaggactgctgcagtggcaatggcattggcagtggcagtggcagggggctgtcagttgcctctggaaactccattccagggaaccagagccaccagcagtgggaatgctcagttgctggggtggggcagctgctctgcagtctgatgaagagtagtgggcctggagccggccacttagagtgtgaagagtacagtgacaaagatgatgatggagccgcaggagaaaacagcatatgtatgctatttagagacatagacctggatgagatcacccaggacgtgaatgttgatagacaagaagttcaaagactgaatgctgcaacatgccaatgtctgagtgtttggaaggcaagaagaagcaagcaaaggagactgatgaagagcaaccagtgaagtaaaacaaaactaaagagggtgacttggtgctaagtgaaggaagtgtttcagagaggaggagacgtatggaataaggtgaggactgggaagtgaccatgggatttgcattatggaaacagttgatagctttgacaagatggcttctgtggag

SEQ ID NO: 474793 - DNA, 707 bp, Homo sapiens
tctaagatctcaaggcatctgaaaggcagctttctcacaatagtaaccctggggtggagatagagaggtgggcgggacagctgaggccggaaggatgagaggaccagggaaaggtgtaggagagaagagaatggggtgggaaaaggaggggagggaggggaaggcatgggtagaggaaaaagaatcagcaaatgagacaaaggaagaaaaggacagagatgtaggaggagagccagagggagaagggtcatggatgccaagggaagggcctagaagaggacaacagccctgcagcaagcttggaaagcagattgcccagattggagcagaagagcagagaacaccaggagggatgacttcagagaaaaagggagctgatagaatacctcatggtcttgatggtcctgaggttttacaggactggaggatagcagctccagtcaatgaaagggcacagagaggatactggagctgggccattcctccccagtgccagatactctaataggctcccttgctgcctggcagagatgtttgcagagctgacatgtaataactgtacatatttatgggataaagagtgatatttccatacatgtatacaatgcataataatcaaatcaaggtaattagtatacctgtcacctcaaatgtttatcatttctttgcattgtgtcttgtcttcttatgaaaagaaaagtagtctc

SEQ ID NO: 474794 - DNA, 980 bp, Homo sapiens
tttctagaggagaatttaagatacttgcatccataatgctgaatattggccctcactctcttctggcttgtagagtttctgccgagagatccactgttagtctgatgggcttccctttgtggtcaggaccctcagctgcaggtctgttggagtttgctggaggtccactccagatcctgtttgcctgggtatcagcagtggaggctgctgaacagcaaatattgcagaatggcagatgtcgctgtctgatccttcctctggaagctttgtctcagaggggcacctgccagtatgagtgtcagtctgcccctactgggaggtgtctcccagttagtctactcagggatgccaattatagcggccatggaccaggtgggtgggtgagttccctggccttaggaagccagtgtggtgtgggcaatgacagtagcagtggcaggataattctctgggtcccaagtgatgtacaatgatgttggcagtgactgcagttagctgggtgggcgagtctccaggcccatgggtgttgcttgcaggagtaatatggaatcaaaatagtaagaactatagtcttcatcatagtcagcctcatcaggatattacttttgaatgtttaaaatgaagaaggaaaggataggcagagagacagaggaagaaacggaatattttaaattattagcattcaataaataagagtctctttattcaccaaagaaactattaatactttgattaatgcagcacaagtttcacttggtgtgtctactgctcctatttttatgactatgtgtacccaatatttagctcacactttctctgataatcattgttttactctctgcttctatgatatcaattttttgtttagattctatgagtgatatcatgaggtatctgtctttctatgtctagtttacttcagttaacatgatatcctcaaatatattaaaaaggaaagaaaaaaatttccttgaaacaaa

SEQ ID NO: 474795 - DNA, 625 bp, Homo sapiens
gccacagcttaaatccgtcaaaaatgtttcaccaaaaaaaagttcatagtgtgggccttccaggggaagaagaccctttgacatcagtgaaattgtctgtttcacgactttctgggacacccacagagccagcagcacgaacgtttaagtctgctgaagctgtgcccacagccaccccttcccccaggtgctctttcccagatgccctgcccagagaggaggaatctaaagaggcagtctggctacagtggctttgccaaactgccatgggctacccccagtttgaacttccaggcgactttgtttacactgtgaggggaaaaccacctactgaagcctcagtaatggcagatgcccttccccccaccaacctcaagcatcccaggttgacttcagactgctgtgctggcagcgagaatttcaatcctgtggatcttatcttgctgggctccatgggtgtgggatctgctaagctagaccacttggctccctggcttcagccccctttccaggggagtgaacagttctgtctcgctggtattccaggtgccactggggtatgaaaaacaactcctgcagctagctcggtgtctgctcaaatggccgtccagtttggtgcttgaaa

SEQ ID NO: 474796 - DNA, 740 bp, Homo sapiens
ctcctcaagcgcagccagagtggacgcccaggccgaggaggcaccgagagcgaggcagtgggctcccctctggcccagatcaggtccagaaatgccgtctgagagtcaggtcctggaatcggggacccaaagagcatgtttggtgctctaccccactatggccatgctggcatctgaagccaggaaagccatcacatttctgcaggctccccttgtagattctgatctctatgatgagaaaaccatggctcaggacataggcatgggcaaagacttcatgactaaaacaccaaaaccaattgcaacaaaagccaaaattgacaaatgggatctaattaaactaaagagcttctgcacagcaaaagaaactatcatcagagtgaacaggcaactacagaatgggagaaaacatttgcgatgtatccatctgacaagtctaatatccagaatctacaaggaacttcaacaaatttacaaaacaaaaaacaaaaaacaaaaaaaaacaccccatcacaaagtgggcaaaggatatgagcagacacttctcaaaagaagacatttatgcagccaacaaacatgacaaaaaactcatcaccactggaacaccaaatttaacaattgtctataccaaagcaatcaccttcacaagaaccaagtcagatgagcactcacaataactggttttaacttaatattgatgaaagaggtattgaagaagataggaaggaaagttgtaaatc

SEQ ID NO: 474797 - DNA, 794 bp, Homo sapiens
ctataccctgtaaagccacagaagcagagctgcccaaggccatgggagcccacctcttgcatcggcatgccctagatatgagacatggagtcaaaggaggtcattttggaattttaaggcttaatgactgccctgttggattttggaattgcatgggacctggaagccatttatacctgagactccatttaccccctctgtataacggacgtgaagacctacatgtattattagtccgttatcacactgctgataaagacatatccgagactgggcaatttacaaaagaaagagctttaattggacttacagttccacatggatggggaagcatcaccatcatggtggaaggcaagaaggagcaagtcccatcttgcatggatggcagcagtcaaggagaaaatgaggaagaggcaaaagtggaaactgctcaaaccaacagatctcgtgagacttactcactaccaggagaacagtatggggaaaactgcccccatgattcagttatctcccactgggtccctcctaaaacatgtgggaattatggcagtacaattcaagatgagatatgggtggggacacagagccaaaccatatcaccacataaagggtgatgagtattataagcaatgtcctttaagtgcctagtatagttcctatcttacggtagatggagatattattattcattactgcaatggttaatactgagtgtcaacttgattggactgaaagatacaaagtattgatcctgggcatgtctgtgagggtgttgccaaaggagattaacattt

SEQ ID NO: 474798 - DNA, 1151 bp, Homo sapiens
agcaccttctgaattaagtgtggcccctgaggttaggggatgcgatgtttgctgaccttggagagagagggaaaagtgcaaagaccaaaacacaaaaagacctcattctttttgaatattttaagcagcagcaacaaaacgctaatcatctcaataaatattttgccccacagatgttgagtgttaacaggagctcaaagttggaggaggccaaagacctgcagagaggacatatatgtgagaagcaggggccattgcccagtggcattgtccttcatcaaggggatacatctgtggaacatggctctgcccctgttggaaccctgacagccagaaataatggtaacgtggggctttgtgaaaagggattgtggcttcaagcaagcatggaggttggtttggtcacagaaggacacttctcctcttacctggttttgctgactcagatcttggcagaagagctgtgctggagtccatgttgtcctgaaggatgacaaagcattttttttactcatctgttttttaatttttttttttaattttccaactgtcttgtgacagaagtagcagtgcttcatcttacagatcaggaaattgaagcttagagccaccatgtgaccatgggtggcttgcccatggtcacacaagccaaatgcagcaaagggtggattatgaggttgatataattatccccattttacagataagtaaactgaggctcagcgatgctgaaaaagtaatacaagggaaaatggtgagtgaatgtcagagctaggtcttaaacacaggtattctaactattttaagaattgcatctgattaaagacacattcaaagatattagaaaagatttgcaaacttagcagacaaggctagaacctgagctgcaagagtttgatatattgccatgattaactactttcataagaaaagatgatgacgatttgatcacttcattttaagaagggggaggtgcctttgctatgaagacaaacctgcccatctctactgaattgtaacatcttagtgatactgaacttttcatgataaagaaagtggaattcacatttgtgctgaaaatgtccattttgctatttactaacatccaaataattccaaattcttagtctgtgtgggtacaaaggttgctc

SEQ ID NO: 474799 - DNA, 888 bp, Homo sapiens
gtgagatttgaaggagacaaatatgcaaactatatcaaacaactctggtttgcggtccatgggagtgactggttgtatatggaatgttcctgcaagtatgggacaagcagtaaaggccacagtctcaggatccaagtccacgagagaagaggtgtgctcaggagggctgactggaagtctgaagacagcatggcatacaaccaatgggtggagagcaggagccagagatgacatatgggatgaggccttcattaaagtccatgggtattatccatcaggctttcctccactttcattggcaataaaatccccctcatttaccatctttcaatttgttcacgcaacctcatttttctggatgccagacaagagctcaggagccgcaagtgcagatacaaaaggctgtcacactagccctttgcccttgctggcagggggcagctgtctcacgcaaaaaggcagaggacccataaaaaatgatgagttcatgtcctttgtagggacatagatgaaattggaaaccatcattctcagtaaactatcgcaagaacaaaaaaaccaaacaccgtatattctcactcataggtgggaattgaacaatgagatcacatggacacaggaaggggaacatcacactctggggactgttgtggggtggggggaggggggagggatagcattgggagatatacctaatgctagatgacgagttagtgggtgcagcacaccagcatggcacatgtatacgtatgtaactaacctgcacaacgtgcacatgtaccctaaaacttaaagtataataataaaaaataaataaataaataaataaataaaggcagaggacccactaagctgttaacacttaagccgtccatggatggcagagct

SEQ ID NO: 474800 - DNA, 572 bp, Homo sapiens
ctgggagaaggctatgcttagtcattcagatgaaagaatactgaagagacttttagtcactactctttggagtcctggttctctaactttactccttcttaaggctcgtctcttcctcatttcctcttctccctcaattctgttagttactgtgtctaattcagaaagagctgatttgggcaattctgaacttgaaaaatgggtgcttcgtgccattagaaaccttataaataagcctgcaccaaatagttctggaccacttggtattatatttattcaagaggtaaaactagtaaaggagatcaagaagatagagcctaagaaggaagatactgccaatttgtttgaggtccagcttgcaaaacttttttatggagtaattccaggtagtatcaagaaccagcaggggacctgtctctgatctttaccctaaaatcctggtgcagttcctgaaagttttgtccatgaaagtgtgaggaccttcctgtgactgtggttcactgagattttttattctcacactagtccacattccacgtctaggaatttgtcagaattaccatttaaatctt

SEQ ID NO: 474801 - DNA, 838 bp, Homo sapiens
ttctgtgtagccttgggacatggtgctctgcatcccaactcctccaactccagcgatagctaaaaggggccaaggtacagcttgggccattgcttcagagggttcaagccccaaccttggcagcttccgtgtagtgttaggcctgtgggtgcacagaaggcaagagttgaactttgggaagctccagctggatttcagaggatgtgtggaaatgcataatgtccagacagaagtctactgcagggaaggcaccctcataaagaacccctttgaggtcattacaaaggggaaatgtctggttggagcccctataagagtccccactggggcactgcctagtgtagctgtaagaaaagggccaccatcctccagagcccagaatggtagattcactgacagcttgaactgtacatctggaaaagctgcaggcactcaatgccagcttgtgaaagcagctacagggactgtaccctgcagaaccacagggacagataattccatggttagtggcttgctcagagatgagaatggtgaacactgtgaaactttatggcattatgaaactgctttcccaattcaactctagaacattacgaacttggcctctcaaagcttcgatttatttacttttataaatggagatagaaataataatatagtggatgacacacagtatgtaagagagcttcatgtagtggctagaaaagagtttaccctaaataagtggttgcagtagttataggagtaactagatcttcttaaaaaggtatttctcttaaagaaatacttatattaacaggctgtgagttgaagacctagcaaatatccaccaaggtac

SEQ ID NO: 474802 - DNA, 2123 bp, Homo sapiens
aactaattgctaaaaatagtcgcctatggagcagcccctatatccttccaggaatgtccttctagttctaggatcagaatatgcggtggaaaataagacaaaatccccatcattgttgagcttgcataagcagttggtggacaaatacgtatacaataaactgtcagagaatttgaagcaacaccatattcttggtgaaagactgtctacaactagccctattactacaagccaaacatatgaggtcagagtttatgatacatccacattactttgcaagcacaaaagaccccagaatgggaaggaatggatccatgacccagttgtgaataagccaggtgaatcaactttgactctgctagaagaggatcaactgctggagatcacaaatgatggtggccttaaaagtatgtttaagacaacttcaaatctctatactctctggattaaagtcaaggtggaatatcctgagattgccacaaaaccactgaaaggcctgctttcatttccagcatcctatctttgtgaagaagggttttcagcagtgacagcaaccaaaacgaaattacagagtagactggacataacacacttctggtgacactatctccgatctcccccagatgggaccttctagttgtagcaaaacaagctcaaggctcccactgattctatattatggtgagttgtataattatttcattatatattacaatgtaataataataaagtgcacaataaatgtaatgtgcttgaaacatcccaaaaccatttctcaccaacctctggtccttggaaaaattctcttctatgaaaccagtccccggtgccaataaggttggggactgctactctaggctattttattttcagttttcagtgataattagttaaatgctagaaccatagaatgtttgcctctggggatgaggtaaggagagtgaagaacaataaggaagtacagtagagtacaggaaggtagagtaaagtgagcaaaagagagtccagcgtaaaataatagtataaggtgtaaattaagggggaaagtgaggggagaggagtggaagggaggacagaagagcctagaggagggaaggggagagaagggtgtaaagaagaaggaattggaaggaaagagaaaaaaaaggagagggagagaggaaaggagaggaaatgaggggaagaaagggaggaaaagggagaggaagagaagggagtacaagggatggagaaggaagggaagggaagaggagaagaaaggagaagaggggaggaaagcaggaagttgagagaataccctttcctggaataatgttgctaatgccttacgaattgaggaatataattaacctagcctttgccacctggagtctaaaacatgacaaaaacataatttcatacatttaattaaataatgatggcaaatgtgtatagatcataacaaattgttacagagctatttgttttaacgtatgttctaaggttcaaatgaggtattctctggtttctttcatatttggacataaaaatatgtcccccacagtctattaacatcggggaatatcttcctcttcagaactttattaaaagctttgactaaacaacacttctcacacaagcctttggtagaaaagcacagataaacttaactttttttttttgaaaggcaattaattaaagaaaatgtacaatgagaaatgattcttacactaactgtttattaatgtgttccattataatatctacctagtaatgtattccatggcttttttgcatatttcatgcatacaatgatctctatatgtctttactttctttcatttacttttggagagggatccatattatttatcatgcatgatttactttttgggagggcatccattttttaacatgcatgatattacaggttgaaatgcaaaagagaaaagtaacaacaaaatacctttgtcttttattaaaaccatgctctatatcttaccttaaattgtgtacctatctatacatagattgtaaattcatgtataggttttatctataaatgaatatgttactttaaagtagtcatcatgcgaaaagtttctacttgttaaaataaccacactattggctaaataattttc

SEQ ID NO: 474803 - DNA, 740 bp, Homo sapiens
ccgcgagggtccgcggcttcattcttgaagagttcaactttatgctccttagacagtttctccttgtgttatatctctgtggtttgaactactttgtaatttcagcaaaggacaaacccacaaccaacatcatactgaatggagaagagttgaaagctttacccctaagaactggaacaagacaaggatgtccattctcaccactcgtattcaacatagaaaatagtactggaagtcctaaccagagcaatcaggaaagagaaacaaataaaaggcatcccaaatggaaagaggaagtcaaattatctctatttactgataacatgatcttatacctggaatactctaaagactcctccaagagatgtccagacttaataagtgacttcagtaaagtttcaggatacaaaatcaatgtaaaaaaatcaatagcatttcaattaactaataacgttcaaacagaaccatgtcaaaaactcaatcccatttacaataacaaaaacaaaaaaaggttaggaatacatttaactaaatatgtgaaagatctctataaagggaactacaaaacacttgtgaaagaaataatagataacacaaatagaaaaacatcacatcttaatggatgggaattgttaaaatgaccatacttctcaaagcagtatacagatacatcacaattcctatcaaattagcaatgccatttttcatagaattaggaaaaaatatcctaaaattcatac

SEQ ID NO: 474804 - DNA, 3221 bp, Homo sapiens
agcctcatttcccagtgctcctggcagtcaggttggggccatgtgaccatctccagccaatgacacgggagaagaaatgagcgagccccctgggagggccactcagggtgaccaggacatccatggcttacgcgacccatgtggcctggcttcctggactgcagcagagatgcagaggccgtgctgccagaccccaggaagtacttacccagcacacggaggaccctggagtcctgcagcaccgagttcccacaggcggcctgcaccgtcacacgcacgtcgcccgtagagggcctgcaggggggctgtggggacccaaaaaggccagggttagatgatatcagggcatggggcatttcagaggctgcttagtgatcactgtcaccagcaacttcattgctatcatcaccaccaccactaccactatcatcaccaccaccaccaccaccaccatcaccactactaccaccatccattcccaccaacactatcaccaccatcaccaacaccaccaccatcaccactactaccaccatccattcccaccaatactatcaccaccatcaccaacaccaccaccatcaccactaccaccaccatcaccactaccaccatcacctccaccatcatcactgccatcaccaccaccatcaccaccatcaccatcctcaccagcaccatcaccaccatcatcaccaacaccaccaccatcaccactactaccaccatccattcccaccaatactatcaccaccatcaccaacaccaccaccatcaccactaccaccattatcaccataactaccaccatcacctccaccatcaccaccatcaccatcctcaccagcactatcaccaccatcaccaacaccaccaccatcaccatcaccaccaccatccattcccaccactactatcaccatcaccaccaccctatcaccaccatcaccaccaccattgtcaccaccaccaccatcaccaccatcaccatcaccaccaccatcaccaccaccattgtcaccattatcaccaccaccatccattcccaccactactatcaccatcaccaacaccctatcaccaccatcatcaccattactaccactactgttaccatcatcaccatcaccctatcaccaccaccaccaccaccattgtcaccattatcaccaccaccaccaccaccatcatcaccatcaccaacaccaacgtcaccatcatcactaccacctccactataatcatcattagtaccatcaccaccaccaccagtactgctatcaccatcaccaccatcaccaccaccaccacgaccatcaccaccaccaccaccaccaccaccatcaccaccactatcatcaatatcaccaccagctaccagctctgccctactattgtatgggtcatcagggtgtaaggttcacgtacatggccttgaagccgtccccaaggtctacctggtacttggtagtcaggacatcaccctgcagagaaacaccatgtggccactcaggagtgggccttgaagctgaggggccagagtggttcattcactcactcactcactcactcattcattcattgccgccctcccttccttgacatgagtgggctctggggacccacaggagaccgggcctggttctgccctggagattcttcctggagtatggggctgaccaaggcagctggtttaactaggggctgtggccaagggatatttcagaacaatcacccagcggcagagagggagagggagaggcccaagggtgtcatcagagagcagctggggggcagtcagggcccgggggagacccacagaggcccgtgctagggatggagccaggaaggggcacgaggaaaccgtttcctagtgatgatggaggaaacagcgtgattactaaccacttagccatcttctcagtttataccagccaaacgttgtaagttgatagaaaacttttacgtaaattctgttcacttaactttctccacagatgtgtttgagagtgaatacatgagcgtgtaagcatgtgtgtgtctgtgtgtttgtgtgtatgtgtgagcgtgtgtaccagccatgggaacaacatgtgcaaaggccctagggtgggtctgagcctggaggaggagcgggtgtggcacgaggctggagagaggccctgggcaaccttttaggagatccctaaaaggggtggcctcatccagcttgctacttgtgaagctccctcaggctacactatgcgtctgtgaaagtggcattgctgccaaggtgctgggggtacctgtctccccaaggctgatcccccctcttgccctcagggccaaattctcccagatggctctgccactgaataagcattcagaagttgatcatgcacaggcccatttcattagtgctttgaaagaaaatacccttctctaagggccacccacccatggcacctacagcgtgcagatggtatgagatgaaatcctttgtcttgatcaagatcctggctctgacacttcagacaagagtccctgttgtcaagcccaggtggatgtgcaaccactgcagcttcatgatacatagcagtatgtccagcctctggtggaggaaaagcatcgtaactgcttgcacttggtgatgccttcccctcatgcacagcttgtattcagcaaaccacagactgaaggaacacctactgtgtgttgtggagcttacagttcagcaaggaggacaattagggaagtggccgccatgctgtgaggatgctcaagcagcgcctgaggcctcgtggccaggagcccgtcgctcaccacaggaagtccgagtcccggcactcgcacacgcgggacgtgagcgccgacgtgaagctcctccccttgatgcaccaggacgtggactttcttttccggaaacttctctgctggcccatgatacagcggtcgccctgcagcaggaacatcagggcttcctcatcccccactgccccccaggtgatgtcaaattctctgatgcctggtgtttcctcttagtcagtttccacccactgaccttggctttgaactcccatttgcccatgctgaattcaagttgagcccaatctctcctttgagagggtccctgtacccaccgtgatggtcttgagtaaagtcttccaccccgcgctttaacaagtaccattaaatcatttcttcaacagggccacccacccccgagcagttccaggccccca

SEQ ID NO: 474805 - DNA, 1046 bp, Homo sapiens
ccttcccctagtcaggcagcagaatgaccaacgcccggatgacagagtgcattttggcccatggcgctgagcagggaggaagggggagctgaggatctgcagatcatcagcacggacgagagtcaggtgttcgtggcggtgcaggagtggtaccagatggacacctacaacctgtaccagtcggacccacggggcgtgcgctacgcgctggtgctgcaggacgtgcgcagctcacggcaggcggaggagagcgtgctcatcgacatcctggagccagactgccacctgcacctgcacctgcgctgggcagacaacccctacgtatcaggcaccgtgcacaccaaggacaccgccccaggcctcatcatgggtgcagccctgagcatctgctgggagcaggaggaaaaggcgcgtgggctggcttcacatctgctggcccgacatggctgcctgccctggcacaggtcccagtgccacgtgaccgcactgctggaggtggctggggatgatggctacctgtttccacagggtaacctgggctcacagctggtggaatataaagaagaaatgtacatcacgtcagactgtggtcacacctggcggcaggtgtttgaggaagagcatcacatcctgtacctggaccacggcggcgtgatcgtggccatcaaagacacctccatccctttgaagatcctcaatgtggacgagggcctcacctggagcacgcacaacttcaccagcacctcggtgtttgtggacgggctgctgagtgagccaggggacgagacgctggtcatgacccacctgggaatcagggacatctgccacctgccccaggtccccttgctgctcatcatgggccaccccaagtatccatccccagttgggggtgctcagacagggaccagactggagcagcgtgcatcacctccccgacccagatgcttggcctctgcggggccactgggggccaaccagagcgactcacgcagtgcaattgacaagtcatagatcacaggtggtagttgtgggaatattcacgccga

SEQ ID NO: 474806 - DNA, 1008 bp, Homo sapiens
cagtcgcgagtactggggatagggatgttgacgaatctttttggggtcatccttgtcagctcctcactcagtgaccgggaccagagcctattcctcagcgcagacgaaggcgccacctttcagaagcagcccattcccttcttcgtggaaactctgattttccaccctaaggaggaggacaaggtcctcgcctacacaaaggagagcaagtgtggaatgttcttctcccctcgccaagagcggtggcttgttcttccccagatcagcatctcctcctctgggagctgtgtccatggggttcagcagggaactgaggctttgtcccccggctctctcacactgtctgtcaggcccagacagaaaaagaagtacaaccaatggctggagctgcagaatgcacttaccagcccctgccctagagtcaaacgtgttcattcggtcagcaaatgggccttgcgcacccggcagccacggattccgggctaccgctggtgccgcagctgtgcaggcgtgagctccgcacagcgcacacggggccggcaggctggggacagtgccgccaagatgcaggcagctgagccggggctgggctgggaggacttcaggggtgggggtggaaggcctggggcactgacccaaggagcccctggctccattcattcctcccagacctggggcactgacccgtgggcccccgaccccgcccactcctcccagaggacctgtccagctgcctgcacaggcctctctcaggccctgtcctcctctccattctgctgctgcccccagctgggcccaggcctggcctcctcagggctccctgcctccacccacagcctctggtgtgggctacttgaaacgctgtctgaccacggaccccctgagcgcctcatcttatccggccttgaagcagcttattcctgacgtcctgaccaagcttttgtttcttttttctgccctaaagctctacgtgtcatctgacttggggaaaaagtggacacttctgca

SEQ ID NO: 474807 - DNA, 1236 bp, Homo sapiens
tttttaatcttttgtttgatttaaacattgcttttagtatgatgcctacaccagctgtgcagaaagggctctggagagatgttcatagcagcataggcttccagctcttcttcagttctggaggctccaggacagccaatattgctttgtcaaatccattctttagatcttgctgtgtgggtacaggaccgtccatatacttgacagccttcaggttgtgggccggcttttcagcagtctctggagtgataggcttctatttgttcttggtaattttctcaataatagaccctctgagatcaatttgggttgtgacaagcaagaaaggagcctttggacagtgcagcctggcccccaaatgccagtcttccctcctgtctcgaaagaagacaccaagaccacctcctgttctgagaccagaggagacttcggcctctgtaggcttgccaaagaagggcgaaaaagaacagcaagaagcaattgaacacattgatgaaatacaaaatgaaatagacagacttaatgaacaagacaatgaggagattttgaaagtagaacagaaatataacaaactccgccaaccattttttcagaagaggtcagaattgatctctaaaatcctaaatttgggggtaacaacatttggcaatcatttacaagtgtctgcactgcttgggaaggaaaacgaagagacattgcattatttgaccagagttgaagtgacagaatttgaagatattaaatcaggttacagagtagatttttattttgatgaaaatccttactttgaaaataaagttctctccaaagaatttcatctgaatgagagtggtaatccatcttcaaaatccactgaaatcaaatggaaatctggaaaggatgtgacgaaacgtttaagtcaaatgcagaataaagccagcaggaagaggcagcatgaggcaccagagagcttcttgacctggtttactgaccattctgatgcaggggccgatgacttaggagaggacatcaaagatgatatttggccaaacccattacagtactacttggttccccatatggatgatgaagaaggagaagatgataatgaggaggaggaggaaggattagaagacactgatgaagaaggggatgaagatgaaggtgaagaagatgatgatgaaggggaggaaggagagaaggatgaaagagatgactaatagaatactgatggattccaaccttcccctttttaaa

SEQ ID NO: 474808 - DNA, 1077 bp, Homo sapiens
ccatacaccattggtattgccataatctggagcacacattctagtgaggggacactgacaataaacaagtaaaaaaaagcaaacaagttattttagacaatggtaagtcccactgatgacaacaaaacaggaaatattggagaatgtctgggagcttctccagaagaagacagggaaatgtgggaaagtttggaacttcctagagacttgttgaatggctctgctcaaaatggggatagtgatatggacaataaaatccaggctggggtggtctcatgtggagatgaggaacttgttgagaactggagcaaagttgacccttgttacattttagcaaagagactggcggcattttgcccctaccctagagatttgtggaactttgaacttgagagagatgatttagagtatctgacggaaaacatttctaagcagcgaagcattcaagaggtgactttggtgctgttaaaggcattcagttttataagggaagcaggacataaaagtttgggaaatttgcagcctgagcatatgatagaaaagaaaaacccattttctggggagaaattcaagccagctgcagaaatttgccccccacacagagtcccgactggggcaccacctagtggagctgtgagaaaagggccaccatcctccagaccccagaatgccagatccactgatagcttgctccgtgtgcctggaaaagttgcagacaatcaacaccagcccattagagcagccaggagggaggctgtaccctgcaaacccacaggggtggagctgcccaagaccatgagaacccaccttttggatcagtgtgacctggatgggagacctggagtcaaaggagatcatttaggagctttaaaatttgactgccttactggatttcagacttgcatgggccctgtttagcgagttgcggagtatataatgtaaaaacatagagaactagggagttggtggggagtatctgtgacaatgttcctgcaatgattgaataaagagtctaggctgtgtaggaaagaaaatgaggcctggaatgtgggctaataaagggtaaaaatgaagggg

SEQ ID NO: 474809 - DNA, 664 bp, Homo sapiens
ttatagtttgaagtcagaaggaatggtaccagctcctctttgtacctctggtagaattcggctgtgcgtctgtctggtcctggactttttttggttgtcaggatcctcagctgcaggtctgttggagtttgctggaggtccactccagaccctgtttgcctgggtatcaccagaggaggctgaagaacagcaaatattgcagaatggcagatgttgctgcctgatccttcctctggaagctttgtctcagaggggcacccagctgtatgaggtgtcagtcagcccctactgggaggtgtctcccactgtggtgggctccacccagttcaagcttcctggcagctttgtttacctactgaagcctcagcaatggcagacgccccttccgcagccttgctgccaccttgcagttggatctcaggctgctgtgctaacagtgagcgaggctccatgggcatgagatcctctgagccatgcgcaggatataatctcctggtgtgccatttgctaagaccgttgtaaaagtgcagtattagggtggaagtgtcccgattttccaggaaaaaatttgaaatgtctgattgtaccagctttcctatatgcaggtattgcacatttataacagttcacccttaagggccccttgtttaaaagtcttgctagc

SEQ ID NO: 474810 - DNA, 645 bp, Homo sapiens
acccaacagctccgaagagacagcgaccatcgagaatgggccacgatgacgatggcggttttgttgaaaagaaaagggggaaatgtggggaaaagaaagagagatcagattgttactgtgtctgtgtagaaagtctgcatgttgcctgttactcatctgatcttggacatgataatgcttttggctgggcttgcctggactccaaactccaggttcagattaggtctgctccacatgttctcatcgttacttttttgagtagatatgagttatcatcattaacttttcagtccagaagctacgtgaaatatcttcttctcaaggttgaagagcaaaagtgcaagaggctaaaccaaatcatgcaagcacacttaaagtctctactaatattttactggccagagcaggtcacatggccaagcccaacaacaatacgatgggaaaatatacctactctattgagaggaattgcaatgacacgctagggagaactgatgaggtgtgtgaacagaaattagccccaaaagtcacttcccaatacttacaaatatttttctatattacttaatattctgctttaatagaaatttgtaacctaaaattcaacatcccctcatgttaaaaactgtcaataaactagatatt

SEQ ID NO: 474811 - DNA, 648 bp, Homo sapiens
tgcctgcaatcccaggcactgggcaggctgaggcaggagaatgacgggagcccgaggcagggaggttgcagcaagccgagatcacggcagtacagtccagccttggcaacagagggagaccgttgaaagaaagaaagaacgaaagaaaggaaggaaggaaggaaggaaggaaggaaggaaggaaggaaggaaggaaggaaggaaggaaggaaaaattgactctttaacagacattggacagaatgggaagagtagttcacaaagacaagcatgggtaatgaattcagaaggaggtgcagcagagagccctgctgttcaggaaatggtggaaggaggctctcaagttgggagcctcagcagctggatggataaggtcataactgaaattgggaaaacctgtggggaagtgaatttggagagcagagagaaaaatcaagagtcctattttgtccagtccagtttgaggtacctattagacttcaaagggatacaccaagaagcatccaagaggcacttcagtcatctttgtttcctgatgcatgaagaacagtaggaaacaatgagataagagactaggtaaggcaataatactagtaaattgaatgtttcccatgcatactttttgcccccatacaaggcttaatttac

SEQ ID NO: 474812 - DNA, 1518 bp, Homo sapiens
agcaccttctccccatctctctttctcctgctgtggccatgtgaagacatgcctgcttcctcctttgccttcaaccatgattgtaaatttcctgaggcctcactagccatgcttcctgtacagcctgcagaactcaagaagacccttgcaaaatgccagaacctcaatcttggacttgcagcctccagaatttacctgagctacatcaatgaacaacaacatcaaaatgactgcctcatagatcttaaattctgtgaggacctctgtggggcagaggagccccacaccatagtcactgctacccctggccatgaggagtactgccagacaatcaccaatgtgcccttaaggccaaggtctcttaagtcagcttgcggtgaatgttgcctggtttgggactcccccttcagggcagtggtctcccttctggcccagggcaggtccagaaatgtcatccaagagtcaagtcctggaattgaggacctcaagagtccactgcaccaccacaaggactgtgttgcgtcagacctgcagccagcacagcaccaggtctcgcccaaggcttgctgtaaccattccctggctacagcctatgttcactcaatgtcctggagctctgctatcaggtggttaagccagtctcacctgtgtccttcccttcagggtggtgacttcccccaggctcctggtgggtcccgaggtgctatctgggatccagggaccagagtcaaaaccttagacgtctacttggtgctctattttactgtggatgagtcagcactcaaaccacaagatgcagttcttcccactcttccgtccccttatccaaaggcacaggaagctcactccatgcaaccgcaggtccatggggcacactgccaggctactgccaatgtttccttaaagcccaggggctctcattcagcttgtgctgtagctggctttagtggcccaaaagctagaactttccctgatatgggcacttctaaatgccagatgccattctggatgatgagggcatagagattaaaacatatggtttctgattacagaaaagtataatacagatttggaaaagagagtcaaatattactagaaagatatttctggagaggagagaggagaggaaaatgaggcaaggatcaaataaaccagttaggattgtggtgtttcttagttaatttcatattttaaaggtctgtaattgtgtctctcttcatattggcctgattttgatagcattaaaaacctgtgtttttcaactttcaaatattaagagctaacaggtaagcccatgcttcttataaatacaactaatcttcactgatattcttctatgaaaatgtttagtctaatatagcaactgtggagcaaaagagatattttgtattaaagcagaattaaagttcttaaataagctaaaattacattttatattatcattttatttaaaccacagggaccagctttggaattatttaaaatctgcattgtagctacagactttctggatagctc

SEQ ID NO: 474813 - DNA, 836 bp, Homo sapiens
gtgtcttgatgtgttctgagcagcaaggacgcagatgacaaacacaaaatgcagaggaaggaggatggaggtggaagagggaagacttcaacagggaagactgactcgcatggggacaagtctggggttatgaaggacttaggaaccttttgcaatagttcagaacgtctggctgccctccgggaaaacccctgtgaggccaggcagaaacaggttactaggggaccgagcgagctcccagggcttttcccactgcttcctctacccctgaatttcactcagctctctaaattgactcagctccagctgcggatgatctctctttcccacttccacagtttgggcactcacagtattcagggtgtctcctgggtcctgcaggagcaacccactcccttcatggggaaaaattcttcagtgttttcttactttcgtgacttagacagctttcaataaacaagtaattctgtagaaatgttcctaattttgatttatgtgatgtttccttgttagattcagattatgtatatttctcaggctatcatagacatgaggctgtgtttttctcattgcattctagttggtggcattcaatttcaatgtgttctattactgatgagataattttgatcacttaaataaggtgaggtctgccaggcgttatgaagtaactttaacttttttgaaatgaataagtatttaataaaagagtcctttgagaccttgtaggtattccttccaactttcagtttttaaatttatttcttaaaagtaatgtggacatacagattcctattttacttgatggattttaagcttttactaacattcctttt

SEQ ID NO: 474814 - DNA, 716 bp, Homo sapiens
aaaattgtaactaaaaggcagaaaatgattaccccaaaagtcagagcaacacattcagccccacttagctctcttcacagccgcagtaggactttggctctgctcccacacacgcccacacgcactgacccgtggccctcaccaggagcctatgaggtcggtgctcctttgtctccgtggaccaatgtcatccagcgagcaaatagtagagccccagctctgctctgccaccaggccttgtcccttttagggtccaaaagagcaggtcctgccctggggccagtcagcatgaaaagggatgaccatctcttcctccagaggacagggactctatgccccaggcactccaaggtcaaacctggctcccactcagactatgaagacagcatccactgggtcagagtcatgaagccacgggtcccaggggacagctcaggcattgcccatcccggaacccagaggttcaccggcacgcagcagatgcttcactgatggctgagtgaggagcctggccttgcgacctgcagtgccacagaggctggagaagcagggcagaggggatcaccccccaccaggccatgctggcgggatgattcctggagctccagttggagcatccagtcggaggcgggcggcagacagggggcagcagggacaaggccacgcatgggcctgggaggcccctggcagggacccgctttgcacaaagctttggg

SEQ ID NO: 474815 - DNA, 772 bp, Homo sapiens
ctgtcacgccatggacttaggggctgatgcttggctgacgccccaaccccaggtgcaccaggaagttccacctagaagtgcaggtgctcaagggattctcaccaggaagtatgggtgcatcaggaagttcacccgtaaatgcagatgcagcagaacatcttacctagaagtgcaggaagtgcaggtgcaccaggaagtctgcatctgggagtgcaggtgcacccggaagtctcatgtggaagtgcaggtgcaccagaaagtctcatctggaagtacaggtgcaccaggaagtctgcatctgggagtggcccccgctgctgcagctgcgttccttgttgttgctgttggcactgtcctatcagaagcacctgggcatacaccacagcaggaaagctggaagtctcatctgggactctcatctgtggctcccaccctggcagagccatctgggctgttctgagcacaggttcacccacaacctaaggaacgggaaactccttacattcgacgcctcttagcttgttttaaacaaggcccacggcttccattttcctacactatggcaggccatgacctttactcatgcctcccacacaacaaaatcaaataaaataaatcctgggtaatttgtggtaaattgtgaacattgataaactgacaaagaagctttattccaagagcttgggttagagttcagtagggactgacagggccttcaggaacacggcagaagtaaacacagatcccttctgtaccacaggacccccagcag

SEQ ID NO: 474816 - DNA, 499 bp, Homo sapiens
ctggaaatctgctttcgctcttgaaagaaggaggaatgcgtgtcctggccctgaactgggctcaccccggggcacgtgggcggaggagagagtgtgcaggcccggggcctgggcctacagaggtggagggttttctactctccccagcaccttcgccattgctgagggaagcagctcgtccccaccagcccccagtccacgaaggagaagcaacaaggggacaccccagacccaacggctccagccagccagcctcccggcgcagcccagataaattactgcattgcgcgccgtcgagatttcacaggtgcttgttggctgcaggggctgactgctatggggccctgcacccagctccagcctcctgggcagcctgcacgtcacagactgctgtctgcccaagtgcccactgcggcctccacttgtccagaaatgttcagtgaatacctcctcactccacatctccctgcccccccgggaggtggggtcagaactcaac

SEQ ID NO: 474817 - DNA, 550 bp, Homo sapiens
cctgagatttccccaggtggctttatgcgtgcctctcttaaagatggtgtatctggagtttgttccttcagatgttcagatgtgtccagagttccttccttccagtgggtttgtggtcttgctgacttcaggagtgaagctacagaccttcacagtgagtgtcacagctcttaaaggtggcacatccagagttgtttgtttctcccggtgggttcatggtctcgctgacttcaggactgaagccgcagaccctcgcggcttcataaaggtagtgcgaacccaaagagtgagcagcagcaagatttattgtgaagagcaaaagaacaaagcttccacagcatggaaggggaccgaagcaggttgccgctgctggctcgggtggccagcttttattcccttatttggccccacccacgtcctgttgattggcccattttacagagcactaattggtccattttacagagttctgattggtgcgtttacaaacctttagctagacacagagcactgattggtgcatttttacagagtgctgattggtgcattt

SEQ ID NO: 474818 - DNA, 844 bp, Homo sapiens
agccagcgagggctgctagcacctcagagtctctcatgatgctgcagacaagctgtcatccgggccacaagtcatctcaaggcttgactggggctgaaacccctcttaccaagttcacccacatggttgttggcagcctcagttcttcaccgtatgggcctctccacatacagcctgagtggcctgcagggcctcctggtgtggctgctgctttcccccagagctatgatccaaaagaaaagcaagagttcaagatagaagtttttattgaaaaaaatgcatataaatggaccagtacaaccttcacaaggggtgtgccctgcattgtcagcatctcccatggcagaggaggtgcattcaatcatggcttgaacacagccaccataccgctagtcctagcccatgagatgatctgctgcctgagaaattgtaacccatcctactttgctatctcttacagatttatgctgtagacattatgaaccataaaccatggacatgttaaacttacaatgcaatcaaggaaaagcctacattatcctggatatgctgaggataaatgcccaagagttcaactgctgggttgtgtagtaattttaattttatagtgatacttgagtttatattaatataaatatagtacagtacatttataactttatagtactgttgaattttataggaatttgccaaactgctttccaaagcagctctaccattttacattcccaccagcaatatgagtgatcctatttccccacaccctctccagcatttggcatttttaattttagccattccgataagtacattaaaaaagagtttttcatgggtatcccttggc

SEQ ID NO: 474819 - DNA, 573 bp, Homo sapiens
cagcagcaaagaccaaagatagataaatccacaaaaatgagaaaaaaacagtacaaaaaggctgaaaattccaaaaaccagaatacctcttctcctcataaggatcacaactccttgcccacaagggaacataactggacagagaaggaatttgatgaattgacagaagctagaccccagggatgcaggatccaggctacccctgaggacccaagctccagacctgctcctgaagacacagtgccagacccacccatatggacaaaagctccagaccttctccaggctgtctttcctgcgaacaacccctcttctgccccctggaactcatttttcttgctgtggtgttctgttgcaaaccacaaggaaatcaattctgccaaaacccaagggaacttggaagtgtatccttctccagccaagcttctatggagactacagccacagacagaacttaaactgcaggctagtaaaaccctaaagaagagaaccagctaagttgtgcccagattttcaacccacagaaattataaaataataaatgcatgtttttttaagtggctaaacttgtga

SEQ ID NO: 474820 - DNA, 1174 bp, Homo sapiens
aggcctctggacctgtgatgggaggcgctgctgcaaggtctctgacatcaatggtcccaagtgggccagtctttgggacttacaagagtgggcacagggcatggcaattttgtctttggagggggcaagattgccagcaaaggtggaccccagatgcaccattggatctagctcaggccatggccctgcagccttctggtgtgggtatggtgggatgagtgaagtgccgcagagatgtggagatgtaggggcaattgggcttttgtggaggatgcactctggcagtggttcttacttcaaaacagtaccatgttgcagtagcctggatcctggggagtgtggggggaacactgtgagttttcctccctggagtaatgcagtcacaaggactctagacagctccctacactggttgagactatcttctctgttttttggaccacgtatcaaagcaaaccccaaatctgtgtgtttcagacccaaaatttctcactggttttggttgtacccagaaacctcacaggcatagattttgtcattccttaaagagagtagaatgaagatttgtttttgatatctagatatttaatctatttggaatttgtttctgaaaattatgtgaagtaatatctaacttagttttttccaaatatacagctgattgcctcaacatctctaatttctcctgttttaaaaaatgctaagcatatagttatatttacatatctttacatatgtgtactatatagttttatatatgtattaaacatatgtcaaataaatatccatgcttacctgtatatatagcatatgtttatataacatacagatgtgtatttatattttgtttcattgatatattgtactttttatgccactaatacattattttaattattatattctagagtatagtttaatataataaaaagtctctatttattatccttttctgatatttttatacatttaattttccacatgcagaattgcaagtttttaatggatcatattaaaaaatagatcttattaagattcattaagaaatctaattgagatttttgtttgcattgaatttacaggtcaattttggaagaatttatgtctttgtaatattgagtcttctcaatgagaaaatcaaaaggtaaaaaacaacagatgttggcaaggctgc

SEQ ID NO: 474821 - DNA, 755 bp, Homo sapiens
tggagatactcatctgcgtgcagaagactatgactagcgtgtcatggaacatttcatcaagttgtacaaaaagaagactgacaaagatgtcaggaaagacgatagggctgtgcagaaactccagctagagattgaagtcacctttgagatagatgtgaatggtattcttcgagtgacagctgaagacaagggtacagggaacaaaaataagatcacaattaccaatgaccagaatcacctgacacctgaagaaatcaaaaggatggttaatgatgctgagaagtttgctgaggaagacacaaagctcaaggagtgcattgatactacaaatgagctggaaagctatggctattctctaaagaatcagattggagataaagaaaagctgggaggtaaactttcctctgaagataaggagaccatggaaaaagctgtagaagaaaagattgaatggctggaaagccaccaagctgctgacattgaagacttcgaagctaacaagaaggaactggaagaaattgttcagccacttatcagcaaactctatggaaatacatattcacatcctatatttttactcaaatcctattcatgataaatatttagtatatcatatgtgttgtaacattgtgtttctattcttatcattgtaattatgactcaggaattgcttttgggacattagtttatctggggaaactagtactagaacacgaccaatggtaaaatatgacaacttaaaatttaataagcct

SEQ ID NO: 474822 - DNA, 1131 bp, Homo sapiens
ctcgctgctagcgcagcagcctgagatcaacccgcgaggctgtagcctggctgggggaggggtgtctgcaattgctgaggcttaagtaggtaaacaaagcggctgggaagctcgaactggggggagcccaccacagctcaggaaggcctactgcctctatagactccacctctgtgggcagggcatagctgaacaaaagccagcagaaacttctgcagacttaaacgtccctgtctgacagctctgaagagagcagttgttctcccagcatggcatttgagctcagagaacagacagactgcctcctcaagtgggtccctgacccctgtgtagcctaactgggagacatctcccagtggcagctgacggacaccacatataggtgcatgcctctgggatgaagcttccagaggaaggatcaggcagcaatatttgccgttctgcaatatttgctgttctacagcctctgctggtgatacccaggcaaacagggtctggagtggacttccagcaaactccaacagacctgcagctgagggatctgactattagaaggaaaactaacaaacagaaaggaatagcagcaacatcaacaaaaaggacattcacaccaaaaccccatctaaaagctgaaaattctaaaaaccagagtgtctcttctcctccaaaggatcgcagctcctcaccagcaacggaacaaagatggatggagaatgactttggcgagttgacagaagtaggcttcagaaggtcggtaataacaaacttctccgagctaaaggagcacgttctaacccatcacaaagaagccaaaaaccttgaaaaaagggtagacgaatggctaactagaataaacagtgtcgagaagactttaaatgacctgattgagctgaaaaccatggcacaagagcttcgtgatacatgcacaagcttcaataggcaattcaatcaagtggaagaaaggatatcagtgattgaagatcaaattaatgaaataaagcgagaagagaagtttagagaaaaaaagaataaaaagaaatgaataaatcctccaagaaatataggactatgtgaaaagacaaaatctacatttgattggtgtacctgaaaatgatggggaaaatggaacca

SEQ ID NO: 474823 - DNA, 945 bp, Homo sapiens
cctgtagctgagggtcctgtctgttagaaggaaaactaacaaacagaaaggaatagcatcaacatcaacaaaaaggacatccacaccaaaaccccatccgtaggtcaccaacatcgaagaccaaaggtagattagaccacaaagatggggagaaaccagagcagaaaggctgaaaattccaaaaaccagaatgcctcttctcctccaaaggaacacaactcctcgccagcaaggaaacaaaactggatggagaatgagtttgacgagttgacagaagtaggcttcagaagatcagtaataacaaacttctccgcgctaaaggagcatgttctaacccatcgcaaggaagctaaaaaccttgaaaaaagattagaggaatggctaactagcataaccagtgtagagaaaagcttaaatgacctgatggagctgaaagccacagtacgagaactgcgtgaagcatacacaagcttcatgagtcaattcgatcaagcggaagaaaggatatcagtgattgaagaccaaattaatgaaataaaatgcactgaggttgaaatgaaggaaaaaatgttaagggcagccagagagaaaggtcggattacccacaaagggaagcccatcagactaacagtggatctcttggcagaaaccctacaagccagaagagagtgggggccaatattcaacattcttaaacaaaagaattttcaatgcagaatttcatatccagccaaactaagcttcataagtgaaggagaaataaaatcctttagagacaagcaaatgctgagagattttgtcaccaccaggcctgccttacaacagctcctgaaggaagcactaaacgtggaaaggaacaaccagtaccagccactgcaaaaacatgccaaattgtaaagaccatcaatgctatgaagaaactgcatcaattaatgggcaaaataa

SEQ ID NO: 474824 - DNA, 922 bp, Homo sapiens
ccagggttgatccattttctaagaaagattggtatgatgtgaaagcacctgctatgttcaatataagaaatattggaaagacgctcgtcaccaggacccaaggaaccaaaattgcatctgatggtctcaagggtcgtgtgtttgaagtgagtcttgctgatttgcagaatgatgaagttgcatttagaaaattcaagctgattactgaagatgttcagggtaaaaactgcctgactaacttccatggcatggatcttacccgtgacaaaatgtgttccatggtcaaaaaatggcagacaatgattgaagctcacgttgatgtcaagactaccgatggttacttgcttcgtctgttctgtgttggttttactaaaaaacgcaacaatcagatacggaagacctcttatgctcagcaccaacaggtccgccaaatccggaagaagatgatggaaatcatgacccgagaggtgcagacaaatgacttgaaagaagtggtcaataaattgattccagacagcattggaaaagacatagaaaaggcttgccaatctatttatcctctccatgatgtcttcgttagaaaagtaaaaatgctgaagaagcccaagtttgaatgtgtcagctcctagaagtgtataacatccatcccggccctattattatttttttgatacatatatgtatatacacgtatatatgtgtatgtatatatatgtgtatatgtgcatgtatatgtaagtatatatgtgtatattaccacatatacatttgtgtatacgtatatgtatatatgtatgtgtatatgtatatacatacacgcatacatacgtatgtgtatatgtatgtatatatttaaagtgtgtgtatgtgtatacacatatgtgtatatgtatatatgtgcatacatatgtataaatgcatg

SEQ ID NO: 474825 - DNA, 1029 bp, Homo sapiens
agtgccgggttacttgccagaatggctgtgcaatctatattcccaagcataaggcttgtgaccaatcctgtgacagttgtggccccagtagccccaggtgtcttacctgtactgagaagacagtgctgcatgatgggaaatgcatgtctgaatgccctggcgggtactatgctgatgccactggcaggtgcaaagtttgtcataactcatgtgccagctgctctgggcccacaccctctcactgtacagcctgcagcccccccaaggctctgcgtcaaggccactgtctgccccgctgtggagagggtttctactctgaccacggagtctgcaaagaagccagaggaaggactgcaagtggagcagctgtctggcgtgggcatcccctctggcgagtgtctagcccagtgtagagcccatttttacttggagagcactggcctatgtgaagtctgcatagttttacacagccttgaactgtgcaccctgaggtttttagtggaaaccacagaggaattagacctccaggaacaccagtctttccaagaattcagagagatgccaacttgccaccagtcctgtttcagatgtgcagggaaaagcccacataactgcacagactgtgggccttcccatgtgctgttggatgggcagtgcctctcccagtgcccagatggctactttcaccaggaaggtagttgcacagcatcccaaagtcgtgggattacaggtgtgggtcactgtatctgactccatttcttttcacataagaaatgaaatttggcaactgggacacttgaggacactagggagatcttttactttctccctcttaatgaggtactgctctggttgtcaattattgcctaataaaccaccctaaatttgtggcttaagacaacaattgttatatttcccagttctgaggattgctgggcagctctttcttcagatcctgcaggtgggctcttcattgacgtctgtcacctgggttggtcaacaatctcttactctatgaggcctcttctc

SEQ ID NO: 474826 - DNA, 692 bp, Homo sapiens
tgttactcatgttgttaagaactgaaaatgtcatccagggcaactcaacatcttcctggcagctagatccctatatagaaggtgattacatcaggatatggatctatggaactttgaacttgagagatgatttagggcatctggtagaagaaatttctaagcagcaaagtagtcaagatttggtctggctgctcctaacagtaaacatttgcgggaagcccctcccatcagaggcccaggggcttatcatattaaaatggtttggtgggccaagcccagggtccagctgccctgtgaagcccggagacatagcgccctgcatcccagccattccagctccagccatacataaaataaggaaaggtacagctcaggccattgcttcagatggtgcaagccccaagtcttggtggctaccacaaggttttggtccttcctccagactgtaccaatctctgcctgttacccggttctaaagtcacttccacatttttgggcattcttacagcagcgcctcactctctgtgtgaggatgaaataaaatattaaatataaatgtcttaattagttccagaaacttaatatatgagaaatattatttattgtaactgtgatgaccatttcttttgcatgctccttatctctctttttgccttataaaaggcaactttatgccaacatttaaaacatat

SEQ ID NO: 474827 - DNA, 518 bp, Homo sapiens
gccactcgccagcaaagccaggctatgctatcatatcttccacatctatcgttgaggctaccactctgcccccctctactacctctcagcaagtcaaattactgcattaatgcctctttaataaaaactctgctcaaggccgctttacttccaaaggaaggtggagtcattcactgcaaagaccatcaaaaggtgtcagatcccattgctgtaggcaaggcttatgctgataaggtggctagacaagcagctagctttccaacttctgtccctcacggccagtttttctccttcatatcagtcactcccatctactcccctgctgaaacttccacctatcaatctcttcccacacaaggcaaatgtttcttagaccaaggaaaatatctccttccagcctcacaggcccattctattctgtcgtcatttcataacctcgtccataattcaggcctgtcctcagaatgctacagggtacagcccatttgagctcctggtacatgtgcacattgtgcagg

SEQ ID NO: 474828 - DNA, 647 bp, Homo sapiens
gcagcagccgatcctgacagcctgccatgccatcatggccacatgtgggtaatgagcacttgaaatgtgcaacactatttgtaatagccaacaggtggaaacagcccaaatatccattaatggatgaatgggaaaaaattggggtacatacatataatggagtattatccattgaaggatgcttgaggctggttctgaaagtgttggaagaaccacaaactggattcaaccactgctgtgggaagatgtcattcactctcagagtttcaattgcccttttattttatgacttgcaaatttttattttcagtccagatctctcttttacatttcagatgttcatgaagtcaagtgttttgaggaaaatgttagtgcagcctgattgctttaacattttcttgcactacagaagaaacaaagcagttattgtatattaataaaagttaaactatttatttacacatgaatagtaccaaatgtggacagtggtcaattttatatttaatctagcagttttatttaaggtattctttttttcactgttaatatgaatataaattcaagtttctcattcaaattgaatcaatctcattctgctagtttcctcattaatgagtcaaataaaattttgacatgtgcccattact

SEQ ID NO: 474829 - DNA, 629 bp, Homo sapiens
cagactgcctcctcaagtgggtccctgacccctgtgtatcctgactgggagatacctcccagtaggggctgacagacacctcagacaggagctctggctggcatctggcaggtgccctgctgggatgaagcttccagaggaaagaacaggcagcaatctttgccgttctgcagcctctgctggtgatacccaggcaaacgggacaccatccgaaggtcaccaacatcaaagaccaaagatggataaattcacaaagatggggagaaaccagcgcaaaaaggctgaaaattccaaaaaccagaacgtctcttctcctccaaaggatcacaactccttgccagcaagagaacaaaactggacagagaatgagtttgacgaactgacagaagtaggctttagaaggtgggtaataacaaactcctctgagctaaaagagcatgttctaacccaatgcaaggaagctaagaaccttgaaaaaaggttagatgaattgctaactagaataaccagtttacagaagaacataaatgacctgacggagctgaaaaacacagcacaagaacttcgtgaagcatacacaagtatcaatagctgaatccatcaagcagaaggaaggatatcaatgattg

SEQ ID NO: 474830 - DNA, 787 bp, Homo sapiens
acatccgagcagctgatacacccagtggagtcggctatgtgcccacactcagaacctgagaaacagccctgcaccctcacatcctcccctaaccccaccacaaacacacccctgggccttcccactggccctgctagccaagcagccaagagcctatgtcccagacctgagaaacagccccatgggctgtccccagtggacatgcccctgagccaacgaagcagccacttgtctgtgcttctggccagtgcccctctgctgcaggtctgctggagtttgctggtggtccactctagactctgtttgtctgggtatcaccagcggaggctgcagaacagccaagattgctgcctgttctttcctctggaagcttcttcccagaggggcacctgccagatgccagctgtagctctcctgtgtgctctgtcccagggagatgggagttttatctataagttcctgactggggctactgcctttctttcagagatgccctacccagaagggaggaatctagagaggcagtctggctacagcagctttgcaaagctgtggaggtttccagaagaaggcattattatcataggagatgacaactccattgttgtgggaagtcagggaccccgaacggagggaccggctggagccacggcagaggaacataaattgtgaagatttcattttaatatggacatttatcagtttccaaataatacttttataatttctcatgcctgtctttacttttatctcttaatcctgttatctttgtaagctgatgatgtac

SEQ ID NO: 474831 - DNA, 632 bp, Homo sapiens
aaccagtcccaatgagatgagctgggtacctcagttggaaatgcagaaatcactgccttctgtattgatcttcctgggagctgcagaccggagctgttcctatttggccattttgccagccacaccaggaccatatcttttgatgccatttaaaaaatctcatgggagtgatgtggagggacgagatggatgctatatgcacagtgggtttgcctgtagccaggtaacactgaatttggggaatccattggttttaaagcaagcagtaagaaaacaagctctttgtcccagagagagacttgacatcatctctctaggttgctctgcaaacatgaccctgagaaatagccccagaaaacagcagtcagtgctttgcattcttgataaacccagtaagacatgtaagagcccaagagactgaggggggactgtctttcccaacaattagcataaattagtatactcatataatgaatgtacagttaatatactcaggagtttgatgtacaactaggtacaacaacagtttttacccactgattttaagttcaaaattctgttcctagatccatgcttacctccatatattaaaaattatttaaaatgacacaagaaactcctgggaagcggta

SEQ ID NO: 474832 - DNA, 1783 bp, Homo sapiens
ccagcggcagtacatcttcgaatacgatatgtgggaccgcctgtctgccatcaccatgcccagtgtggctcgccacaccatgcagaccatccgatccattggctactaccgcaacatatacaaccccccggaaagcaacgcctccatcatcacggactacaacgaggaagggctgcttctacaaacagctttcttgggtacaagtcggagggtcttattcaaatacagaaggcagactaggctctcagaaattttatatgatagcacaagagtcagttttacctatgatgaaacagcaggagtcctaaagacagtaaacctccagagtgatggttttatttgcaccattagatacaggcaaattggtcccctgattgacaggcagattttccgctttagtgaagatgggatggtaaatgcaagatttgactatagctatgacaacagctttcgagtgaccagcatgcagggtgtgatcaatgaaacgccactgcctattgatctgtatcagtttgatgacatttctggcaaagttgagcagtttggaaagtttggagttatatattatgatattaaccagatcatttctacagctgtaatgacctatacgaagcactttgatgctcatggccgtatcaaggagattcaatatgagatattcaggtcgctcatgtactggattacaattcagtatgataacatgggtcgggtaaccaagagagagattaaaatagggccctttgccaacaccaccaaatatgcttatgaatatgatgttgatggacagctccaaacagtttacctcaatgaaaagataatgtggcggtacaactacgatctgaatggaaacctccatttactgaacccaagtaacagtgcgcgtctgacaccccttcgctatgacctgcgagacagaatcactcgactgggtgatgttcaatatcggttggatgaagatggtttcctacgtcaaaggggcacggaaatctttgaatatagctccaaggggcttctaactcgagtttacagtaaaggcagtggctggacagtgatctaccgttatgacggcctgggaaggcgtgtttctagcaaaaccagtctaggacagcacctgcagtttttttatgctgacttaacttatcccactaggattactcatgtctacaaccattcgagttcagaaattacctccctgtattatgatctccaaggacatctttttgccatggaaatcagcagtggggatgaattctatattgcatcggataacacagggacaccactggctgtgttcagtagcaatgggcttatgctgaaacagattcagtacactgcatatggggaaatctattttgactctaatattgactttcaactggtaattggatttcatggtggcctgtatgacccactcaccaaattaatccactttggagaaagagattatgacattttggcaggacggtggacaacacctgacatagaaatctggaaaagaattgggaaggacccagctccttttaacttgtacatgtttaggaataacaaccctgcaagcaaaatccatgacgtgaaagattacatcacaggacagtcacgaagccatttctcccatcagttgcttagacaatggatcctgtgtctggactcacttctgtcttcttacatcactgtcttcattgccagtgcagttcttgcatggtgacaatactaataggcatactaatttttccacgaatgtgggataattttcagggtacagatttaagatctttccaagttt

SEQ ID NO: 474833 - DNA, 776 bp, Homo sapiens
cgaggaacctaaggtgggggtgagagtggctccctgacttgccaattttacaaaccatgaaaaaaatcagggatcaacacagggtttttaaattaaaaactactacccgttactcccatcgtttcataaggccatttaaacatatcaaagagaggcgggacctaccttgcggacgagtaaaaactttttcacagattagcacctatgtcaacagaaatgaaaacgagatgaaggaaagacatcagaaaaatgacccggggactctgactaagggagtgaaagaaaatgtcttcaaagacgactctcaggagggacttgtgcacaaacagcgaacccggaacggcgggctgatgcggaatcttaatggcaataatgtgatttgcaacagcaacagcgaaagattttacatgttctggatagaaaatgcttctatcaccaagggaaacagagcagtcgcctacgcccacatcatggcaccacctgatactcccctgcctgctacctacctattatcaaaaatggcagggaaaatgcaaaagaaggaagacaaaagaaagtattattttacgtgagtttggtcttggtgctaaggggatcctgatgagaaaggggcataaactttttaaataataaatatttagcaggtgagatctttttggtttccttggaattactctggctaaggaatgatcgcgtgtggccactgtttttaagtggtgtgaagagcagcatgaagcggtccctaatactcactgaagacacagtgtcttcataca

SEQ ID NO: 474834 - DNA, 579 bp, Homo sapiens
ctgatgtgcacacagaaggaatgaagtatggatgtgaaagaacgcaggccttactgctccctgaccaagagcagacgagagaaggaacggcgctacacaaattcctccgcagacaatgaggagtgccgggtacccacacagaagtcctacagttccagcgagacattgaaagcttttgatcatgattcctcgcggctgctttacggcaacagagtgaaggatttggttcacagagaagcagacgagttcactagacaaggcagccttgatccagtgcagactgttgttgacaacccggcggtagcatttgtagaagccctgaaacggaggttcatagggggccaaagagtgttattcctcactccttccaagccaaggactgcagaatccaaaggggcggaggaaagagaaagggcgccaggcggccagggaggccttgttggagagcagaagtgaatggagaagcgcacgcgcagtgtgtgatggtgccgcaggtcacttgatgtgtatgaatccgaactttgtagaaacgtaaatgggatggactgctagttacagctaatgctgccaccctactgc

SEQ ID NO: 474835 - DNA, 593 bp, Homo sapiens
caccactgcatttccctcatccagacatgggtacctatagcagaagccatgtgcagtacatatggtgcagctgcagccttgcatggacctggcacctgtgccaccacctggatctgtctgccctgctgctctgtgcctggagccattctgtgcctggcttacccttggcaggcatgggatctgggctggtagtaccagccaagtgcagcctgccaggccaagacaaagaggaaatttccaatatttacctcacaggcattcagttgggatggatggaggtggtaaaacactgggaaattggatgtactttcaaggtagaggcaacaggatttgcagaagaatttgatataagatgtgagggaaaaaggaatgaaggtaaattcaaagatttcttccttatcaatagagaatgtgatcctcccactttcaattctataagacaggatttagaagaaaacttttgagtctagtatggaaaatctgaaggaagaaagaagataattagaaaaaatcaacacaaatgtaataaacaaattgatacaaacaggaagcagggaatactgggtagaagagatcagggtccctggtgaggg

SEQ ID NO: 474836 - DNA, 726 bp, Homo sapiens
gctctctctcctctttgagggagcaatgcttacagccaccttggtgcttctccaaagctactttctccatcatgggatatctactggggccgtgtgttttgctggtatagttgttccccttattcatcgtttcactttctacagtttcagttacctgcagtcaaccagggaggagaaattggtgagaaaacctgtcaagttgtgtttgcatattttgactgtttcctgcaggggaacaccagccatgagtgacaaatcttggtacagtgttcaagttaaagatgatggaggaaatgcaacgatgtgcaaatctccctttctaaattcatgcctctggggacaacatgagattcagaaaccggggaaatcacggtttcggattccatcttgtgtccaatttctgctgaagatctctgctaactgtgcatcttgtcttggagatgtcattgcccatgactggaatgccggtgtctatgaagacagtgatattggtgtattactcaagtgaattatcattttggttctgaattgagttgtattctactcatttttatagaagtctgacacaaacatccgtgctttcttttttactgcctggagaaggcaaataccattgacaaaatccttgcctatttacacttactctcatgtgttattttcattattgctttcaaggtgaaacctgatcaagagattaataagtccttgtgaatatgtgaaagaaca

SEQ ID NO: 474837 - DNA, 979 bp, Homo sapiens
cagggtattggtcctatgtaagatgatggtaaagtgggcatcatctaatatgaacgaattaaacacttcagactatgagctgcatgaagttgtacagatcatgtgcaaatatgaggacaatgtcttcaccctcttcatggcaccggcacagaaaaagtccaagccctgtgacactttactagagacttcccatcatgctgaccaggtgttaatagccagttcttactggggctttttgacaaatgcgttccagtatttgtgtaagtgtgtggactacccaatcagtaatagtagtaaaagatcacaagtaagaactgaagaggcaggaaatagaggtgggataaggcgagactggaaactgggctttaggctccaattacataagatattacacaacagtaacattttgggagcagattcttccctagagccttttgaggaaaaccctgcaaagcaacatcatgacttcagccttgtgaaatccaaaatagaggaaccaactgtgtcaacaataaacttcagacctgcagaactgtgagatcatacattcatgttgcttaaaagtgctaaatgtgtgtagcaacaataaaaaacgacaagtaattaatatcattgttaataatttttgtgtaaagtttggttaattttctaggaacactgattattcttaagcttggtcatttaacaaaatcccagacttcttggaggctttgttcatattttcttattcttttttctttgtctttgttggattgggttaactcaaagagcttgtcttcatgctctgaatttctttcttctacttgttcaattctattgctgagactttccagagcattttgcattttgataagtgtgttcattatttcctgaagttatgatattttttatttatgctatctatttccttgaatatttctccctttgattcttgtatcttttttggatttctttgcattgagcttcacctttctctggt

SEQ ID NO: 474838 - DNA, 1466 bp, Homo sapiens
aaactaattctgattggctaatttaaagagactgaggggcggaaaaaatggttatgacagagcaggtaattggaatgagtcagggtggagcagggccatattttcctctttatttgtatgttttgggatcttttgttgtgattttggcatttgacaatacagccatttctcccagtttttatggactgtcttcatacacaggaagacctttatcaatcaacctgcatcaatattctgaagctctgaagctttctcaaatctttttaaaagatatgctttatcttgtcttggggatatttaattttccaattaaagatgttggtatttcttctctggtttccataatttcttatgttatgttccacaatttcttcttgttgtctatctgcaatattactatctctctggtgcttaacaagccacagtgcttgcttttgttctcgaaatcccctaatgatgactaagaactggatgtccaaaccagtgcttctctcagtgctgtcaggacagacagaaatgagtccctcgggcagtccctgaaaagccagaatgtttaatccatggtccgcttctctcttagggggattgactatgtttctttcacttacagtaatgttaagtaccatttaataattcacagctgaaatttcttttaaggtaaatggttgtgaatatcaaaacataattttttaaaacttgtaaagtttacgtgggtatattataggatcttaagtctttatatgtatgctacaattagctgtaattatatattccttgacatcttaaaataacattttttaaaattgatacagaagtgatgtgatcttcaaaatggaaagaacaaaacaaatatatagagcatatcacaggtgaagaaatcatgctaccctgaatgaattcaaaatcaaaggttgaaggaacttagaggagctatgtatgtgaggtgatctgcaagccagctttgatactttataagcaatagtggaaaggaagattttttggaaaactgcaaatggacaaatgctccaaatttacaaaaaaaaaaaaatactctgaccatattctagatgaaataccaaaggaatgatttttaaatttaatttattgaaagagaacacaacggaagacattttaaaccttattggaattggaacatatacctgtgtaaacataattattttacagattatataataacaggtgccaaaattttagtgatttttttctaaaggatttgacaaatcccatttcattattgtatttgaaaattgagtaaaccatgaaaacttcctttgcctcagtttctctctatgtaaaataacattaaactggaatgacatttaaattgtccaccaccaatatcaaaatttatacctgttagtacaaaattttagtttctctttacagctgaaaaaactaagactgtgtctatttgacttgttttgtatctcctaaatatgtcattc

SEQ ID NO: 474839 - DNA, 1515 bp, Homo sapiens
cacagtggcaaggacaaggagatgaatgtagcagccaagtaccgcatggcctccctgtatgtgggtgacttacatgcagatgtcaccgaggacctgctgttcaggaagttcagcactgtggggcctgtgctgtccatccgcatttgcagggaccaggtcacccgccgctctctgggctatgcctacgtgaacttcttgcagctggctgatgcccagaaggcgctggacacaatgaactttgacatcataaaaggcaaatccatccgtctcatgtggtctcagcgcgatgcctacttgaggagatctggaattgggaacgtattcatcaagaatctggacaaatctatcgataacaaaaccctttatgaacatttttcagcttttggaaagatcctttcctccaaggtgatgagtgatgatcaaggctccaagggctatgcatttgtgcactttcagaaccagagtgctgcagacagggccattgaggagatgaatggaaaactactcaagggctgcaaggtgtttgttggcagattcaaaaaccgaaaagatcgtgaagctgaactcagaagcaaagccagtgaattcaccaatgtttacataaaaaactttggaggtgacatggatgatgagagattgaaggacgttttcagcaaatatggcaaaactctgagtgttaaggtgatgacagattccagtgggaaatccaaaggctttggctttgtgagttttgatagccatgaggctgccaagaaagctgttgaagaaatgaatggaagggacataaatgggcagctgatttttgtaggccgggctcaaaagaaagtcgagcgacaggctgagttaaagcaaatgtttgagcagctgaaaagggaacgaattcgtgggtgccagggggtaaaactctatattaagaaccttgatgacaccatcgatgatgaaaaactacgaaacgaattttcttcatttggatcaattagcagagttaaggtaatgcaggaagaggggcagagcaaagggtttggcttgatctgcttctcctctcctgaggatgctactaaagcaatgactgagatgaatggccgcatcttgggctccaaacctcttagcattgccttggcccagagacactaggaaagaaaaacgtacctttccagctagtatctgcagcaggtgggagaatgatagtgatctctgcctgaattgacctcagtaaatttcatattccacatgatgggtgcttagtttagtaaactttatgataaaacgttttttatacaaagccattttttttcttttgtggaaaaatagatggagcttagttcattttacagaggcacattttctaattttaatattgcacatttttcttattttgatatgttcatagcaataagtataaatagatatatttttacatttgaaccaaatgaaatgagaagggatctctctctgcactgggctgcctaaagtttggtaaggggtaatatgagcatcttcatggccaccacagcc

SEQ ID NO: 474840 - DNA, 701 bp, Homo sapiens
ctacgcagccataaaaagaaatgagatcatgtcctttgcagaaacaaagcctaacacccgtgtctttagaccggcagccgtgctagttgcttttaactggctgacagctgcctggtatttagcccccaaattctaaggaaaaataggacagaatagcaagtgaaaggggtctgatagtcctcaccactcagcaatagtcgatgtcccttcatcgtcaccaaaatatgcctggaattcattatttccggtgggttcttggtctcgctgacttcaagaatgaagcctcagacactcacgatgttcagatgtgtctggagtttcttccttctggtgggttcgtggtcttgttgacttcaggagtgaagccacagaccttcacagtgagttttacagctcttaaaggtggcgtttccagagttgttcattcttcccagtgggtttgtggtctcgctgacttcaggaatgaacccacagaccttcacaaagtgaacctgcagacctttgcggtgagtgttacagctcataaaggttttttgcttgccggacacccatggctgcacctggacccaatagctccacctggaccagcctatgcccatagactggtcctgtggtcccacccagaagtgattcagtgggcagaagaatcattttcaacccccacaattgcacctgcaaccaatcagcagcaagcctagcaa

SEQ ID NO: 474841 - DNA, 847 bp, Homo sapiens
tcaagaaagacctggatcctggaacagctcaagatgtcaacctgaagcaaccatttcaaacagaacttaataccagtatgatgtattactatgatgatggtacaggggtacaggtgtatcgtgtggaagaagcattgcttaaagagtgtattaagcgtcaaattgaacattacttcaatgcagaaaattcggaaagagactactttcttcgaggaaagaggggtgaacaagattccttgcctattttcctgattgctggtttccaacgtgttcaggctctcactacaaaccttatcacagaggcactgaaggatagcacagaagtagaaattatgaatgagaaaatgagaaaaaagaaccagaaaaatggccaattccaggccctcctccatgcaaccccaattgatagtggcaagaggcaggcaaattcctgggcagataagcgtaggtccgtggtgaggcccacccttcaagccaggaatagccccaggcctgaaaaacctgcttccagttccaggtggagtccaccaccccaagtgcaaacttccttgatgcctttcagccagtgggatgctttttctgggcccacccatggaccaatcagcatgcacttccttcatttggagcccataaaaaccccagatgcagccaaactcagacacagcttgggactacatgcctataaggaggagctacccacgttgtgtcttctctctgctgagagctgttctgcccctcaataaaaccatctccaccttgctcacccttcagttgttcacataacttcattcttcctggacactggacaagaactggggacctgccaaactgtggtttggaaagggct

SEQ ID NO: 474842 - DNA, 1334 bp, Homo sapiens
tctaaggggcatagcgtctggctaccactatgaaagaggagcaagcagagagatacaatgggggtacagggagtacaggcaaatacagccatttcaaatgggagacaatggccaaaatagagaggctacaggctcatgcaagtccaaaatccagtggggtagtcaaagctcaatgttcagaaatgatctcgtttaactccatgtctcatatccaggtcatgttgatgcaagaggtgggttctcatggtcttgggcagctccatctctgtggctttgcagggacagcccccctcctgtctgcagcttttcaagaagcatggtgtaagctgtcagtggatctaccatgctgggctctggagaatggtggccctcttctcacagctccactaggcagtgccccagcagggactctgtgtgggggctccaacgccacatttccctttctcactgacctagcagaggttctccatgagggccttgtcttgcccctgcagcaaacttctgcctgggcatccaggcctttccatacatcttctgaaatctagagaaatgaaatttccagttgatccatgtgtccagtgcattctctaacggaatccacattctcattcatattcgtaagtactgctcgttccactcatttgcatacagaaactcttccctgagttcacacaggtttacgtacctatatattctacattaataaatatatatttagttgaaaaatcaaagcttttgtggattatattctttaaaacttaaaagcactgaagtatatttatctagcgccctctatggtaaactatatttatatcctgaattagtgcatatttatctatgaaagaatatatagagttgagatagctatttttcaaaatcatttaaggaaagcatatagtactactttaatgtaaattgcattgtctgtgagacagtgccatattttaaattaggccacacaagagcaagattgtaccttctttaattaaaaaataacaaaattaattaatcttaataatgagtaattttagtggtattatataatattttacataacagttaaataactcagtctgaataaaatctatgtgattagacaaaaggattgaaaatatataatacataaaataatattcaagatttttaaaatgtaaaaataggatatatcataacttaatacttaggatttcataaagttttttgttacagaaatttcttcagaaaggttgaaagtgaatgggaactttctgaaagtcatggtgtatttatgatggcagcaatggaaatgaatcaatgaaatatccttaaaaaaaagatttccaaagaaataagat

SEQ ID NO: 474843 - DNA, 1280 bp, Homo sapiens
tataattatgtcttctttgtgagtcaaaataaaaatctttttttttaaacagtttctctttccttgatatgacgttaaaaccagatactgtgattgctcacctgattttaggctcttatgaaggtgcttccttgtatggatggctattcaatgtggtgttcagggggtcacagggagaagttatacacaagatgaatggattaaccactggaagacctgcactactacaaatgttaaagaaagtccttccaagaaagaaaaaaggcaacttaatggaaacttgtgtctaccaaatggaaagaagagcaatgggaatcctaactacagatctgtggagctttgaacatgagaaagatgatttagaatatctggtggaagaaatttatatgcagcaaagtgttcaagaagtgactcgggtgctcttaaaaccattcagttgtatgcattcacaaagatatggtttggaattggaacttatgtttaaaagggaagcagagaataagagttcagaaaatttgcagcctgatgatgcaatagaaaagaaaaatctcattttctggggagaaattcaagcctgctgcagaaatttgcaggatgtatggaaactcttggatgtccaggcagaagagtactacaggggcagagctctccatggagaacatctgctagggcagtgcagagtccccactggggcgctgactagtggagctgtgagaagaaggccaccaacctccagaccccagaatggtagatccaccaacatcttgcatcgtacacctagaaaagtcacagacgctcaacaacacctcatgaaagtagccaggagaggcgctgtatcctgcaaagccacagaggcagagctgcccaaggctgtggtatcccacctcctacatcagtgtgattggatcaaagatactggtggcagtttgccctgctctggagatctatggaactttgaacttgagaaagatgatttaaggcatctggcagaagaaatttctgagcagcaaggcattcaagaggtgaactggctgttctgagcatgtacacatactctcttatttgttataatccatgttatattaattgttagtttacagttggaaaatatgcatctttaacttttctcagtctaaagtttacatacatacatcatctttatgttatcttatgtataaaattgtatatttaaaatgatatcctcttttctgggctccgttagcaattatttttctgtctgcattgtcttctcattcccacaagcttgataatacattcag

SEQ ID NO: 474844 - DNA, 1032 bp, Homo sapiens
ccgcgagggtccgcggcttcattcttgaagtcaagtatccactaagtatatgtggcttttgagcacgtactatgtgtattactccttaaatagttattcctccatccttgttatcatccagaattcctaccgtttatctgtgacttatttttcttcccaaccttcccaacccctgtttgatcatcctgtaattgtccccatctcagtgaagcacatccaaaaagcaaatacatcaaattttccctggctacattttgacctcatctactgctccttgatctactctgtgacagccactttagcttcctcgcacttccaaaacactaagcacacatctacattaaatcctttgcattcattatgcatttgtttactatactcagatttcatgataacagcaaagtgttcccttgtcacctccaataagatagcaatacatatcagtcagagttcatttggaaaagcagagtcaccagggtacatgcactgactcaaatatatacacatccctacaataaaatggttgttacggggatttgggtttgcaggattgtaggatctggttaaccagtttgtgtgaggcttttgcttctgtacctggtgttagattctgaagatagcaaggcagtcagtcagaaaggtaaggtggacgtgaagtgaggcagacaagaaccagttgcaacctgtgaaaatgggcaagaaaccaaaagatagactggaatctatgaagacaaattacaacgtgttttaccacctcctatcttcccactttggaaatgtcagtgtttaacaggaaatactggcacccttcctcaaatagctgaacacaaacctcagccaaaaattgtagaactgaacggggaaaatctgctatgatctgatgttgctgctggagaagctgctatcccacatcaaaagaaacaagttaatgaccatattgcacaggcttcaacaactacttgtgtacatgtaacaagatggctgccgcattcccctaccttcctcatcttgtgtgccatgtctcctgtggcc

SEQ ID NO: 474845 - DNA, 628 bp, Homo sapiens
agaaagaaaaaccaggtctgagggatccaaagccagacaacaggcacaatgtaaatgagcaggacaaattcctgccaactgaaccccaccacatggaaggaggccatgcttcatggcataaacaggctcagggaactcaagatttgcttagcagggagaaagggaagcatgggcaattcagccctttgccgacaatgtagggttgatccagccctcctgtttgttgtctcagggaaggctgcaaggggcaagcccagtgaattaaagatacaaatcccagaggcattctcagcagaggagccatctccctccagtcctgctcctccatgtccaccccgacctccctatccagcttcagcctctcacttgctcccttctagaaaacctcaccccaaacaagccccaatctcactcttgcccctccaacagatgcccagtgaatctgggcccagtaaagtccaggtcccctcctccctacaggacttaaagcaaattaagggggatcttggaaagttttcagatgaccctgatatatagaggttttccagaattttacccaaatatttgaactatcctggagagaggttacgttacttttgaatcagaccctgacagacagagagaaacc

SEQ ID NO: 474846 - DNA, 2305 bp, Homo sapiens
tctcctctacactcatcaggactacctgcctgtggataggagctaccctctttcagtgttctctacacttgtcaagatgagctgcctgcagaaaggagctacccacttgggtctcctgagagctgttctgtcactcaataaagctactctgacttgctcaccctccagttgtccacctaacctcattcttcctgggtgcagaacaagaactcaggacccaacaaataaagggagcaaatggaactgtaacatcttcttgactgacatgcagcctgctgttcacaatgctgagggtgatgagaaggagagaagagctgtggcccttctgggagtccagacctcagtgcttcccagggctgtgacatgctgttacaccctctttgggtctctgcagtttctggtgcctctgagctttcaggagccactgtgttacccattgctcacagtggaaatcacttgtggtatgcccggtctagccacagccttgcatggagtcagtgattgataatgcaaacgtcagtaaattaaacattaacattagaaccattgtgtatatgtacatatgaaacataatttaagaatatgtgtaaatattagaatatccgaataagtataaaacaagattttttatttttgttatttgaaaattatagtaataaaataatgtgcattatatgtgtgatacatatgattttataatgtttgttaaatctgactcaagcatggttattgaggttatgtatattcacacagaaaaatcacttgaataaaaaagaatatgtactttcttacttattgacttgaataaaacttaaaatgtgaattgaaatttttgaaacttatttagagatccataatttaaaaattacaacaggtgatacaaaatattaagattatgtttacattaaaccgatttctctatttattgttgaaacattactgtgtagtatttggaataaaagatttaaattaacttattaaaataaaccataggaagaacgattgttacaattttaacatattttatttgctttgcccttcctatcccagacctacacattcaggtgttttataatctttctgccacgtcttctgattttccagataagcagtagactaaaattaaagttcctcatctaatcgcatagcaaagttctataattgttaatcaaaattaaaataattatcaaacataattttcagcattttgtttttatcatatgaaaaaacccagagtgttctgagagaaaagcaatcatatgttgaatcatataacaaagtattatttcatataacatataacaaagttatatatgatatctatgtcatatataacaaagtattattaatcacataacaaggtattattggttgctcagggagaaaaaaatgaaacaggaaatcatatattaatcatataacagtcaaagtataactgattcctcagaaagaaaaaatatggaaatatttggagtttgtattccttatatacatcaactgaaaattataggagatgtcattttaaccatataaaaaatgcttctgattcaagaccacaaaatgatgagaaatgaagaacacagtaaacaacaagatcatagatctttgaaatgtaagtatagctatagctaacatgctaatcatatctttggaaaatataatatgtatgagtactaaataagaaatctataaagtagtaaaaaatgaaataaaattttgttagtgatgtaaaactaaaaatattaaattatctcaggcactcataaggatatcagtagaaacaggaataaagagtaacctaaatctcttattagtaaaaggtgaggggaagaaagaggacaaaagtcagcatggtcaagatattattttagttgagtagaagatttaaggagaaagtgattattatggtggcaaaacgaagtggttagcttttttaaaataaaataagagactgcctctaattatgagtatgtcaataagataagcattaattgtatagactacatagaattatttttaaataagcaaggtgacaaattggaatgaatagcaacataataaaacttaaaagagaataataaatgtgactatttaatagaaagaataattaaaatgagtagaatatagtcaagtccatcaatcattacaaaaaatgggaataggtggaatttttcagatagtgataatatgaaagtatcagtaattttcttacggaaaacacatttaaggaaataaagtttcaaaacatattgaaagaaatgttaggcaaatgaatatagaaagaaaaagcaggcatgaaaatatc

SEQ ID NO: 474847 - DNA, 2273 bp, Homo sapiens
tcctcagtcttcaggaaagaatacaggcctgtccttagaatgctacaaggcacacaagaagatgggcatggagaggagcagatcagccaaagaagacacgaatggctggatgttgagagggtattgatgggagcacgccggcagaagagcacaccgacagacactggcagaggagagcccaggcctctgagtggctggactccagggaaaaccatctcctttctggctccctcatctgttgagtactacttccactcagtaaaaccttgcactcattttccaagcccacctgtgatccgattcttctggtacaccaaggcaagaacccaggatgcagaaagccttctgttctcccaaaaaggacataactggtgcaagctgactccaagcacatccaggaatgcacttgctcataagatactgaggcaagctgtaccagcagcccctgggaacgcgctcggttgatggtacccaaagcccatgcatttatctctttgtgatagtttaagcccctgcatttggaactgttttttctgtaactgtttctgtaatcatttatctttaactttttgcctgttctgcttctgtaaaattgcttcagctagactccccctcccctttttagaccaaggtataaaaagaaatctagccccttcttcagggccgagagaatttttgagctctagccgtctctcattcgccggcaataaaggactctgaattagtctcagagtgtggcatttctctataactcgctcggttacaacaatataaacaatcataaaaatataccaatactccattgagggtggcaactggaagaagtccatctggacatgtgtaaatggttcattagggagtaggtatatacaatctgaagtgtagattttttttttaggattatgagtttagcaaatcaaatattggttataaactattttagaaatttggactattctattaatttttaatataattgaataattgtgtctgttttatgatgagttgtggaatgtagagtttttaatgatggaagctttaaagacagaaaggacaggtggctatcctggctttttgtgtctctacattgaacattgaatttatacttttatagatatcaattttctttttttaaataatgtgtattattctatttattaagtagatttttataaacaagttgaattgatgtaatcttatgaagttcatttagattgtatatcctaacagttttggtcctagctgatttagcagaaaaatttgttaaagcactttcttgatatttaggctgagttttataggtatgagctttaatctaaataatttgtgatggtaacagaagagtggaaaaaaattatctaacatggtgtctatttctgatggggtatgactagaagggagaagcccttgatgattttatattatgtcaaaatatgttattattctaaaagtatatctgttgtctgtataaatatttattgacttgttcttagttatataacaagctctggagatagcaaaaagcactgtggattgagctgatttaaagaagatttttgtttgcttcattttttcctattagctcattttaggtagtaacattatatcctgcctgatatttctcttttgagtttttggaatagaacctattaacaaaaagtattaactcagtggagtatttcataaaccaacatgagggcccactatttcagatactgtacttacacagctgtggcctttaccctcatcaggcagcggcaatagagtagtagaatcaagtagattgtggcattttagatggagattagaaggagactgagaattttataacatgttagactgcttactgaaaattgttggatatatttggaatttagcagacttttatagtatgtaagattgtaaattcagattatttcacaaaaccagctcagatgaagcttttatcaacttggtgactggtgattgttgttactgttttgaaacaattaggatgtgtcttagttcataggtcttactgcaggctataatatgtaatggacctaggttttcccccaagtttcttgggtaaaaactgttaatgtctgattgttatgtttataaataaacaaggtaaaaggtttagtgtaatttgcaagtgtgaaacccaaaggctgttataagaccaattttatttggctaaaagcctgtttatgattctgtttccaaggccaaagctctaatattctgaatttagtaggttcatataatgacaaacacattaagaaaagttt

SEQ ID NO: 474848 - DNA, 2117 bp, Homo sapiens
atgtggtgttgagtgtgacagcccgtatatggaacattttcatcatcacagaaattcccatgcgagagcatccaaagacttggtgaatgattttgaccaaaatgctgatagtgatatggaccatgaagttcaggctgaagtggtctcagatggaaataagaaacttcttgggaactggaacaaaggtcactggagctatgctttagcaaagagacttgcagcattttgcccctgccctaaagatctgtggaactttgaacttgagagagataatgtgaaattgcaacttatgtttaaaagggaagcagagtataaaagtttgggaaatttgaagtctgatgagaaaaacctattttctgggaagaaattcaagactgctgcagaaaattgcataacttgcaggtcacagaagtcaaaaattgaggtttgggagcctctgcctatgtttccgatgatgtatggaaacacctggatgtccaggatgaagtctgctgcaggggcgaagtcctcatggagaacttctgccatggcagtgcaaacaggaaatgcagagttggagcccacacacagactccccaatggggcactgcctagtggagctgtgagaagagggcctccatcctccagacgccagaattgtagatccaccaacagcttgcactatgcacctgaaaaacctgcagacaccgaacaccagccataagagctgtaccctgcaaagccaccaaggtggagctgtccaagattgtggaagcccaccctttgcatcagcatgacctgggtgagtggaactgctggtcaatagaatatggtcactatttttaacattttttagaactgacaaagtgttttacaaggtggtggcagaatgtaacatttccattaagaatggatgacttcagtttattcacatccttattaaaattagttattttctctcattctgatcataataattttagttggtatgaagtggtatcttgtagttataatttgcacttccatgatgactaacggtattgaacttcttcttgtgcgcttataggcctttggaataatttcttttaataaatttctattcagggtcttatctgtataaaaaattggattatttgactttatcctgttgcgttcaaagattttttaatatattttggatacaagtattttttatcaaatatatagtttgaaaatactttctctcattccatgaattgtcttttgaaactcatagtattgtttacagaatgaagggtataattttgacaaagtctattttgtcttttattgctgtgcttttggagacatagcaaagaaattgttgcctattccaaggttatgaatatttactctatattttcaggactttatttacaactcttacatttccagaaaaacaggactaaaggaatttatcattagtaggcttactcgacaaaatatattaaatggagcttttcaggttaaaatagaaggcacttaatagtaactcctatccttgaaaataaatagcactagcagaggtaactacctaagttggaaaattactttataatcatttatttagtaaagaaaattgagacactttaaaaagcaaaagtgtaggttaatttataaaggtatatttgcatcacaacctcaagaaagcagccacgttttgcaaaaaaaaaaaaaaaagaaataaagaattcctttaatttcacaaagcttatgaacataacactagaatgtaaaaagccaagtaatacatgagttgttttcatgagataattccttacatttcaaatacaaagcaaataaccggtcattgccatcatataaacaataacttaccaataattataattctaatttcgtcctaatttttcttatattatacatctagcaaaaatgtcaaatggctctggtgtcagattacaagttgtcaagtttacctagaagagtttcatctttaaaagttaaactatatcattaatactagtgattttccactaaaatatacatgtatgtgtgtattcatatacatatgtgtaaaatattacgtacattgaaaagataactgaaaggcaaaacaattctgaaataaatgtaacagataagtcttacacagtagcttc

SEQ ID NO: 474849 - DNA, 2570 bp, Homo sapiens
gtagttttctaagtacgtacctgtgtccctgaacaaatacttatctgtacagaataccgcaagatgtgcgtctgcaaatcaggaagaggaccctcaacaggaactgaatcagccagcaccttgatcctgaacttcctgcctttaggactgaaatttctcttgtgtttttgggacttgttacagcagactgcgctgactaaaacaccaccacttcctgtggaaggtggtccctggaaaaattccaactggcctactccctgggatgggaccttgggatattcgagctatttgctcaaacctgagattcatgcagctggtggagaatgtttcagagggaccctgagacatccagaaaagagaggaaaacaggattatttgacctgtttaggtacatgggattgccaaaatgatgtccaatcttctttaagttatatcttggtaaataatgctaatatatctttcaaaattgtatgggatttctatgattctaatgtctaagtatatgctatcaatcataattaaggttgttaagttaagctattgtaaaccacagagataaccaaacatctttgccaatcgtgtttctaactatttatttagtggaattctatgtgagaacatattttatattgcctccaataaaaggcacatatgagtctttatcatattttaatcttttaaaatattattcctttaacattatcacttatgtaccataagaaaacttggacttgctgcaatatagtgaaaatctttgtgggaatcacaaggcaggaggtctgaatcgatttctgatactacaaagcagtatagacaaggaaagttcactcaaacaccccaggtgtcttgcggagttgattggatgatgagtctagttttaatggattatgagctcataattttatattctcattcataattctgaaacagagcagtgaagattttgacttaccacatttttaattctcatttccactataggaaaaaataaaaacccgaaaaatcattgctaatgacactagttactgaaaacatgggagaaggagctgaggtgagaaaagattgacttctcttgggttttcaaaattatgtggtaattatatagatcctgaacctgcttagaggcttcctaatccaaatatattatctctgtcccaattcttgatttgtcatctattaagggaatataacagtattttccattttgttcacagaattaccaatgtaaaataagtcaaatttctgcaataaacatgctttttgaaattttaatatgcagtagaaatatcatattattttaattaatattactaccattattgaaagttaatttagactaatgatagagtagaagtctaacagtctctctgaaagtttctatgtattaccaggctatgtatagttacttcttttcttcagcatttattagttataatgattttgtagttaaaaaattaccaaactgaaaaaaccttttttttcataaacagccctaaactttagctttctttgcttgtaaatagagtaaaacacttcattctaaaactcagtaattttaaattattgatgatttacaaaaagatcttttgaactagacttcaacgtgtttgcttagcaaattttctttttagtggacaattttctataataatattaatgtaaacaagccagaagtgggaaagtgttaatttagtttaggtatttttggacagttaccaagtactgagccttaaaaatcatgcttaacgccaagccctgcttagagaaaagctaacgagtgttaaggaacacagacagaaaacctaaagggctatgggactactctaattttttaactacaaaatcattataactaacaaatgctgaagaaaagaagtaactatacatagcctggtaatacatagaaactttcagagagactgttagacttctactctaacattagtctaaattaaccttcaataaaggtagtaatattaattaaaataacatgatatttctactgcatattaaaatttcaaaaagcatgtttattgcagaaatttgacttctacattggtaattctgtaaaaaaatggaaaatactgttatattcccttaatagatgacagatcaagaattgggacagagataatatatttagattaggaagcctctaagcaggttcaggatctagtttttccatagctcaacttctctactgacaatcagatgctgagcactgaatggtggttgtgaataaaggaaacactaatatatcttaaggacttgtttcataaatgccttttgaaaattctattataaaacaacactgtacaccttcaaaaatcacataatagaataaaaactcaaacatttaaataatttgttaaagtaaatttcaaagatgatagttaacactttttttcactttttattccaaggccccagcattaatattccagaatgtgctagaatttaggtaattttaatagaataagaatgaatgaatgaatgaatgaatgaacaaatgaataaaatatttatgtagaaatgaaacttatatttggagaacacagattttatctatc

SEQ ID NO: 474850 - DNA, 3869 bp, Homo sapiens
gactgggtcagctgctttctctcccgaggaggaaaaaatgttcatacactttaataagatgtcggctttatgcagaatggagaggaaaaagtgtatcagacagaaggaaaagccagatcgaagtcgtaaattaggagaacgctcaacatgcataaagagcagaaaacaaacctttgaggaggagagtagtttaagaaatgaacaaaaagaacaaagctggagacatcatgctacccaacttcaaactatgctaaaaagctacagtaaccaaaacaacacagtactggtacaaaaactgacacatagaccaatggaaataaaagagaactcagaaatgagaccacacgtctacaaccatctgatcttcaacaaacctgacaaaaacaagcaatgggaaaaggattcctcatttaataaatggtgttgggaaaactggctagctatatgcagaaaactgaaagtagacccccttccttacaccttatacaaaaattaactcaagatggattaaagacttcaatgtaaaacccaaaactataaaaaccatatacaaaaattgaggcaataccattcaggacataagtacaggcaaagatttcatgaagaaaacaccaaaagcaattattaaatattatgtcccatcacaagagaaacaataattcattcaacctgtttttacgttttccattatattaagtatgtgcattttccattctcactgtccatttcatttttattccaatataatgatattgaataatcaatagtagtcaggatttaaatcaaaagctgtattttaataagtatataatacattgaccattttaattttgaatccagctccatctctaatcttttttacaaaatgaaaagagcaggaagaagtaaagaaaccagattatcatttaactgttaaaaacacaaataggtttaaaaagtacagaaacaccaaagttaaaaatatttaaatcagaatatacatttcttcttgcatataaatgttctactgcaatgaatttgctttggaaatttttcttcccttgcctcaatataacttacatgtagtcataaattattatcttccttttccaatcctttatggaagaaaatgttcgatgcctcttctctcagatcatataatttcattttgtcctcggttattcacaaaatctcaaaaattgaagtcaagtttatctcttttccttatggataaataaggccttactgatatcatatttggttttggattactgcaaagatggctacataggaatagtaaagaatacattaaactaaaaattataattggaacaattttgtagcaattatttcaacagttatctactcacatgtagatataatatgaatgttctatgtaaatctcaccatagccaacattagtttaataattccaagtcttatgatattgttaaataaaagtttttaaagactttacttgcatttactaacgttttaaattctttgtaacttactaatttatactttgatgttattagcagagtgtagtaaaaaggttttgcacttgagtttagaacttcaagagcctgatactatttcaagctcatgccctactaagaatttgatttgaggcaagtcacttaaattttaaaatcacaatttcttcagccataaaagaaagttgagatatggatttttttgttaattctctgaacaattttatgaactatagaatcctctggtatcagaggattgatgttgaatagtcctattaacactaataagacaattgggtatattacagttaaactcaattttgacactaactgtacagagctactgcagaccctaccaagttaagagtaaagttcttcataagactgccattacttcaaacaccagtcacaagtcttggagatcatctgtactactgactgaccaaccataaatttggagcttatcacaatctgcttaggtttggcaatttgatagaatgacttgtggaatctgacaaaagcacatacttataactgtagttttattataaaggatacatactaggaacaccacatgaagagacatatggggaaggctttcagaaggtggaagtggagcttctatgtcctagcctcataaaatccaggtaagtcatcacccagcacatcagtgtgtttgccaaccagaagggtctactgagcctcagtgttcagagtttttatgaaattttcactagataggtatgcttaacataattattgaccacatgattgaaccaaagcttcagccctgaaggttgggatggtccaaagttccaaccatgtaataacatgattggtctttcttgtgttcatccctgatgaggaaggtatcgaagagttcatcttaaggtacctaattaacataataaagacatttttatcacccaggtattacaagtattttgaaaacttaccaggaactaggaacaattgtaaggatatacatttttacaataggttcctataaaacttgatatccataaactttgtaaatatatttctaactatataactataggcctataaaaggctattcaaacttttttctctttgggttaatttaggtaataaatttgtttgagaacttgtgtttatttcatgtttgtttatattgttctcaaacagttgaaaatttaatcatcgaacttacttttaaaactgtactgactctatagctatgcccctgtttcaattctactattacttataggtcctcctctctttttaatgtactttgggtgaaaaatgtattatattatactttttagagaatgatgtttcacttcatttgatgctctctttattgtcaatttcataattttctggctcatttttacccacacttctaaaatacgttgaaatgatatttctttcttttctaacttcttatattaaacacaggtctttgatttctagcttttctctaatatctgtaaatgtgtttacattttcaataaacttttgcatttgaattattattgggttttgatatgtatcattttaaatagtggtcagttacaattctttaaaaatttccaaaacaatttcttatttgacaccctcattatttaaaaacatgactttaagcatctaaacagggaagctttttttttatttttgaatatacatatgtagacacaattgacaatgaaatttgtaacctctgtagcacacaataatttaatatagcaattataattattactgataacatatactaggttatatcagaattataggagttttacataattttgggacatataccagcacgtttacacaaatatagcccaaagaaagccaaacatcatttcatatttgataatgcttcttacataatttttacaccaaaaaaccaaacacatcatttttggacttcaagggacctaatgtctaaaggatcagttaggtcagaaaatgacatactttataatttgattttggaaagtttgtcaaatatcaaaggcttaaaacactggatatcaccaaatagaatcacaggttattcatttatccaaagtggtaactcaaaatttttaaaggtaaaaatatttactctgaagagaattagctttccaaataagactcaatgaggttagcatgaggccaactgaatacatctcttttctctcctcctttttttcccctgctgtttaccaaaagggcaaacaaaaccttttcattatcttttaatattacatacaaaccttttttaaaagagaaaaccaaatttcatgtttgcattgctgcatctttaatgcttaagctagttttcaaattatattttataaatctatccagttttagtcagtttgaccatgaggtaagattttcataaacttaaaacctttt

SEQ ID NO: 474851 - DNA, 503 bp, Homo sapiens
accaaacagcaggcaggcaccagtgtgcttgtgggggcccatctgctgaatctctacaatgcttaaacaaggtctaccagtgaagaagctcttgtggtggacactgggaagcaccccatttgagcatctgaggctgttctccaaggagccacagaccgaaggctgcactgtcggctttcttacttttgaagatttgggactcagactgacttccctacacctcagctcgcagactgccgattgcgggatttcactttgtgatcgtgtggtttactctacctctattactcacatcacctacatcactccagctacccagaggcctgataatcaacccctatgcctagcccactgctgccacaaccggaatctgagcaagacacaaggagggccaattattcagcccaccactaccactactggggtccaaggaccgacccacctgatgttccggttcccagaaaaatttcaccatagcctcaactaataaccataccttaaac

SEQ ID NO: 474852 - DNA, 1592 bp, Homo sapiens
tcctcactgtaaacaagctccagtctcactcttacccctccaacggatgcccagtgaatttgggcccagtaagatgagaccctgatggacactgagaaacaggccattctgcaagcagcagagacatttggggatgagctttgcatcacaggtagcatcagggaagggggcgaatattttccaactggaagagaagcaataccggtgaatgaccctaaatgggatcccagtgatgagatggaagattggaaaaagagacattttggggtgtgcataatggaaggcttatgtagaactaagaccaagcctctgaattatattaagttgttcatgctcaaccagggatttggtgaaaatcccactgccttcctcgaaaggctaagagagaccttggccacaccccaatcctgtgcctataaaatacctcaagaccatagcaggcagacacaggcggctgaacttccagagctcgtcagcggaggaacacacagacggctggatgttgagagcagcacacctacaggcaccagcacagggcaggccaccgaccagcaaaacactgtggagtctggctggggcagtcggaggaaagcctgggccactaagcagcctgactcctggggaaaaccttcccactccatcccccttttggtttcccccaatctgctgagcgctacctccactcaataaaaccttgcactcattctccaagcccaggtgttatcccattcttccaggacaccaaggcaagaccctgggatacagaaagccccctgtccttgttacaagctcatttcactgtccttctaaaatctgacaacattttcatatagtataacacttgatattcatgtttcaaattgttattctgttgtcttccagaacctgtactcctttacaatgatgttgaaagactcatgccattggtgacaagtggtgaaattaaacacaaaaatagttatctacataattatactctataatactttataaaatgactgttttaatagaaattttactgttgctttgttatgtgaaacatttttctgactttaaggcagttgttatttgacatctgaatattctgttatgccatacatttttaaaagtcaaatttataccactcaagtttatagtgaatagactttaatttagataactataattaaatagtatactaggtggatgtttgctttttcagcgttcattcaattaggaaagatccttatttgctttgtctgcaaaggacaaaaaagactattacttcaagaagtgcactgaaatattttggtgcaaatactgatgcagataacttttaagaaaaagagagaggaaattggtcactggagggtttgctgtgggaaaaaaaatcattctaatgctttctaccaaatggtaatgttttgtttgtctttgcctaagtgaaacatctatgtgatttgaatcagtgttcttaccactttaagcaaaattgaattaaatttgagtcccttagccttaaacacaattccactcttcagtttattaagggtcagaatttgcaccattaggtggtgctatggtttgaatgcattcctgaaagttaatgtgtt

SEQ ID NO: 474853 - DNA, 1333 bp, Homo sapiens
ccgttcagatggtcggtagactaaaatcccagatgttaccactatgcaatatatcaagaagatgtcagtgccttgctccaaaatcctagaggcctccactgtgattcacctatggggctctgccaaagacctcaaccagcatctttatctgccactgacacctcaagcaccagtggatttgctgggtcatatggcccaagtggcagagcagcttgcacagcagcctggacctgttgcagagccttctcttgttctggaccccactcaaaattggcagccttttgagtcactcgataaatgggccagagacagtgaagggatattgctggccttgccaggtgaaggaaaattgcttctggtgggccttatggacatgaatggagaaaaaggcacttgccaaatcaatggctgcataccagctgctaagtatgtctatgccaattattcattctggtactggggaaattactacaggatgagtctggagacccagcggacccactgcagcgggaaaggtgaacccattgggcggttacaactttatccagcaaacttaggagcaaccaaccaacttcattacattccttggttctccacatatggtcaaaggtgcagctggtcctcccacactgggccagataaaacaggaagcatattgccatctgctcttgaaccatcagcaaaagaccttggtgccaggacagctaagacaacttttggtgagaatatttatggtgaactggtcatgcagacacattgtatctatgttcccagtcctaactgttgaacttctccaactccaagtctccatgaaaaccaagtggtaatcataattattattattactaaacaatactgacaaactagaaatcattagtttcatggcttcaaggtttggacaaaatcagtaactctggagaaaagcatgaaatcaatacagggtacccaaaacccatactgtgcaaatgcaaatagaacatagagcatgcataatattttacagttcttccatgcaataccacatttaagcattacacaaataagaggaaggttgttaaatctcctactgggaaaacacaagaaatattaataatttgacaggaactgtcagggttctatggtggtcttatgccaagcaggcttagtgatatttgaaggaaagtaatcataaatacactagagaaaggcctaactagaaaactgttttcattttatagtagctcttttaacaattaaaaacaatatacttgctatcagctaagataataatttttaatacaaaaatactgatgattacgtttcattcaaatggtaatatattaaaattatatac

SEQ ID NO: 474854 - DNA, 701 bp, Homo sapiens
tagcattgggagatatacctaatgctagatgacgagttagtgggtgcagcacaccagcatggcgcatgtatgcgtatgtgtcatttgcaaataccactgcactgcattgaagataggcccagtgaatttgcaggaagtattatatttgacttacaaaatgctgtgacaggaaatggaggccttcactcatgtctgctaagtattggaaactgtcacagagccagctggggcagaacagtgaaagccaagatcaggagtccaactggaagggccttgaagacagtgaatgtctggcaggcacagacccaagcacaggaggagaggtctctgttctttgaattccaggtcaatgagaatgtctggaaaatggattccatctgttcacaagagtacatgaagaggggaaggttgtcattgtgtacagactggagaatcagacctaaacaaaacccagagttaaggaagttcagtgaaggacccggacaagcctaggtaattcattcatttccagacacagtctcctctaatattttcaaataagtgaacgttatgttttttggaacaattactaaattacagtttcatagtgtttctatttgatgagcatttttttcccatggacccaaaaatagttttattgtagaaaataatggagttatgctgcggtctgaaagtctgtgtcctcctaaaattcatatgtc

SEQ ID NO: 474855 - DNA, 1885 bp, Homo sapiens
cgtcttccatcacccccagataggaccatctagttgagggaaaataagctcagggatcccactgattctacgttatggtgagttcatcattgtcagacataaacatcaaggtgatgctggccttggggatgggacaccagttagctcaagcttcaggggctatggctgctattgtgtttcaggactcttggaccctgaatgatggtgaacatgatccaaagggtacagctacacttctgggctgctatgccctggtctacaggggtcagggcactacatgggcttgggtcccaaataggcagttgctctgctggactggggctctgatttcgagggggctaggcactgagctggttcaggcaggaatggggaagcagaagtttgttccttctgatgttcgggtgtgttcagagtttcttccttctggtggttttgtggtcttgctggcttcaggagtgaagctgcagaccttcacgtccccactagactcaggagcccagcaggcttcacctaatggatcccgcacctgggctgcaggcagagctgcccgccagtcccacgccctacgcctgcactcctcagcccttgggcggtcaatgggacagggcaccgcggagcagggggcagcactcactggggaggctctggccatgaaggagcccacagtggtggagggggaggctgaggcatggcaggctgcaggtcctgagccctgcaccatggggaggcagctgacgcctggtgagaattccagtgcagtgccagcgggccggcactgccggaggacccggtgcaccctccgcagctgctgaccctggtgctaagcccctcactgcctgggaccactggcgccagccggctgctccaggtcatttctttactgtgtagtcttagtccccctgatccaggatggctccttgagtttcagatacattgtttgcatttcaggctgcatgagggacaaaatttcaaagaaagccaagcctcttctttataaatgatgtgataaaattgtcatattacattttaaatctcatcagttcctgttacatcctaattgtcagaatttatttttatggctacaataggatgcatgggaatctggaaaaaaggaatttttagtcatgtagctatattcattgtaaagatatgagtgttaataataagagatatagcagcctttttgccaagacccaattggcctactgtacagaaactgtttattaactatggtaattagtatgctatgggatagccttaccttttgtgcttattatttctaatcttaaagcttcagtggagtaggattagtttctaatgttctatgattctttttgcattttagcatatcaactaagagaatgacaacatagaggatttgcttttgtatgctcttatagtattaaaactaaaatatgaataatgtgactagcaaatgaacattcaaagacaaatttatatatcattatgcaaatgtatttacttatcctttttcaaccaaagacatattacaagtagtagagaaaagcaataggataaaattgtttagatataaaggcacgcctctcactgttatccaaaatggaaaatcagtacacttgtaaattctacatgtgcattagactgtctcctttgtttatactttttggaatatcttaatttttctatctcatcccttctctctttctcttttacaatttatttgccaaattaaaataattaataatgaaaatacttcatgcatttatcactaatataatgagaatacaagttatatactaataatcacattaataaatacctagattttagccaggctccttggaaactttttaaaaagtaataatgttaaaaacctatattttccagtttctccatgaaccct

SEQ ID NO: 474856 - DNA, 1604 bp, Homo sapiens
aggccatctgcaagcggaggagccaggaacccagtctgagtctcaaagcctcaaaagtagggaagcccacagtgcagtcttcagtctgtggttgaagatccaggagtcacaaagctgaagaaactggagtccaatgttcaaggacaggaaatatccagcacaggagaaagatggaaaccagaagactcagccgcaaagagactggaagcattctgcgcctgcattagagatctgtgaaactgaacttaagagagatgatttagggtatctggcagaagaaatttccaagcagcaaagcattcaagatgtgacttgggcgctgttaaaagtagaaaaggaaaacctattttctgaggagaaattcaaacaggctgccaaaatttgcataagtaatgaggagccaaatgttaatagccaagacaatggggaaaatgtctccagggcatatcagaggtcttcgtggcagcccctccaatcacaggcctggagacctaaaaggaaaaaatggttgtatgggccaggcccagggccttgcagctttgtgcagtctcaggactcagtgccctgcatcccagctgtggcaaaaatgggccaatgtacagcctgggctgtagcgtcagagggcacaagccccaagccttggcagcttccttgtggtgttcagcctccagccctggtgctacaagaggattgacacaacccctttcttcacaattatatgaatgttattacaacatcagcaaagcagctttggtcacgtgtcaatcaacagaattgcttgcacatatttgaaaattaaacacataaatgtaaaattaagcacattctctgcctagagaaaggtgttgccaactatttattttaattttcaaagaacatatattttctttccctctttgatgatacaccttttgaaaccaatgatcatgtcttaaaaactgtataccttacatttgaaataacattttactatgttatgtcttttacatatatattttaaatattttctctatttgccatttgttttactttacttcatggtgttctctttcagtataattgtagtattctcaatgacttcattttaaatttcaacctttggtaatattacattatttctaaaacagtcaactataatttattgtatattaataatatttatttttatgttacaataagatattgaatctccttaatatatattttactctatgatacaacattaacttaaaacattgctacatgatttttacaaaataatttttctaagatgatatgcatatgtttatatatgtgtgtgtatatatgaatagatatatattcctatacatataaataccttttgtctacttcttgagtcttcaaacagttctgttgatctgtctgtcaattatctcgtctccttgcttactaattttaataatcttaattttataatgccttttaataatgactgaaaattgcttaattgtactttattttcaaaattgttctggatattctagattatgtactctattagacatactttagaacatcattttggacaattatttcaggaccattatttaaaaataacatttttaggaaaaaaattacagaaa

SEQ ID NO: 474857 - DNA, 443 bp, Homo sapiens
gcgatagataatggtccccttgtggtcgccaaaatgtgtccagaattggtttctttcagtgggatcttggtctcgctgacttcaagaatgaagctgtggaccctcgcgatgagtgtaacagctcaaaaaggtggtgcatccagagttgttcattcctcctggtggactgtggtcttgctggcttcaggagtgaagctgcagaccttcatggtgggttttacagctcttaaaggtggcgtggagccaaagattgtcctcctaacagtcaggaccctcagcttcaggtctgttggagtttgccacaggtccgctccataccccgtttgcctgggtatcagcagtggaggctacagaacagtgaatattggtgaacagcaaatgttgctgcctgatcgttcctctggaggttttgtctcagaggagtacccagccgtgtgaggtat

SEQ ID NO: 474858 - DNA, 825 bp, Homo sapiens
ctgagggctttacatgcaccaggtgctgcacaaaataattgaatttaatcctcactccggctctgacaggttcccctacctttatccgggcacttttctcttcagcgtcttcttcaaggtatttccagttgcccaccctggactgtttcagaatgaggaggacacctggaggaatctacaggtgcatagaccaatttgcaaaagaacctgtgagccaacactggctaagttttctggcctccatctttctcccatactggatgctccctgccctcgaacatcagaatccaagttcttcagctttggactcagacttacatcagtgatttgccagcggctcttgggcctttggccacagactgaaggctgtactactggcttccctacttttgaggtctggggactttgggactggcttcctgtctcctcaccttgcagatggcctattgtgggacttcaccttgtggtcctgtgagtcaattcttctaataaactttcctttgtatatgcatctatcccattagttctgtccctccagagaaccctgactaatacagtatggaaatttacatttttggttattattgctaaatgaccataaaaaggtaatatatatttatactcctaccaacaatgtatgagagtttgttatttcacccacatcctctagcctttagcattgtcagactttgaaattgttggcattgctatttcatgtttttaatgaacgtttaaaaaaattatgaatattggtgacaactttagcacatttaaatttaaattatgctgtgtaaaaatttcagaataaagacagagaaattcact

SEQ ID NO: 474859 - DNA, 1214 bp, Homo sapiens
catcaaggaggcgaagaggcgacagcgtgctggcaagccctcacttgctctgcgcgcctcctcggtcttggcgcccatgcttgagaagaatcccttcagcccgccgctgcactgtgggagcccctccctgggccggccgaggccggatcccgccccttccgcttgcgggtaggcgtggagcgaaacgcgccggctgaggccgggatcgggccccttccgcttgagggcaggtgtggagcgaaaggcgagggcgggaaccggggctgcgcgcggcgctcggaggccagcgcaaattccgggtgggcgcgggctcggcgggccccgcgggcccgcactcggagcgcctggccggccggcactgccgaccccgggcagtgaagggctcagcacccgggccaacagctgcggaggatgcaccgggtgccccgcgccgcgcgagaatttgccgggcctcaatcacctccacacggggcagggctcgggacctgcagcctgccatgccctcgctctctcacccgcggtgggctcccgcgcggaccgcgcctcaccgatgagcgcagccccctgctccaaagtgcctggtcccatggaccgcccaatggctgaggactggaggattgtaaatgcaccagtcagcactgtgtctagctcaaagtttgtaaacttaccaatcagcaccctgtcaaaacggaccaatcagctctctgtaaaatggaccaatcagctctctgtaaaatggaccaatcagcagaatgtgggtggggccagacaagggaataaaagcaggctgcccgggttggaagagaaagaagaaactcggagcacgtgtgaacgtcagaaggaacaaactgtggacagggcatctttaagaactgtaacattcactgtgaggacctgcggcttcatttttgaagtcaatgaaaccaagaacccaccaattctggacacaccaggacattctctatttttatttgctgaaactggcaacactaacctggggaagcagccagatctggaacacctccagcaattgccatatccttcagcttcagaaggccgccagcaggggtcagtcaacgtggttgctaccaattatttttgagtgaaccaaaatatcacgggttttcttcactgtggttattaaatccagtgccaagcatatatcaaaacatatttccagagttatttatctctttgctacttttacttttata

SEQ ID NO: 474860 - DNA, 619 bp, Homo sapiens
ctaaacaagaagtgtttatttaattaattaatcaagtatataaatgctattgaacaacaattcagactcctatgggaaatcttccagctataattatgaaaacacaagaaagcatgtacccccaaagcttaagggaaaaccatatttcaagtcaaaccttgagggctacctggccagatacctcacggaaaggattctcaattttgcagttctcccaggacacttcacagatttgcttcgaggacacattgatgttccaattttcaccagcgttcagagttgcccatttctcctggaacagctcagaaatagttccgataatcaaggctccaaaaacctgaaagtcgcgagatgtaaaatgtttcaagcttatccatacaatgtgaagtggccattgctggcagcttctcttccctatattcctaccaatggaagcatttcgaatatattatcacattctctagtggcttgcaaggtttctactgaaaaatctgctgacagtggaattcataaagttccattttttgaggtcagttactagagaattattttattcttttggtggtgttatgtttccttacatttttatttttcttgtgtcctcgtattaatgtctgta

SEQ ID NO: 474861 - DNA, 643 bp, Homo sapiens
tgctcaaggggagtggattatacaaggctccttcaggatttagcttgggcattacctcttttgggatatattccctgatcgacccctattcgtgtctccagaaggatgagattccatggtgcaagtatgcagaacacaagagagtggcatagaaagagccaaaataaggatgtgtttttgtgttgttcatggctgactggagttcaaacctgccaggaccttcagaggtgtcttatcaaacagaggtcagaactatcttccttaaatcagagaaaccttcatgctggaagcaaaagtctgcatgagaccctctccaactgtgcctgcctgaagcccttcaaagcctgcatggaacttgccactcttgcagtgcttggagttagtggtgagattgagggaatgctttctaggaagtattggccactcaacattcctttcctgttccttattacaaagtgttgccagaagcacaaatctgttagggactctgccgcttaccgtctgcttgatactaagggtctccaaatggccccaaaaggtggtggctgtttgcagcactcggacttttgaattgcattaagtaccaatctgaattttctggtctattaaaatgcattaagtaccaatccgaatgtcttcattc

SEQ ID NO: 474862 - DNA, 554 bp, Homo sapiens
caggtcccttgtttcaaagtcacacccggaagctgactgctccacacacggccgaaacatgaggaaactcatcgcgggactcattttccttaaaatttggacttgtacaataaggacttcaactgaccttcctcagactgagaactgtttccagtatatacatgaagtcactgaggtaggacaaaagattgctacggtcctattattttatggttattgtgacacaagtaaggtaatggctaaaacagaagaaagaggggtccccaaaaatgtaaccttaaaatttgatggttgtgctgctattgatagcattgatggaaaaggactagatcctagtgtaagcatcctaatagaaggagaggttcaaaaacgctctccagaaccagtatatcagactttctatgataaactaaatgtgccagtacctgagattccaagaaaaactaaaaatttgtttttgcaattagccgaacacgtagcccagtctctacaagtcacctcatgttatgtttgtagagggaccgtaacaggagatcaatggccataggaagccc

SEQ ID NO: 474863 - DNA, 563 bp, Homo sapiens
gaaacggaccaatcagctctctgtaaaacagatcaatcggctctctgtaaaatggaccaatcagcaggatgtgggtggggccagataaagcaataaaagcaggctgccctgtaacactcaccgcgaaggtctgcagcttcactcttgagccagcaagaccacgaacccaccagaaggaaggaactccaaacacatccgaacatcagaaggaacaaactccagacacgcagcctttaagaactgtaacactcaccacgagggtccacggcttcattcttgaagtcaaacaaaataggcatgtagtcaacaacagtctaccaaagacatacaaccagaaagaggacaacattcatattgtattaggacctactgtagaatcttattttacttcacatacctctttgaaggcattttatccaaatgaaatcacattctgggctactaaaaggacttcaacatacaaatttgaggggacacagttcagcccataccacaactaaagtgtaaaaagctgcaggggtggcatgtggtctccattaatgatctctatttaattcttttgt

SEQ ID NO: 474864 - DNA, 1528 bp, Homo sapiens
cacctcgttgctttcggtctatatgtgtctttactgctaaagtttactttcgagaggtcttcttaccttctgcactctcatcaagctgcatgatatcaacatttctagtgtacttgggctgaagttgtttctctctctctctctctctctctctctctctctctctctctccgtcttgtgctgctcccccttctacccaatatgtggagaagaagaagaggaagaaaaggaagaagaaggatgaagaagaaggaggaagaagaaggaggaagaacaagaaaagaagaagaggaagaggaagagaaagaagaagaagaagaagaagaagaagaagaagaagaagaagaagaagaagaagaagaagaagagccaaatagcttcatcccatactgctcaccttttctagatttttgggcacagtgcaagctgccagtggatctaccattctggggtctggaggatggtggccctcttcttacagttccactaggaagtgctccagtggggactctgtgtgggggctccaaacccagatttctcttctttactgccatagcagaggttcttcatgaaggctctgcccctgcagcaaatttctgcctggacatccaggcatttctacacatcctctgaaatcaagttggaggttcccaaacctcaattcttgacttctgttcactcacaggacaaataccatgtctctaagctcagatatttaaagtgtgcttcctgtagctaacatataattggttctttctttcctcattcaatctaccaatgtttttattaactgctatcttctaaccttttatatttaatattcccctcaacttcaactataacttcccctagtcaagagagacaacttttcttctgaaaagctgattctctagggcatgattcccctctccagttaaggctgctatggtcatgtatttattgtcaaaattgggcagatattttgtggttcctcaaaaagctaaacagaattaccatgtgacccactcctgagtatatacctaaaagatttgaaaatagagactcaaatggatatgcttatgccaatatttatttcagcattattcataatagccaaagggtaaacacaatctgagtgtatgtaaactgattattggagaaataaaatgtactccaaatatacaataaaatattactaaccaataaaaaggatgaagttctgatacatgctacaacatgaatgaatcttaaaaacattatgctaaatgaaataagccaaatacacgaggacaaccattatataatcccaattatataaaatatttagcaaggtggtcttcaaactctgatatcctttcttctgcttggttgatttggctgttgatacttgtgcatgcttcctgaaattcttgtgttgtgtttttcagctccattgggtcctttatgttcctctctaaactggttattctagttagcaattcctctacccttttatcaagattgttagcttttttttgcattagtttagaacatgctcctttagctcagc

SEQ ID NO: 474865 - DNA, 868 bp, Homo sapiens
ttatagctttaagtgttcaggccaggcctagctatgggcacactgcacaagatggctttgcggtgtctcccttctttggacccagtgaaagcatttaacttacttctgagtgacaagaaagaaaagaagcaccacttaaagctgggagtggagcaacacaagcacccctatggtcaccaccactatgagtgtgtgggatcagatctgaagccagcaaaacactgggtctcacccaaggcctgctgttaccattccctggctattgcctatgttttctcaaggccttggggctctacaaccagcaggtggcaaagccacccagatccgaatccttcccttaagaatggtaaaatcctccaggctctcgttgggtccaggagtgccatccaggaatcagagactaaagtcaaaaacttagaaatctacctggtgttctattgtactgaggctgagctgccactccttcccacccttccctcccctttccaaaggcagaggagcttcgccctgtagccaccatcacatcaggccatgaggagtactgccaactgctgccaatgttcccttaaggcccaaagcctcttaggtcagattgtggtgaatgctgcctggcctaagactcaccatttatggcactgggctcccctctggcccttggcaggtccagaaatgccatccaagtgtaaagtcttagaattgggactttacttggtgctctactgcttggtgctctaccctcctgtggctcttctgtcctctgaagccagaaaatctcagaggctcacccaaggccctcgacatagtacatgggtatccctgatggttatttagtgcccaagggctctttaattaccaagtgatgaattcc

SEQ ID NO: 474866 - DNA, 947 bp, Homo sapiens
ctgatgtggccctatatccactaggaagaaggggcacattttcttaatactcaccatgactttgactgcctgcccagccttccaaccatatgcctggctctctccagagaggaagaattttcctgttcagtattcctacggcattattgatgaggatttagtgagagaaatggaattgggtatactttaccctggattctcagtcattctgagcaaacttgtatgggtttcaatgtcctcattttttaaaatgaggagaataatgaaagtctgccatgagacttcaaggaaccaggctgcacagcaggaagtgagtggcgggaaagcaagcaaagcttcacctgtatttacagccgctccccatcactcacattactgtccgatgccgcctcctgtcagatcagcagcagcattagattctcatagtgggggaaaccctgctgtgaactgcacatgcgagggaactaggttgcatgctccttaagagaatctaatgcctgatcatcggtcactatccgccattaactccagatgggaccgtctagttgcaggaaacaaactcaggactcccactgattctatattatgcctattgaaatcagtatcaagttgctatccaagaatgtaataaagaatgtacctcagataaacaaaagcctctccaggttgaatactcgtgtgcagactgagagaaagggctttattaagtgaatgtaggcttttgtacaaatgagtttaaatactgagtcacttgacacaattacatagtcattctggaaatggatatttaagccatgcatatttgggtgtgtttttattaaagcagattcttctttatgaacagtaagttgatgtttgtgcatttttcatacattcttaagttataatagcagcattaaatagtacaatagaaaagattgtccttgatcgcagctctttgaagatat

SEQ ID NO: 474867 - DNA, 1070 bp, Homo sapiens
ctcactgtgagggtccgcagcttcattgttgaagtcagcgagaccaagaacccattggaaggaaccaattctggacagaatgagtcctgtgccttcctactccctgagacacagcaatactgaaattaggagagttgataacctcacaatggcctctaagtgttcaagtgaaaagaagagtcacagctgcccccctccctgcccacctgctacattacagacccagaggcctaggaggaaaaaatggtttcttgagcctgatctagggctcccctgcagcataagcctagggacttggtgctctgtgtcccagatgctccagccatggctaaaaggggccaaagtacagctcaggccatggcttcagagggtgcaagccccaagctctgacaacatccacgtggtgtgtgcttcaggggtgaagccctcatggagagcctctgataaggcagtgcagaaggaaaatgaggggttggagcccccacgcagagtcaccactggggctttgcctagtagagctgtgagaagagggccatcatcctccagaccccagaatggtagatccgctgacagcttgcactgtgcacctgaaaaagcttcagacaatcaacaccaacagtgaaagtagcagtaaggcctcagtgtctattatccccttccttgtgttcatgtatactcaatgtttagcttccacttataaatgagaacatgtggtattcgattttatgttcctgcattagtttatttaggataataacctccagctccattcatgttgctgcaaagaacatgatctccttccagtgttattatgttttaaacacattattttttatattgctgtatttccccagagatttgtaccaagcagtagaattactattataaagtgtttataagttataagacttttagtttatattccttaattacccaacagaaaatataaatttaatttgtaacaaaagaatttttatatatgatcttgggtctttaccaaaataagtatttttcaccaaatctcaaattttttgaaaaaacaagctgatgtctgtttcagtgtaaaatgt

SEQ ID NO: 474868 - DNA, 676 bp, Homo sapiens
tccttgggaacatgacccaatacttcgttttagtctttgccattttacagtgctggctgttttcttgttctgagtcagttcctgggaaacgcatgtttccagtgccaaagaacactctcgccaaaggtgagtttcacaccctcaggcttggaaaagttgaccaggactttgaccaaaatgctgatagtgatatggacaatgaaatcccggttgaggtggtctcagatggagatgggaaatttgttgggaactggaacaaaggtgactcttttcatgttttagcaaagagactggcagcattttgttcctgccctggagatctgtggaactttgaatttgatagagataatttagagcatctggcagaagcaatttctaagcaacaaggcattcaagaagtgatttgggtgctgttaaaagcattcagttttatgtatccacagatatatggatacataaaatttgtatttggaattggaacttatgtttaaaagggtagcagagcataaatgtttgaaaaatttgcagcctgatgaggatgcgatagaaaagaaaatctcattttcagagaagaaactcaaacctgctgcagaaatttgcttaagtaatgaggagccaaatcttaattgccaagacaatgagaaaaatgtctccagggcatgttggagacctaccc

SEQ ID NO: 474869 - DNA, 756 bp, Homo sapiens
aggcctctgggcctgtgatgggaggagctgctgtgaagactttcgacagtccctggagacatttttcacattgtcttgataattaacatttggctccttgttacgtctgcaaatttctgcagcaggcttgaatttctcctcaggaaatgggtttttctttgctgtcacattacctgaactttggagttggtgctttctatggtccccagattgacatgaaccttcacagtgtcccacagtgtgggataatcaagcttgacttacaactgtccctgagatttgactttcagtacaagtggccgacaggagtcctagagtgtccagttattcatcaagcagcgttcaaggcctctcttttcaagatcattaccaaatactgggattttgatgaccaacttcaattaaaactaaatagtattttgaattataagtttttttttttcaaaactgagtctattaaaacatttaagtttttattttattttgttaaaatgacacattacattgcttctattatatgtttctttaagaaagttaatctattcgatttctaatctttttgtgcctgcttatgacacataaagcaaaataatgataacgtcgcatatttctaatgaactaacttacggaaacaattaattttaacaagactttgtttcgttcatttgtgatttcttctctttttcaaatatgtacggaactgcactatattgttctaggcactaggaatttagcaagtggaatttataatctcat

SEQ ID NO: 474870 - DNA, 718 bp, Homo sapiens
ctagcagcctggatttcaggcttcaggctgtcttttggcttgaaggagggggagcgtgcagactggcaggtacatgagctgagacaagtgctctggggctccagccccatggtagcatctagaggtgagtgcctgcgactcccaaagcccacgtggatgtggcctgtcttaaccgtgtgctcttttagctttgccttccacagacggcttaagtgttcaccagctcagtgccctcttggtacccaggtctttgtccgatatccaggaagaatcaggtcacacatgaatgtggagatggaatttggctgtccggtggccgatctcctctctgaccgccaacagccaaactcctctcagcattcagatgctctttctcttctttctgctgagccgctctgctgttctccggctcttctgtttgtctccttctcatctgcttctagagcttggggtctggggtttatgagtttgatttcaattaatgcaagtatcagatgtaaagaagggcaatagcaagtgataaagacttacactcaagtgctactctattatacttggggatgaatatttcatggtcaattctggaaggggttaagtatagaaattgaacagtggtaagtggctgcctcaggagaaaaggtagcagtaattacctctgaagggaagaagattcaataaacaaggatgttggagagctttggaaataagctttacatat

SEQ ID NO: 474871 - DNA, 882 bp, Homo sapiens
ccggtaccaaaatgtcgtgagcaccacagcactgtacaggctatgctcggcttgtgctaccagccagaatcacacacctgccaagggtgcaccaggcacgtagtggagaggagtgtgtgggcaagcaagcgcatggtctggctactgtgcacagcggggtgggaagctacaggtgctggcacaggtaccagttctgtgccaagctgtgccaggaccagatgtattgcacgtggcttccactgtgggcacccatgtctggatgaggagaatgcagtggcacctggaagtttggagatgccaggaactgcagagcccaaagagagtgtcacaggtctagcttggggagctcctaggtataggcaccctgaagggctaaagctcttctctccttctcctcatctacaatgtggcaagcagggggcatgtttcaggcctgtttgtgttacagctcttttagtcctgccatttaggagttcccaagttcttgtcccacatccaggaagaatgagagccatcctcagcacccccttgaccgccctcttgtgcttgtcagtgcccaaattccagagaaagccaaggcagcagggggctggcatgtcagtgcctcctcaagcacacacctggccagatgcacgcactcacaccccacaccaccaccagcaaagcccactctacagccatgggaaggtgagacacaagagctcactttataattttgtgtctgagcgtgggcaaaaccaaagtcactgtgcaacccacaaaataccaaacacaatcctctactggctaatatgactgctctgctttgcaaattgaagctctattttcattctaggcgttcctcttcctagcttatgtcactgtttcttttttgagtgttta

SEQ ID NO: 474872 - DNA, 1176 bp, Homo sapiens
aaacagaaaccattcaaaaacactgtcaccaccagagccaccaccaccatcactgcaacaaccaccaccacgccaccacccccatcaccaccaccaccattaccatgaccaccattaccaccaccaccaacagcaccactgccaccaccactgccaccaccaccacccccatcaccaccaacaccaccaccgtcaccaccactgccaccaccaccaccaccatcaccaccaccgccatcaccaccatcactaccactaccaccaccatcaccatcaccaccatcaccaccaccaccactaccaccaccaccatcaccatcaccaccatcaccactaccaccaccaccatcaccaccatcactaccaccaccaccatcaccgtcaccaccgccaccaccaccccatcaccgccaccgccaccaccactgccaccaccaccatcaccatcaccaccatcaccaccaccaccatcactgccaccgccaccaccgccaacaccatcaccatcaccaccaccaccgccaccatcaccactgccacaaccatcaccaccaccaccgtgccgccaccacaccaccaccatcaccaccaccacaaccaccattgccactatcaccgccactgccaccaccactaccgctgccaccaccttcaccgtgccgccaccgccaccaccaccatcgccaccatcaccaccaccactacaaccatcaccaccaccaccatcaccgccgctgccaccgccaccaccaccaccaccatcgccaccatcctcaccaccgctaccaccactgccattgccaccaacacaatcactgccaccaccaccaccattgccaccatcgccaccatcaccaccactgctgccaccattgctaccaccaccaccattgccaccatcaccaccatcacccacaccaccatcaccaccaccaccgtcaccaccaccaccgccgtcgccaccaccaccaccacaagcaccactacaattgtctccacgcataaatatatatgaagtcacattggagtacggtgtaccctcaatccaatgtgactggtacccttataagaagaggagaggagatacagaggtgagaatgccatgtgaagacaaagagacacataaagggaagaaagccatgtgaatataggagcacagattaaagttaagctgtt

SEQ ID NO: 474873 - DNA, 699 bp, Homo sapiens
tcacttcttttctgattcttcgcttgcttcaggccatctgcatgtatatgtgcaggctagggctcagaggcctcacactcagcaagtacagtggaagctgggattggatagggagatttgtcccattagtatcaactgtgtcctacaggactctattgtttcaagagtcaatcaacacagttcaagttggcattgttcaagggtcaactgtatactgttttaagctgttgaatttatggcattatgttaatcaggttttggtactggaaagtgggctgcaggataatgttagtgactttaatgtaattaatatggtggggttgacaaccaggttaccctgggttgagaaaataggaaatgtgaaaatgggaagtggagatactgaacataacatgatcctttcaagaatcttaaatagaaagagaagtcattaccatcagccagaatgcacaactacccttgcctgttaccacaagcagaaccttgggcccacgggctctctcaaccacagtaagccaaatttcctggaaagggaggagacccctctagaaatctgctttggcttaagcaatagtaaaaaggctgctgtgtacgagactgtgctaagtgtctgactaaacctttgttatttaatttgggcttaatgatcacctttaaaagcagacaagtgtgattgttaattttatgtgttgcttggct

SEQ ID NO: 474874 - DNA, 606 bp, Homo sapiens
tgaaggcttaagctcagaagtgatatgtttactcttccactgcattccaccagccaaagcaattcacaagaccacctcagcctggactttattgtacgtatcactatcagcattttgggcaaagcaattcaacaagtctctgggggagttccagattttactacattttcctgtcttcttctgagccctccaaactgttccaacctctgcctgttacccagttccaaagctggttccacattttcagacaagaacccagacctcgctgagctaaggagcaaaaaatcctgcatcatcgtgacgtggaagggaaagtttttggagatgaagtgcccattgtacctgatggcagctgagataataaatgctgccatctggatgtacatgtgcaagcttgggctcagaggcctgacattcctgtcttcttatattaataagaaaaataaaacaaaatagtggtgaagtgttggggtggtgaaaattttgggggttgtatggagagataatgggcaatgtttctcagggctgcttcgagtgggattaggggtggcgtgggaacttagagtgggagcgattaagcagaaggaagattttgtggtaagaggc

SEQ ID NO: 474875 - DNA, 527 bp, Homo sapiens
tctgtcaccatgagatctgcacacgccaccgcgctccctttcgccttccgcagcctcgagtggaagcagcctgaggccctcaccagatgcagaagtccaatcttgaactttttagccaaaccaccagagtggagcaagaaaaagaaaggcttttctccctgtttgcaagagtttcagtctgaagatgagacattctgccttctggcagttaggagaggttttatgcattacaagtactcaggccgatcaagagaaaaaaatcgaaaaacaaagaaacaggacaatgatgcgtggtttaaggcaaaatttcagcgatcagttttcagaagcagaagcaaagactttagcacagccatttggtggaagaagatttatggaccgaaaaaggaaagtgatatccaaaaaatggaagtgatgtacagaaacagctgaattggttacagctcagtttttgccttatttgaatatgtttcaaacagttggctacatttgactggccgaaactcagtcatttctggaggtgtcag

SEQ ID NO: 474876 - DNA, 644 bp, Homo sapiens
cactgaaggcatctgctacatcgaaccaaggtgcaggccctgctgggtggagatgctccctggtcagcctatttgctgtgaccactctggcatatgtggtggacgatgcctctgcttcctctctagtggctgcagctctctaccaagccctccaccagatctgcagctctctaccaagtcctccactggaccccctcaatttccagcgatgaggcttagggttgaggatagacttgagatgctgggatccaaagaagaagaggttatcatgatggttcggaggcactccaagtccagaaagagagaagtcccgaagagttataaggatttaacgaattggttgctcaaactctttggcagtagaaaggttgtgcaggaatctaaaggcagagagagactgaaactaatgaaagaagtgaaccataaaattttcaaaacgtttgctgctcagtgtgtggactataacttgcagggagtaaatattatctgggaccttccaggaaagatggattcccaggttccagaaagacccacagatgtagaagatggtgtttaaccagaattccccgtgaattgtatagccatttaaataaaattaattaaataaaatcgacatttaaaagcagtactctaaagcacttcag

SEQ ID NO: 474877 - DNA, 700 bp, Homo sapiens
agagcagttgacacagatactacgttctagaagagaattaaatttaaacgtcaagtttaaagggatcataattctgcaggcatgaagttaggaagagcaggaatactgggagtatattgtgagttttactctaggaccaaaagcagctgtggtcaaggaaagaagcctggccctttgctcttgggttgtgacggagccgctgtgtttctccacagcacccttcagtctgtgtgtgcagcaccaagtcggggggaagttagaagaggtgggaagagccaccgagcaggcagctcaggagaagccaaaccttgcacagtggaacggaacgggcagtccatttgtggggaaaacacgagacggaggtccagtgctctgtggggattcagaagggaaggtcacccccgcacatggaagagcagtgatgcgcccatactgcaacgtgctcgggatactgcgggaaagggttccagaaccattccgcctactcaccagctctaggatttggcagccaacaccctcctctgacctccgaggctcggcgttattgactaaccctaacagggatggatcccgccttccctgcctcacagtgacttctgtgagggttaaacgagagccatgaaaaccatgcatgtcaggtaaggtgcaaaaccaccattgtgcggttgtgcaggttcgggggagacagagctcactttgc

SEQ ID NO: 474878 - DNA, 611 bp, Homo sapiens
cgggcagtgatggatgcgataagttatggggaaagcaggaaaaaattagctcccatccaccattttgtacctcccaagatccacagcaggccctctcaatatggggttggagagctattagttagctttgtggaggatcctgcgcccagggttgcctgcagtgccaggcttgctggctgctgcattgtggccggttatctgagtgggtatttccagcagccccctgttctccaaaaggaacaggttccatgcgcagctctggatgggctgagtcaggggagagtcctgcagacatcccaggctggtctgatttgcacgcagagaactgtgttggagcttactgaacgccaagtcctttttaactggggtcagcatctcatgcttcaaaaatgccttgcgaccgcatttccacgaacataaagccgaaataaaagaaccatcttttttattgcaaagtcaggcgacataaggatgttgtactattttggcaataaggctcccttgattttccctttcatgaaaagccaaattcgtaaagaaagtgacaactacagtttatacttcagtcatttaagtcgctgctgtggttgctacactcttcagacttgtgg

SEQ ID NO: 474879 - DNA, 2019 bp, Homo sapiens
ccaaagaagaaaaaaatcaaagcttccaagatggtggcaagcttcttgttctctgaccgggggttcttggcctcacggattccaatgaatggaaccttgggccatgtggagccgtgggtcacggaagagaactgtggaacccagctactagcgttcagctcgattaggacgaaccctgggctcttagccatgcaggaacaatggcaagcctttagcctgattgggagcagcaatgggtggctcgctgggtcaggagcacagcggacaccctgccagatctgcagaggtggaagtcagtggtgggtctgcgatggcggcaaacagcagtggtggacagcgagcgaaagctcagctcgagccataacaaacatagaccagaagagaggaaccatctatcatcctgtcctaaagggagttcctgctgggtctggtcggacctttgtatggtaatgaagatttaaatcccattaggaaacctgctgggttaagggaattttcagtggttaatgttaaatcacctttttctaacagaataaccccatactttaagatttttgagttagtaagctacctttttgcttttttgacttagaataattctgaactgccctttgaaaacttggggccctggcaagggtggtagggaatgggtcccacataactgtccatgttgagagctgtatgcctaaatggggagagataacagggagaagactctctgggttcatagcctaggggcctaaggacacagcatagatcccttccttagatccctctggagatagaacttgctagaggaaatgaaattaaactgtaagtttaaggtaaatattgatattttctaagatataaaagcagtcactcatcacaatgcatttcaacaaaaccaaacagtttggtgatcgagactcacagagatttctcctaattggataaaaagatgaggcctgtgctttttcatttgcttgattaattactgctctgaaacccttgaaaacagacatggtctgtaagtggtatctgttgtttaatcgaggacagatgtttttgaaaaccttttaaataggcctagagagttattgactctgaagtgaatcattgaactgtatgttttttacaagtaacatgccagcaaaaaatgatttttactaatattcaagttatagtcaccataattgtggtttgtcctaaacctaccagcatctagaagcagctgcaagataatggtagtaaatggcatcaccatcgacccaggggactaggctgaaaatccaataatcactcacaacttcttcctgcctgtacttctctccctcattcctgctctgtccaagccccgttgtcattctcaagttcattgcctaagagcagtatctctccaggtgtctcctgtgtctgttcctaccaccgcttatgttaagacaactgtgatatggcttcggtgactggaggagcaccagggtccttagtctcatgctgatttagataaaacaacacggacacatatagagtggttttaaggagcggagagtttaataggtaagaaagaaggaagaagctcccccatacagagactggagggggggctccaagccaagagaggaaaccccatgtgccgcagaaaagtggctgcttatatgagtaggctggaggaggtggtgtctgacttgggtagggctcaggggattggtttgaccaggcatgtcattcacgtagcctatggaaaaactggccctcccaccctagccttttaatatgcaaatgcagggtgccatgatgttctacacacgtggagatatgtgggggtggtcatgttgccaggcacatgtaggggcaagggcaagaggacaagggtgggaattgccatgtttgggtggacccggtttctaatggcctgcatttgcatatcaaagcttgccagcccggctctaagagctggggctttcctgctagacaagaagcatttctggagctgctttaaaagaaacaaaaacttcccaaggaccccttttcctctct

SEQ ID NO: 474880 - DNA, 910 bp, Homo sapiens
aggggctactagccagatggcttgggaaaataggatagccttagacatgatattagcagaaagaggaggagtttgcatcgtgattaaaactcaacgttgtatcttcatcccaaacaacactgcccctgatggaagtataacaaaggcattgcaaggtctgactgctctgtccaatgagttagccaacaactcaggggaaaatgacccctttacaggatggctagaaaagtggtttggtagatggaaaagaataatagcctcgattcttacttccctcgcagccataatgggtgtacttattcttgtcaggtgctgtgtcacaccatgcatctgtgggttggtgcaaaggctcataaaaacggcacttactaaaacctcccttaactatcctccaccttatccagagaagcttcttcttttggaaaatcaagcagaacaactaagccaagacatgttaaagaagtttgaagagaaagcgctataaggaaatgcaagaagacaaattgttagatatgagttctaaatttctcttccaagaaatttgtcagtatgttcaattctttgccttctacttttaaacttaacttcctcgtaaagcaacatttttcgattacctactccaccctgactcattccgattacctgctcattctccaccctgactcattccaatttcctgctctgccataaccagttttcctgccaaaccactcaccccatcactctctttaaatcagccaattggaattagtttgtctgtgcggtctaaccctagccaataggggaatgacacagcagcaggggccatatagcctttgctgtgtaatagatgacttcaaaacttggtagctgaaaatagcaatcatatatctgtgggtcacgtggagttcagctgattaggcagggttgc

SEQ ID NO: 474881 - DNA, 1155 bp, Homo sapiens
catacacttaaagcaattttataggggtgatctgagtctaaggttaggtcaccaggagacctgaagtactctggggatctgctgggcctctgagcttcacagagtcagagtgggttgtggggtatgtctgttgttggtctggtgatgcagtgggtcagcagggaggatccccaggcagagtgtttgcgctgcaggtcttcttccgttatctgtccctggagcaggcctgaccaggcactactctaatggcttcatgtgtatcgcctcagtcaatcctcatagccatcttactagttcggtgcttttattatccctgctctgctgatggcattctcttggtcaaggatgtaagtagtgatgcggacagagccatctgtgctgcgctgcagacccacacagaggtctactggaagggaggagcccgaggcgagtccactgaatgtgggcacttcccatgcatagtcgacctagtaaaatggccacagatatgtgtctggaaaggactgggaaacactcctccttgtcttgtatggaccttccccgagggtccaagcctctccctcagtcaaggcagcacttctgagtttgtgaatttgattgccctggtccagaagccgaagtcaatgatccatggaagatgtacctgctttcccattgccttctgccatgactgtaagtttcctcgggtctccacagccatgctttctgtaaatcctgcagaactttctggcatctctgttgacttaaggaccagtcaacatgagaaaatggagcccactaattttgtaacatattgtaatatctctggaaaaacacaactggtttacgaaagagaccatgtgatttatttgaaaatgaagcagaagcctttacaatgttttactgaaactgccatggggaccagaagtgaatggatcggaggtccaacaaaattcactattgaggcttacacaaataaccacagctgaagatgcaattgtcccagcctattctgtatattcatattcatcttgtatgtttatgatattatttaagctgtgatatttaggttaatatattctttagtactattatgtttaataagtcaactctaaactataatttctactttcatgatttagcaatttgacattagcaatagtaatgataaactgc

SEQ ID NO: 474882 - DNA, 740 bp, Homo sapiens
tatgagtgtcattgcatgtgagatgggtttcttgaagacagctttcacactggtgctgggtggggcactggcaggctctgtgcctgcaaatactccaacagcaatggtggcacagcaggtgaattgggggagggggtgtactcctgccagcagctgtagcatggtgggcagggtgcatgcacacatgcatgctgacaaggaagggaaggcaaggtgcaccagcatgcacacatggtgggagagtaatgtgagggatggccatgtaactaaagtcttctggagaggagtaaagcgagccacaggggatgggtgtcctgggcatgctccactacagatgctcccatgccaaactatttgggctcccaactatctagagttctgtccctactatttttttaagcagctttccctgtcagctcaagtgtctgtgggggttatggagtctcccgctggcaggattccagagatccgtggtgagatttgtgcatatctttaaggtgaatgaagccagtgtcctgtagaaaacatatagtttggtctttttaaatacattcagttactttatgtcttttaatcaaagcatttaatcaatttatattcaaaattattattgatagagaataaagtagcagtcaatgttttaatgaaatgaaaataaagcttcttttccttaccattaagcaatgagaagtttgactggctagccaagtttctgattttactgttatcaagtgtaacta

SEQ ID NO: 474883 - DNA, 609 bp, Homo sapiens
ggtgggagccgccaaccacagctgtatccagttggccattttggcccctccttttgaatacgctttatttctttctcttgcctgattgccccggccagagcttccaatactatgttgaataggactgcggagcttgagcactgtgctgggagatccactgctgtcttcacagccggcaggcaggaatgtgtaagtctgctgaagatgtgcccacagctgtcccttcccccaggtgctctgtcccagggagatgggagttttatctataagcccctgactggggctgctgtctttctttcagagatgccctgtccagagaggaggaatctagagaggcagtctgactacagtgactttgtggagctgcaaagggctctacccagtttgaacttgcagctttgtttacactgtgaggggaaaaccacctactccagcctcagttacggcagatgcccttcaccccaccaagctcaagtgtcccagtgcgcctttctacactgcagaggccgtcgagctaaaatctgcatttcccacatttctggatgtaatgtatgctctgccaaccaaatggcctcacataagacttaaatctagaactgaaataaaaac

SEQ ID NO: 474884 - DNA, 1199 bp, Homo sapiens
ctgacactgtgcaaactaagaacataaggtctctctctctctctctctctctctctctctctctctctctctccctgcacacactgaggaaagggaagcctcttccatcacaggcctggaggtctaggagaaacaaaaatggtttggtttcccgagcagcgcccaagttccctgtgctgtatacagtctagtgatttggtgccctatgtcccagcacctccagccgtggctgaaaggggccaacatagagctcaggcaatggcttcagagggtgcaagccccaagtcttggcagcttccacgtagtgttgaacctgtgggtgaacagaaggcagtgcagaagggaaatgtgggattggagcccccacggagagtccatactggggcgccacctagtggagctatgataaaagggccactgtcctccagaccccagaatggtagatccacctacagcttgcaccgtgtgcctgcaaaagctgcagacaatgctagcacattaaagaagctaggagggagtctgaatctagaaaacattcccaaagataagtttatcaaactgtttaactgtcagcaaacctctttaatttccaataatggcagtagtgcatatgctagaacagaattattagctaataagctgataagtaccaggatctcagactgacttttaatatttattacattatattgaagtagtgcagtggaagattttaataattcaaaaaacaatttttagtgccttttgtcatttaagacatgggtctaaagcagcacaatgttattagttagaaaagctgtaaatacacacatatatattctttctaccatacatttttctcattgttctacaatgacgatgcaaaaattcttaccagtagatacttttgtgacaatgaatataaatttttgttaaaatataaataccttgtcattttaatcaaaattggtgtggcagattagaaaatcaatcccttctaagataataaaggcaagcaacattgtagagactatttgaatgtagactattcaaaacaatgggaagatatgattttgagtatctgggacagccttattaaaatggactggagggttccagtcagaattttctatattagctctccttaatgatgtgtaggccaaatgaagatttatttttctatgattatttaattagtgcactaaatgtcaatcatgatg

SEQ ID NO: 474885 - DNA, 848 bp, Homo sapiens
ctacagacacttctgcagctccactacagacactcctgaaccaaaccctctgggtgccacactggctcaagttctgccccaccacttccttaagcggatctccctggcaactcaagtgtccgtgatgctcaaggggtctccttctactgggaaaccagaggcccacagctgtgtccaatataatgacaagaatcttcataagaggagccaggaaaatctgattcagaaaaggcaagatgatgatagaagcaaagagagagaaagagagagatttgaagatgctagctttggagatggagaagggccatcagccaaggaatccaggcagcctctagaaggaccagggccctgctgtcctgtgcagcatcaagacaatggtctccacatcctagccaatccagctccaactgtggatcaaagaggcccaggtacaactcatgctgccacattcctccatgaggaagcctgccggcagcaccatggggaaatgtggggttggagatcccacagagtccacaatggggaattgtctagtggagctgtgagaaaagagccaccatcctccagaccccagaatggtagacccaccagcagcttccaccctgtgcctgaaagagctgcaggcattcaactccaacctgacatgatcacaagtttaaaatgtgacaaaagaaatgtccatggaagctgtgagtgtaaactctaggaagcgtctttaaaggcaagagcgtacttttcttctgttttgtgttcctgtcaacatcaataggaattttagtaaatggagctagagaagccatttcaggccacctggggatggagagggcacacaagggagaaatgacacc

SEQ ID NO: 474886 - DNA, 744 bp, Homo sapiens
tgcccaatttgccagcagcagagaccaacactgagccttcaatatggcaccattcctcagggtgatcaaccagctccctggtggcacgttaattatattggacctcttccatcatggaaagggcagaagtttatcctcaccggaggagacacttactcctgatatgattttgcctatcctgcttacaatgcttctgccaaggctaccatccatggactcacggaatgccttacccaccgtcatggtataccacacagcattgcatctgactaaggcactcactcactttactgctaaagaagtgtggcaccaggattcacaggtccaggaatcaaaaggtggaagtggaagcagcagcattcgctacacttccagtgattcaaactttttgcttcctattcctgcaacattaagttctgctgtcctagagtctaagaagggagttaccgtgttgtctggggtaattgacctgaattatcaagatgaaatcaatctactactccacattggaggtaaggaagagtatgaatggaatacaggggatccattaggggttctcttagtattgccatgccctgtgattaaagtcaatgggaaactacaacagcccaatccaggcagggctacaaatgacccagacccttcaggaatgaaggtttgggtcactccacaaggaaaacaaaacaaaacaaaaaacatgacctgctgaggtgcttgctgaagccaaatggaatacagtagaag

SEQ ID NO: 474887 - DNA, 860 bp, Homo sapiens
taacacaaacagggctgaaacatgcccaccgctcgccactttgtgggcgacgaggagaaacgaactgctggctgtgacaccctctttggggctccgcagtttctggtgtctccaagcttccgggtgccatcgtatttcccagtgcctgcagtggaagccatttgtggtaacgcctggtccagccagtctcacacggaacccacgcctgtgctggcgcctggagctgcctgcccagtggcagcaagcacgcatggctgtgtgcagtggccagaccccatgcttattaacacaccccttgctactcctcaccaggctcgcccttggcaggtgtgggatccagccaaatacagcctgctggggcgagtgagcagaagaggccagcgggcccgtgtaaaactcaggcaaaggcaccaccagccgcagaggtttccaactgaaaaagtgacacgccatggctccaaggttaggggactcatgggtttgggagaggtcgtggtttatttctcaaagcagctcaacggtgtccactccttgggtaggcgaggactgaggcagccatatctccatctctggggttttctggtagaaatgaatgttgattaccttcatagcaaaagatgccagtgtcctttgtggagcaggccactgaggaccacagtgattcctgctgcatgactgataccaatagcttttgcctttctattttgctcctagctgtctcttggtgtctaagagaacaccatgtttttacaaaagtctttttaatataatttcttaatacacatgtatatttataataatttttattacctagctattgaaacattctatatatgtgagcaactatttggaaaatgtat

SEQ ID NO: 474888 - DNA, 1314 bp, Homo sapiens
accacagtggagaggcggttacgctgatgcaagaggtgggttcctatggtcttgggcagctctgcccctgtggcttttcagggtatagccccactcctggatgccttcatggactggccctgatgtcttttgcaggctcatggtgcaggctgtcagtggatctaccattctgggctctggaggacagtggccctcttctcacagctccactaggcagtgtcccagtagggactctgtgtgggaactccaacaacacaattcccttctgcactgccctagcagaggttctccctgtgattcgtgactacctccagaaccatgaattagaacatgaagaaaagcaagaaaatggtgcttgctatgattgggaaatggaactccaatatgcaagaatctattgcatccatgccacaggagagagtggatttaacaagtatctgcccgacaatgtggatgaggctcacagacacaatgccttttcctgttaacaaatgcagtatatattctttgtggacaatttagaaaattaaatgaaaaggaaaaaaaagttgccattatttctattacccagagataaacattgttaacattttcatagattttctttcatgtttgtaaatgcactatagcttcttgctttaaaagcattgtatttttccatctaatgcgataatttgctatgacatatttttaacagctgtaaattattctagcacatgaagtaattatttaatcagtcactcttattgataggtattgaagttgtttccaggtttctgctacacatacacctttgcatatctctctgataatttcctggaatgcattttacatgtgggatggctacatcaaagagtcagaaacattttcaaggttcctgatgcatattgtaacttgcttttccaaaatatagtgttaactcacattcccttctggagtatatggcactttccttccatagcacttgctctaactctgagcattgttgttttttaacctttgcctatttcatagatgaaaaatggtattttgtttttacttaccgctccttgattagtagtgatgctaaatatatttttctgatattttattattctatagaaaatttggaagtcactattctgaaagagcagagttggagagactgaagtttacactaaacaagcagaaatattagtaacaggaaatatgtatagtgcacattccactgtatacagtgctaccaagcactctacaataatttctgccacagcagagaagcataatatatgaatacctgtaactgatactgtgaacacattggtaataggctac

SEQ ID NO: 474889 - DNA, 582 bp, Homo sapiens
taatatctgagctatgtcttactttggtgctgggacagctgtcagtagagcaccacaggataagaaacataacagtaataaagaaaactttccaggaagaaagtttgcagtgtttgtatgtgatgtggctggttttcataagcatcagaaaaacagggtcattgccctcaagttcaatgtcaacttctgccagaacctaccccaggttgggccatggcactgtgagaagggccacagcttcttccctgggtgccttccaactaattctcccttaccttatatattgagattggttccccaggagacagactctgagatgcagactggcaaggaggatgcttatgagggaccacccttgaaatcaacatctgccaaaaggaagagaagaagcaggaccccagaactgcccaatgagatgattgctaatgctatctccttttactgatgtggaaataagactagacactaagtgggtcccacagctgataagtgcgggaagccaggacttgaaccctaagccctagctctatttgttttagtaagtacctaaaagaatgtttctaggaacttatgtcctgaaat

SEQ ID NO: 474890 - DNA, 650 bp, Homo sapiens
catccactggatgaagccagctgggctcccgagtctgctcagggattgtaaatgcaccaatcagctccctgtcaaaacagaccactgggctctaccaatcagcaggatgtgggtggggccagataaaagaataaaagcaggctgcctgagtcagcagtggcaacccgctcgggtccccttctacaccgtggaagctttgttcttcactcctgaagccacagagaccacaagcccaccgggaggaacgaataattccagacgcgctgccttaagagctgtaacactcaccgcgaaggtctgcagcttcactcctgagccagcgagaccacaaacccaccagaaggaagaaactcccaacacatccgaacatcagaaggaacaaaactccagacgcgccaccttaagagctgtaacactcaccgagaggagtattcgaagaatatggattctagcttcctgaattagttacaatgaaggtttaaactgatattaaaagtcttactaaaacattccagtctaattatttcctgccttagtaaggacaatgcatcaagtaatacttactcttcctttgatggtcaaaggaaggttaacatgcctgagggtcagtattataactattgatcagcactgaccaaaaccacaaatgc

SEQ ID NO: 474891 - DNA, 745 bp, Homo sapiens
actcttagtttttaagacaattaaatttaaaaatttacatggagattgctatggtctgaatgccaaatccatgtgttgcaaccctcatccccaaggtgatggtgttgggaggtggaaactttgggagtctctcatcccacccaacgagaaatgcctacagcaccagttggtgtgggctctgcgaatgcaaactcatttaaacgtcagctggagcaacagagctcagcaaaacaagcaggcaacagaaatagacatgacaatcactggcatcctagactgtcagcaggacttccagaccctcttagcccttcctgggacagaggctaaaactcacatgccaacagcatttgcaaatgagggacgcagccccagcgccattcctcacgtcattgaggggaagaatagtatagtggccatgagcacagactggttttggctagactgggtccaaatcttggctctgccacttaccaaccgcagacctctgaatctcggtttcctcgtcaacaaagggattaataaacagtaaaataaatcattggcaaatagcatatcgataccttctgttcgcttatcctgcagccatgacagacactgctaatcattcaagatattctttctcactgaccctcagaatcttctgtatgtccagagctccaggcagccactcccaataggtaggatttggcatgtgagatgaatcttttttgtcatctcattacgatacctttagagcacagtttct

SEQ ID NO: 474892 - DNA, 802 bp, Homo sapiens
gtgcagcctgaaatgtgtccccggtgctgggtggtcattcctttcttgtgtgtcagcctcacctcaagaactaggagtgtctggagggtaggaagacgctgccacccacttgcatcctctaatcttccacagctgaccccagtgggtgaaggtcagatagctgagttgagcagttacttcatcatctctaccaggaagcattcaagggcgttacaaggtgctcatacccttcagatgtgcttgggacaatggccccagcccctgggcctccctgctaggtcctggttgtgggactggggagaaactggtgggggcaacagagggggtagggtgggagcaagatgtccaggttggaaaacagtggaggcatcttctgtgctgggcgaagtagggtgggccctaaatgggaagattggtcgcacagtagaactggaggcattagaaggtggggctcactcagccaagaggtgcaggatggcctggtctgaggccttagatctttgggaatgtctttgcctgtgtcccaagggtgacactaaggaggtctgagttctcttccattccctctggctggaatgctattaagaaagttctcctctgtgcctcttttgctgagagttaaaaaaaaacatgaataagtattgaattttaatgaatctttgcccatatgtattgattttcattcacatcttcagctgcacctctcgaaagctggaaagtggtatgtggctggtgtcaggccagaggtttcagagggagtcctgcccctgtggagaccggatgtgacggttacaggagggcc

SEQ ID NO: 474893 - DNA, 1237 bp, Homo sapiens
gtggtggagaccaaggattcctcgaactggtctagggtgggcctggaatggggctgggattgggccaggggctagacctaggacagccaaacgccctcctggctctgcacccaaagctactcaaggcctggtggaggctgcagattgtgggagaatacccacggggcctctccctggctgcactggggcagctgctgctggggctgctgctgctgggactgctgctgctgggactgctggtgctggagctgctgctgctggggctgctgctacgggggctggggctgctgctgctgctactggggctgctgctgctactactggggctgctgttgctgctactggggctgctgccgctgctactggggctgctgctgctgggactgctgctgctggagctgctgctgctagagctgctactggggctgctggagctgctactggggctgctgctgctgctgctggagctgctactggggctgctggagctgctactggggctgctgctgctgctgctggagctactgctggggctgctgctgctggagctgctactggagttgctgctgctggggctgctgctgctgctgctagagctgctactggggctgctggtggagctgctgctgctggggctgctgctgctgtggctgctgctggggctgctgctgctggggctgctgctggggctgctgctgctggagctgctgctggggatgctgctgctgaggatgctgctgctgaggatgcttctggagctgctggagctgcttctggaaccaccgctcccgagagcgtttggcccggcgattcttgaaccacacctgcacttggtactccctgagattgagcatctccgccagctcttgcaacccaagccattattacaatacactggacccaaagacaaacgccctgctactccgtcacctgggccatcaagtggccctggttctgccacaaataaaatcatccctcctcccaaataacagctccttagatggcatttttagtcatattttgaatgttggttataatgaaagtaaatgctatttatattaagatccatatttatcttaaagcatgctttgatttcttcagtgtgagtaatttattttgctgtctactcccattaacagtagtatgagcattatattctaagagaagcattcccaacttctaaaacacagagaaactatttttagctattgttaagctaagacttattgcatttaag

SEQ ID NO: 474894 - DNA, 987 bp, Homo sapiens
agcccctcacagatacctgcctggtgctcggctacatagatgactcagaccaagcctccacctcccaggagttcccagtctgcttgaccacacagacacaggcagatagttctgctactctgaggctcgtgctgggatgggaacgcacaggcgcctgtgggagctcagaggaggaccccagtgcggagggttcaaccagaggagaggccttcccagtaggaggaattgctggggcaaagacttcaccgaggtgggagaaggcctggcctgctggaggagtgtccagggctttggcttggcagaggtggtggaggtggtgttggaggtgaaggaggcagaggtggtagtagaaactagtggtggtggagaggtcgaggtggtggtggtggaggtcgaaagggtaattgacgtagttgtggaagttgtggtgcagctggaggacatagtatattcggtggaagaactggaagtggtagaattgatagatgatgtagacatggtggaactgaaagaggcgaaggagatggtggacatggaacaggtgatggagtggattgagttgatggaggtgaaggccagcagctgccagcaaccttgtggtgaaaacccagcaggagtgttggaattgggggtcaaggggaccatcaccatccaaggaccagccaggtgtccaccacagagcctgctggccttcttcaaaatagggaactgctctccctgcttcctgaaggacaagaactatccccatggcaaccaagggatgaagaggccacattaacccttctgagggcaggcctggttgagagcctcttcaccaacccctcctgggtgtggcactatacaggcgacaaggggagtcacatctcccaaaggacatcccccagtctcaccaccattccaagagaaaggcaaggctgagatgttatacacattggatgaagggcaacgttgaggtgaactcagagggacggacagtacaaggacttc

SEQ ID NO: 474895 - DNA, 883 bp, Homo sapiens
gggaaggtggtggaatacaggaagcctgaagacaaggttcaataaagcaagagttgggctgtgccaggacaggacactgtcctggaggccttccttatcctgtctaccctgccttcaaactcggtctcaaatccacccccttctctccccaccatctgtccaggcacctggcctgacatccggtcacaagtacaccccagcattcatgacatgagtgaaactttggtctaggaatgatggtgaatgcagaaaataaaggtcatatttggagattctttggaggtagactgctcagggcttgtgctgacttcatctgagggtggaagaggaggaagaggaggaggaacaatgcaggagggaagaacatggtcaggacagaccttgtgatttcctttaccaaactcttagctcctccaaccatctccagatcattacaagccacctccattcacccaaatactccagccaacatcggggtcacctatcattcctctttctctttctctacccacccccaccgaatcctttcaagtcctgtctgtgcaagacacaggccccgtatcctgggtccttttctcctctctgcaccccacttctacccttattgtcctagttacaactgctgtgtaacaagcatcccctccaaacttagtggcaaaataatcattatattcacaagttatagggctcaggaagttgggcagggtacactggggatactacacggccactgtccaccatgctttagcttggcagacacaaagccagcatgacataatggtggaggtaccttcacccacatttctggcacctgggcaaggtgactccagtgctgaactcacctgggactgtgggctggagcaagcacaggtggcctctgcct

SEQ ID NO: 474896 - DNA, 634 bp, Homo sapiens
gtcctacagaaccattgtctaggtgcacggggctcgggttcaatatgactgctatcctcataaaaagaggaaatgtggacatagaaatgcacacagagggaagacaatgtgaagagatgaagacagagggagaaggaagccttctgccagccaagggttctccctcacggccctcagaaaaaccaaccctgcccaaccttgatttggaacggtggacagtcagggacccagagcccttccttctgtggcttcacagctggcatcccatggcccacatagaacccagtcacatggcccagaataagaggatctgggagtggcaaaaagccagccagactcagccccataaatggctggtggttgtgcagacagagagagctcagatttgggtataggttgaggttgaatcaatgggacttgttgatggatggagtagaggaagacaagacccatgactgactccaggactgcacaactggcagggactgtcctgaccttgggtgggaaaagcctcctcaggactgtgcctgcccttgggtggaaaagcctccccaggactgtcttgacctttggtgggaaaagcctccccaggtctgttctgactcaggtcttgctgaggggctcccttgccaat

SEQ ID NO: 474897 - DNA, 1700 bp, Homo sapiens
cagcccccaagcccacagggaagccaccgctctccccaaatcacagtgaggaaagagcctgagaggggcccagcatggttgaggaagcctcacagccctgggaggcagaacagctcaggaatgaagagtgtagacctaaacctgcccatcaggtccaaatctcacactggttgtgcacccgaagcagcagatggccactgagagattcccctgagagtcgccactgccctggagatggtgaatgggtctttgtgtcaccaccctgcctgttgctgcaggcccccctgctccctccctggctccttcccgaccccgtggcaggaagcatgcctgcttcatccccaagattcagggcacctgtggcaactcagtcaggctgtctgccccacacatccagccccacaagtggcctggcttcccgggcagcagatggacagggatcaggagggggcaggaaccctgagtccccagagaccccaccccatctccccatccccctggcacagccaggctcaagcctgggacaggtgaggtctgctgggctgctgtccagcacccaccagagaatgctccatcctctgctccacacagaccccttcccagtcgggctggtccccactactgggctgatctggagggcagcttgggacccctagagcagagatttcagaggggcctctggggtgcttacaacaagctcacagatggggcattcacaatgcagattcccgggccctattccagacctaccgattccaaatctctggagacaaagttcatgaatctgtattttaaacaagtgaccccgtgcatcctgcagtttgaagagcattgcctaaaataaggcaatgcttctaacactgtagaatatttggcagtttgagaactttgcaataatctgattccccaatctttagaattggggaatattcgatttgggagggaagggagaatgtttggaatccttagaacttccaagtgttttgatttttaaagaatcattcaaactttcaaatgagcagacacttctgagtgaatttctcctgagtcagacacccttacacatcctgcaaaacttctgcccactccacatagaccctactctttttctttcatttttcaattcaatcagataccatttatcttcctttttaatgttttggaataattttagactcacaaggttttcctgtatagtcttgactcagtttcccccatgtttgtatcttgcacaataaagtacaatgattgaaaccaggaaattgtcatgaataaaatcctgttaaccaacataaaaaccttattagaattttgccaattttcccgaaatgtccttcttctggtcccaaatcagatccagatcccatattgcctttagttgtcatgtccctgccaacttgggaccgttcctcagtcgtgattggtcacttatgttttactttatgtttttaaagaacacagctcagttattttgtagagtttggattcggtttggatctgtctgatgtttactcatgatcagaacgaggttatatatttttggcaagaatgtcacagaagtgacatggggtgcttcccaaggccttgcacggggtctacacaatggtgtgtcttactactgcccacctctcctgtcacctatgtctttgcctaaaccaaccctcttcttttaaacttgctgcctgatttaatgtaaccat

SEQ ID NO: 474898 - DNA, 802 bp, Homo sapiens
atcgttgccacagcctctcaattcaccctcctgtgctcccaccaccctcctatgatcccttttcctgatgcagccagaatgcatgcagctaaactggaagtcacggcaccttcctcctctgctccacaccctccatggctcccaccttcctcggaggcagagacaaaaccctccctcaggctgcaggcccacatcatctggcctgaccctctctatctacttcccctggctcactctgcctcaggcccacggcgtcctatttcctgagcacgtgccctctcatcctcacctcagggcctttgcacgggctgctccctcctccggtggtgcctcttctccagatgcttgctccctcacctccttcaggtcctggttcgatgctcctttctcaggggcattcactcgggcctccagcacttcctatttccctgttctacttcatttttcttcgtagttctcacccctaactcaccatatattttactcataactttcttccccacaaggctgtcagctccatgaggtcagaggtttttctctggctggttcactgcggtatgtcctgtcctgtttcttcttgtcatatgtatatgtatatgtgtgtacatatatgtgtatttttatatatgtaaatgctatataaaaatatatataaataaaattttatatatgtaaatacatatatatgtatttttggtatttatcctttttaaaaaaattgagagatattatacaactcaggggcttttagcatattcacaagatcgtgttagcattaccacaaccagaacattgtcatccc

SEQ ID NO: 474899 - DNA, 2994 bp, Homo sapiens
tttgctgagaagatggtttccagcttcatctatgtccctgcaaaggacacgaactcatcctttttatggctgcatagtattccatggtatatatgtgatacattttctttatccagtctatcaatgatgggcatttgggttggttcaaagtctttgctattgtcaacagtgccgcagtaaacatacatgtgcatgtgtctttatagtagaaggatttataatcctttgggtatatacccagtaatgggattgctgggtcaaatggtatttctggttctagatccttgaggaatcaccacactgtcttccacaattgttgaactaatttacgctcccaccaacagtgtaaaagcattcctatttcttcacatcctctccagcatctgttgttccctgactttttaagatcaccattctaactggcatgagatggtatctcattatggttttgatttgcgtttctctaatgaccagtgatgatgagctttttttcatatgtttgttggctgcataaatatcttcttttgagaaatgtctgttcatatcctttgcccacttttttatggggttctttgtttttttctgtaaatttgttcaagttctttgtagattctggatattagtcctttgtcagatggatagatgcaaaaattttctcccgttctgtaggttgcctcatcattctgatgacagtttcttttgctgtgcagaagctctttagtttaattagatcccatttgtcaattttggctcctgtgccattgcttttggtgttttagtcatgaagtttttgcccatgcctatgtcctgagtggtattgcctaggttttcttctagggtttttatggttttaggtcttatgtttaagtctttaatccatcttgagttaatttttgtataaggtgtaagaaaaaggtccagtttcagtttttttgcatatggctagccagttttcccaacgccatttattaaatagggaatcctttccccattgcttgtttttgtcaggtttgtcaaagatcagctggttgtagatttgtggtgttatttctgaggcctctgttctgtcccattggtctatatatctgttttggtaccagtaccatgctgtttttgttcctgtagccttgtagtatagtttgaagtcaggtagggtgatgcttccagctttgttctttttgcctaggattgtctcagcttacaggctcttttttggttctatatgaaatttaaagtagttttttctaattctgtgaagaaagttgacggtagcttgatggggttagcattgaatctataaattactttgggcagtatggctattttcatgatactgattcttcctatccatgagcatggaatgtttttccatttgtttgtgtcccctcttatttccttgagcagtggtttgtagttctccttgaagaggtccttcatatcccttgtaagttgtattcctaggtattttattctttttgtagaaattttgaatgggagttcactcatgatttggctctctgtttgtctattattcgtgtataggaatgcttatgatttttgcacattaattttgtatcctgagactttgctgaagttgcttatcagcataaggagattttgggcttgagacgatggggttttctaaatatacaatcatgtcatctgcaaacagagacagtttgatttcctctcttcctatttgaatacctttatttctttcttttgcctgattgccccggccggaacttgcaatactaggttgaataggcatggtgagagagggcatccttgtcttgtgctggttttcagagggaatgcttccagtttttgcccattcagtatgatattggctcagagcttgaatgctgtgctgggagatctgctgctttcttcagagctgtccggcagggatgtttaagtctgctgaagctgcacccacaggtgtcgtttcccccaggtgctctgtctcagggacatgggggttttatctgactggggctgctgactttttttcagagatgccctgcacagagaggaggaatctagagaggcagtctggctacagcagctttgctgagctgtggagggctctgcccatttggaacctcccagcggctttgtttacactttccaatgagatgaaccaggtaactcagttggaaatggagaaatcacccaccttctgcgttgatctcactgggagatgcagaccggagctggtcctattcagctgtcttgccagcagaaatctcctgtctacttcaaattattaatactggtaaaatataaactctttgttccagcatagctctattttcatatctctcctttgtgctaatatttcaaaacctattatattcatatatgttataaagcaaacaatacagtgttgcaattattgctttatgcaatactatgtattttaaagacgttaaagaaatgagaaatatatatttatagtcttttatattaattaatgtgcaggtataccttgttttattgcactttggagatactgtgttttttgacaaattggaggttagtggcaaccctgtgttgagcaagtctattggcaccatttttccagcagcctgtgtttacttcatgtctctgtgtcaaattttggtaattctcacactatttcaaagtttttcattattttatctgttatggtgactgcaatcagtgatctttgatgttactattgtaattgttttggagtgccacaaactgtgcttatataatacagtgaatttaatcgataaatacgtgtgttctgactgcgcccccaaccacccattctgtgtttctctctctcttctggcctccctattccctgagacacaacaatattaaagttacactaattaataaccctacaatggcctgagagtgttcaagtgaaaggaagagttgtacatctttctctttaaatcaaaaactagaaatgattaagcttagtgaggaaagtatgttgaaagccaagataagcca

SEQ ID NO: 474900 - DNA, 604 bp, Homo sapiens
cggggcttgctaatgaagtgccaggggtgtggcaggctaaggtgagaggcaggaaccgtctgtcctgggacagccatgggtgaggagtggcttccggtttggggagctatggccagccctgctggggatcttctcgtttgtgcctcctgcctggaggacacacgctgtcctgagtggaaactgaggagggagatttctgggtcacagcacgcacatatgttctgttttggtcccttctgccaaacggtttcccacaatggtcgcgccatccgaaactcccgctggcggataaacattccagtggtttcccttctttgtccacagttgttattttctgagtttcttgcctcttccacaattccagtggggtggagccacagcttttccatcctcccgccagccacccttgttcatatttcacagcacaatcccaaaaccatagaccacaaagaaaaatactggtaggtctgtctacatcaaatttttaaaattctatgtgtaaaaaagtatataaccaaagctaaactagaggagtttgcagcatgtgcttggcagacaataggttggcactcctgctatacaaaaaatgcttatcggttactac

SEQ ID NO: 474901 - DNA, 520 bp, Homo sapiens
gtcagctcatgtaaagcactcagaaccatgcccagaagcaagtggtcttgatggcagcccttgctataggcactctaggctggatgcgagggttctgccgcacacagctgcctggtgcgggccagccacgtccactgtctctgcgtaccatgtgcacccacagcaagcctccggaggtgcccccagaggcaggggatgggtcccctgacctcggggaggacccccagccccatcagccgcggaaatggtggacccgcgggccctgggctactgccatgctgcagccctcggaggaactgagcagggacagggccagcctgggtcacccgatgcagctgcacagatgtcaggcccggcatagccgagaagatgaggagaaaagcacagtcggggccgtggtgcacctgttggtggcccctatagtcttcaccagcacacctgggtcacatccttgctaagcgcacagactagcagtggtgttgagcctgacccttgagtgcacatcttctgaatattcttc

SEQ ID NO: 474902 - DNA, 1117 bp, Homo sapiens
ggaagccactcctcacccactgacagtggagatgggcagggcggccgggctgtctgccagcagaagcagccaagggtcttgttaacagagatgcgacgtcagaagcagccaagggtcctgttaacagagatgcgacgtgcagaagcccagatggctgtaagtccacccatcgcagatgtgccgcagcagccaagccccacaccagcagggacgccgtgcccggcaggcagcctgggtcagcccgtgcctgcccaccagactggtgaccctaatcctgtgtgcagacagggccagcccgaaaccctcccttgcacaaaaggcctttgttctgctgcccttcctccctgtcccccatggctgccttttcttcagccagggaggaaggaagctccctgccgagcacaccacctccaggcccggtgccagccatttgagcgcaacaggagaccacatctccctccctccttgctgtgtctccggctcctcaagccccatccagactccaggccctgaccctcaccaagccccgaaccagagccctcctccccgtgtggctggccccgatgacacaggccctgatcacgcggaacactctgaattcttacccaatttatttttcttcccaaccagcagttctcaaatatgttgctctcaggatccctttagtaggatcaccgggtttactacataaataacagtacagaatgcccagttcaatttgaattgcaaataaataacaaataatttttttagaacaactacttcccaaatattgcacaggacacacttccattgtatctggcaagcctattttccatactcttaaaaattatcaaggacttcaaagagctgtagttcatgtgagttatgaaaactgatatttactgtattcaaaactaagacagatgaattattagaatatttatcaaagtataagagaatctttttaaaagaaataatacatgttcacataaagcatttttatgaaaaagctacatttttcaaaacaaagaaatcagtgggaaaagtggtgttgttttgcacttttgcaaatccttttaatgtctgacttaattgaagacagctggattttcatagctgtttcttcattcagttc

SEQ ID NO: 474903 - DNA, 514 bp, Homo sapiens
tggaatattattcagccataaaaaggaatgaaggactgatgagccctaccacgtggatgaaccctggaaacatcatgctgagtgaaagcagccagacacaaaagcccacagagtgtatgcttccatttaagcccacagagtgtatgcttccatttgtctccaatgtccagaatgggaaatccatagagacagaagctagatcagcaggcgcttgtgaggattcggagggggaagcagtccgggctgccacagctcttactgttattgtcgatgttatccttgttgggctgtgcagggaggccctgccaagttctggcagatttcaccctgagttggggccctgctgccatgagacagcagaagatgaggagaaaagcacagtcggggccgtggtgcacctgttggtggcccctatagtcttcaccagcacacctgggtcacatccttgctaagcgcacagactagcagtggtgttgagcctgacccttgagtgcacatcttctgaatattcttc

SEQ ID NO: 474904 - DNA, 577 bp, Homo sapiens
gcactggggctgcaggtggagctgcctgccagtcctgcgccgtgcgctcgcattcctcagcccttgggtggtcgatgggactgggcgctgtggagcagggggtggtgctcgtcggggaggctcgggccacacaggagcccatggagtgggtgggaggctcaggcatggcgggctgcaggtcccgaaccctgccctgcgggaaggcagctaaggctcatacaccctccacagccactggcccgggtgctaagtccctcattgcccggggccagcagggctggctggctgctccaagtgcggggcccaccaagcccacacccacccggaactccagctggcccgcaagcgccgcacgcagccccggttcccgctcgtgcctctccctccacacctccctgcaagctgagggagtgggctccagccttggccagcccagaaaggggctcccacagggcagtggggggctgaagggctcctcaaatgccaccaaagtgggagcccaggcaggggaggcgccgagagcgagcgagggctgtgaggactgccagcacgctgtcacctctcaagaggactaaat

SEQ ID NO: 474905 - DNA, 548 bp, Homo sapiens
gcagccagagaaggcatgcagaagaaaaataaaaatatgatttctttcaaaatactactgctcattgacaatgcacctggccacacaagagctatgatggagatgtacaaggagattaatgttgttttcacacctgttaacacaatatccattctgcagtccatggatcaaggagtaatttttactttcaagtcttattatttaagaaatacattttgtaagactatacctgctatagatagtgactactctgatggacctgggcaaagtaaattgaacaccttctggaaagtattcatcattctggatgccattaaaaacatttatgatcaatgggaggtcaaaatgtcaacattaacaggagtttggaagaagttgattccagtcttcatggatgactttgagggattcaaggcttcagtggaggaagtaactgcagatgtggtggaaataccaagagagctagaattagaagtagagcctgaagatgtgagtgaattgctgcaatctcgtgatcaaacttgaatggatggggagttgctttttac

SEQ ID NO: 474906 - DNA, 723 bp, Homo sapiens
ttgttttttttttttgtttgttttgtttgtttgtttgtttgttttttgcatcgtggttatgtgtttttcattatgacgaagaatgaagaaattgatttggcaggtaacaagtactcaccccggtgggaggctcctcctcgtacagtccttcatcttcatggcagaaaggctgttctgcccctgcgccctccctggcctctctggggatccctgcagctgatgtattgtgatggagcagtggacttggatgctgctggtattgatataatcattgttaacagtagcaacagtgcagggggccctggaaatcctaaaccaaatctaatctttggacccaccaaccaaactgcagcttggaaaaggaagctcctgtttggttggggacaattttccagaggaaggggcagctgtgagtgcttagcagccaccacacagcacctgggagatgggagcgatggtcctttaaagaccatcaacaagagtggtccctacgatgttcttctgctaatctagaagcaaatgatcactgtgttgatttttccatttttgtcatttctttgatactgtggagacacatgcttagcatgtttttctaatttcatgccatgggcctgttgagcagagctcatcacttctcagattaaattatatgtttaagaaatgccttctgcgtcaaccagttattcatcagcctggttgtaagtggctaagcctggctttcag

SEQ ID NO: 474907 - DNA, 622 bp, Homo sapiens
ggctgctttggggacacagggcacaccaccgctgctctagcagctgctcctgcagccagcgtgatagcagtggctgctccgtacggcccgccacggtcatcactattagatgagcgccctctttaaacagaggccaggaaaagggcaaggcttatgtggtgcagaggtcatggagctgggccttggtggtcacacggccttggagtggagccccagcctggtgctgagcctgcggaaggctgagcgacaagaacaagagaaaggccctaagaaatttaagggctcatggtctccttcaaacttcattgtggcctgggacggaaggaaacttaccagggagactttcagcggcttcgccaatgtggcagaggtggaaagcgataacaactgtgtccactctgtttcccatccatcattcattcatccaaggaatattcttaagcactgtcaactgaagaatgatgaggttcacacatgtggaaaggagatctttatttatcataaacagaggcagcctgcaggccagccatcccataggctgggcagcatggcctctggctctgcagagagcaagcagtttgagggaagggtaaagggaacaggaacttatgctgagtgagac

SEQ ID NO: 474908 - DNA, 1698 bp, Homo sapiens
gggtgtataatgatatcatgcaatacagtgcaaataatactgtgagatatgtggggtactggcacgtggaactagtggatgttgagggttactatgttatgtatattcagtcatatttatccatcacagcccctaagtctcagtctgtggttacaacggctattttctcaccctgggatccaggagtagaagcaggagttcatcagggagaccagagagttgaaaagggcacatctggcagagggcaaagtcctctacatcctatattcatggattggaagaggagaagaggggcaatgacagggatgggagtgtgtgagtggggacgggtcctggtgaaagctagagcctgctccaccatccccctccccaccgtaggaacctgttccaaaccctgtacctttctcatcaaataaagaagggcttgaggtgcttattagaatgtaatttctgggcaccagcctagacttcctgcatcagagtgtctgggatggggtctagggatcagctttctgcccagcacactctctgattcttatgtgcactgctgggttaaagctttctttttctgaagatgccgctaaggatttgtgcatggggcttctgggccggtgtttcctggcatggtccttgtaaattcagtctgtgcattttaccctgaagcccctgcaggcctacgaggtcagtgcaggcccttgcctccagaggggttggcagaagatgtggggctaatttctgaagctaaaaacacctttgcaaaaattgtagtagtaagggaaatcgaacatacctgacttcatcttgcttctaccaggctagtttgcttttgctcattcttgtgcggaggccatagcagccccttcctggagctgttcccttctttgtttggaaattgcaatcgtatctgtaaagactaacaaaaggtaacaaggttagaatgatgctagaggcctacaacttcgctaaagaataggttgaactataaccatccattgcttgtttagtttgcttttctatatgttgcttactgccccagagtcacataactggaggtcgtgatatttgtaacttccccaactgctcctatggataacttcactattgtgaaacctaaaagactggtctttgagatgtttttcagatttagcatttcaggagatcaagagatgccacatgatcctgaaatcccctcccaggaactgactcagctgttcaaagacagtttagagacccctgtgattttgtccccagccaatcaattgtttcagtttcccagccctctgcctgctgttttcaagtacacttaaaaaccctagcttctgaattcttggggaggcagatttgaaaaacatctcccatccttttgtttagttaccttgtgataattaaaccctttctctacagcaacactgctgtctcaatgttctggcttcatcttgcagtgggcaagaagaacccctttgggctgtaacaagactccagcaggaaaggggcagaagcccctcatattgatgccatgggcttttcctgatccccctcttgccttaactctgcctggtcttagatctttgccttataccctgtgccatgtttgtgaccatggaggccactgtgctatagtggaaggatctgggctcagggtccagtcctgtgactttcagctctgtggctttgtgagaaagttgttttccctctctg

SEQ ID NO: 474909 - DNA, 1154 bp, Homo sapiens
gagctctgagagctgtctctggtgcagtgagacttcagatagggacactatattgtgaaggcgaggcctgggctcctccaaagccagggctctgggcctgtaagctcatgaatcctgccagggagtttttctgccgccccagagagcctctcattaggctatagccatgccctcctctcagagctttgcacggatgggatggctcccttcatcgttcgggtctctgcgcgcttgtcactgccagccttccctgaacacctttctgacagctgctgcccagactcctgtcctgctacagcccctccaggccgttggtctggtcggcttcctggaggagctgctccctggggctgtgctggcagggcggaaacacaggggtggaggggcagctgcagacacagccaagaccagcatctcccgccaggcccagctgctgtctgctgggcttgaattccaccctttgcagtggccctgcactgtagatgtgtcggccactcctggcttctgccgcaagtgccttggcgataagttccagctcttgagggtcctcagctcagtgccttccatgtgctaggtgctcagtatgtgatgcttcccttctacttcctgccctctcttatggaggcttggctttgtaaagcttaactctcctgtattagactgagacttaagagcatgatctctggatttaggcttcctgtattcaaatcccggctctgggacttactatcgggttgatgttgaataagtcatttagccatttttctgcctctgtttcttcctctataaaatggggataataatggtacccacctaacagtctcatgaggaggactaagcaaatgtatgtatagtcgtggtaaactcccagcacacagtgagtctagagaagggttgctttactctgatcagttcatgcctctccccagccctctgaacacacccatcagaagggtacaaatatcaggcagtcaatgcctgccatgatttgacagatgactttgagagattgtttttcaattcccagggccccctaggtatccttaccagtcatgtatgacttcgaatgagctctcgtcttaccttgacaacccagagaacagatccttttttggggtgggaaggtggataagcagcttagaggatgggagtac

SEQ ID NO: 474910 - DNA, 565 bp, Homo sapiens
gtcctttgggtcttggttcttttgtcggccccatgagtgggttggatctttgtgaccgtgacctgtggcatggatgacacagagcagtgtgtgatgatgcagaggccaggggccagggtctatccacacacagtttcacacatgcatgctcatgccccgtgcacgtgcaagaacatgtgtctgaatgtgtgggcccacgtgtgcatgtgcatgcgttttgctcaacctccagactatggccccacatggcctatgggcgctcagacaatccagccacaactacgattaggcagaggggatccaagagactatggacccagactcccaccttcccccattactgtccctttggtggtgctggtcagccccttgtccttgatgcaaggtggaagagacaaaaataaagtgtataactgtcagaagcattatggaactgtcaaaggtaaatgaagtcattcccgtgaattattaataagtcacgagcctacctattcaatgacagtataaaaaagaaaaaatatttatcaaaaaaattttttaaaaattagggtggacaaagtggctc

SEQ ID NO: 474911 - DNA, 2603 bp, Homo sapiens
gcagtagtaaaaagagctatttcccccaagccattttagcggggaaaaaataggaacatcacagaaatgatgctgtgttctcattgcgtcctagtgggtagcacacaatttctctttgccgcattactggtgcaggaaccttattatatgctcaatttcttagtgattgctttagagcatacaacttataactttgaatttatcacagtctatattcaaggtgaggaactgtgcagggcacccaggtgtgacccaaccatgtccattgttcctctctgtccctttgatggacagcctgtacccacgacactctttccagatgctgcctgcatcctagttccctgtcctatcacctctgcatggaaagatgtggagttggccacattgatcccaacaccaatgggatcacctgaggatggatctggccccatcccagactgcctgagtcactctgggcctgaacccaggaagagttaaccatctggagactgtagattgtaacaatttccttgggtgacttccaggcaggctaaagtgtaagaaagggtgccatgaatcagcaaaacagccagcacttcaacttgcaacctgagcatcccacaggggtcccagccatcgtagtgccagctacatttgctgaagtgtgaggcctggactgcaggcaggctccaggccaacccttccttgcatgacttgctcagggatctgtatgacatgctggtgccattctctccattttacagatgagggaccagaggcccagagcactgaagtacctagctaaaaagctggaacaccatattaccctgcctccctgacagctttcctccatccaagtggcccaactgtggttcagaaaatacagcctcattaaagacaggtgcttgaaaccatggcctggaagtggtaatctggttgagctcactttgctggatggtgaaagagcccagcctgccctgccctgcccttccttctttttccctctcctctcttctcctctcctctcctctcctctcctctcctctcctctcccctcccctctcccctcccctcctttcttttcttctttttcccttcctctcgtctccccctcccctcccctcccctcctgtcccattcccttcccttcctttccctcccctcccctcttctcccctcctttctttccttccttccttcctccctccctctctctctctttcctattttctttctctcgttctttcccgagtcattgattcaacagaacagcccactgtggttattggaatgcactgggagagacacaatgtgcttccagctccaaaggaaagatgagaagaatcagagaacacagaggccagaaaggcctggcgaggagctcaaacagggacctatcagggctggtgtccggtgtgagggggtttgagcctctgagaggtccagacaaagccatcttgcgcctaggcgcttgtctgtaaacgcgggatctttgcttagtggctaagaatgtgcctgctgggctgagtctaagacctggagatgcacccagaaatcagtgtctggttgccctgaaacatgtgttgagaaggagagcctcagggtggcactgatgtttggcggataggttcagagatctgcatgggactcccagttaagcccctttgctgtgtgagcattcatcaacccccagccctctctgagcctcagtgttacctgtgtgatgttggattggaactggttgcttactaagggtcttctagttctagactttaaagtcttaacctcctggcctgacatagggtaggtgcttaataaatacgccatgaagaaatacatttgcttttacacaaggtttctcctcttcctttgctggaactgaggttggtgcagtgttcagctccttctttccataccattccaaccaactatcataccaccaactccgatcaggctctttctctagctcctgtcagcagtctccaccttccaggtacaccacctggctgactgtcccagcctccccctcccccaccctccttcccaacactcagagtcttgtccccttcaatccagcccctgcagtacagccagagggggcttcccaagacataactaaaactacgttcctccctgcaaacctttcccccgcactcctgcgtttggcctaaaccaccctcccagtgctttcccatcattctctccaaagcctggccctgagggttaagttaagaggagcagggcagggtgaggccagaccacctgtgggcccctttctcagccagctcacctctcagcagtgtggagaaaggaggatgcactgggcccacacacatgttgtggacatcagtagccccaccctgcgtgcaggaaatgtcacagtgccataactgactcgaggggagggcagtgggggacaggtgcagggaaggtctttgctcccccttttgtggccaacccgaagacacagtagcctagatcagcaggaagagcaaccagtaggaagctaaaaccctgtttgttgtggccgtgccactgaccagttgtgagctggaatgagccctcagcctctctgaacctcagcttcctcatttgcaaaaggggctggcatcattcacccctct

SEQ ID NO: 474912 - DNA, 1512 bp, Homo sapiens
ggaaatgacgacaaaacccagccatggcgccaggaagaggccccctctgcatacagtctggtgggaacagcatcatcttcagtcctcctccatctgtaccactcttctccacacctctgtgcgaggtcattccttcccccaggggtactattggcaacagaggagatggcagagggtcctcacagcaagcctgtgatgtggctaaataccacttcctttcccctacaaggtggctactcattaatgaagccagatctcaaatccgttccttgggttttcagttccaagctgctctcactgctgtggtagccactctgggtagcgggaagcccactggtatgaagatgttgctatcagctacttcctggcttcatgaggttgggagactggaaaacagtgaaatgttaggccctgataagggggaggttgtgagaagaacaaggagtacccaaaaaagtaaaactgggcctcagtatctgttgtccagttgtcactatgtttcgcagaagtgattgctgttcagtgtttctcagaaactcatggtaggctgtcaactcgtgattaacttgaaaaatctgcttttggcgctatttggagaaatgaactgttgaagtgaacatctagcagtcataatatagaactgggtgaaccatgaaggtgtactaatttggtttggttagtcattcgtgctatagaaatatctccagttccttactctctagccacatgataaattgaattggtttacctcttttgacattagtcatagccacatgccttactttggccaatgagctttgaaaagtgacatgtgtcatttctggatggaagctttaataaccaccatgctgtttgctatttttccccatttcttctcttggcaatcaaggcagcatggagatggaacctccctcagtctggttctctgagtgagaatgacacagggcagagctcacagccaacccatgatggacatgtagcatcagtgagaagtaagcctttgttttaagctatggcacactggtcatgtttgttactgagcataactcagtccattctaacagatgccagtagggcatggactgaaataatcacaacttgtttggagatgtttttgagtcttttcattccttcaagaatgatgccaaaaatgttagtgtttgaggtattacgaacacaaaatgggggagagacacagctctgcaaggtaatggctagtctccctactgtgcatggcatttgttgacttctccagtttcaccctgtcctcatctctccatgctatgcctgacaagtccacaacatctttgaaatgggacacttgtttgcacatctccaggcctttactcatgctctgcctagaatgggacatatcgcaggaaatcatgttatttgttgagtggcttgggtggagacaagcgtgtgggggagaggggagcattgggctttttctgtgaggcacagaaggcagaacacttaggacagagagtgagattcctgtgcaatgtgaac

SEQ ID NO: 474913 - DNA, 1307 bp, Homo sapiens
cgacgaataaagtggttacttaataggtggttatggatttgaagcttctgtggctgcccactgctcccttttgggtgttccccattcctctgttcaccctaccctcactgaggacctactttgtggacctgcctgcccaagcccacctcggggtggagggtgcgcagcaatgcttggattgcacagcagcaaaggcaagcttcatacctggttctgactcctaccaaaaccctcatgtgccccgccacccacaagctccagactactctaaaagaggctcagaatggctaacggtggtagagctcatagaatatatggagatctgcaccaggacccgtctggtcccagcgagcacacttattggcttgacttcagaatacagttttattcctgccgttagatacctgcttttgctggaaaacaagcctcaggcctttgccgtttacagagtgcctcatttgatcctcacagcaaccccagggattaaacagtggggacttagcacacccgttttacagatgaggaaatgttctctgagaagaacctcagagaaggagaacatcatcggtggcctggatttagagagtatctctgatcgccctacattgccaatcatccattcatataacaagtacattctgagcatctactgtgtgcctgaacatcatgaattctctataccaaattgcaaattctcaaagacagggactgggtcagcagagtagttcagtttgcaggctttggagcctgtaggtttgaatactggtttctccatttactagctgcacgacttagagcaagttccttaacattgataagtctcagtttccccctctgttaaatgggcctaataataataggacctgcatcttatagtgtggtgtgaaaattatagtctgaatgtagtagataaccaatcattgttaccaagtagtaagtgcttagtcaatgttacctgttgtgaagtctgtttttcatacttgtatcttgaggaccaaccacagtgcctgcacccagtgggcgttcagtgaatgtttgcatgaacaggaaagccatacatcccagggagctatgctcaggacgaatgtgtaaaaggtttctattaatcaatgagaggatcagtaaccaccaccctggcccttacatttgggggacaccaaaggagacctaatgtcccccgggtcctagcctctgacttgtgtgctgagtatggattcactgttcatcctctggatgaagatgccaaggcatcaggacacgatggcctgcccaaggtcactccactggtgaggaccagagctgacatg

SEQ ID NO: 474914 - DNA, 2263 bp, Homo sapiens
agctcatgcccaactcttcagccacaccaagctactcactgttcctcctcgtaccagtcagactgccatgggactcctcttgatgtcctgccagcctgaggagccctcctcactgcctctagcccctggagggccgtcaatggatgtaagctacaatgtgctcgaatccagcccccagaagccccttctgttggggagtgtatcacagggggcagtcctggagacccaggtggagggtattgcattccttcaggcggatggcgagctggcaaaggaggtggtagcagagggaaggatgtgcaaggtgctagatatagaatctacaggatttgaggccagctccagtgcctgctcctctaggaaccccagctcctgggtctcactccagccagacctctccaggagctctgtccacctttcctgcatcggctttcctaccagaaggctctcctgcctccttccatcatgctgcagcaggggcacaaactccctgggaatctagcttcgtccaggcagcccagatgccgcaaaggcgaggctgcctatttccttgattcacagacactgaatcttctgcctcccttttccacttttaaaggtccttgtattccattggcccacccagatcatccagggtgatctcccctgtcttaaagtcagcggtgagacaccttcactccatctgcaccctcatttccctttgccataagctgacatattcacaggctctgggggtttggatgtgggtgtctttgtgcagccattattctgccttccacacctggaaactgagacatttctgagaggccttgggcaagctgtctcccctttttggacccagttttttctcttctgtgaaatggtgtggctgctttgaaaacaaagtgagaggatgagtgttcaggtgggttacaaagggtcaagcgccatacatggggttaattctttattcctggggtatttctattgccagcaatggcagctggcagcctctcaccgggccctcatgccttcctatgccttgttctgaaaagctgcagcccccacccccgccccactagacccccagaaaacaaacgtgggtctgtgtaccgctcctgctcattataatctcttgcttcttttcacaaaaccccaggggcccctgggatttgggagctgggggatgtcactcaaggatgcctattgagtgctaaacaatggccccctcatgaggtcatagggccgcttagcaaccacccaggcccttagtaacgggcccagaagtgttgatatttacccaacagaaactttggattatctcgataacacccagttccttccagagagctgcaggcactaaaagcaagctccacccactccgagctgctgctctggctcttccaagagcaggcctatggaggggcagggagtcctgggtttcccccccagctctgcaatcctctgagggcctcagtttcccccacaacatggggatcagactaaataagtactaaatatttaagtagtatgactgtatgtccctgctggcccagaacagttccattttatcaagactattaaaagaggcgttttcattctcaagagttggaacatcaaccttctggtcacccacctctaaaaggccacttccagccctcaatcccattgttcttcccctccaccctctttcccagtctgaattaatcctgaatagtttcacctagctttttcaaggtccctctctgtgtcaggcatggaacagggcgctgaggaaactgaggcaaaccagacgtggtccctgctttcaggagcttccagtccgggaaagaacaccgcttaaacactctgcagaaatctaggtctgaatctagaaccttgcaattctcagacttatttgtgttgtcttcactaagctattttagtaaataataatactccatagaattccggtggcattttgcagtttctaaagcatttctgttatgttccctcatttaaccctgacatcatctgaaggtgtgattttaatatattcccattgcacagatggggaactggaggctggaggccatagaggacagagcagttggatgcccttgaggagcaattcaatctctgcctccttgccttcgaaatggagatgttagctcccacttcatagaactgttatggaaagtaaatgagacagcacatagaaagtcctttggaaagtgacagctgcctaaaatgagtgtttctgccctgagctgtctgtggcctcagcagttgcacttcctggatg

SEQ ID NO: 474915 - DNA, 1534 bp, Homo sapiens
gagcatcctttagagagaagatgatgcatctttgttattatataacaaaacaggttgaattccatggtgaaaattccactacctggtttccactgatgggcatgggaagcctttgtcaacccatttcaggaggaggagaggagcgacgtcaccgcctctccctgaggatggcttgtggatggctctcctcaacctccttccccacctatgcctgtcaaaagctgctgggtttagatgctcaagtttctgttctgtattatgggtcatttaatattcaagagatggcattaaataaatatgtgagcaattatgtaatgtgtttggaaacaatctggttcgtcccaaagtgcttgggcaagaaaccaaactttagcgaagcaagaggtctgggtggtgtctgaaggctgaacagggaggcatgtggcccatctgcttgtttgctccctccctgagttgagtctgtggttactcatcttcaggcaggcacaaaggcagtaggaagccagtgatgcttgcttgcacagttagaagctcagggttgcatgctggctgcaaagtttcttctctctgggcatcagttttctcatttgtgaaaagggctaatggcggctactgggaaggtcagatgagatggcaactctaagctctggctccgaggacaagcttgtgcaacaattccctggagattcctctaggtggttgtgtgtaacaagagttcgctcctttttattgttgggtagtattccctacgtggatgcattacaggttgtttaactatcaatcagtgaaaggacatctgtgttactcctagttgtggggtattataaacatttatgtaaggttttttgtgtgaacaaattgttttcatttgtttggaataaatgcccaagagtgcaattgttgggttgtatggcagttgatttttcttttttcttttttttttaagaaactgtcaaactgttttccagtatggtaaatgactgtagcattttacattcccaccagcaatgtacaagtggatccaatttctctgcatcttcatcgacatttggtgttgtcactattttctattttagccattctgataggtgtgtaataatatctaattgagggtttattttgcatttccctaatgactaatgatgttgcacatcttttcacgtgcttatttgtcatctatatatactctttgttgagatgtcttttgcccatttttaaattggatttttaaattgctgagttttgagacttttttgtatatgttagataccagtacctcatcggttttgtggtttgcaaatattttcttctagtccatagcttagctttttatccttgtcacaggattttttttttttttgtctttttatccttgtcacaggatttttttgcctgttttatggatttgctttcctcttcttcttcttctgcttctcttcttcttcttcttcctcttcctgtctttcttcctctccttcctccttcctcctcctcctcctctttctccttctccttcttttcctcctcctcctcc

SEQ ID NO: 474916 - DNA, 746 bp, Homo sapiens
ctcactccactctctgtgccagcactgatgctgcctgccttgcatgtggagacttctggaccaggatacctgcctagcaagtggcaggactgggatcgaatgcaggggtttttctcacatcatacaactgctattggtgggtgcagggacatctgacttcacctcctcataccctttaccatatacatttggctgcagcccagtttttcaggtccccaccctgatccctcatggtcactgggacatgctgctcttcctaaaatcagccctaacagataaaactctattcccaacctcaaaggaagctccaagccatggtttctggattctggaattgaagagagctgatagatgcactggactcttcaaagtgaaggtcacagatgtggatagtgagggtaaagagaggccaagagtgaaaggctcttgagccactgcttgtgcaaacaggtgggctggcagctgctgacagtgacaatggctggtttttattgtttaatcctccacaagtgtcatattccatcctcatcacaagctgtacaaaaaaaaaaaaaaaataaaagaaagtgaactggcaggactagactggagggaatctacaaaccagctacttgtgagagcagcccactgaaaatacatttgtttgttttgctcagagcttaaaataaaattgcattaaatgccaatgtttaaaaatggggggattgtgcataagaatccagatttctgtcttctcttaaaatatc

SEQ ID NO: 474917 - DNA, 1230 bp, Homo sapiens
gccacagctgccagagagccctggacactgtagagggctgtgcacgaaggtgtgattggcatcaggatcaggagccggagcagggtcagagagttccagatatgtggccagagaccacggctggcaggaccaggagggcaagtgaccaggcccgagcaggggccacagctcaggttcctaaagaaacagaggtccctggggcaagcctgcaaagaaggggcagccgggagctctagctcccagcagctggggtgtggaagctgcagaccgaaggtggcctttcagcagagacctgagggagcctcatggctgtttggggcgagggtttcagactaaggaatggccagtgcaaaggccctgacatggggacatgctcagcacacaagacccagactgagccctcaaccagcccctttcacagagggggtctgcgtcagtgcaaaggaaacagcttcagcccatttcacagctgaggaaactgaggctcagcactgtgaaggaatctgcgcagacgtgagctggtacccagatgcagaactaagtgttcaggtcactctctcctgccctggaagtctctggtccctggagatgcctccagagtttccaggaactcagtttttctgcacccctcctggactcatccccagggaccttgggaaacccaaagccagggccagcaccatcacgatgcttcagaccttagacagcaccccgccaatgctgcctgtcacagcagagatggactcagagaggcctagtcgttgctcaagaattaagcccgcagagaattccccagtaagaggcttccaggtagatcgctcatcagactcaggatattctggtttggaaatccaggctgcccctcaggaagggattccagccactcagggccaggagccaggattgccttctgctctcagtgctcggggtgatctggcagcttatggagagaagactgaggcccagataccccaggagggtttggctgtatttgggagtgtggctgggatcaaggtcaaggtcatttatggagcgcctatttggtgctcgacactttcatatgcatcatcttttctaatccagcaacgctgtcggaatacagtagtgatgaaaacgtagacacaggccttagtgaaaggagacagacagtaagtatatatataatatgcataatagctataactgttattttttaaattattgcagagtctgggcctaggaggtggtgat

SEQ ID NO: 474918 - DNA, 1079 bp, Homo sapiens
ccgtgcaagtgattatgatgaaggacgtaactgaacaagcttccctttgccttctctcaacccagaaaacaccaaatcggtaaaatgcaggatggcaatgtggacgccagccagagcaaagccaaacaacaggacggggcagccgccatggagatgcagcccctcaagagtgccgagggcggcgacgctgacgacaggaagaaggccagcatgcacaagaaggagaagtccgtgctgcagggcaagctcaccaagctggctgtgcagatcgggaaggcgggcttggtgatgtcagccatcacggtgatcatcctggtgctctacttcactgtggacaccttcgtggtcaacaagaagccgtggctgcctgagtgcacgcccgtctacgtgcagtactttgtcaagttcttcatcattggcgtgacggtgctggtggtcgccgtgcccgaggggctccctctggccgtcaccatctcgttggcctattcggtgaaggtgagaggggaggagagcaggaccagccggctgatgcagctgcagctgagggcctgggggaatcactggggctggtgctggggttgggagatgaacgaagaagccccatagaccccctaggagcttggaagaagaatgtatgcaggaccccaaaactctgacgctttcatagagtccaggggcctgtagcaaaccagagagccataccctggctgaagaggcagctgttattcagcccagccacacgccgccttgcaggggtgcaggcccagcattgccacattgtcacctttttccaagagaagccagaaatctggacttaatgtagactctcgtgatttttagacattgataatcaactcaaaaattttaaaaaaataataaagacatcaccgtgcaagccagaattcatccttaccccaccaaatttacgtagaagtctggcggtctcagtcgtaggccccgcgggcaactgtagcgcttgtaaaactcatcacagaggtggctccctgaagtgtgaggggtaagccaaaaacaaaaaggaagtctgatttcatagaagcctcctccccttgggaaagagg

SEQ ID NO: 474919 - DNA, 994 bp, Homo sapiens
ggagcagtatgaagaagaggtgagaacgacccccggaccgaccaaagcccgtgcgccgctgtgtcccgcgtccagcacctacgtcccgccgccgtcgccatcgccgcggccaccatgcccaagagaaaggctgaaggagatgctaaaggagataaagccaaggtgaaggacgaaccgcagagaagatccgctaggttgtctgctaaacctgctcctccaaagccagagcccaagcctaaaaaggcctctgcaaagaagggagagaaggtacccaaagggaaaaagggaaaggctgatgctggcaaggaggggaataaccctgcagaaaatggagatgccaaaacagaccagtcacagaaagctgaaggtgctggagatgccaagtttgatctccactttggcacagacatcatcatgctgtatcgtctctcacccagctggctgcacctattccctgactcgctggtccctatggcatcaggcagagctggcaaaggaaacggtacttccttaatccatggatacactgcttcagacaagtttgccctttctcaactctgaaaggaacggaagagagaaggcaggggcccacctagtgtgcctgggaaacacagggatgggtttcctgttcctgcaaatgttcttggcgtgcctttagatcccccatgattcacccactctgccctgcatttccttacttctttggcttaatcatgccagtttctccttctagaatgccgagcctctaatatctttccccccatgtggctgaacatcctcttttctcaccccactctcctctggactccagggcaacttgtaattgaggcgaagccaattagtaattttactccctgcccctgagtcaataactgagggcttagttattgattcagagaggagtgtatgagccaactcagttcaataagagttagtcccaggaattattggtgaggagagactcttagctggggttgttaagctgctttaacat

SEQ ID NO: 474920 - DNA, 729 bp, Homo sapiens
tgcccattttacagaggagaaaagtgaggtgcagcgaggtgaaatgacttgcccagggccacagaaccagtacctggtgtggtcgagaacctgctcctctctcagcctgggtgagcatgctcagggcagtgggggtctgagccaaatttatctgatgtcctccagcaatgtgtgcagcatgggaagggaagggcagccttgctcagacaccatttccctccccactctacccccacaacccccaaacccccggcaggtatctggcttagatttgtcctccctggagccaggaaggcaactcaattacttttcaggggaagataagccccagaggctgatggtgtcacagccatggcactgcagggtgacaaaaggtggacctcgtggaaaatgggaaacacagggggcccctgccacaggagcagaatgcaaaggtggccagcacacagtgggaaagcaaaccctgaggttcacccccttctgcgtggggcaggaagcagaacccaggccacctccacaggctgctgccctgcttccgcactgccctccactacccccaactctgctcattccagcatgcacagggtgctcagtaagtgctcctttctgatcttctcatgctctgattgtgggggttgtgtgccccagttcctggctcttccagagaagtgtggagaggctcttgcccacaaaaggcaaagccaaggactgcaagcattcacagagtag

SEQ ID NO: 474921 - DNA, 822 bp, Homo sapiens
ctgggctcttgacgggcatcatctcttaatcctcagaacatcccagggagaccactttgtctcccatcaatggccctgtcctctccagctccacaggatccccatatcctgggccatgagtgagttgaaagactgccccttgcagttccacgacttcaagtctgtggatcacctgaaggtctgtccccgctacacggcagtgctggcacgctctgaggatgatggcatcggcatcgaggagctggacaccctgcagctggagctggagaccctgctgtcttctgccagccggcgcctgcgtgtgcttgaggccgaaacccagatcctcaccgactggcaggataagaaaggtgacagacgattcctgaagctgggtcgagaccatgaacttggagctccccccaaacatgggaagcccaagaagcagaaactggaagggaaggcaggacatgggccgggccctggcccaggacggcccaaatccaaaaaccttcagcccaagatccaggaatatgaattcactgatgaccctatcgacgtgccacggatccccaaaaatgatgcccccaacaggttctgggcttcagtggagccctactgtgctgacatcaccagcgaggaggtccgcacacttgaggagttactgaagcccccagaagatgaggctgagcattacaaggtagaaactctgggccttgatagacatgatgcggaacaagagagttcagaggtgcctgagaagtaaagctaccaaagccatgcatcatcttccttccccaaccctgcccagtctgctgtctgctccatcagtgcctccagaca

SEQ ID NO: 474922 - DNA, 2119 bp, Homo sapiens
gcatcccagtccttgctggcacagctccagtgcccctctccattttcctcggccatatccctcttcattgccgtgttgaccagtcccaccaagtatctcgccctcattccaggacaccacagcctcctcgctggtctctgggcctctggcaagctcttctctccctcttgtctccttgacagacttgactcacccttcaaggccctgatctcatgttacctccaccaaagcactctttcagattccccagcagaaagttagtcagtctctcctttgtgctgccacaacactttgatctctctctttcacttcacttatctgatttcttaaaaatttatctgaaaaagagttcatacagacagcagtaaattcaagcaatacaaaaggtaattccctgtcacccgtgacctgaaggctcctaattctctcgagaggcaattgctgtgacctgagacaatctgtgtacgtattctgcaccttctatcttgggaattatttcagattggcttctgtgtgtgtgtcttagttctttttggacctgtctcccttactagagtgtgaagtacaggttttatcttcgttgtactttcttacctacacctgacactgggcttggccttggactagggacttgagagagatataagataggtaagtgaatgaatgaatgaagcatggctggccagtgcttacccactcagggttgggtgccatcttttccacagatcccacccctggggaagcactactcccagcgctgggcccaggaggacctgctggaggagcagaaggatggggcccgggcagcggctgtggctgacaagaagaaaggcctcatggggccactgaccgaactggacactaaagatgtggatgccctgctgaagaagtctgaggcccagcatgaacagccggaagatggatgcccctttggtgccctgacgcagcgcctcctgcaggccctggtggaggaaaatattatttcccctatggaggattctcctattcctgacatgtctgggaaagaatcaggggctgacggggcaagcacctcccctcgcaatcagaacaagcccttcagtgtgccgcatactaagtccctggagagccgcatcaaggaggagctaattgcccagggccttttggagtctgaggaccgccccgcagaggactccgaggatgaggtccttgctgagcttcgcaaacggcaggctgagctgaaggcacttagtgcccacaaccgcaccaagaagcacgacctgctgaggctggcaaaggaggaggtgagccggcaggagctgaggcagcgggtgcgcatggctgacaacgaggtcatggacgcctttcgcaagatcatggctgcccggcagaagaagcggactcccaccaagaaagaaaaggaccaggcctggaagactctgaaggagcgtgagagcatcctgaagctgctggatgggtagccctcacccctgcctcaggctgattatctggcctaggggaggggaagggaggcccacttccttctttgggcacaggaaacattggcctgtggctgtccctcaaatggcggcagtctctagagggccgtggcccttcccctgaggtcttttggcctagctctgtacaaccaggacacaggaagccctgctgggctagcctgaggcctagtctctgcttggtccccgagatggggttggaggggacttcgtttctgggtcttcctcttcccctctttaccatcccccactccctaatcccctacccctgtctccccttcaaggacttctcccttgtggttttgtaaagtgcaaacttaagaataaagtgactgctgtggtttttcaaaaaaagcatccagtctttgaatgtctgttacagtggggaggaaggaaccagtgtgggtgggtccaggtttcttaggggtcaccacactgccctccacagtgtcgacctctgcctaagtactttgaaatgtgctcatcgggactgggggctgcagaaggatgtatatgtatacgcatccaaaaaatctggaagaattgtactaaaaatgtgaacactggttgtctctggttggtgggggcccggctgagagtgttgtgttattcttgcctccctc

SEQ ID NO: 474923 - DNA, 1621 bp, Homo sapiens
ttgatgtcttaaatacactatagcttgagaaccgctgctgcaggccatggggagccagagaaggtttacagcagaggaacaatccaggggtgcagatgatgcctgggcagatgtggaggacgtcacggaggaggactgtgctcttcgaagtggtgacacgcatctttttgataaggtcagaggctatgacatcaagctgcttcgatacctgtcagtcaaatacatctgtgacctgatggtggagaacaagaaggtgaagtttggcatgaatgtaacctcctctgagaaggtggacaaagcccagcgctatgccgacttcactctcctctccatcccgtatccagatgatgatgatggtggtgatgatgttgatgatggtgatgatgatgatgatgataatgatgctggagactacgttgatgccccattgagcatccccgacttcctgactcactctctgaacattgactggagccagtatcaggatgggctcatccacacgtccctgaagcccactgagatcctctacctcactgtggcctatgactggttcctcttcgggaggaagagtttgccagcccgggatggaggcttcaccctggaagacatctgcatgctgagacgaaaggaccgtggcagcaccaccagccttggcagcgacttctccctggtcatggagagttccccaggagccactgggagcttcacctatgaggccgtggagctggtcccagcaggagcgccaactcaggcagcttggatgggtagcagtcccctggaggtccccaaacccagatcagtggaccatcccctgcccggatcctctctctccacagactatggcagctggcagatggtaacgggctgtggcagtattcaggagcgggctgtcctgcacacagactcctctctccctttcagcttcccggatgagctccctaacagttgtctgcttgcagccctgagtgatcgagagactcggctgcaggaggtgcgctcagccttcttggctgcgtacagcagcacagtggggcttcgggcagtagcccccagtccttccggtgccatcgggggcctgctggagcaatttgcccgtggtgttggactccggagcatcagcagcaatgccttgtgaagaagccagcccatgacattttcctgctcctctctcagctgagcccttagcagagaatcaaagccatgcctggccgaaggggtacttccaggtcaggggaaatttcagtcccccatctccatcatgaacatggcagccccaaagctgagcaaggccaaagacagggttttccaacccccagcctcttgactggtgaccaccaccccttcttgtcactgtctcccacccaccccatctttgctgggattcccatcaactctcagaactgtgtggggtttccctggggccttgtggaagccatgacttcacaaagaccctacctgtcagttcttgtttctggggaggagggatcacctgcactgagaatgaggcagtttgacacagatcacaaaataaaatcaaagtctttttgaatagccactcttgtgtcatcatttggttattgtctttgtggagctactaggaaggttctcattgtccttcctt

SEQ ID NO: 474924 - DNA, 1027 bp, Homo sapiens
ccagcagatcatgcagtgagaacccacttagaggagcagacagcccatcttggtgggtggagcagtatcctagagggagggggtagggcataggctccagtaccataaaggggactgctcagctgggtctagaggacgagctaacttccagataaaaacagccttgagaatgcaaggcatctacagagaaccaaagatgtacctcctggctgcagccaagatctctgatggctcccagtactatgttctgctcatcatcactgatggggtcatctctgacatgacgcagaccaaggaggccatcgtcagcgcctcctcattgcccatgtctatcattatcgtcggtgtaggaccagccatgtttgaggcaatggaagagttggacggtgatgatgtgcgcgtgtcctctaggggacgctacgcagagcgggacatcgttcagcaagccttcaatgccacggctgtggtgcggcacatgaggaaactgcagctgggcaccagccaggaggggcaggggcagacggcgagccatggggagctgctgacaccagtggctgggggtgaggagcgggctctgcagaagggcatgggtggtccacaaaggtgcacccgggctggagtggagggcctgcccctgcggccacctctgttctgtcttcccatgcagggccggcagctggctgttgctgtcgagactgctgcgtggagccgggcacagaactgtcccccacactgccccaccagctctagggccctggacctcgggtcatgatcctctgcgtgggagggcttgggggcagcctgctccccttccctccctgaaccgggagtttctctgccctgtcccctcctcacctgcttccctaccactcctcactgcattttccatacaaatgtttctattttattgttccttcttgtaataaagggaagataaaaccatccttagcgctgtctccctcaatatcccccaccccatcttgttgtgcaaactgactgcttgatttgggggtgcctggcctttgag

SEQ ID NO: 474925 - DNA, 1467 bp, Homo sapiens
ggtttgtggtttttaagcagagagagaaaggaaatgtccttgggttccaaatgtggaaagttgtgcagagactctcaaggagaaagaagttttccgctttccaaagctgcatttgtcactcgctgttgtatcgtaactgaaagtaatgaactttccgatgctactgtccagaaggaggaagctaagacctcactgagcctgtggctccggccgctgagtgatggtcccttctgtctgccagggtgggatcgggcactcatccagttgcaggtgcgagcactattgagtagcacagggtctcaagctgtggccatggacttgggcaacaggaaattagaaatatcctctggaaagctggccagatttgcaaatggctctgctgtaatacagtcaggtgacactgcggtaatggccacagccgtcagtaaaacaaaaccttccccttcccagtttatgcctttggtggttgactacggacaaaaggctgctgcagtaggaatgactgatggagaatgtgttgttaacccaacaagaaaagaaatgtcttctagtactttaaatgtagtggttgctggagcacctaaaagtcagactgtcatgttggaagcctctgcagagaacattttacagcaggacttttgccacgctatcaaagtgggagtgaaatatacccagcaaataattcagggcatccagcagctggtaaaagaaattggtgttaccaagaggacacctcagaagttatttaccccttcacaagagattgtgaaacatgctcataaactcactatggagagactctatgcagtttttacagattatgaacatgataaaatttccagagatgaagctgttaacaaaataagattagatacagaggaacaactaaaagaaatatttccagaggtcgatctatatgagataatagaatccttcaatactgttgcaaagaaagtttttagaagtattattttgaatgaatacaaaagatgcgatggtcgggatttgactttacttcggaatataagttgtgaggtagatatgtttaaaacccttcatggatcagaattatttcaaagaggacaaacacagctgctttgtgctgttacatttgattcattagaatccagtattaagttggatcgagttataacaactataaatgggataaaagataaaaatttcatgctgcactatgagtttcctccttatgcaactaatgaaattgtcaaagtcaccggtataaatagaagagaacttgggcctgatgctcttgctgagaaagctttgtatcctgttattcccaaagattttccttttgccataagagttacatctgaagtcctagagtcaaatgggtcatcttctatggcatctgcatgtggtggaagtttagcattaatggattcagggcttccaatttaatctgctgtcacaggtgtagcaatgggattggccaccaaaacc

SEQ ID NO: 474926 - DNA, 1081 bp, Homo sapiens
tggaatcttctctcctccctctttttgtcgtcttttaataagggagtgttctcactcacttccccgtgagggtgatgaatatgttcactttcctgatcatggtgatgacttcatgggtgaatacatattttaaaatacatcaaatgatacacattgcctctgtgcggtctagtgagggtcctgagatggggagagcctcacctctgcctctcaacctgggcatcaactttaaacagattgccagcaagaacaaaagccatggggagtttggaaaaaaacaactgatacctgattcccaaccccaggggttcttgtttaattggtatggagagctgcctggagaggttgaaaagctccccaggtgtcgctcatgtacagcacggttgcagaactctcaagcagtggttctcaaacttccctgggtgcctaaatcgcctggaggtcttgttaagacagtgatttgtgaacgtcccagcagtgttcgtgaatcagtacatctgggggtcaggggttgaggttgagaatttacccttataacgagctcacaggtaatgctggtggtgacccaacgaccacattttaagaactattctatgatcctttactatgtacttaatcagcacatcgaaatagcattttaagtgttccattagtaaaaatatggttttatacttctcccaggttaatgggaaaaatgttctagtgaatctacccatttggggaaattgagccaaattcaagcaaattaaatattacccaacataatcgatgtccagacaatttatcttgcatttcgtagatcaagtctttcaagagccccaattatgtaattatgtgggaacagttgaaaaaaatatttgttattgtatcgtcatacctcggagacatcacagggttggttctagactagtacaataaagtcaatattaccataaaatgagtcatgtgaattttggtttcccagcatatataaaagttatgtttatactatactgtagcctattaagtgtgcagtagcattatgcctaaagtaacaatgtacgtatcttaattaaaaataccttattgctaaaaaatcttc

SEQ ID NO: 474927 - DNA, 1713 bp, Homo sapiens
ctggcacagaaggaagaagcaggtgctatgaccctgggagatgggggtcttatctataagcccctgactggggctgctgcctttttttcagagatgccctgcccagagaggaggaatctagagaggcagtctggccacaaatgccttgctgagctgtggtgggctccacccagttcaaacttccaggcggctttgtttacactattgctgtgctggcagcgagaatttcaagccatacatctcagcttgctgggctccgtgggggtgggacctgctgagccagaccacttggctccctggcttcagccccctttccaagggagtgaaccattccaggtgccactgggttatgaaaaaaaattcccacagctggttcagtgtctgcccaaacggccacccagttttgtgcttgaaacccagggccctggtggtgtaggcaccagagggaatctcctgagccggtagtaattgttttatagatttgggacctccagtgttcagttcatatatatttatgattgtgatcttttcctttgggactagtctttttatcattatataatgtccctgtttgtcttttttaactgttgttgctttaaagtctgttttgtctgatataagagtagctactcctgctcacttttggtgtccatttgcctggaatacctttttccatctttttacctgaagcttatatctataaacgtatgctttgtatatttcagtgttttcatgttgcctgcatatacattgacagttgttatgtcttcttgatgaattgactccttctttgtctcttgtggcactttttgttgtaaagtatattttttcagatattagtgtagctactcctgctcttttttggtttctatttatatgtaatctctttttccatcccttctctttcagtctatgtatgtccttacaggtgaaattagctttgtaggcagaatatagttgggttttgttttgttatttacctagctactctgtgtctttagattagcatacttagtccatttacatttaaagtaataattgataggtaaagatatatactatcgccatcttactaattttttggttgcttttgtagatcctttgtttctttcttcctctcctgctgtcttcctttgtgatttggtgattttctgtagtggtatgcttttattcctttttttttttttttttacttttgtatatgctataggtttttgctttgtggttaccatggtgcttatgcaaaacatcttttggctacacaagaccattttaagctgataacaactctgactgcatacaaagtgcctgcacttttactgctcctccccaattttacatctttgatttcacagtttacatctttttatattgtgtatacattcacaagttaatattaacagttaattttaatgcttttgtcttatgtcttttaacctttatactagagttaaaagtgatttacataccaccatggcagtactagagtattttgaatttcactaaatgtttactggtgagaaaacatactttcatatgttttcatattacttaccagtggtctttcatttcaccttcaataattttctttagcatttcttgtaaagcaagtctggtggtgattaatttcctcagcttctgtttgcctgggaaagtctttatccctcttttctaaagcacaggttttctgggtcaagtattcttggctggcag

SEQ ID NO: 474928 - DNA, 785 bp, Homo sapiens
tttggactggggttgcaatggttgaagtttaaagcaggagatgttgccacattgttccgatgcaggtaggagtgatgtagcagggaaagaaaatgtatctaatgcaggagagaggagtaaaacgatagctagagtgaagttcttgagtgggaagaaggtggaggaggaggagaaagaggaggagaagggcaagcaggaacaaaggaaaagaaaagatctgagtttatactcccatatgacaacagtggatttgaaaagtttacagaacaaagatgaattcaatttggttggcattatagtggtgtttgaggacttgaaagtgatgctaggaacccagatatgggtaaggagagggagcctgaaaaaggtaatgagagaaagtagagggagtaagctggaagtacagggactgcttcctgaggaaagtgaccagtcgtccaaagcacagttgacaaacctaggacccagccaggcaaatgtcaatagccaaggagaggatcccctgccatcaagaaactcagatttaattgacctggggtgagcgccaaagaaccactgacacagaaagtacagtacatgtttccagtttttctgctatatacaaataaaagggcgcattctaggcaacaagcctctaattctgcagccatgaacatcactatggaaatccttaatacacttatttcagagtaaaagggaaagcttattcagagctgtcccaggtgctgattccagccctcacagtgttctctctccaactgcctgagttttttgtcaccctcttc

SEQ ID NO: 474929 - DNA, 1641 bp, Homo sapiens
cagcaggatagcagcagttcctcactgtggatgtccttgtcaaactgatgcaacaggtgggctcccacagccttgggcagctctacccctatggctttgcagggtatagcacccctcctggctgctttcacaggctggcattgagtgtctgtggcttttccaggtgcacagtacaagctgtaggtggatctaccattctgggaaagtgcaagcccacaaaatcacctgaactactcattgtcatccacaatttccacaaggataccattaaagttgctgctgcatatcttgctgaaggccagcagtcccaccctaaaggagtcctctggcccaccagtcatgaacaaaaagggatattaattttttgtgacttatttggagtgaatttagactgcttctcagaccatatgcttttcaaacccagattttgtgagcatttggcaagtattcccaaactacaactacaaaccagtcctcaagaacaccttttatacattttgcagacagtatttcagaatttcacctataactacctgaaatactaaacaaaagaaccctgatccactgtgtagagcatatgagttaagagctggaaattcagactagactgcctatgtttgaatagcagtgcaattttggacaagttacttcatctgtgactcagttttctcatctttgagaaaactcaataaacaggcattattattattgttgttatttttgcattactgttgttaatatagggcaggcaagtgcatcctgaaccaccaatagcttaaatcatggcaattaaacagtcaaacaaaaataagcatcaataaaaaggaactgacatgggagattggcagaagggaatgtatacaggaagatttaaacatctgtgcactatcatttgttacattttgaaatgaaacatattgtaaaacacccttagagcaaatgaaaatcagtctattgcttctatcaaagccaagctgtgaatacatgtttcttctgggttcctaagctcactggatcctactccacatagagtgatgtgacactaatgtcatatccttaccctcttgagtaagaacacctaagaactcagagtttataaaggggatattaactttggtgtaaaagaggttagtgctttagtttaaagaactaagtaaaacaaatggcatccttttcttctttgaacggacttcttcctcaacatgatagcagttatctccaagtgttttgagacatatttcccaccccagatacaactttaaaatcctttttgtccatttcgtacctgtcaaattaacaaagaatttaaaatgatgacaatgcctacaacagtatgaagaaatatttggcaaaatgtttcaataaactcacatatttttaaaccaaagcaattcagcttaaggttatctatcacctttattgcattctatcatttccaaaataatcttgcttaccatgttttacaatgtgtattgtatacagctttgacgaaaataaggcatttataaatgtgctcagaagctaagacccatgattctaatacaagattcaggcaaggttaatgaaaagttcattggcaaatgattttgacaccataacctgatgcttagaacatttagaggagagcttttttaatttccc

SEQ ID NO: 474930 - DNA, 483 bp, Homo sapiens
atcatgtaaacctaccctgacatctccactatgtggaaaagatcaaagaagcgatgctcagctgccacctctgccaagatagaaagcctcttgcggaagctcccaggattggggagtgttcctaatagactcaacccctgtcaggggacagaaatggtttattttgatgacaacagcctcacacgtgtgtctctacatatccaggaccccgactgccatggcggaaggcaaggaggagcaagtcacatcttacatggagggcagcaaagacaggagagagcttgtgcagagaaactctggttttcaaaaccatcagatctggtgagacacattcactatcacaagaacagcatgggaaagacctgcctccgtgattcgattgtctcccactgggcagctcccgcaacacatgagaattatgggtgcagacagggagtcaaaccatatcaaaaagtcttgtgactttcctcattcataattatt

SEQ ID NO: 474931 - DNA, 800 bp, Homo sapiens
cagcgaggagggggtcacgaatactggacagcatatctgagggtgcttttgcatccttaaaatacttgccggtctctggaggcatttctggttataacaactagtagcttctactgacatcttgccaataagcatggctatgatgcacaggactgccacccttcccagtcaaaaaagaattttctggcccctaaatgtagaacctaaattatcaggagacactgctgtgaagaatcctttcagggctctccttacctgcgataatacaactcttattgatcaaaacgtgcttccttgtggagagttgtttgttactcaccaggtgaaagaatccttgtcttttcagcaacgaaagggtttgatatgccttactgccctaggctttgtggttttggaagaaggctaccatatagtccatgcccagttggtcagaggaccatccaagtggaaaggggagagtttgggtttctggcctgcccattgcacaagcataacaatcaattttgttcagtgtgcagacagaatatttaatccattccagccaagcatttgcatcttggtaccctgtttcaatggctaaagtttgctttaaatatttaacttctacaatgtccactttggcttggtgaaagggccatgaagcccattttcagttgtttaccatacacttgagaacccaaataagtcaatgacaccattttgtgcctgcacaccagcaggagtttaacgattttgaatgaactgacaagctaatataaatgaaatgaatcaaaccagttattacttttaatggtaaagcc

SEQ ID NO: 474932 - DNA, 620 bp, Homo sapiens
aggggtgcctcctaaagggagatggagtggagagtgacccagtgcaccatgatctcaggggggcaggctggcgaacccagcaatggctcattaagactggtttcaggtcgccaatctggccctggtttatcaccactcaggaacaatggcagctttagcagttctcctcctggtctaggcttgtgctcaggtggcatcacggtcctactaatatgtgatgtcacccccataggcccagctgtaaaattcctctctttatactctttctctgtatttctcagaccagccaaacacttacagaaaatagaaagaacctacattgaaatattgggggcaggttcctccaataattgtgttcacagtgttctggtggaggctaaggaggctccacgtgggtggttgcttctctttgatcctgaatcctatgatcaatgcatgaggagcagagctgttcctactcaatctgtcctgcatgaattgactggctaacctgcacatatgtgaggaatcaatgtatattctatgctactcagatacagtgattgttttattacacaacattattgtagtaatagagaactgatacaattttcatattggtaaatttcatatggcctctt

SEQ ID NO: 474933 - DNA, 522 bp, Homo sapiens
acagacagctggacagacgtcatgacaacctgcctgcagaaaggagctacccactgcaggtctcctgagagctgttttgtctctcagttaattaagctcctcttctcctttttcaccctccagactgaaagagctgtaacacaaaccgggctgaaacacatcaccctgctcaccatgttgctggcaaggaaaaggagagaagagctgcagcccttcagggagcccacacgtaggggatccctgagccagggctctgacactctctctggggctctgtggttcctggcatctccaagcttccaggctccactgcatcccccctcatccagatgtggtgaccagcagtggaagccacatgcagtacatctggtccagccacagcttcacacggagctggcacctgtgcagatgcctggagctacttgccctggtgcagcagccaaacatggaacttgagtatggactcttgtgtaaatgaatataagtgttattaaagatgttttacttaaaacaattgaaaaa

SEQ ID NO: 474934 - DNA, 1186 bp, Homo sapiens
accccagccttcaggccctccatggtcggaaggtggagcctcgctcaggacccacctccttccacccaggaatccgtctgcttcctgctgcctttcatggcaccgaggctgagttcaggaaaaagagaaagagattcagaaagagctgtcaatgaggtaggaaaaggaggaggaggggaggaggaggaggagctggagggagatactgcagctgtaagggatacaatagacggcaagagcagatacgcagctgtaagggatacgataggcggcaagagcagatactgcagctgtaagggatacaatagacggcaagagcagatacgcagctgtaagggatacaataggcggcaagagcagatactgcagctggatacaatagacggcaagagcagatacgcagctgtaagggatacaatagacggcaagagcagatacgcagctgtaagggatacaatagacggcaagagcagatacgcagctgtaagggatacaataggcggcaagagcagatactgcagctgtaagggatacaatagacggcaagagcagatacgcagctgtaagggatacaatagacggcaagagcagatacgcagctgtaagggatacaatagacggcaagagcagatacgcagctgtaagggatacaatagacggcaagagcagatatgcagctgtaagggatacaatagacggcaagagcagatactgcagctggatacaataggcggcaagagcagatacgcagctgtaagggatacaataggcggcaagagcagatacgcagctgtaagggatacaataggcggcaagagcagatacgcagctgtaagggatacaataggcggcaagagcagatacgcagctgtaagggatacaatagacggcaagagcagatactgcagctgtaagggatacaatagacggcaagagcagatacgcagctgtaagggatacaataggcggcaagagcagatacgcagctgtttatccaaactcttccttcccacacccttgccaaataagtgatagtttgtgtttttgcatgtattactgactcttccaaaaagacatgtctcttagatttcactagtattttagttttgttcccttgctggtgaggagttgtgatcctttggaggagaagaggcattctggtttttggaattttcaggctttttcc

SEQ ID NO: 474935 - DNA, 1212 bp, Homo sapiens
gctcacaggagaaacaagtttgaccactatgctatcatgaagtttcctctgatcactgagttggccataaagaagatagaagacaacaacacacttgtgttcactgtggatgttaaagccaacaagcaccagatcaaacaggctgtgaagaagctctatgacattgatgtggccaaggtcaacaccctgattcgacctgatggagagaagaaggcatatgttcaactggctcctgattatgatgctttggatgctttggtggagcccctgcaattgctggcgccctgctcatgttaccttaggtccacgtggggctttggcggtctgtgctctcatgtcccagaggggcagtctgagccaaagtttaggtcaccaggagacctgcaagtccctggggacctgctgggcggctgtattgtaaatgtgcagctggtgtggcacctgtggtccggggctgttatccaagcagacagctgtggggactgccctgctcgcaccctgttcactgagcccccttccagcattgactccaggagcaggcccaaccagctggacttgagcggccaggcagtcagtctgggagcggcctgtgcacaagggattgtgtggatcggatgcaccctggacctgtgggagaggcagccgtgctctctcctggcccaggagtcagcagggactggagtcactcagagcaagatggagagccttgggagatggtctctggctgccttttgctgcagtcgcactgcacgccaggaaactttctgggctctgccaaggttctggctgtatctctgcctgctctctggtcaattccccctgcaaattcaaaagtctgtggaggtctagggatctcttgtagctaggatcgcagaggtcctagcaggagtgtggtcccctgcagttccttcactcaccccttccttaggacctgttcagtactgagagctggtcctggtgcttggtgactctggagaactacagttgcctattttttaggtcacttaaagttatcccagagttcaataatattctgcttattttttagtttttttttctggtctaatggtctaattctatttccacaagttcatcaacctttcactttcaactccatttctgcagctcagagtgtgtccattgagttctgcattagttctctgcttctccactgctgcctggaagcagtctccatgcagtaagctgctttaa

SEQ ID NO: 474936 - DNA, 953 bp, Homo sapiens
aggaaacggaattccctgaccccttgtgcttcctgtgtgaggcgatgcctcaccctgcttcggctcactctcagtgcactgcacccactgtcctgcacccactgtcccacaagccccaagctcaagctgctactccagagaatgtggaggcctcaactcccacgcacttcagccagccagtgactgaggagagtgagggcaccagtgccagcccattcctgcccagtgaaggattctgcataggtagcttgttcggggatctcgtcattggcttgggagagaagttttcaaacctgagctgtgtcagcttgactggcaccacaatcttcccatgttgtggatttcaaattgtttctatactgtctcaggcatcaaaacagggcttggcagcaccagaatctaacaaaaatgcaattaaaaactacttctcaaagtttccagtgggcacgcggatcatttccaagaaagatgttcagattattgctcaaggcaaaatgacttcagacggtgattttgccattgatctaacaggaaagaattccgcggatctgaacctcgggaaagagattaatagaaataaaagatagctcctaccactaccctttatcgaatgtgatcttaaaaaaaaactattttcatataatgtttggctgatatttcttagttatggtaatggttttatagagattagaatttataactaaatatattaaggtcagaaagggaaaagtaaatgtgcattagctaatatttgtgtcttattttaaaataattttcaaatgataagattgacataatgtacattgttgatatattcttaaacactgtgacatggaaatagatttttttatagttcaaaaattaaacttgaatacatcagaatggggaataggagtatctgtttaggagcttggattttgaaatttggcagtcctgggcttgaatgagaaagc

SEQ ID NO: 474937 - DNA, 548 bp, Homo sapiens
gaaagacaaatggtattccctgctgcctttttcagtatgaagaaaatttccagtgccgaagaacagctaaatgattccttttgtgtttgcctgactgtggacagcagtgaccaaagctgtgaaatcaagtcagagagaaacaggcagactcaccagttttatatcatggaatttctacatgtagtgaatcatcagatagagtcacctttcccactctccctacacattaacccgcaagctgaccctcatgtctccccctacaaccccaaaatgcatatgttcagttcattgctgtgtccaaatggtcccagtctgatcctgagtcaaatgtttcttcctctgggaatacttgttcaaatttccaaggttgagatggtcaccttctcaatctgtgttctcacctctggtttaacaattatcctgcttcaggttaagtcaggtatttaaatactcatttcatctactgcattgatcacgtcacacagatgatgtcacattcccctcaagtacatcatcaaacaaaaaatcctaaagttacaggagcttat

SEQ ID NO: 474938 - DNA, 449 bp, Homo sapiens
tcctccttgcagtcacaaagtaatgactttcggtggtagacagctcttggcctgttactgggctttggttgaaactgaacatttaactatggatcatcaagtcaccatgcaacctgaattgcctatcatgaattggatgctttctgacccatctggccataaagtgggtcacgcacagcagcactggatcatcaaacggaagtggtctatatgtgattgggctcaagcaggccctgaaggaacaagtaagttacataaggaagtggttcaaatactcactgtctccactccagccaccctggcttttctcccccagcatgcactgatggcctcatggggagttccccatgatcagttgacagaggaagagaagactagggcctggttcacaaatggttctgacaatatgcaggcaccacccaaaagtggacagctgcagcactaaagcc

SEQ ID NO: 474939 - DNA, 1193 bp, Homo sapiens
agcccatctgaatgtcattccactacctttccatgcaggggtgttggtttatgcgtgctgcagcagtgggcataatgaatataatttacccagaggacaaagcagcggtaagaggcagaggtccttttaattgggctctctcccagagaaatgcagagccactaccaatgaaagtgatcagcctatgccggggggccctccaattggtagtgggctttcgggggctattactcacaatttcctatagtggaaagcctccccttgctccatgccaatcctgggtgggcaactgtcctatgttgctcctctctgacctgtgtaggtcatattgcttctttgatgaatcccagcatgtctacctgcatatccagctgaagggccagcctttacttgctactctttctcctctgcatgagagtggtgcacatcagctgcttctagtcagccagtcttggcactctcctgtcgcttgtttagacttaagctgacccctttcattattattagtagtaattttgatgaaatacatgttactttaaaagaactgtcttcaaatttagaaactgtttcttctatacaaatcataaatacatatgctgccaaaatggctacaaagaacactagtatcagtcagtttaatgtattaaaggattcttaagtctttcatatattaaaacttattttcattctacaatggttattgttttgtgtttttcttactaaactatatcttaattttatgtcatgtaattgcattaatttttatcaaaaataattactgcagaaaaaagttactataattttaacataattattaaacttcagcttactattttaaaaactacttatttattttgctgtcagacaaaatagcacttcttatttttaggccttagttttttttttaattttattattatgatactttaagttttagggtacatgtgcacaacgtgcagtatagtttctttagaattacaagctttgttttgattaggtttatcatgttccgtaattctactttcagtctttcttatttttgtattaaagacacatctcttatcagcagaacacagttacattttgtttcagtattcaattttaaattgtttgcctacgaattgcaggattttgtccatattaacttaatgtaatagctgaactatttgagtttaaatggactattctatgaa

SEQ ID NO: 474940 - DNA, 896 bp, Homo sapiens
agacactttcgctggatagaagtggccatgagaagaccaatatacacacaaggaaggaacaatgtggcaacgaagaggctggattttgcagcttcaagggacagcaaaggtgtgcagaaaactgccaaaagctatgaagaggcaaggaaggttcctctatatacaccagagggaccattgccctgtcagcaactcgagtcaaggaagggttcctctatatacaccagagggaccattgccctgtcagcaactcgaggcaaggaagggttcctctatatacaccagagggaccattgccctgtcagcaactcgaggcaaggaagggttcctctatatacaccagagggaccattgccctgtcagcaactcgaggcaaggaagggttcctctatatacaccagagggaccattgccctgtcagcaactcgagtcaaggaagggttcctctatatacaccagagggaccattgccctgtcagcaactcgagtcaaggaagggttcctctatatacaccagagggaccattgccctgtcagcaactcgagtcaaggaagggttcctctatatacaccagagggaccattgccctgtcagcaactcgagtcaaggaagggttcctctatatacaccagagggaccattgccctgtcagcaactcgaacttggacttcaggcttccagaacagtgatccaacagcatttctgttgttttaagccactcggtctatggtactttgttatgaccatcctaagactctaatatatatatttaaatgagataatgttttcagtgttctcagtagaaaatttgataccaatgctcaatagacaatttctgcttcatatttgtagctggtatttatttttctctagcatgtgaaacaaaatgaaccag

SEQ ID NO: 474941 - DNA, 644 bp, Homo sapiens
agaaaatttaagatgacatatatggcttacaatcacctccactgggcagtgctgggctcattcaagcatgagaacatcggattccatcataggggtcttggggctcatctggtagcaacagggagtcaccagaaattccagagcaaaggagcaattcagtccgctgaaggtttaggaacaccttcagtggcttcaggttggatccaggaggcaaacctaaccccgctgggccccagacagcaattcctaacagtgtgctcttttataccttccttcaaggctgctgacaggaaaggccgttgccaaggaaacaggctgagccaggaagctgactggagcaaacacagacagtctcacggccgctctgtggacagagcggaccagttggtaaatatttcaccaggcacataccagagacgcaaagcaaacagtgggaattgaacaatgagaacacatggacacaggaaggggaacatcacaccctggggactgttgtggggtggggggagatgggggagggatagcattgggagatatacctaatgctagatgacgagttagtgggtgcagcgcaccagcatggcacatgtatacatatgtaactaacctgcacattgtgcacatgtaccctaaaacttaaagta

SEQ ID NO: 474942 - DNA, 560 bp, Homo sapiens
aactgcccccaaccttcaaagtcagctcaattagacccctgccttatcgcaatgacagagggctttctatatcctgggttctcgccttggtgtaccagaagaatccgatcacacccgggcttggagaatgagtgcaaggttttactgagtggagttcctgtttttcttcttctacttgttcttgttctttttcttcttcctcttcctcctccttcttcttcttcctcttctctcttcttcctcttcttcttctacctcttcttcctccttcttctttcttcttcctcttattccttcttcttccttcttcttcttcttcttcctcctcctccttcttctacttcttcttcttcctcttcttcttctccttcttcctctctttcttctcctcctccttcttcttttcttcttcttcctcttctttctcctcctccttcttcttcttcctcttctttctccccctcctcctcctcctccttcttcttcctcttctttgaaataggattgtctgctgctggcatatagaatgctactgattttttctgttttctaggttatgt

SEQ ID NO: 474943 - DNA, 507 bp, Homo sapiens
ctctcctccagctgcctctggtcaaattcccttaggcaccggtgtcattccaccatcaatggcccgccagttattatgggtgcaggatggggggacttgatgggccaaaaggcaacattttgggcacaaaaaaagaaatgcctgtcctcatttaggtccatgggcacagacctgagggtggagcccttgccagggaccctgccattctctacccagcacttccctgattcacaggtatctctctttgatcagtctgcagctggaggtcaaagagacttggggcttaaggattgtttgtcagattccccaattctcaatgcctggtgttctttgcagagctcagatcatgctgatgtaaattcaccatccccaccagccagcattgagcaggatctgctaccattgccttacactcattacacatcccatctgtctgtgatgcctctttggcagtcaaagagcttaatgcattatgcatttcagaatattagagagattatttaacca

SEQ ID NO: 474944 - DNA, 627 bp, Homo sapiens
taggtagttttggaaaaggcaacatttgattggtaaaatgacattactcagaaagaaccagttgggagagagcaggcaaacagaaatagaagttctcactttgagccacaggtttcaggctacttttgacttgaagatagggttcccaccagaaactgggttcaaatcctgctttacaagttttgtaagctgtttggctagttacttaaactcatatacttttactttcctggtctgtaaaatgaggataatagtttctctctcactgggattttacatcaatagcagacacccaaagtgtaaagtcaattttgttaaagggagatctgagagaacaattcgcaagaaggcaactgctgtggttggaatatgtcccctccaaaatacaggtgttgccaatgtgatagtattaagagaaaacgtgaaagatgctaacaacaacatactgtacgtggaagacgtgcagaataagatatggctgtgcaaaaaagaaaagaaagaaaagaagaccctttatcagacatacagaaaaatatagttctgtgtctgtctcagaaggcatatagttacctgtcactcctttagatagaggtttgtcaaagatcagacagttgtagatatgcggcg

SEQ ID NO: 474945 - DNA, 723 bp, Homo sapiens
tatctgagggtgaccaaacatctgcagtattcaaagaccatcgggtgattacaacatgcagcaacatttaggaaccgttgactatgtctatgatgcaagtaaaaattactccttgactgaagtaatgggggctgtctgtgaagccttgcggcagtacggcccaggttatttgctgagcctaatgggtgtcaggctgctaagccgagaagatctgggaaggagtcagagagccctgggccagagttccaggggctctgggaatggctgccaggaggaatcctgggctgtgggcattccttggcccagtggccagatttccagcacttgtagcaagctcctgggggaggaggttctggaggaacccctggcagctgcagttgaggcgtttggagttcttgtgtgctggagatgtggctggggtttgtctcacagtggaggcaagttattgcaactcaggaatacattgctacttggctgcctctactctattattgtacaccttgaaggtgaggttaattaagtcctgttgtggggtttgagggctggaatttaatttttggagttttatttaatgtcgggagcagattgggtaataaaatgtatattgagaataagacggccttttgaccttttagggtctagggctgtaaagcgtctcagggttgttgccaaacaagtcatgaactgggctgggtttttcatatttgatgaaagagcctaaat

SEQ ID NO: 474946 - DNA, 788 bp, Homo sapiens
agctgagcggctttgctgtcagtttcagtatggtagggaaaggggcctggctctcaggtctgccccatacagaattcccatgtgtcacgggagggacccagggggaggagaaattcaagccagctgcagaaatttgcataagtagcaaggagtctaatattaatccccaagactgtggggaaaatgtctccaggccaagtcagagaccttcacagcagcccctctcatcgcaggcctggagtcccaggaggaaaaagtggtctcatgggccagtcccagggtccctgtgctgtgtgcagcctagaaacttggtgccctgtgtcccagctgctccagatgtggctgaaaggggccaacatagagcttgggctgtggcttcagagtgtgcaaaccccaagccttggcagcttccacatggtgttgagcctgcagtccacagaagtcaagaattgagggaagtgcagaagggaaatgtggggtcggagcccccacacagagtccctactggggcaccgcctagtggagctgtgagaagacggccaccgtcatccagaccccagaatggtagatccacaggcagcttgcactgtgcacctggaaaagccacggacacacaatgcctgcctgtgaaagcagtgggagagaggctgtatcctgcaaagccacaggggtggagctgcccaagaccatgggaacccaccttttgaattagcatgacctggatgtgagacctggagtcaaaggagatcattttggagctttaaaatttgatgacctcactggatttc

SEQ ID NO: 474947 - DNA, 702 bp, Homo sapiens
caaccagacttagtgactcatagatggcctgtgggcagatactgcctgtgttcctcctacagccctttagactttccatcatatttcacagtttgagggatcatacccacagtttcttagaatcttttaaatctgtgatccaaattcaaggacaaaatgcaatccctatgaaaatgctcataagctatttttcagagttagacaagtccttagtaaagcaaacatctacaaataaagaaggaaaacactgtgaaagaaaagctctgagaggagggagatacggatgctgctgtcacaggtggggaacacatgccgagaaccactgttctcgagcattctatgagctgcatttcatacttattggatcagacccaggacagggaagttttgagcagctgaggattgggaaaatctgggccataggttgctacgggaaggctgagtcaggacagcctgctaagggtattggcggtggagcaagaatgaaagggctgttggagacaattgcgtcttatctgtgatgcaaatggggtatattttctctcccttttgcctcaggccctcagggtagttaccagatcctgaaagttctgaaccagagatcttctcaggtcccagatgatatgagggattagttattgggggaaatatcttgagttctatttattcatctttccattatttattaagcaaaggaagtga

SEQ ID NO: 474948 - DNA, 569 bp, Homo sapiens
ggattttctcgtgctatgactaggaggatttgtggctacaaggaaaaaatgctcaatagagctaatcactccggcaagtgggaagcgacccgggagctgcccacaggcacctgcaaaacatgtcaaccaccacgactgacagtaccaccggccagtcatacaaatggcgttgtgtctgagatctccccgcttctcagcccaagtccaccttgtccattctgctctcatcctggccttgctgcaacccatcagatagctcctgcatctttcagtattcagggcatttgcccctcaatgtcctaccctggggcccctgagccagctaagtaccaaacatacggcaagctcccagagactggccaccagccctgcgtacggcagcaagcttctctgccccactcagcacctggatttctgtaacatcatgttgtcccgagggtggtgactgctccctcagtgattcctgtgccgcttcaatgtctgctttttatcttttccgtcttcccacaccatgtaaccaactcccttgattgtttcccctcagctggagatttctggactggttttga

SEQ ID NO: 474949 - DNA, 727 bp, Homo sapiens
gactgtccctttggctgctccagtagattggagagagacaagaccggaaacacgattgggaaggctcccagtatgctaaaggatggtgcccctagctgtcctttcttgacccttcctcgggaatgtgaacttcagatgtttgatgtgcggagaaggattgccttcctggtgtgttctgttcacagtacaccgcagggcattcttgcgggactgcgagcagaggccgctcccctgttcctgctggcttcaaaagagtgcagatggcggctcacttccaccctgcagtttgctttcctgccccccacaatcaacgtccccaccccttctttccatctcaggacggctaagaactgctccttacccctgtcactgaaagtcatggctgcaggtcccagaagaaggaagctaccaggatcagaacctgtggaattcaggtctggggatttcctcaggtctctgaagacgttccttcaaatgctaaggatgttccactatatttcgtgatcattagctgcctgtgaatgtgagagacaggcccgtgccctatgcaaagcaaaacagtcaccaggacttggaaaacattatagtacctgccatcatgagctggtgaaaccaggaacaatgaatacatttaggcattaacaactttatcccgaaagcaaacatatgtgcttacaatatgagcttgtgctcattgagaattaactgcttgacagaagtaaatgta

SEQ ID NO: 474950 - DNA, 902 bp, Homo sapiens
tacgctttgtgagaataggaagctcagggatgcattacaggagggctgatgatatgttctagcatgctgagctatgccttggttagcatagaggttagctcagtgcctggttgccagctttgcggagaaaaatgttgcaattccagtttaaaatatggtttgggaattacagtggaatttatctatacgcttacaattgctgattcctgcatgcagtcaggagatactttgaaagatagtaaaatgattcttaaattactatattttatcattggaattattctcaatttcagtggcaaaactgtctcccaaactaagctaattgtagctatcgcagggactttttcctctaacatgtaccaagttcctctccaccaaagtcaacaaaggttagaggagagctcagcacaacctggttggcaggaccagtgctgctgtttgcacatgctccaaagtctgtgctcaaagctgacaaagataaattccaatgtgtttgagcaaataggctttgctcatcctcagccaataaatatcccatatcctgaacaggctcccagttgacttcttggtacaatttgagttgatgtcatgatcatagttatttatcaagcaacttatgtatcaccacagagttaatccaaatggctagaattgaccgtctatgtatcattcatgggataagctaaatacattcatagaagctgttttgaattaagaaaataattttgatctgaatattgtcttgaataagcatctggattagtggagggttgttcaattgttagaactttttgttttgaaatgaaggcttctcaggtcatgaagattattagtattattgctatcagggagataaatgaccctacagatgatagaatatttcatgtagtgtatgcgtcggg

SEQ ID NO: 474951 - DNA, 798 bp, Homo sapiens
ccgcaccactaggaaaagttgctgtttgttacctaactctggaggcaggacatggaaaagaagtatgcctttatcagcagcatgaaaacatacagcaaattggtcccagtagagtgggatgctgctgaaattatacccgaatacatggaagtgactttggaactggtttcagcaaagaaactggtagcattttgcccctgccatggagatttgtgggacttcaaacttgagagagatgacttagggtatctggtagaagaaatttctaagcagcaaagcattcaagaagtgacttggatgctgtcaaatgcattcagttttataaatgaagcggagcataaaagttcagaaaatttgcagcctgacaataaaatagtaaagaaaatcccattttctgaggggaaattcaagctggctgcagagatttgtataagtaatgaagggctgaatgttcatccccaagacaatggggtaaatgtcttcagggcatgtcagaggtcttcacggcagggcttcccatcacaagcctggaggcctaggaggaaaaaattgttttgtggactgagcccaggctccttctgctgtgtgcagtctagggacttggtgctctctgtcccggccactccagccatgactaaacggggccaaggtacagcttgggccatggcttcagaggatacaagctccaagccttggcatcttccatatggtctagcgtttctagcagcctgcaggtgcacagatgtcaagaactgaggcttggaagcctctgcctagatttcagaggatgtatggtaa

SEQ ID NO: 474952 - DNA, 575 bp, Homo sapiens
ggaaaagggggcactttgaaccgcagaaatggagcctaccccttcagcaattttaaacctcaagaaatcgaaggtgtggaaaggatctcagacaagcgaatccatcactgttactgtacagataagaaatggaggccaaataggattagcaacttgctcaggactccacagggaagagtttcagactacagctgtaacgttgggactcatcaacttcaaatgtaatttagccatgaaactggatactctcacctggaaagtcatgcaatacagagaaggaatccatggattgagctctgggacaatctacagtgtagacatcagggagatgaggaagaaacagcatagtagactgggaagaagaggctatgagatgacaaaaggagaggtgtccttggaggagtggaaaccctgggtgagagaagaggccacactatggagtctaggtgtttttcctgcatgtggaggtatggcacggacagtttagaacaggatagtgaaaccatctgatctcaggaaggtatctctagttccagtttattggctggagtttcagaagagaagatgagtgcagc

SEQ ID NO: 474953 - DNA, 516 bp, Homo sapiens
gtttgcaacgatggcgcttacgtagaaagtcgcctaactgccatctgcttcagtgtcctccccagcacagtaggaaccaccactcaccatgacaggggagcttggactcacagggtctcagctggaagaggtgacccttgctgccctggatgcgttttctgctttctcacttcaaaaagccccgcacagagctcaggagagagctattggagatgttggcctgtttttccagaagtttacagggcccaggggctggtgcttcctagaaaagcttgcatgggcaaagggtgtgctggagttccctaccttagcacaaagaaaagagtactggaatggcagcagctcacactccccaaatatgtcaaggtcaagtggataccatgggaggaggctggatttgttctgccctgagaggaaactgttcaaaaagactccccctctttcagaagctggagactccaatggcaagagccgacatggggtgagccacatgcaaaaaggctgaggaaggggcca

SEQ ID NO: 474954 - DNA, 711 bp, Homo sapiens
tttttttatagtccctttgtaatcatgtatggcagaacttttgtcttggggcctccacccttaccagactctgagccactcaggaattacctctcctccttaatccagacacagtttttcattcgtgaagtaggagatgaggccatgcctatccctgttgacacctccttgtcctctcaacataacttttttgcaggcacagacatgtttatctgcccgaccctcacccaaaggctacaactgaaatggacaggcccctacactgtgatactcagcacgccaactgcagagagagtccaaggactccctaactgggtccatcacaccagggtaaagctcacccccaaggctaccccttcctccaaaacattaacagcgggcccagtcccaaggtgcaagaccacttgcatcagcagcgagcgtcagcaagaagaagcagcaggaagacaggcagctgaaagacaccaccctggccggaagacacgtacccctgaagatctgaagatctagaaagaggccatccagtgttgtcttttactgcatacttataaacttgaaatccaactttataaacatggcttcaactatctaaatatttaacattataaattcagcacttcttaccaaagttctcataaaagttgttaactcattgatgtctatacattacttccatactttccatattgaagaaagccaacaaacttagga

SEQ ID NO: 474955 - DNA, 3857 bp, Homo sapiens
ttaggtccataagaatgaaggagcccttccttgaagataaggagcatagtggctggccatcagaagctgacaacaacaaattgagagcaatcattgaaactgatcctcttacaactatacgagaagttgccaaagaactcaacgttgaccattctatggttgtttggcatttgaagcaaatcggaaaggtgaaaaagctcaataagtgggtgcctcatgagctgactcagtggttggaccaagaagaagttccaaagcatttcccaacaccaaaattgcaccaaaaaaaggtcatgatcactgtttggtggtctgctgccagtgtgatccaccacagctttctgaatcatggcaaaaccattacatctgagaagtatgctcagcaaatcgatgagatgcaccgaaaagtggaatgcctgcagccagcactggtcaacacaaagggcacgattcttctccataacaatacccaaccagatttcgcacaactaatgcttcaaagctacgaagtcttgtctcatccaccttattcacctgacctcttgcctaccaactaccacttcttcaggcatctcgacaactttttgtggggaaaatgattccacagccagcaggatgcagaaaatgctctccaagagtttgtcaaatcccaaagcacagatttttatgctataaaaataaacaaactgatttctcattggcaaaattgtgttgattgtaatggttcctattttgattaataaagatgtgtttgagcctagttataatgatttaaaattcatggtccaaaaccacaagtacctttgtaccaacctaacattttaaaaaattgaggcaaagagtgattaaataatgttatcaatattagaaaaagcaccagtaaggtgctgggctccaaagtctcctttcctaaccatgctattacctctatggttgatggagagagaactttccttattcttgtgtccttaggaattttttaatgttataagataatttatcttagtgaacttctcctggttacaaattcacatatctgatgtctttatttgaaacttatttttacagaatattcttactgggtataaaattttgcactgactttttctaatctctttacagatttttgttgttgttgttgtactctttttattcttgctttagtgattttctctttattattagttttaagcagtttgacaaatatatacctatttctggtattcttatttgtggtattcttttcatttatttctctttggggtaagttgagcttcttgaatggctagatattcttatataggtgaggaattcttactatttgtaaatgggacatcagatttcattatgccacaattatttggtaaggtcaaaaggttctgttcttgctttctaaaactaattatctaaagcataactatgattatcacaataaacattaacactttaaaaagcaatgatttgataatagtctacatttcaaagtaattttaatataaaattgtttaagctaaagaaatatgaatgatcttcagaaatgggttatgattcgtccctcctatatgctctaatagcatcgtgtattaaacaggtcacaccacttatgtgaaaatacattttttgcagttgtctctccatccaattctacctgaaaatagtggtgttcaggaattgtcattgttcttattatatttttagaatatagaatcgaaggaaacattaggcattcaataacaggttgattaaataaatatgtaattgaacgggatatcctaaccctcaaactcataactctataacctaagggtgtgacactgtcaatgtggtaaaatgtacacacacacacacttatatatatttcttggtgtatatatatatatatatatatatatatgcatatacatatatgtataaatgtgtgtgtatgtgtatgtgtgtatgtatatatacacatatacatacaagaaaacaagacatggtccctatttcatgaaagttttttatattttacctttctatcaaggctattatacttttctgttgcttgccaactttgcagaatattttgtctttattttctaatttagctttgtgcaggagaaatgacttggtgcctgactatatttttcttcctatgaaactaaaaaataggtaaccttttataattgttcttgaggactattctttggcactctgggaaggaattggtagcactgtaaacaggtaggttgtggagagggatctctgtaagtcttcaagttattagtaatctacaccatatttaagcaattcacaaatatcttattctcacatgaaggagcttggggttgcatctataaacagtgtagcttaaacacattcccaaccatattgctgccctaaagtcttctttaacctccaaccaataaataaataattactagagcagcttctggcagaaaatgacccacttcttatatgctcaaatttctaagacacgacaaaaccgctttttctctacccataccccaatcattttctgactcctttggaagggatatgggtcaatttcagaatgaaatatgaaagtctaagaggagctcaaaattttggctaaactgactttgttatgaaagtacactaaattaatatacaactgaaccatattaaataagttactgttttttactaaaaagatatgcaattagtgattaatattaattatcttattaattacttagtaacttattaatattgattaatattaatattgactaatattaactaataagttactttttttactaaatggatatacaattagtgattaactctgttatggtttattttgagtttttaatgtattttaaaaaatgattagtagagaaaaccttttttctaaaagaatacagatgctaggtctttatggaaaatagtacagtgttgcagcattaaattaaaaagtgaattagctcaaagagaaattctcaaatgacaatgtctgctttgtatttatatatagataatgatattcagggaaaaaaacttcatacatataaggaactagaaaaatgttaaaaaatttcttacataaattatagaattacatcttccaaaaccaaaactgaaattaaaattttaaataaatgactagatcctaaacataaactgtattttattttcacaaatttaggacagatcacgtcttagaaataaatatgcagcattgtgtggcagatggcttaggaaaatggattaggcaaataccactcattttagccataattaaatggcaaaagctttaaaaatcaggttaaataaaattctgcagtataagttacatgtagttacaagaaagatatggctaaataattttttcttatacatttttgaatatagcttactaatatttttctatttgcctaaaaagcctgaggtgcattcttacagttattttttaaatacccaaaccaaaatgcaatttttggaaaataaactttaaaaaatataatttagaaaaagacatattaaagctattactctttaaaataaaatgctttggaataggtcaatttaatgtgtagatttattttgcaaagcttttattttccaccctaaaagtcacaagaactcagaataaagtaggtggatattcaggaaaaagtaataatcagcccacatctcacaaaagaaagtcattgttattttttaattctctttactatgtcagcatggtatatccctgacatattataaaactactttgtagtttttcatttatttatcactacaaaatgtattttatatgatttataaattatttcaaaacagtattttaatgataaaacttatgttaatgggacatatttagtatgtat

SEQ ID NO: 474956 - DNA, 808 bp, Homo sapiens
cagagattgggatggtgcagtggattagtcactttagacctactcatctcagctgggagggtccagaagatatacccttgaccaatgcttcgcaaaatagatttgtgagggcagcacctgcatctatgaacagccctgaaattgctcttctctgtatgtcagatctaacaatgggaaccatggtcactcaactacaaaatttaaatacaatgggaataattggattccaagatggcaggggccaagtggcagcactcaaacgtcaaaggcaaggagatgtgtatgagttcaagctgacaaggagtggactcctgagggttaatactgattgtcaacttgattggattgaaggatgcaaagtattgatcctgggtgtgtctgtgagggtgtttccagaggagactggcattcaaatcaatatgggaaagaagcagcagttgtgtacatgactgtgtataatgcatattaatgggaccttctaagcaagagccctgagtaacttcactggtctagcacaaaaaaaaaaaaaaaaaaaaaaaaaaaaaaaaaaaaaaaaaagccctattctcagaaaattgtatatcgcatcatgatattcaagaatcaaatatttggtatcatacctcaccccagtctgctcatattcatttataacttactttcaaaatagcagactgtgaaaaatccactggtttgcaaccctccatattatccatgcatcatttatgtaaaagctttactaattctagtttttagtcctagttattgtatttgcagactgttaaaatagcactgagattttaggagt

SEQ ID NO: 474957 - DNA, 1241 bp, Homo sapiens
gccgtgcatgacttggagggtcctacgcccatggagcctcgctcattgctagcacagcagtctgagatcaaactgcaaggcagcagccaggctggtggaggggcgcccgccattgccaaggcttgagtaggtaaacaaagcggccgggaagctcgaactgggtggagcccacggcagctcaaggaggcctgcctgcctctgtagactccacctctgggggcaggacatagccagacaaaaggcagcagaatcctctgcagacttaaatgtccctgtctgacagctttgaagagagtaatggttctcccagcaagcagctggagatctgagaatgggcagactgcctcctcaagtgggtccctgacccccgagtagcctaactgggaggcacccctcagtaggggcagactgacacctcacacggccgggtactcctccgagataaaacttccagaggaacgctcaggcagcaacatttgctgttcaccaatatccgctgttctgcagcctccgctgctgatacccaggcaaacagggtctggagtggacctccagcaaagtccaacagacctgcagctgagggtcctgactgtgagaaggaaaactaacaaacagaaaggacatccacaccaaaaccccatctgtacgtcaccatcatcaaagaccaaaggtagataaaaccacaaagatggggaaaaaacagagcagaaaaactggaaactctgaaaatccaagtgcctctcctcctccaaaggaacgcagctcctcaccaccaatggaacaaagctggatggagaatgactttgatgagttgagagaagaaggcttcaaacgattaaactactctgagtcaaaggatgaagtcctaacccatggcaaagaagtcaaaaactttgaaaaaaaattagatgaatggataactagaataaccaatgcagagaagtccttaaaggacgtgatggagctgaaaaccaagacacgagaactacatgacgaatgcacaagcctcagtagccgattcgatcaagtggaagaaagggtatcagtgatggaagatcaaatgaatgaaaagaagaaatacagagaacgccacaaagatactccttgagaagagcaactccaagacacataattgtcagattcaccaaaattgaaatgaaggaaaaaatgttaagggcacccagagagaaaggtcgggttacccacaaagggaagcccatcagtctaacaatgaatctctc

SEQ ID NO: 474958 - DNA, 4504 bp, Homo sapiens
tgagtttctgatttagtgtgtaattaggtctgaggtcacgctaatgcaagaggtgggttcccatggccttgggcaaatgtgcctctgtggctttgcggggtacagccttccccctggctatcacgggttggcattgagtgtctgtggcttttccaggtgcatgatgcaagctgtagatgaatctaccattctggtgtctggaggactgtggccctcttctcacaggtacactaggcagtgccccaccacggcacgagtggctgagatgcagggcaccaaatccgtagactgcacacagcatggggaccctgagccctacccacaaaatcattttttcctcctagacctctggaacttggaggtgattgcaccagtaaatctgagaaatcacactgccattctaaaaaggataaatgcaattaagaaacaggacaattgccaacatgaacaacggctgaaaagcagccacaccgttgtttaggtagaatagcctgtgtatttctgggaatgtacaatatctatgtcagcagcattggctgagtccgtttgttttccagttgtcttactgattgagtttttctctttattaaaaaaatgaaactgttctcatttggtgctaattaatacatcaaaatataccagggctttctttttcaaattaagtgtgcatgattgcacatggaacaaatattaagatctcaagagtgtgagggctagggaaagggacatggagggattttttacttgacttgaatatgcacctgagggtgctttgtgcaatttattgtacactgaagcatctgatacttttccagttgagtttcaataaattacaattttttaccctccaacgaaaagaaaaagaaaataacacatggatggtagtaaaatattcagctgaatatattttcactacacaccgctattagtatgcaaaatgctttgcaaaatggtatgcaaaatattttactaatgcaccaaaatgcattttggtatgcattaaaatattttactaatagaagtgtttattgaaatcctagtaattgttaaacatagtgatgtaaaaattaacaaaaatgaagaaatattctgtatagaagcttatttttagaacatcaaagacagagaaggaaaacttaagcagttgaatactaaagcaaagcatccctttgtgtcagtcatttagatctggggaaagtcattccttgaattaaagttagggaaaactgagatcggaaggttttcagcattgacaccacatacgggttataaaacaaatcagaaatacttcactatcagcatattatacatgtacttgtaattctttgattataaatcctgagcaatataaaggtagaagaataagaatattgataaattaagtgactgatggttatgtgaacacaaacacgagcaaaacctagaaatcctgggtttctagtaacatagagatctaagtggaaatttcatttctgtaagcctctattcactccatttaaaaatttataaaacttgctcctgtaaaatgcacatgctattttgaagataaattatagagttaatagcctttcataaaattaaatgttctattgagtgtaagatgaaattgttatcaaaaaataggactaaagaaaacagtcttctgtttcagcactagaattgctggatcactcagaatactacatatcctataagaagtgagctctaggaatgagaatatagcaggccacactagagatcttttctatggacagaaattttactctgattttttttatcaataataattactgttgataattatcatggtgatgatgatgggattattataagcaaaatttattaagcatctatactctgtaatgtacagcttcaacccacattgaaagaaaacataaagcatagagagaagaaacacaaattaaagtaaatatgtatataactgtgccagaagtgatgaaaatttatgaagcatactagaattacattttaatttacaagttgtacgaatatctttatttgttcttttcatatgctatagatacatattgtacaccctgaatgtcagagaatatcagagagaagaattctctttgtaattttgttttaagcctaaataattatacaaaaaaattatgatttagaattatcggcacacttcttccttattattgtcctagtaaaatgtgtgagtagaaagacatttccgtgtatctataacaattatatgatcttttgaatgctatatatctttcaatttctatacatgataagattctagagctccttgttatcgttattcattcaatgcaacttattaaaataattatcatatgtgaaacatttacaatattcccttatatattatggttatatatgtttatcttctcttaaataacctgcactattagagtaaaaatatcacattttgttaattttgtatttactgtttgataaatacaattcataatatatgcccaaagaatgtccaataactcatttaaacttgaagtactttacaataataagacagttttacatacagtattgcattagatacacaattctttgaaggaagtagaatgggttaaataaaataataattttagatgtaaagaaatactccatcatgttttattattaatctccatggcctgaatatatgttactggatatgaaagcaaaaaaggagtttactttagcaaatttttaaatattattctagttcatgactcttttgtgaaagacgagcatttatattatactaactctctttgaactgacattctgtaaatatattcagtgaggatagagtcattaggaaatgcaaactgtgttaatttacacatactcgatacattttaagcactatttattattatatatcactaaaaaaatcccatggcagacagtaatgcctttaataaattgagaaaatcataacaaaataacatggtaagttagttattaaaggaaatatgatcaacacttgttgacttttaaatatcctaattaagtatagcctatttgtttttctgagtgacctaattttgatgtttattttaaaagcagaaatacagttttttaaaatcaatttaagcataaactttcccagaacaagctatgaatctaaaccatggctggctaataattgcatcaaagtgttaatgtacagaagaaacaataattttaaaagacagttctcacaaaatttaaaaagaaccaggaacccacactatatggctgtaatattatgtatttctgtttctatccagggtgaaaaagatatatatacagaggatctagaaatatcttaatcaaagttaattcattttttaatatctctaaagtttatttacaaaataaaaacacatacatttaaaatttggggtttggtagtaataatcgctttttgattaaggcattatatagatttcataatttcttgatattaaaatgtattatttttaaatgtgatgctatagacaactgatcatttataccattttaaagatttcattttggtaaaaaagaataaaaagaaaagtttatcagttatcactttatgtacatatatatttgaaacatagttatttggtatttattcccatagtcggggggcataaattcccatatgcccatagaatgtgctcagttgactgttcctttttttatatatttttgacggattcttcgcctggtagcaatgtattgcatactatacatttaatatgaaatatcttacttcactaattcaattttagtatgtttgaaatgaaataatgacatcaattgtttatgtgcattacttcatttttaatataaatatttcaatatgttaataattatttttatatacttattttaatttgccaaattttgagatattttgggttgtagggattattcatttaatcttctcttaaatagattaagatattttgttacagaattgagatataaaataagctgaaaatatgaaaagcaaatctgctcctatgtttcattaaacatttcttttccctttcaatcattatctttatttagaagactgtataaagtttagagaatgttaaaaacaaaaaataattgaattatattaaaatattataaataattcttcacgtatttatttctgtatctatgcaccatagtacttacagccacagggaagattgaattgttacttatgtcaacctaattgacttctatattacaaattatcaagcacctagttagtcttcaaataaaatattttattaacatcatagaatttagagcatgtagaaaacgtatatgttaaataatctattattttcaaagataaaagggaaagaaattaacgagtttttctaaagttagatatcaatgatctaacagaaccaagagtccattgtctttgtttggggtctgatgctttctgccaataagtcactgatactctatttcaacttacctcattctatattatattggacacatatagtactttaattttttaatc

SEQ ID NO: 474959 - DNA, 556 bp, Homo sapiens
ctggagagaccaataggaagtatcacatctcattcagttccactgcccacagcttggccagcgagagcatgtggcacccagcagctttttctcccctgttaaacaagagccagagggaaggtaatagtgttacagctcagcgggttctgggttcttgtcccatgaccacgaagactgagaatttggaagcctgcctgcacccaggtgaaataaacagccatgttgctcacacaaagcctgtttggtggtctcttcacacggacgcgagtgaaatttggtgccatgactcggatcaggggacctcccttgggagatcaatcccctgtcctcctgttctttgctctgtgaaaaagatccacctacgtacgacctcaggtcctcagacccaccagcccaaggaacatctcaccaattttaaatcagagacaaaggagacacgttttatccgtggacccaaaactccggcgctggtcacggactaggaaaggcagccttcccttggtgtttaatcattgcagggatgcctctctgattattcacccaggtttcaaaggtg

SEQ ID NO: 474960 - DNA, 574 bp, Homo sapiens
tgctagcatgttgtcacctctcataaggatcatgaatagccataaatcttcgaaacctaagaaccaaattggaagccagaaaagtcttccaagtacagttggagaattgatgagcagtaattcatggctcagacatacagaggaagtgggatggaggggagctgtggagatagctgactatggagaaagcactggtgcacaacaggacctgaccaggccttgctcggatagtaagggccaatgggagctctccaggactgcaggcaatacatgtatgagcttgaagaggacaatcagggcacttgtacaaatcaggaagcttttgaggcagtttttatatagagagggccacacaaaaggttaccatcagtctatggctgaaagaccacggagggatcatgctctgaacacaggctgggacacacttagcaatagaggagaaatggaaaaggtaaaaagagaatattatcggtgtctacatgccaagaatttttaagcctaaatttaaatgggaaaatgcattttatattaaaagtttgaacagtcctataagtttaataaatttaagcaaagg

SEQ ID NO: 474961 - DNA, 571 bp, Homo sapiens
ggcagagtccatgtctgatcttgagagaccttttcaccatcatgagaacagcaggggaaaaatctgcccccatgatgcaattacctcctaccgggtctctcccacaacacatgggaattatgggagctacagttcaaaatgagatttgggtgtggatacagccaaactatatcattccactgctggcccatcctaaatcttatgtcctcacagttcaaagccaatcatgccttcccaacagtcctgaagagtttatcaatccgagagataagtcagctgacttttcaaaattctactctgacaatcattggctgcaggataagcaaaggaaaggagacagaaaaccagcagtgattcaagtccttttggaagcctgtctagtgaaacaagatagcaatgtgatgactaagaaagcaaaaccatggatgaataaaagaggaaacaagaaacgcatgtttttaaatccaaaacaccaaaaggaggattttatctgtagaccaaatgaaaaaggatgagatgtactgaatcatttgtctcttacatgaagaactcatctgtttagagatacagc

SEQ ID NO: 474962 - DNA, 1745 bp, Homo sapiens
ccgggcaactctgcaaggacatcagagctccagagctccccacagtctgggaacgaatagggaaatgagcgctaaactttccttcaaactccaacaccaggctcatcccaggataatccagcagagccaggcagggacctttaacccccatactcccatccagtacccacagactaagcctcaaggctttctccagagccaggctggattgcacagccttgggttccagacttgccaagcagactcagtttctgaaactggcagcacatgtgaatctagtcttcagaccaggacctgcacacctaaccaccaggctgatagcccttatgaactgaagctcttaggtaactcctgcagatgcaggctctattctatgcaaagatataaggaatttctattagcagctttatcacctatcatcacttcatatgtcatcgagtatgttagaaaaaaaggtattgcagtcagtataatggctctccaaatgtatcaactgcctaatccccagaatgaaagagactttgcatacgtgatgaagattaaggatcttcaaatgagaagactgtcctggcttatccagaaggatatgactggaagacagccacctgcaaaccggaaagagagctgtcaccaagaacctgactgtgctggcaccctgatcttgaactttcagcctccagtactgttagaaatcaatgttgatggtttactctacccagtctatgggatttttgttacagcagcccaaactgattcagatgaggcaacaagatctaacagggagcttcctttccatgatactatgtatccatatactactactgaacattattccaaaaacactaccacctgagaaggggttatatattgtattagataaacaaatagcaagcatattcattcaaatacaaattaatcttcatggattttgaagtaaacatgcaaaaaagacaatgcaactctgacataatttatgttcaagattcaatttcaaaaaaaaccatagtttgtaatttaagaaaagagaaattacttgcaaattataaacttttaacaaaaacttgttattccattttgaaaaacactgtatctgaaaaaaagtttttcatcactcatcaaaacaggaaaatataggaatatttatcaaaatgagaaatgctctcattttgatatgctatatagaacagtgcagtaggtgaatcacaggtaaaaagaaagaataggatttggttttcacagatgaagcataataattcagcaaagatttgtcaagtatgtgctacatgtattccaggtatatagaggggatagagatctaggaaaagaacattctaggcagaagggacaacaaatgcagaggttcttacatttttccttcaggtatagccatctgatttatgtataattatatttgtacaaacataccttaaaaataaatcaatgtgtaagcatttacattgtgaggtgttcttaaaaatgggccaatttattctggaattctaaaatattattcagcagtatctaagattaagaactcaaaaagggtactaactctccctaaattcaaaggccctaacttagctatgagttatatatacatatattaatatgactttcatggaaccattgtacaaattatggttgaaaattatgtcattttattaaagatcatgtttcatgtgctaaacaattcacatatattttatattatcttgcataatatcaaatatagtaattcaattcaa

SEQ ID NO: 474963 - DNA, 3131 bp, Homo sapiens
ttctgctgaaacaaataactaagattgtggaagcatctttgcattactagggacgtaaatgggagactggcatagaaagtggtgaggagccgaagccaagaaattgctttaaacacaagatgaaaatgctctgttctgtgatttttctgggtcactttgccagccggaaatctccagctggtgacgaccctgcccaagccttgccagggctcgaatttgccacaagagataccccgtccactcagcctaccagactgcacctggcctgcgctccagggcgattcccacagctaccccaactgtgtgcccagctccaagcaggatcccactgtctgcagccccacggaccgaggcacattaagagctctgccctttgctccactccagcccatggctctgaggctggcttagccccgccactgcttcccgttgcttggggtggctgccttctgcaggcagagggcagagggccacagtgttacagccttgtttgtacccacatccagtggatcccgagttcttaatgaaatattgttggaatcctgcagtttgcagccctttcaaactggtgtctttcactgagaaatatgcatttaagctccttcatgtattttcatggtttgatagctcattccttttattgctgaaaatattgcattgtatcgatgttccacagtttgtttatctattcacccattcaaggacatcttggttgattccaagttgtgtcgtatatgaataaaactactatagacacttatgtgcagtttcttgtgtttgaaggtgagttgtacattcaaatcttttgtccacttattaattgcattttctgtttcctttttgttgtttttaaaggtcttttgtatttttttgataaacgtcctttatcaaatatgtacttgtaaatattttctctcacttcgtggcttgtcatttcattctctgatcagtgtcttgcagggcacacatttttattctaatttaatgtgtcaattatattgggtctttgcatttccatataaactttagaatcagtttttcaaaattcaccaagtaacttgtgtttgcattgaatctatggatcaaatggtgaagaactgagatggtaacactactgaatttttctattcctgaatatttggtatctttctattatttagaaaagatttctttgatttatttcattagagctttacagttttcatcaaaaagaacttgaacatattttttttagatttaaatttaagttgtttatttttcatgctaatataaatggtgttctgtttaaataatatttcaattgttcattgatgatatatagtaaatcaactgacttttgtatgccaaaattgcattctgcaactttgctataactgcatattagtactaggaggtttttttccaattgtttcagactttataaatagataatcatgtcatctgtcagcagttttatttcttgcttcccaatctttaccttttattttcatgacttgtctttttgcattagctagaaatgatgagtgggcatccttgcctcattttctatcttaaagggaaaacatccagtttctcaccattaggtatgatgttactataggtttcttgtggatattctttatcaagttgagtaagtttctctctattccaagtttgctgagaggttttgtttttaatcatatatgggtattggattttctcaaatgtcttctctgcatctatttgatatactcatataatttttcctctttaacctgttgatgttatggattaaattggtgttcaaatgctgaaacagccttgcatacctggaattatgtatatttgtttttaaatttttcttagttgaattttgtgaactactttaataactgatgtataaaaacttaaatgtttatatggattgttcattatacaatctggattccctgcctcagatggttccagttgaatttaataacacctttgtttagcaaaaaaaaaaaaaattcattgagtatttaaaatatgaagcatggtagtagttactagtaatgcattgtaatgtctccgtccttaaagtttactctgaccaatattaaaataaatgccttaaatttttattggctatggatttcatggaaaaatttttacattaaaactttctaaatactaacagtttgcttatgttgactcttatcaatatacaacattttgaatttttaaatagctgtcctagagtttgcaatgtacatttacaactaataagtccaccttcaattaacactatttattactttatacagttatattttagatcactttgggaatatgatacaataaaaggtattttatctttattcctcctctgatgatttcctttctttagttagcctggaagagtaaaggggtctcaagttgcataaacaccctatccctaagagggataaggctctagtaaagtcttttattctgagaattggccttttataagaggtacattctggacccaattcaaaatggcttgtcatgaggatatctttctaagttcttcactgtgtaagtctggtcagtttgtgaagatttcagagatggtcttcacccacaatctctgtggatcttaaaaagttcagatctttatggatactataaaacaagtcattgacccttaatttgttctgcatttttcttgttgtaaagatgggaatgacaattcccaagttctttatatatttgtgctaaaacagagtgtttttgtagacaatatgaagtaaggttctaattttacttttttgcatataaatctaacagttccagcatttttaaaatgtgtaaaaattaactgaccataggtcaacatttggacttgttatattgtctatttgatttatattttgtagtttatttcagagacagcaataggtcagaaaattattggtttagggaataacataaaatgatgtgatatttattcagaagttaactgagtgttcaaaataaaggaattgtcatgaaattatttattatattctattattcagtatatagtctatgtgcttttaatttctattatgtttaattatgaacactgacatttattttgattgatgtgctgctctacttcacatggctctatttggttttcccagaca

SEQ ID NO: 474964 - DNA, 1479 bp, Homo sapiens
gcgtctttaagatcaagaacagaatagtgagtcatagaggaagctcggcatccttgatggtccagggggcttctgaggtgatcaggcagcatcagtcttcaactgctaagctgaggagatctgggaaggagtcagtcagagagccttgggccagagtcacaggttctctgggagtggctgccaggagagttggacagtccgatttccagtgggttccctcacagttgggacacagcttaggaggaatcccaggttgtgggcattccttggcccagtggccagatttccagcacttgaaacaaaatcctgggggaggcggtcctggaggaacacctggccactgcggtttagacgttttgaagttcttgtgtactggaaatgtggctgggatttctctcacagtggaggcaagtaattgcaattcagaaatatgttgctacttggctgcctctattctattattgtacaccttgaaggcgagttagtacagaaaaacatgagaaatggttggaagttaaatttatctttgtattttgaaatacacatggaaacaagaataacttcttcagtattacttattatgcagattataatttcacagttgttttctcacatctatttcatcgagtctcctaataaaaaataataattctaacacaactctaacagtgactgagctgccaaaaatatcactgccaatgaattaaatcatgttgtttacaataatttgctgactcttaatctgaagaaagtactttgtggaactaatggtgatgctaattgtgcatttctatgctctgaaatgacaatgatatcataacaagttaatctcatttcaatgtgcatttcggatgcaaaccacaaaatatattacaaaagacattttgattaaagtttgctaaaggattcatagttctatgctatcgattgtctaacataaatgaagttgtttttcatatgctttttatcagttttctaattgtttatgagtggaaggatagtccaaaatgcattaaacagttttaatataatttaaaatgaataaggaaattgcattgatgatctatttgggcaaaaaaaaaaaatagaatgtacaaatatagtgtgctctaatcaaatacttttcaaaattcttctttggatttactgttcaaaattatatttgattaagactctaccctcctatgataattgattactgttccattaagtatacaaatttcaacaaatataaaattatcaatatagcattttttttaattttatgagaaatatgtgtagatttggcataacttctatgccaaatttgatagaattcatcagtggtagaaaaaaatctatgcctaaaagtttagtttattattaaattcatttctttaataggtataattaaatttttattttcattcttttaaatactttaaacatttttttcttttgaatttatctgctttaggggttatgtaaaagagtactgtc

SEQ ID NO: 474965 - DNA, 1819 bp, Homo sapiens
gaaaccatttttcctcctacgcctctggacctgtgatggaaggggctgctgcaaagtcatacagtatgtacagtatgtatcagataaaagtaatgaaagtaagatctttactgaatcttcactgtgaaaacctggttgggccacttgaggtaatgccaataacaaatgggtatccctccttcaagaatgggttccccaggggttcatcactcacactagctcacattcagccttcagcaattcgtcaatactgccatttgagtgctcccacaatcgtgacagcacaagttgaaactctaaggctttgctatattcagggtaccactgtggcaaaatacagacaaagtttcctgtttgtgtttggaaagtctgatgcaacatggctctaccatcataaccacaatgtagtgtcctgtggatcaatgactgagccaaaagcaagaatctgtaggctgggtattaatgaggacccccacacatcggaggagaaaatcaaaacacagaaatttaaaggaatcaaaatggatacaatgttaacaagtaaactgggcaactgcctcttctgttgtgtattggaaaaagaggaggcactgatggaattctccatgagttctgctgtacactgcagcttttgaaatctgagtctcacaagaatctttacttttattgaactgcttttgcttataatttcttacatatctgatatgcacttaaagtacattcacatcacccacaattaagcagaattgacagtctaataattatttatttttatattagctttcagacttattccccttttagtcagaatttaaaataaggatcttaatccaatagaatccatatgcttaatctactttgtgaagaaaaatacaagatagtttgttgtgtatttatactaattatttgggttcctcaagcaatcatacagcacagtatgtcccttatgtattgattagtacctcttcccaattttgcatcattgtgtgtttttctgattatgtatagctgattcacagtcatttgttaaacattgcccattctcccttcagttaaaggaattctagtttggaaaacaagccaacaaacaaaatcagatgcattgaattagagtatacagcgataactgaaattctgcatgtaatatcccattaactgcttggattccttccacttatttggttttaggtttataatctgcttatcctgctcatgtatttaacatggcacaaagagattgtacgtttccacatctatttttatactttgccttggttgctctgtggaaggtatgcaaatctaaagtcaaaggtacaagagcttatctaagtgtgaggtcagatatgagtgctttggttactcatatctgagaccacaatcagcttgcatctaattatctcatgaatgatgacagtgtatgtccataattgccttcttcctaagagtgctgctgattcactgactcattaaatatgaccatttactctattttgtattgtggaagggcaatctggcaacagaccactgatgccgaagggcaagaagctaatcctaaccactgtatatgagtgacagagaagtttgtagaacacaaataaaattaatatcatttaaatgaagaggacttgagaaaattcatagaatttactttgaaatgaagcaaatatgaaccaaaatgtcagggtatcatttaaatattttattaattacaatttataacaaaatagtattcagataattgcaataaatatttaagaatcttaaatatgttacccagtaattgactatcttcatacaggaagtaaacttttagcattga

SEQ ID NO: 474966 - DNA, 549 bp, Homo sapiens
ctctggctggcatctggtacataaatccacgaagatgattaaaaaccagtgcaaaaagtctaaaaattccaaaaaccagaatgtctcttctcctccaaaggatcacaactccttgccagcaagagaacaaaaccagagtgagaatgcgtttgacgaattgacagaagtaggcttcagaaggtcagtactaacaaacacctctgagctaaaggagcatattctataccaatgcaaggaagctaagaaccttgataaaaggttacaggaactgctaactagaataaccagtttagagaagaatataaatgagctgatagagctgaaaaacacagcacgagaactttgtgaagcatacgcaagtatcaatagccgaatcaatcaagcggaagaaaggatatcagagattgaagatcaacttaatgaaataaagtatgaagacaagattagagaaaaaatatgaaaaggaatgaacaaagcctccaagaaatatgggactatgtgaaaagaccaaaccgacatttgattggtttacctgaaagtgatggggag

SEQ ID NO: 474967 - DNA, 846 bp, Homo sapiens
gtaggtagttttggaaaaggcaacattcagttggacactttcagtgccgctttgccagccagaaacttctgtggctggtggcccctctgcccgggtttcactccagcccgctcaacctggcaggctgcactcgactcgctccctggcctggatcccgtgaccaccatggctgtgtggtcaccatggtccagcccatggcaggaccagaagtgccacaaggggcttccatgtctgggagccagcattcagacaaggggagcgctgtggcaccccaaaactcggagacaacagtgaccacggaactccaaagaggtgtcacagattctgctcggggagttctgaggtgtgggcccccaggaagtgttacagttctctctcattcccgccatttacagccgagcgaacgagggcgtgtcacaactcattcggtcccgctgcctagatgggcgagccaaccagaagcgtgctgctgcccttttcactgccactatgcggcaggttccaggttcttgttctgtgaccagaagaatgaggtacgtggacaccgtttcatgaccctcagaaaccatacaatactaaatgtttattattcaagctgctaagttttaagtgatttgttatgatagaagagataactaatgtagtaccaagtgcttggttcacttccaatctctctgaaattttaaaaattcatttggaaataaaaatgaaattataactactcataatttgtgggttgcagtggaagccgtgcttgagggaaatatatggcattgaatgtgtatattagataagaagagagatctaaaatcaataccataaatttccaacttaggacactagtat

SEQ ID NO: 474968 - DNA, 559 bp, Homo sapiens
ggcacactgtcccaccttcctcactaggcagtgagtcttgcatttcgtacccactgatggagatccatggaccttatgagaaagtttgggtgatggctgtggtgagggttgaaggggtggaagtagaatccttggaggaaggtttaaatcctcttttaaaaacagagtggtctaacctaacctgtccttttagaaagccgtccgggtctatactcctcttacacaaaacccctaagcccttctgtcttttatgccttaatttcagtcagaccctgtttagagcagtgaaggcccagagtccggctgagtcaaaaattctctttaagcgtctttggagagggagccctgtgaaaattgtgggaacatacttctcatttctggcctctctgaacttgtgtcagctcagtgatttcaggattggaaaggatctagaaatagtaacagaaataataatacccaatatttattgaatatttgctatgtactaggcactgtaaaactacatatgtttaattctcacaatgacccaatgaggtggaggtctcataggtatctcaaa

SEQ ID NO: 474969 - DNA, 583 bp, Homo sapiens
cgggtgacactgagtgcagggaatgtgatgagacatactttcctgagctccagaatgacaatctctgactaccttctgggcatgtccacaggaacatcccatcaccttccacaccaacccctcaactatgtttatgctccaggaccccagaattccctgcccaaacagctccaggcttcttacagggcctatgcaggcctctggcactggtttgtcctctggagggtgccatctgctgcaggggcagttcttagtgtggatggggcattggcggagcttggctgtgcagactggagtgccacttgttgggctcctcatggtgcaggaagacgggtaggctttgggtcactggcctccatggatagtgtggtcccaggtcctggcctgtcaccctgtattatccagctctgtgacatatcatcatcatgtttaaacccctcctgccatcttgatcagatcatcctgattagccagttactaacttctcttgatgccacctccacaacagctcttgggcacactcccttctctccacccacactgcctcggcctctcctctgttctcctgggtaaagcaaaataa

SEQ ID NO: 474970 - DNA, 672 bp, Homo sapiens
ggggcactcaggatggctgagactggcactagggagcctttgctcctccagggagcatgagaaggcacatccaggaggtggatgttgttagtgatgatgatgaagaaaataaagtacagaaaggctcagcaacttgtacaaggacacacatacagtcagcggctgagtcaggatcccagcgcagacaggctggccccagtgcccccgtgcctcccttccctgtcatcaagggctctgggccctttactcccttactccacatgcacctttgggctcctctggcttctttcatggtgaccctttctgcttccctcagtctggattttattccaggacagatttatctctgcaaaggtgggagagcctattccctgggtctgggctgggggcgtgatgtgctttgcaagggcctggttaggttttgcacaagcagtattgtatgcaccctagaagaagaggtgactatgggaaaagctgtcctagagcctgaattccacagcccacatcccttggaaggggattccaaggcccacagcatgactacatggctacgctcctttggagtggtgcaagtgggcccacacactttactatcctccttgcccactcccaaaattgtcccaggtataattaaattagtgaattaaccaaccccaagtccacgagctcatt

SEQ ID NO: 474971 - DNA, 478 bp, Homo sapiens
gattaaagtcctgtctgttatggtcccatctgggagtgatgggagacagtaaaagatcatcaggcattagattctcacaaggagcgcggaacctagatccctcccataggcagttcacaatagggttcgcactcccaagagaatctaacgctgctgctgatctgacaggaggtggagctcaggcggtaatgctcccttgcccactgctcacctcctgctgtgcagcctggttcctaacaggccgtggaccagtgtcagtccgtggcccaggaattggggacccttgccctagagcaactattgtgtttacttgtgtcttctcttctagattcagtttcttaagagcaagaactgagtcacttccgtttgaccagcatgtagcatcatgcctggtctgggtaagagaaataaagattatggataatccaaaagctttcaatctcctttcatgtctttcacaataaacctttgttgaaga

SEQ ID NO: 474972 - DNA, 485 bp, Homo sapiens
cccagggccctgatgttgtatgtacacaagggactctcctggtctattggttgcaaaaactgtgggaaaagcatagtatctgggccaggtagcactgtccctcacagcaaagtccctcatggcttcccttggctagactgcttgtgcttcctggccagcatcaggggctgctcctacatcattccatcattgtctccttgggcaaatttcaacctagttcaaccatccatcaaaatcctctgctgtacttacaatagtggtgccaaatgtctttatcctatgcaggaggatagcaaccaggatgaagaccagcatgagaagctttgcctggtggcccaccttctgccagacatgatattccctgataacctggaggaagttgactatcttgttgggatcatggactgcagcagcccgggagaggaaaggagagataagagcaaggcagcactgggctatgaggttctggagagcaaggcctgact

SEQ ID NO: 474973 - DNA, 1023 bp, Homo sapiens
ttgctctcctcaggctctggatgtatggaaatgcctagacgcctaggcagatgtttgctgcagaggtggggccctcatggagaacctctgctagggcattgtgggccggagaccccacacagagtccctactgggatactgccgagtggagcgttgagaagaggaccactctcctccagaccccagaatggtagatccacctacatcttgcatcatgcacctggaaaagccacagacactcaacaccagccagtgaaagcagccaggagggggactataacctgggaagccatgaaggcagagttgcccaaggccatgggaacccccctcttgtatcactgtgacctgaatgtgagaaatgaagtcaaaggagatcattttgcagcattaagatttgactgccctgctggatttcagactggctttgggcctgtagcccctttattttcaccaatttctcctatttggaatggctgtatttacccaattcctgtacccccattgcatctaggaaaacctctagaggaagtgtggctctgtcaacaccttgattttggcccaatgattccgatttcagacttctcacctgcagaattatggaagaataactttatattgttttaatacaccaaatccattgtaatttcttacagtaaccacagaaaactagtacaaccagaaaaaataaaaatgttgcatattatttcatttgcatatatggttttaatgtttgatgctttgtataataatatatcttgttttgctcaaatcagtcatcacctcaatgcattttattctaccatagccctgaaaaaaatagtaacactataaaagtcatcaaaattatcagaaacaagtctgtgaattaccatattttgaaaacgttttttaagatatagtaatagtatgtgacatcttctataccacacagaaaactgttgacttaaaaaagtttggaagcatttacttaaactaaaggaaatccaaatgtttaccttttatctgaaagaaaacgaaaaactc

SEQ ID NO: 474974 - DNA, 618 bp, Homo sapiens
tccccagagtgtgatgctccccttcctgtgtccatctgttctcattgttcaattcccacctatgaaaggctcacgtgacccacagagagaaagaaaaacagtgtggtgtgacagccgacctgacagccatatgaggaaggggaaccccctactcctggccaagggaggcagtgagtgggcacggtacccagccggggaacctgtgctttttccagggaactgtggaacccacggattggaagattctactcggcctgaagtgaaaccccagaaaactgcagcagacctacagaagacggacctgattattgaaagaaaaacaagcagaaagcgacaacaagagcatcaacaacaaacacaaaaaaggcccccacaaaaaccccagccaaggagtgcctcttctccttcaaatgatcgaaacatctctccatcaagggcccagaactggatggcggatcagatggatgaattttcagaaataggcttcagaagatgggtaatacaaaactatgctgagctaaagtagcatgatctaacccaatacaaagaagctaagagccttgataaaaggaaggaagaattgctaactagaataaccagttagtgaggagtgtaaac

SEQ ID NO: 474975 - DNA, 2115 bp, Homo sapiens
agaatttaatccatgtacattcaggatgatattttttctcattaccgcagggtgcctgcattcttcggcccgtgacccccttgctccaccttcagtcggcaatggtgatttgcgttcttacattgccccactattctcttcttcttcccttgttactttcatggaaactagtgattacattgagttcactaagataatccagtattatctctccatctcaagatccaagtttctaatctacgtcattttctctatctctgaaaaacatcttttaacatttcttgaacgtaccctttgcaatattgtgaaaagctatgcaatgatgtatgaaatcaaaggaacagtgacagagatatgtcaagtggaatggtgtggcaatgattccaagatactacagcaaatgaaaataaaattagaaatcctaaagaaaaacacagaaataaccaaagaaacctctctgatagaaaaattacgcttcaaaaaacggaagatttctctaaatgaatgtttctcctcacaaatataacaaatagaaaaatagctttgtgaactgagagtttaggatgaagacagaaacatttttgaataaaagggaaaatgaaaagaagagcaaaaccgtcccatcatacaattagcaaatgaattagggctatgaggaacaatatacacaggtggaaaccataagtgtaattaaaatcataactcctcatttcatttttgggtttaatgattttttttatcttaagatatgaatctatttccacttctaattattctgtatttttattgaatcttaaatattctgtgattccttttgaaaattcttttcaagaaaatatacaccttctcaagattgattgtcttacctgtaaaaatagtaaaattatataagaatatgaattgactgctgtattttgaagagtaaacaaaacctggaacaaaagaaatggcaataaagtttgtgtgttaactacgtgattatttcataaaatatgtgttttagtaataaaatccaatccaatgtcatttaacaaaatgttttattagccaaagcccatctaagctattctttgatcaactgttttcatcatcacttttgtaaatattttgaaagaaaataaggcagctgaagataaaagccagaggcagggaatgtagtgctgattttgggttaatggtgtcctcaagagttccagaaagtgattttaaaatcctgagaacgaaaggttggtgagtcaggtagtgccacacaaaccattttgtccatgctttctgaccctacatgattaggggtcattctcacatttgtaataaatcatatagattaatttgacacaacacccagtatcttttatcttcctatgcacagagctccattaattgaaaaaaaaaaagtcagaaaaagcccagtaagcaaaataaaaacaccttttttcaaaggtgattattcttattatgatctttcaaatttcagaataagaatgagaaaatcatttatctgaaatgctgtttataccaaaatgaatttgactcagggctatttctaagaaggggcctttctgcaacattctggcacctcttaaagcaataagaaaagccacctttatttcttggccagtggcaatatttggagggtgagttaattttctttaatttttcttataattctgctttgcctacatctcagaccaaaagccgattatattttcatcaacaatggatctagaagaaaaagtaaagtattttatgtctgcagttttcttttatattcatatatttaaagtttaattttgaaatttatttaactcaaagtaattggatattaaagaactatgccagctataaattattctaactgtaaattatttaaacaaataataaaagaaaagctttgtttcattttcttcattattactctatgattgactactaaaccaacttttaaatatttaaaattaattacaagctttatcaacaagttcctcttattttccatcctactgtcagtcttttaaacaataattgtagctttttcaaaaggtaatgtttaagagaagcaagaaacacaaacttgcaaatagcttttcagtagtaatattaaatggttaggtttac

SEQ ID NO: 474976 - DNA, 553 bp, Homo sapiens
cagtagaggagcttttgagccaggatgagccaggagaaggaatttcacaacagaagacaatgtcatcagttaaggcaggaacaggccattttcacttcttctgtggtagaatgtcatcagttaaggcaggaaccagccatctggatgtgtacatgcagagaatcatggcccctcaatcaatttccagacttcaaccagtttacagactcagacacccagaatgaaggagatgccagttttgagtgggatccagaacaggagaaggctctgcaacaggtccaggctactgtgcaagctgctctgccacttgggtcatataacccaacagatccaatggtgtttgaggtgtcagtggcagatgggaatgctatttggagcctttggcaggacccaacagaatccacccccaacaccactgtttgcttctagacctataactagactcaagttttggcaggcccctagaggtgagggtcagagtgtgactcatgaggagaagcactacactctaaaagaactgtttgagttttcaaatttatgtaagcagaaatct

SEQ ID NO: 474977 - DNA, 1401 bp, Homo sapiens
gaccccagaagtatagcaacgtataaaagtatgagatttgggtgggggcacagccagagcatatcagatgcattattattaactaaagacaatactttattgaaatgttttaattttatacccaatatgttcttgggaggaacactacagaattcaagtaatatttcatcctatcatatgaagcgaacatattttcaacataagttaatagtgttaatgttaagcctggtcaccagggtgacacagtgtttgccagacttccacaccagaaatttaattcccctgcccccatctttcatactgtatgatttgaaagtattcactatttgcagcccatatacaaggaagaagagaattatgctccatcttcttgagggtaaattaactatatacattattggaattactttacatcagtgatttatttattttctttcacttattattctattcaattatgtatttgtatcagtatttacacatgaatttttactttgagttataataaaatactactttatttttttactctaattttttcagctttagcctttgggagctatttcagaaggctcctgtgtatttgtgacataccccatgattggcacttttggaagtcttcttttgatgcactaaaggatgctcgagatttatctcatctattttccgtttccatcctagacacagtgatttatccgaagagcactgactccttttacttgaaaatggcattagaagtcaagatctgaatgttatctgtgcttattaaccctggagtattttgaatctagagtctctcagatggcagaacaagtgtatatacatatgtatactaacatatgcacacaaaatatctgtacataattctatacatatccttttgtatctatatcaagttaaacataaatttatatagatagttccgatattaataaattagcacattgatcattctagtcttgtccttacttgtttagcctcagactcccacagtgaaaaacatggatggtattcatcatttacttattctattctagtatacaaggttagtggcttcagaattattaaacaatactctgtaagaaacaaatttataatgtaggatacagtgattatatgacgttctttttacctttagttttatagtctaaacattttcagaattacttaggcctgcactttctccatcaccacttttagtgaatttatttcatacttttgtaacacattttttatcattatttatagtccatttggaattactgaattaccctaaatattttttaaatatttgtatacattaagaatactccttgtgatgaaaagttttatgtaaatttattttacaaacaatttaaaaatagccagcttaatgccaataagtcatattttggaaaccaa

SEQ ID NO: 474978 - DNA, 867 bp, Homo sapiens
tcatcaacagggagtgtgtcaaaaatacacaatttcagttctagaattctgaatggctatcaagaagttaaatgattaaatctaaagttgtaagacaaaacttgatcaatgaaaaatgggacaagaatttgttgaaggattttgaccaaaatgctgatagtgatatgaacaatgaagtccaagctgaagtgctctcagatggagatgagcaacatattgggaaatggagcaaaggtgactccagctatgtgttagcaaagagactggcagcaatgtgtccttgctctaggaatctgtggaactttgaacttgagagagatgatttagggtatctgacagaagaaatttctaagcaaaggcaacagtttgggagcctgcacctggatttcagaggatgtatggaaacacctggatgcccaggcagaagtctgctgcaatggtgtagtcctcatgaagaacttctactagggcagtgtggaaggaaactgtgggattggatcccccacagagtccccactggggaactgcctagtggggctgtgagaagagggctaccatcctccagaccctggaatggtagattatctggcagcttgcaccatgcacctggaaaagccacagacattcagtgccagtccttgaaagcagccatgaatgttgtatcccacaaagccacaagggcagagccgcccaaggcctttggaggccatccagtctcaaatgggtaatttcttagacacattatgtaattgggagaaccctctaattgttctttgcctttgaggataagaactatcattgtgaagactaagtgtaaaactctaaaactgccaccttctatgaggaatgtattttcatgtttctgcc

SEQ ID NO: 474979 - DNA, 808 bp, Homo sapiens
gttttgacagcttcccccatcccggacccccaacctaccatgggaccccatggcaccatgtcagtgacctctagcagcagcatggatcaatgccatttttatcttaggctcatcatgagcctgggttccaaacacaacctctctggcctccaacaggtggctctctatcaaccggcctttgtcagtctgccctctattcttttgggggcttccggcctgcataagatgattgccaaggcctctttcagcaagaaaattctatttggaaaggctacagtacaccacagatcaaggaccaagttttcagactgctccacagaagttaaaggtctccaactttgtttccaagccaaactctatcagctgttatctttattctgccctcccctaatactctctcttttggaagctcctcttgtgcagaagtggtcctcaacatcctacgcctgatcctatctcttctaacagtggtctggccctatgtctaatgtatgaacagtctggtatgcatcctttgaaaatttgttcatgtacatacatatattcacattttaaaacaaaaaatttactcctatactttcttccaagagttttatagttttaactcttacatttaggcctttgatccattttgagttattttctgtgtaggacatgaggaaagggtccaactttattcttttgcatggacttatccagttggcttagcaccatttgttgaaaagattttcctttcccctttggactgtcttggcacccttgttgaaaatcaattgaccataaatgtgaaggtttgtttctggactct

SEQ ID NO: 474980 - DNA, 1226 bp, Homo sapiens
actagaggagaaacttgctgatcgggctgtgaggaccatggaaaagtacattacccagttcagcaaaactaaggagagaattgccaagcggggtggaaactcgtggactgtgacatcatactggctctatgtgaccatcttccagaacatttccaacttgagggatgtcttctacagggaaatgagcaaactgaaccacaatctctccgaggtgatgagcaaactggagaagcaacattccagtaaagtctttgtggtgaagagactatcaagcagcagcaggcgctctttagtcatttctcccccagttcgaacatctacagtctccagtccacttacctcacctactagtccctctacactttcctcgaagagtaagagtgaatctgtctcagcaactgaagatctggcacctgatgcagcccagggggaagacaattctgagatcaaggagctcttagaagatgaggaaatagggaaggaaggatctgaagcaagctcctctgaggaagaagagcctctactaacctgcaacggcccctcccaggcccagccctctcctatcattgagagtgccaggtcccaggaagaagttccccccagctcccctgctctatcaccaggtggagccctaagcccttcaggacaccctttatcatctgccgcagaagtagtcctccgaacccgcaccgcaggtgacaaatctgaacaatcaaagaagagagcctctatccagaggacctcagcaccccctagtaggcctcctccacccagagccactgcaagccccaggccctcctcagggaacataccctccagccctccagcctctggagggggttcacccaccagccctagggcctccttggggactgggactccaagtcctaggacctccctagaggtctctcctaatccagaaccaccagagaagccagtaagaactcctgaggccaaagaaaatgaaaacatccacaatcagaacctcgaagaactttgtacttcccccaccttaatgacatctcacattgcttcagagcctggagaggcaaagaagatggaagacaaggaaaatgataacaagcttgtctcagctgactcctcggagggccaagaccagcttaaagtctccacagtaccagacaagagcaacctcacagcacctgaacctcaagaagaggtatctacaagtgaaaatgcacaactctgaagagaaactgccaaga

SEQ ID NO: 474981 - DNA, 983 bp, Homo sapiens
tgtctggcacaacttctggcctgcaactgtgttcagtgatgatgacgagcaaggtgacaagtttgaatgattctcctgaagaaatttttgacatcgataatgaggctccagttgttcattcaccacctgatggtagaataaccaaaatggttctgaatcaaggtaattgtcataatagtcataaatttgattttgttaacactacagaaaaagtgcctatagacaacatggtgaaaatgtgtgatgggcttattgaaggactagagcagtgtgcattcattcaagaacgagaaatcatgacagtttacaaaatcaaagagacttctgagacagcaaccgttgttaatgaggcagaagagtctagaggaaacatttttaaaagccattcagcagaatgcctcctagtccctagaagacccacttcctggtccttcgacttcttctgatgtttcttctcacctaaaaatataaaacacagtggacagtaaccttttaatcacaacacagcatcataggtggaggctgaaagcctgctgttattcgttgctaccgttgtttagcagctgatgcaggtgttctagtgaagctactgtgctgctgagttatcctgaacatactattttttaactgtattaatgggatgttgtttttttactgttaagtacttatgtgtgaataagtgaaaatgattgttaatttgtagcatataaattcaaagtcaggaatgaggatgatgtcaaacaaccacagattgtccacatgagtggctgagataatgacacctttgccatctgacgattcagtgtacacaactttgtttcatgcgcattattaaaatagtgtattaaatgagcttcaggctgtgtgaataaggtatatacaaaacataagtgcactttgtgtttagtcttgggtctcatatctcattatgtatatgcaataacaaaatcccccaaaatcccaatccaaaactctctgatcag

SEQ ID NO: 474982 - DNA, 1469 bp, Homo sapiens
gtgttctaggttgggaatggagcatgatggacaaggcaacaggtgtggtgatgagactgctatgggaagtgtcatggctcccttggtacaagcagcattccatcgttaccactggtcccgatgcagtggtcaagaactgaaaagatatatccattcctatgactgtctccttgatgacccttttgatcatgattggcctaaactcccagaacttcctggaatcaattattctatggatgagcaatgtcgttttgattttggtgttggctataaaatgtgcaccgcgtggtgctataagggtcattgcatgtggaagaatgctaatcagcaaaaacaagatggcaattgggggtcatggactaaatttggctcctgttctcggacatgtggaactggtgttcgtttcagaacacgccagtgcaataatcccatgcccatcaatggtggtcaggattgtcctggtgttaattttgagtaccagctttgtaacacagaagaatgccaaaaacactttgaggacttcagagcacagcagtgtcagcagcgaaactcccactttgaataccagaataccaaacaccactggttgccatatgaacatcctgaccccaagaaaagatgccacctttactgtcagtccaaggagactggagatgttgcttacatgaaacaactggtgcatgatggaacgcactgttcttacaaagatccatatagcatatgtgtgcgaggagagtgtgtgaaagtgggctgtgataaagaaattggttctaataaggttgaggataagtgtggtgtctgtggaggagataattcccactgccgaaccgtgaaggggacatttaccagaactcccaggaagcttgggaagacaagaggcgctttcactttacccaaaggagctcgtaatatttctcttgctgaaacaagagaagctaaaaacgtactggctattaagaaccaggctacaggccattatattttaaatggcaaaggggaggaagccaagtcgcggaccttcatagatcttggtgtggagtgggattataacattgaagatgacattgaaagtcttcacaccgatggacctttacatgatcctgttattgttttggtttccagtacactaaatatggatgccgtaggaaaagtgataataaaatggtccatcgcagcttctatttataacatttttgtcatttactttcattctgagatcttaggagggaatggagaatgtgaaccagatttttaactatgtataatagacatgaccaagagagaaggaaaccatagtgaaaacagaaggttatgtaaagaaatcgtaagtgtgtcttagcaaccattagatggattctgttttaaagattcactgtcagatgtttaacaccattaggcaatgtaactgagagtgagttggtgctatccttgaaaactgccttcatgcctgaatctaacagggcaacttt

SEQ ID NO: 474983 - DNA, 704 bp, Homo sapiens
cacaacctgagaaagggcaaagtaatgtggcgttgcgacacctcagggataagggtgtgggtcactccaccagcagaggtgtcagctgcaggaaataagagcaaacctggagaagctgtccccaagctgagtaaagaagatccacgctcaccattgtgggtggacatcaccaatccattgctggcccagatgaagcaaaaaggcagaagaagggcaaattggctctctctacttgagctggaacatcagtcttttcattcccttggacctcagagcttctggttggttcttggacctgcaaactctaggacctacaccattggtttccctggttctcaggcctttgaacttggaccaaaatacaccactggctttcctcgttctccaacttgcagacagcagacaaaggttccatttctccaaggaatcttgacaagaatacttatattagtcattcgttcttcctgcatgaacatgcatctaggtcttgtgggagcactgtaagtaaaatcagaagaaaaaaacccactagtttattaaaactcttgcatgggcagaagctgctttagttctcttcttaaatatgtcctattccattacctttggccccttgagtgttctagtatatgttgagtatcccttatttgaaatgcttgggacaaaaaatgtttcagatttcagatttttcagattttagaatattt

SEQ ID NO: 474984 - DNA, 613 bp, Homo sapiens
cttttctaattatgcctgaaagccccactcccttgttagggagagacattctagcaaaagcaggggccattatacacctgaacataggagaaggaacacccatttgttgtcccctgcttgaggaagaaattaatcctgaagtctgggcaacagaaggacaatatggacaagcaaagaatgcccatcttgttcaagttaaactaaaggattcgacctcctttccctaccaaaagcagtacccccttagacccaaggcccaacaagggctccaaaagattgttaaggacataaaagcccaaggcctagtaaaaccatgcagtagcccctgcaatactccaattttaggagtacagaaacccaacagacagtggagcatactcactgctaaaggagacttgtggctgtcagacaactgtgaggaaagtaactgaaatctaaatccccatggccctcccttatcatatttttctctttactgtcctcttaccccctttcactctcactgtaccccctccatgccactgtacagccagtagttccccttaccaagagtttctatggagaatgcggcttcccagagatattgatgacccatcatataggagtttatcta

SEQ ID NO: 474985 - DNA, 830 bp, Homo sapiens
ttcattgttatcagaagcagagaaatggacacgcatggtgaatctggcccaggctgctccttggttatagagatcccatggaaattgaaggatggtttgatggaaggaagggagggaaggagaaagggaatctctcctgggaaaccaggactccagagaaacatcctggacaagctgcccaagagccatggttttataagctttctggagactttgacatgcttcataaattgctttttctccaaattctcattatttgaacttttgtttttttactctgatagaaaatatgtgtatttgatagctactaatcagaatccttatcaacatagtactctaagcaactactaccaattaattgtggtagatgtcaactgtgatgggccgaaatctaaagatggcccaactgctcttgccctaatcctcaagacaagaaactgtgattgtgatgggatatcatgcccatgattatgttatcttagatggcaaaggcattttgcagatgaaagctctcactctcctaatgtgaatttaagcaccttttctctggtatacatgaattatgcataccagatagcattactttgccaagcctagaaactttttacttttatattctatcatatatcacatgactaaaatgtgatatgattctgtatggatgattctgtatggataaagatctgtccaaggttatagatcatctcactcaaagatttagaataagctcacaacttttaaatgacagcttctcttgcttttatttatgcatacctatttatattatacatacacattcatatttataagcacagaaataatttggaagg

SEQ ID NO: 474986 - DNA, 1001 bp, Homo sapiens
cggtctacagcctgagacccatcaccagagccctcgcttgctcttggcacctcctctgcctgggctcccactttggcggcatttgaggataccttcagcccactactgcactgtgggaacccgtttctgggctggccaaggccggagcccactccctcagcttgcagggaggtgtggagggagaggcgcgagcgggaaccggggctgcgagcggcgcttgcgggccagctggagttccgggtgggtgtgggcttggcgggccctgcactcgcagcagctggccagccctgccggccccgggctatgagggacttaacacccgggccagtggctgcggagggtgtactgggtctcccagcagtgccagcccgccggcgctgcgctcgatttctcaccgggccttagctgccttcccgcggggcagggctcgggacctgcagcctgccacgcctgagccttcccacccactccatgggttcctgtgcgcccctagcctccccgacgagcaccaccccctgctccacggtgcccagtcccatcgaccacccaagggctgaggaatgcgagggcacggcacaggactggcaggcagctccacctgcagccccggtgtgggatccactaggtgaagccagctgggctcctgagtctgctgtaacactcaccacgaagatctgcagcttcactcctgagcccagcgagaccacaagcccacccggaggaatgaacaactccagacgcgctgctttaagagctgtaacactcaccgcgaaggtctgcagcttcactcctgagaccagcgagaccacgaggccaccgggaggagtgaacaactccagacgcgctgccttaagagctgtaacactcaccgcaaaggtctgcagcttcactcctgagccagtgagaccacgaacccaccagaaggaagaaactctgaacacatctgaacatcagcagggacaaactccagacgcaccaccttaagagctgtaacactcatc

SEQ ID NO: 474987 - DNA, 1197 bp, Homo sapiens
gttaagaactaattcattgcaattttcttttttttaataggacataagttgaatttttttcaaaggctttttaagcatctgtggagcatctttcactctcgctgtatctcagtcagggttcaaatgcctctttctgagcaccgcagcagcattcccttggaatcatctcagctttctcttgacattcagcagaattctccacaagctctggaactcttcatggtcctcttgaagaaacccaatgttaactcccttcacaaagtgactttatgtttggcctctgatgaaatgctcgggggaataactctcaatagttcttcctggcatcatttccatcgccagactttcagcgaccccgagctgctggaggtgagggtggggtccctggaccctggctgctcacagctcacactgcacatcgcacccctctgctctgcagtgcatcctgtcctgcgggacgcccttgctagcggggtaccggttggcctctgcctgcgggaagcagtaagtgacaagagcctggaaggcggtcgaagccaaggatgcgcctcctctttcagctcccgcggtggcggaggttccagctgctgaggaggcctatctccagggcctctgatccccgggtttaatgtcctctccttcccgctgctgtgtgctctttcttctcccttctgtgctctcagtcctctgaaacttgttttgaccaattgtttgtgtgaaattgcctgtttcctctatttgaacgaccaggagttttcctgtgcggacactgaccggcataccttcctcgtaaagttcccccaaccctctcacttaatgacgcgcttcaaaacggtgattctccaatttcattcattctacacttactagctggaattgttttgactagaacaactaactgcctcagccactagagctatttggatttggaaggcagggtccattccacagcatcttgcttgataaagagcttcatattggttaatccctttttttcacttaacaataggacatgaacatcactttgtatcatactcatcactccttttgttgtaactcattcctatctagaatgtcagcttgatgacagcagacaccttcatgtgtgcttatattataaatccagcactaacataaagactgatacatggtaatgataataaattgaaattgaataaataataaaggggcaagccc

SEQ ID NO: 474988 - DNA, 636 bp, Homo sapiens
gatggaccgcaggcctgtgttccgctcccacacacactcaagatgcaatttctcctggcccatagaagtgccaatttaggaaacaaagatgacctgcaatattcacttgagccacagccgactcctatgtctttggtgcttcaagctgcatgcctgcaggctacttcatatgttccccctcttggcttagtaggatctctccctttctcctgccccttttcatctggcagcatgagaattttgggaaacaccctcatctccatccagttgggggagtgtttcaccaatgtgtatgaccttgtgggaatatgccgacaaaatagattgttattactgtccatggggcagaagaggagttctcagacgcagctgaaagaaggtagaatttatcctgatgtaatcattggcaaagggaaaactggtgtctttctggagaccaaggtcagtaatagccttatacaacaggtgatgtttgagggcctattactgtcatctctgttttacacctgaaaaaactgaggcttagagaaattaagaaacttcttgagttcatacttgtaaaactctttacctgtatatacatatacatgcatatgtgttgtgtgaatgtatgagaaagtacatgctagacaaaag

SEQ ID NO: 474989 - DNA, 1670 bp, Homo sapiens
ctccgcgaggacacagatctgcgctcccgaggaagtccagccaccccctcgccgcccacccccacctctgcaccagggcacaggaatggtgcagcaagctaggctagagggctcgggaggagtggtcaggaaaggcttctatgaggaccgagtgaagagaagcagagagtcaagtgcaaaccgaggggagattattccaggtacagaaatgagtaagtgcaaaggcacagtgagctcagcaggtcctcgggacaggaaccgggaagaagtgatgggggcagacagaggcacaaagcaggccaagatgcaagttgagcattttgagcagaaatatcagagcagtgattccatgttttcctcattgtgtcccctcaggttgcaaacaaatgcactttgtcccattactggtgatattaaacatgagcactggattaaggtcatatcttccaggttccctcatactcaggattcagcgagctctccaaggagccatgagtcctctcagtggagaatggcatttacagaccacggaaaagatgtgccgactgctcttgaggtgtcacttctctctgactctcagaggacagaactaggaaacagatgaattatattgcatgtaattatagtatctgtttatctctctattgaaatccacacgatatttccatttccagtccaacattaacgggttcatcccagttttctccttttccatattggtgattctcggcaccagagtaccaataaagggaatgtgcttgtgtcagggaaaaaatgtaggaaatgaaaaagttaattcagaatatttaaaataggccaagaatcatcccctgaaagagtacagagctatgcgaatttgattttaattttcccgtagctgacggctttgtgttttctgtattctcacatgtggtggtacccagcacccccacagcctctcccatgtggtggcacctgaacccccacagcctctctcacatgtgatgacactgtcacccccacagcctctctcacatgtgatgacacctgaacccccacagcctctcacacatgtgatgacactgtcacccccacagcctctctcacatgtgatgacactgtcacccccacagcctctctcacatgtgatgacactgtcacccccacagcctgtctcccatgtggtggcacctgaacccccacagcctctctcacatgtgatgacactgtcacccccacagcctctctcacatgtgatgacactgtcacccccacagcctctctcacatgtgatgacacctgaacccccacagcctctcacacatgtgatgacactgtcacccccacagcctctctcacatgtgatgacactgtcacccccacagcctctctcacatgtgatgacactgtcacccccacagcctctctcacatgtgatgacactgtcacccccacagcctctctcacatgtgatgacactgtcacccccacagcctctcacatatgatgacactgtcacccccacagcctctctcacatgtgatgacactgtcacccccacagcctctctcacatgtgatgacacctgcacccccacagcctctctcacatgtgatgacactgtcacccctacagcctcacccagcttgcatccagctgtcaggcaaagctttgaaatgcacttgcatatc

SEQ ID NO: 474990 - DNA, 870 bp, Homo sapiens
aggaagcggattttcctgggactggcacctgagtgtcttgtatcggtcacggaggagtcaggacagaggggtcatggaagaggctggcggggccgggaaggtgctctgcccccgtctcggggtccagggccgtccactccgcccgtggctgccgcccgtggctggctctctgcggagcagccagcgcccggtggaacagggctttctggaaggtggctgctctctgaccatgtcctcggtgccagccgggtcaggggctgctgtccacacttcccacttaagccagtatttaagacagagggagaagggaggagaaatgagggacagaggggagaggtttacatggggcagttgctcccgaggaaaaagaaaaggggtccccaggctgtctcccatggcgtccttcctggtgcccaccctctatgccctacctgcaaccccacgtgcgcatgagaggacggacgtctcttccagcctgaagggaaagtgcagactttccgcatctgccttgcagccagtaccagaaaagtcaacccaacagttttaaacagtggtttttatatactattaaaagctctataataagcaactttgggaatcaggatgaaagctaattatagaacttctttgccatggctgtttctatttacatcttcaaaaccacagaagcaaataatgtaggctttcctaatacgtcagcatcttcttgatttctgagttctttgaagctgccctaaatctttcccttgaaaacacattgtggttgaatattcccagttcaaggacaatttcagattagagtttttagtccaagtatactattctttccttgaaatactgaatctcaggactcagacaaaacatcaaaat

SEQ ID NO: 474991 - DNA, 1713 bp, Homo sapiens
actaagtttgagaaccactttgaggagtgatgccgtatctgatcccctgcaatcacatgatgctgagtcagaggtgggctgtgaaggagagagactgttactctgtttctgcggccaagcttctcgccttgactcctgtctgctgctccagcgggatcactctgacgctggggaaccaagagagggattatattctctggtcaaagtgtatgcatgacacttcagggcctgtggagcggccattccccgaagcgttctccgagtcagcctgcattgtggagtatgggaaagccctggacatcagctacctgcagtacctgtgggaggcccacaccaacatcctccgctgcatgagggactgccgtgtctggtccgccctgtatgatggcgactcccccgaccctgagatgtttctccagagtctgacggaggagggcagtgtgagctcggcctgccctgtgttcgggctcccgcaacaactccccaggaagacaggacctcagctggctcccagaaaggacaagagccagacagagctggaatgggatgacagctatgacactggaatctcctcaggggctgacgtgggctccccagggccttatgatgatctggaggtttcaggccccccagcacccattgatccccccaaacacatccaggagatgaagaagaatgccctcctgctcttcaaagggtcctacatagaagagtcggactttcaggatgatgtgatggtgtacaggctgtgtgctgagaaggactccgaggacatgaaggattctcaggaggaagctgctaggccaccagctgaagcccaggctgaagttcagagtgtccccatcaacaacggccccctcctcagcacccagccagagacagattcagaggaggagtggaatagggacaattcagacccgtttcacagtgagcccaaggagccaaagcaagagagggaacctgaagcagccccagaatccaactcagagttagcatcccctgcccctgaggcagagcacagctctaacctgacagccgcccacccggagagcgaggagctcattgcccagtatgaccaaatcattaaagagctggattccggcgccgagggcttgatggaacagaattaccccacacctgatcccttgcttctcactaaggaggaagaagggaaggaagagagtaaaggagaaaaggagaaggaggggaagaaggagctagaagatgaggaggatgactttgactcttttatagcggagatgcctgctgtagagactgtgccttccccatttgtggggagagatgaggctgcctttgccagtcgccatcccgtgaggactcaaagcaccccattcacaggtgaccatcttaaattgctttgtggtttctgctttcgaaagtacttgtatatattggaacaggaaaggaaggtaggaaaaggtaagggatattatcggtttgtctaacagagggctgcaaatatttttgtaaagatcaaagaggggtggctttatttttatttttccattcttgtaatgattatcttatttatttctcaagctagaggttagattttattacttagtaacttcttttgatatgtcagtgttaaaacagtagggctgattaaaccacacaagaatccagacgtcttatttaatgacttcatttattctagcgtaactaacttatttttctccttagcacttattt

SEQ ID NO: 474992 - DNA, 1192 bp, Homo sapiens
cacccccagccagtggcccttgctaactgaagaaaggtcatgatcgggtccactgttgggagcaagtggggaggggttgccaaaataggccattatttctttgaaatggttgatgacaacaggagactgaggtcaggagttgcagcagagcaagaaccaggtggggaatctatggctcaggaaggagaagaggggagtccagtggcttctgaggcaaaggggcctaaggcagccactgaaaccaggagtgtggattcaggaggacaatgcagggagcaatgggtgagatacacctggggagtggtcaggagcggttaccagagctggcatgttgtctgctgctacttcgcatgcccaacacaggtaggttgcagtgggtctgaaaaagaaataaacaagagcctggggctgaattccatggagcgtggtttttcctccatctgcacgtgggaaattgagcctatgtgagctccagcccttggctgagaagcccatcctctcaccttgaattgaggcaacgttcttgtaggggacatatcctgagacttatccggggcttagatttggttggaagtgggtgacctgaagccaccgttatgttttgattgaaatttttttatataattatagggaaaagtaattttccccattactttttggaaaagataaactcgattttcttttttttattggttaccctttaaagtttaattgtacttaacaaagcctaaagttacttagtatctctactcttttcataaacttttagcacatttaagtctgactacccctcccatcttatatgttatttttgactgctttaaaaaaaatctctaaaattatgcattgttattgtaacttcctacaagtattcatttagatttagctgcatatttgcctattcttagcttacatttcttcttattttttactcctcagctttattaaggtataattgacaaatacaaattgtatatatttaaggtatgcaatgtgatgttttgatatatgtataaattgtgaaatgattaccacaatcaagctaattaacattttcctcacctcacatagttgcctttgtgtatgtgtgtgtggggaatacttaagatgagtcttagcaaatttcaagtatataatacatcctttttaactatggtcaccatacagtacattagggctccaggactttttc

SEQ ID NO: 474993 - DNA, 614 bp, Homo sapiens
tttagataacttgcctagtgaacatggcactgctagtaagggtggagctgggattcaagtccaggttgtctgactccaggatagcaggcctgaagcctgtgagtggaagtggcttttggttgccagaagcatcagctggagacagaggcccatcagtaggaagggctgccgggtgccctgggaagctgctttcaccagagatttcaaagccagggggcctgggaaatatctggggtgatgcagaggggattcctgctggaggggtggggacaggggtgagatacaaggtgaccttgagtttagagaaatcagagagagagactctgacacaggaggaaatcgaatccaattgccttgaggtggtttccttcctccgaattggagaaagtgtgacttggggaaacatgagacacagccagccagtgtgccctggtgatgtgggggagaaacctccccctccccaacttgggactcagcatttccctgccaaattgggctttggcactgctatggacgccttggcaaactttttcgtttcccaagagcaacttcctggttcttaattaggccttttattcctagatgtctatatttaactgtgctccgtaaatgct

SEQ ID NO: 474994 - DNA, 777 bp, Homo sapiens
ccacaagcgccttaacatctgtccagtaatgtttttctttatttttggaaaattctatgccattgtctcttcaaatatttcttctgctttgtccctttcttatcttttgggatttcaattacgggattctacccctcctccctatggcaggcaaactgtgtcctgtgtctttggtgaatcatcctgccctcctccagcagtagaagacctctcacagcattggtgtgtcaagatttattgcccaccttcaggagctcaaggcttttgctcaatggaagtgaaggcttttgcctttcctgcattggcagctgcttcttcctccagatctgctttctcaggtctcccaccattgccccagtcttacctggaagccagtggtttgaatcagactgagtctgaagatctgagaaccaaaatgggagtgggggatgaggggcttctggttgttgaactctggaattctgcaagtgacaaggaagaaatgaacagggcaaaacatctgcagtaattcaataagaatatgatgtgtatatttcatttctcaaattttattttagattcagggtatgcatgtgcttgtttgttacataggtttagaatcctcagagtctattttcttcatctttatgtccatgtgtaccatgtgtttagcttacacttctaagtgagaacgatatgtgcatatttgattaatatagtagcccacccactgcaagtgggtctttaaagagagagagagagagagagagagagagagagagagagagagattgcaca

SEQ ID NO: 474995 - DNA, 717 bp, Homo sapiens
gtgcctgagttaagggctgactttaggcgacactacagcaactcagaggagagtctgggatggaggagagtctgggatggagcaggcttggggttgaatcgcagctctcttcttctcctgttcatgcaacacattttgagtgtttacagaagaccgaacttagtgttgagggacagcctaaagaagacagaagccatagaatctggcctcgagctacttgcaatatgaagaaaaatgcatggcctcagtgcctctttatcagacatcatgagtttggggtcagatatacagatatccgctctgtagctatttcaacatatgaattttggggaaacacaaacattcagaccataacaccaggacgactatgcggagggagagccaagcagagaggaaggaatgttctgggggataaccaggggcagacccagtgccctcctgctgaagtgctggtaaacactgacactctgggaaagcgaatagcctggtgggcagacaaaacacagaaactgcttaacagtgtcgatcagacccttcagggctctgctgtaaacataggggcagctgcaagaaaagctggagcaattgacagcctctctccatcctgccccagtgactttgaagacaaaggtctgatgcatttttctttgagggttgtacctcaaatgagagtatgctcctctcgttcttcagttgattagatgaaagagataaaac

SEQ ID NO: 474996 - DNA, 1778 bp, Homo sapiens
ggcagtggccctcacgccagcagatgcttgtcatgagcctgtgcggctggatttacgctcctcatgtctgccactgccaggacaagaacaagagcagttgctcctgccttttgcatcttgggtcccagaatgaaacacgtggaggaggcctgtccgggctgagccgatgatgtgcagtgagacgcttgctgctgtgtgccactgaacatctgtcgttgccatgcagcaagagctgattgatgcagaatccaaagccttacctcgtggtcctgagtgtcctctctgacagcatttttgtacactctcgccctcatggattgtgctccagcagtgtgttcctgccccagggttttgcctttgttgtgtcctccacttataattttatttccttcaactacctgtttggagctctggtagtgataattgtggtgaagcaggataaggggctaggaggtagagtggtcaattttggcatatcctggaagctggaagtgaggggcttggacagggatggaaagagctgccctcaagacccagaaaaagacagcaaggagcagcccaatctgacagaaggagagaaagcaaaaggagctgtttgcaagaaccagatctcttggagcctggctagtgccaagctcttgtgtgtgggcagagtctgagcggatccgagtgtttcaatgagctaaactagtcagcttcaagctgttccatagacagtaggtgtgaatccaaaatcatttcagacattcagctttataatgtttcttttaagaaaaaaaaaaaaaaacatggaagaagcaccagacccaaatgatcactttttctcttggccagttacctgtacaagtatcaggccagttgtaaaacacaagtctgggtaggttagaaaggcaagttgcagatgcctcttcccttacagcagcattcatgggagagcttctttctttctctctgcctcaaggatactcaccattcttctattccatttttagaaacaggctggcaacacacattctccagtctccacacaactctcctctcctcgctgcactttacaagtcattttttacctgggttatgctccttagctacctcaccttcatgtggaaactgtacaggcccctttctccaagacacgggaaagacctggaaggataatagggtggagagcttgggctgaagaggcattgaaagggaagcttccatgttgaatactccataactctcaataatgctcgcttctttctacctgagtcagtgcatgttttggagtgaatactgtcatgtgcaaagtgccttgctcagtctcttctggatcactttccaaacatctgtacctttatcaatacagaagtctctggggccctgtggcatctgtaagaacaggctccccggctgaggcagccaagtgcaaatccagcacagcacggggatgctatctatcactcagggctttccagggagatcctattcagaagcccaggtgcttaacaggtaaggaacagtgttaataaaagttcttttgacttgaaagggcacagaaaaaaccaataaagctgagcccagctcttaaaaaaaaaaaggttgataaaaccgacaaaaaataaagaagtagtttatcgtggttctaaaagaaaggcgagggtttttctttctcttgtttaaaggcagaattaattaatctaccgctggcttgagctctgaatggaatgttagctgtgactctggggggctgttaagtcctctggaccctggataagctttcattaaagcaacgg

SEQ ID NO: 474997 - DNA, 1165 bp, Homo sapiens
agatcagatccgctgtcaacatgacttgttcctatatccagtctgcagaaaacgtcaccatcacgtggctgggggccactggaaatcacagcctcttccttcagctgagcccttattggcgcttttcatcttctttcctaagccttggtcctcagctgctctcagtctcctccatgactcctgcaacccccaccaggcttctcagctgccatgttgtgagatgctcaagcagctgtatggaggagcccatgtggaaaaaaactgagcacccctcacaaccgatattcccttaccaggagtgtggcaagcctccctggaagcagactcttcagcaccagtcaagctttcagatgctgcagccgtgggcaatgactttgctgcaatcttatgagagactaagccagaaccacccagctaagtggctcccacattcatgactcacgaaaactgtgtgaggacacatggtgaatagagggcttgctggcaattggttcacaagctgaggagggcacaaaggccagatatttcatctgaagagttcacaggctattaaaaacattaacaagattttactgcctcacctaggatggaaataattgctttaaagtgaactggcattaaagtgaacacgtcaagactacctacttggaagctacaggagacagaaacagaaaacacgactcctgaatcatgttccattactttaatcgctaaacactgctccgtttaagctaaagagatataatggtacatttgacagatgccttcacatcaagatgagatagggccctgaaagtcgcatgttgaacctttcttaccttctacgaggatgtcactcaaaatcttttctcaattcctcttcattggctgattacacaatacagagtcattcctagtgcagcccaaccctctccccaggtgaaccttgctttacacaaaacacctgtgtataaataacctggtaatcattcaagttgtattctaaatgcaccacagagatctcactttttaaggaacactgaaataaatgctttagtgaagcagaatagcccttttgtaatgtaaacaatataagcctagataaagcttccaatttacctaagtttagatttttgcatattgggtttcattaaagcagcatatatctgtaaaagaaaatattgta

SEQ ID NO: 474998 - DNA, 1543 bp, Homo sapiens
ctcttaagacctggaaccagaaactggcacagcatagcttctatcctgtttcatttgtcaaagtaggctgcagccacccaaatggtgactgtggattggagcccctgtttgctcttgggaggcctggagccagcaggagtcctgcgttcctgggcacagctgcagctgtccaaatggtggctgcagactcaggcattcctgaacacttgggagcccaggaaggtctctttgccctcacagcctccaaagtgccagcttgcactgcctggctccttcctactgtcagcacccactcctatcctagggtaaagtcagggctgatcccgggcactataaacagaggcaggaggaagacagattcctgggcagaaggcggccagggaggtcctgatgactggagttctggctgccagacccacagactaaagtgggaacttgtggtgccttttgcgagacctgcagagatgtcagaactaccagctgcggagaggagctacccctctccaggacctcctccagggctgagcactcgatgggatgacctgtctacaaagaggagctacccactgcaggtcttctctgagctgagttaagattcaagaaataatcagagattacctaaagcatttctatctaatcatgttacctacagcattattgagaagatttgaaatctatctaaatttttaataataggagactgataatagacatctataatgaataactatgaaacaattatatatcacacagtagcatatgcttaagacaatagttaaatgctcattttaaaaatgttttaaaacttaatttatgaaaatgataatgtatacagtatattttacatatcatactccatgtgcacatgtatcacctttctaaggctttataacaaattaccataaactgtgtggcttaaaccaagaaaaaaatgttttctcatagttcagtggccgggagttcaaaataaatatttggtcttatgtgagggctctgaaggattctctattccttgattcttctagttcctggaggttgggagcattccttggcatccttagttcatagattaactactccaattcttctgtctacatgtggatattttctctgtgtgtgtgtctgtatctttgtttccaaattataaggacagcaatcattgcaattagtgcccataataatctagtataagttaatggtaattatatctgcaaagaccctaatttcaaataaggttacattcacagattttggatgaccatggctttgagggaatactattcaatttagtatcataacatttatacatgcaaacatagattaaagtactgtgtgcatgaaaatatattcttaagtgataaacctcaaaacgttaaatttgcttatctatgagcagtgtcattacaagagatttgtatatttttctgccatactattctgtggcaaatttttgtacattcatttcaaaaaactattttaaaagtatttacattcctgctactgcctctgacaacgtatctgataccagacgtatctgactgtg

SEQ ID NO: 474999 - DNA, 630 bp, Homo sapiens
agggctgaaacatgctccttgctcatcacctttctagcagcacgagggagagaagagctgaagcccttcagggagccaagacgaaagaagtagaatatttgaatatgttgatggtgagaattaaaaggagtctagttacaatccctaaagtttacaatcctaaagattatggaaaatcagtatatgattattttatgacagaacaaaaatgggaggttctaagctatgaccttaaatttcttcctatggcacagggtaagcaacagaataatagaacattacggaaagttcagttcagtttgactgactgcaaagttgtcaatgaaattcaggggatttccgctgtcaagtcatgtgatactgcaggccacactggcatgtatgattgtatgtcctggacatgccagaaagttaacatccctcaagggaacccaagtttaaacagtgcaagtaaagagaatctgttcttgcagttggggagctttcatcagccaaagtagaagtaaaatcttttggacagactagtgaacggtcactgattcagttatagatggtataaggttgaattgtgctactttgacatgtttaattaactaatatagaaaacaatgaaaatttcatctgtatttt

SEQ ID NO: 475000 - DNA, 857 bp, Homo sapiens
gataccagaattctaagtcagatgctactgcttgcacagaaattactctcctctcatactgctataagtttgctgttactgcttcccattcaggtggcccagaggaggaaatcagaacccaagtgtggtggaaagggtgtctgcatggtgtgtagttggtcttgtgtggggtgtagagcctatgcaggtgacccatggagaggcaacatcatgagtaaacacaaagttgagagtatcacacattcagacaataagaagcagttctttttttgctggattacagaaagacagaggggagtgacagaagatatgccatattctacttcatatatcaagaagtgtcagaatgaaaatttctccaaaggctctgtgagaagaaaaacagatgctgacccagagatctgctttcctaatgcaaatgtaaagcaatttgaagacgtccctttagatgtccattttttaaaaaaccttgcagcagctgttagttgtcattagagatttttagggtgagccagttgtgactatcaggaggagtttctgaagaacttctgagtgtttgtcacggacttggtactcagtcaataattatttaacatattactcatatgttacaaatatgtttacagaagtatcacagaaattaacatcatctccagagttttagaaaaatatatttgaatagtaagaatataatgcttcttggtcaaattagaccttttagactaaatgattatgggaagtctaactgaagttttgtcaattttatttaacttttggaaaaaaaaaactactttttgtttcattaacctgtaactttagaagtctatgtacgttccattgtactgtggctaagctgg

SEQ ID NO: 475001 - DNA, 1838 bp, Homo sapiens
ttgagacagtcaggaagccggggtgccataagcctcaacattctgaaagtccaagtaaggctatgacccctgcacctgatgcaagctttcagtgtgctggctcatcttgctggtgtggggaagcagctggacccttaagtaattgggtgtctattccttgcaagcagaagctagagaagctgcaagatctgctgtccaggctggtacagagccagacgctgttgcagtgcacacatacagctgctgatccactgcctcaactcactgtcatgaagcagcagccagacctgcagttcccccagttcccactgggtcatatcattcaattatttccaaactctgagtcagttcagagaggaatgagaaaatgcaactacttttcaatgtctaatcatcactatatttctattgctcaaatgtgcaagaaatactttataaaattttgtggtcacttacacaactccccactactccaaattagctatgattatgattaagtcaacccactggtctttcagctgacataaagttgaataaaaaaatgttgtttttacctaggaattttctttttttcccactgatttatagttattttggcactgaataaattacaagtgaaacaattacatgattcaaaagactagagttaagaaaaattgcatctgcatgaaaaaataacagcaacttgaaagatggtccatcttctcaacatatttaacaatgaaagattattttgggaaggaaagatgcacgttattagttccaatttgaacgcttttctaccaacagaaatgaaatgaggcagaaaagaaaaagtaaaaatttggaagaaatgagaagtattcccttttgatatttgtgtttttgaaatgagattacttttctacctacattaatattggttcccatttgaaataaatgatacaagaacagcaatatgctaatttaaaatatatagagatgattataatgattttaaatttgtgtattattaatatgtttgtatttattcctatacagtccattaagtgaaattgataagagtatatcacaaaaggaaatgctatgaattggaaattcacataaaaatataattaatgtatttattgaatccctatcattaagctaggggtgaagaaaaagaagagataaaaaatataatgaaattattgacatacaggggtatttgtggttggtttttcagacaaaagtaagaaaatcaggtcttgtgtatatgtgggtgtgtgtgcacccccattatagctaaaagtattttgcctaaaattctctgtacataaaataaaaatagtaatatgttatcctttctatttcaggataaatacagtgctctgtgtgaaatcgtgtttcttcattagaagggtaattttatattgtttaatatttctattagctagatgtttcatcataggaaggagtaaaccctcttccatttgtctcagaaagaataaaaaattttctccttctatattatttgtctaataaatatgattgttctggtatagttcattcattttactgaggaaaacaaaacattttaaattgtgttaaaattgcaattcaaaatatcacaaaacttagtacaaagattttaactcgcagcttcattacataacacaagaacaaaagtcaatcaaataaaatgacaattttgccttaagattaaatgaattcctgatattaatctttattactatggctgacggtaaattattaattccaaggactccttttattgggcataattattcagatttaccaggtgtctctaaagaagatgttaacaaataacttgttcaacttcagtgttgtaaatattt

SEQ ID NO: 475002 - DNA, 647 bp, Homo sapiens
ttacaacagaccttgagaacgccctcaatggattggatgattcctgcccacattagttctttactcagtctaatgattaagatgctaatcatctcctctggaattctccttacgtctgccgctgaagccaggaagccaagtggtcttactggcaggtcccactcccataaagccaagcaagctaagaacgactggcttgaaattctcactgccagcagagcagtctggagtctggcttggatgactgagtttggtggagaaagtggcaaccaccattactgtggctttggtaggcaattttcccctgacagtgctaaggagactgggaggtttggactcggcagaattcaccaaagcgtagcaaagcggctgtggccagactgcttctctagattcttcctcattgggcaaggcatctctgcaggaaatccagcagttccagtcaggggcttacagacagaactctcatctccctgggtcagagcacctgggggtagggacagctgcggtttcaggttcaacggatttaatctttgctgcttgccatttctgaagagagtggctgatcctgacgagggggattctcccagcacagagcaccagctctgctaagggactgactgcctcctcaagcaggtatctgaccc

SEQ ID NO: 475003 - DNA, 4205 bp, Homo sapiens
tggatacccttcccctcaaagatttcttgaaaaaacaaggggctgatgtacagtcaccctttgctatgactactgaaatgtcttttccgcgagatcatgaaccctcaagaaggaagaaaccccggacacatctgaaggaacaaattcgggacacaccatctttaagagttgtaacactcaccacgaaggtctgcggcttgattcttgaagtcagcgagaccaagaacccaccggaagaaacaaactccggacatggtagtttgttacgcagaaatacaaaactgatcccttctgagagacagaattcttattactttgagtatataagtgtgccagctcccccttgttcaagtacttatctttattgtgacacagtgaaagctaatgggaatttttcctatatgagtatccagacactgcagagctcatcaggacaggatacttcagggacagcaactgtggcttatgagaaggcattctagcctaaaaatttcaagttcaagtcacaacttaactgcttattagcatgtgactttatctgagttgcatggcttccaagagcctaagtttccacacctatgaaaagcagttatatctcatatgattttcataatatttttcagattcatctgtgttagtgaatcagtagttcattcctgattatttttgggcagtaaatcaagttttgatataacacaatctgtttatctttttatctattgatgcacatttgggaggtttccaatttctggatatttttcaagaaagctgtcttaaacattttgtacaagtatttgtattgacatatttttgaatttttttgggcaaataactaggaatagaattagtgggttacatgttacgtgtatgtttataagaaatttccaggctattttctaaagtgattgtggtcttttatattcccacagacaactaattaaaatgtcaatactaggtattttcagtcttttaatcttaaacattatagtgagtgtttagaagtatctcgttgtttcaacagtagtatttcattgtggttttaatttgcattttactaatgatgaattattgaatacattttcagttgcttattggacatccatttatcttgtattgggaagtatgtcttcaaatattttacctatttttaattgaatttgttgtcattttattactgacaacatcaaatatatgtatgtatttaaaaaatgtatatttgattacccaatggtcacaaaactcgttaactggcaattaagtgaaggaccctttatactcagttgactacacaattttgttagctttttctataatgatcctcatgggttcctctcaagttccattattcagcatgtgatgaccttacctttcctcttgctaaagccatgtctctatcagcatcatgatcctgtgtttaccaggaaagctgtacctggtctgagatcttacactactttccagctatctatttatgtcacagtttcgtgaatgctggcagtaaaaatgagactctagagtcagagtcaaagaaatttactactcacagcaatagcagtaaccagagcatcagatttttcttgtgctggttccctaaactccaatactcacagaaaaacatgaagaggactagatgatagctatacaggcagtaggctgtattacaggcaagggaaactgatactatgtaattgaatattttataatgtaagttagcatgcctacctttgctccagaggaagatattacctttattaaaactggaaaataagtaaactagctttctgcttcagagggagacactattttttaaggctgattgctgcacaaacatttctgtgaagatagtcacaaaaaaggcagtcagtgcttctgtgtgtaaaacattcaaatatgtgagagatccagagagaattatctctcatcataaaattgcatgaatactaattagcaaaatttcagatcagaatgagaaataattagtatatctattaagcattatacctaaaatcacaggatgataataataacattcattcaaaaagatctattagtcagctagcatgtgctgagcattgttataaatgtttcaggttgcaactgatatttgaaaaaaattgtttttcagtattgtctttagatttagacaagaggattgggtttcttagaagtctccacttattacaaagaaataaaaataaatatattaaaaaacaaatgtttaacttttttttttaactcggaatctggagcttatatctggtacagaaaacacttaagactctaaacagctgctctcatcagtaacaatgagtaggcctcagtgaaataattcttcctagctctatccctgtattgtcaaataaaagggtgtgatatggtttggctgtgtccacacgaatatcatcttcagttgtagctcccataattcccacatgtcatgggagggatctggtggggggtaattgaatcatgggggcatgtctttaccatgctgttttcatgatagtgaataagtctcacaagatctgatggttttataaaggggagttcccctgcacatgctctcttacctgctgctatggactactgccttttgctgtttaagacttttgttgcctaagagtactgccttttcatatccattgcatggaataattgatttaatacattttgtatatttttagttatttcaagtgtgaaatatagccagtcccattttttaatgtttaacaaaagtgatagtctataattttaaatatattttaaaaacaattttgtacatactttagtaatgatgcaccaacaggttaaagagtttacacaagattatagggctaaaaagaagttataaggggttcaaacccagggtatctgacttacatttaaaacttgacgttttattttcaaagagtgcagtaagttttagagagtattaaaatgaagattactgacatatatcatggtgctcatttcactagattatatcatgtttatcctctgaaatagcattattagtgtttttaatgacactttaacagaaagatgccatttgataaaattcacctaatatccatagaaggcacaatgctcattcagcactcaaaaatcattattccagctactataattaccatactgtaacagagttttctctggaaattggtataagttaaataactggaccattctctccagtgcttacctgttttcaatctgataaagaaaatcaatagccaggttagtaagcaaatatttggcaagcaatgcatttctaataatgaaactgataattatacttctttcatagagctgtaattgaatgaatttaattgcctcttctgtttaactttaatgctaggtttcaaattgttgtatggacaggaaagtaacattagaaaaattactctactgttgctttcttttctatacagtggtttgaactcaagcaataaagttaaatgaaaaaggctctatactcaattttcaattatagtaaaggcagggagccacaattatccctttcattaccatgatgcttttcattgctgcctaggaaacttcctccctgttgttgtttgatgctgctgtgcttctcaaaatgaagagcacttgaaaatggaaggttaaaagtaaggaaccaaatcaaagggaaaatgtgaaaatgtaaaaattgacattatcaagatgaaatggtgaagaaaaatatgtgaattgataaattgactttcagaaactctatgggggatggagaaactttgaaagatttaaccaatctttatttcaaattttgtgattataatttagctatttaaaattttaaaatcgtcaagcaatatttgttaatttcaattagaatattttcatcagttttcaaatgaacatctagtagttttctacattatggtaatttctcaagaaattaatcccaagagcctttaattaggctttttcttcagtcacttgtttcactgtctagttccatatatttattctgaataatatatggaatatattattatatataatattatataatatatatatattatatatattatataattatataatatatataataatatatattatatatattatatatattatatatattatatattatatattatatatatatattatatatataatatatataataattatatatataatatatataataataataaactgccccc

SEQ ID NO: 475004 - DNA, 713 bp, Homo sapiens
tgacacaagtttacctgtctaaactatactcttgtctcagtcatgattgaatacagacaactacagcaaattcttctaacgacttcattgatcagccactatgtgacttccaaacctaacaggcatgaagtctacatagtgcttggggaaggctggttgtcccgccctaatcttattatgcaagtggactttccagttgattggtgccatcttgtctgcttcttactgtacacttggctaacaaagagaagggaagatggagccgccatcttgaaaacgtctagtccttggttcctgccagcattcactcgtgcaagctcccagcttgcaggctgctctttgctaaaaaatgatttggagctatttttcattaaaaagaaaggccttaccaagtattcccatgcccttgctgtctgcctaagtaattccttcttaactcctatatcatctagttgaaatactttagaaaatattcttaattattcacaaatgttattactattaaagcattcaacatcttcttactgtctttcaagtcattaagcattcttgaggatctcctagctttcacacacaatcttcccaaaacccttccagcctctgctcactgcctagcttgaaagccaatgtcatacatcttaagttactggtgtgtagtacttcacttttatgtaccaaatttctgtttcggttttatattactaagtaataaa

SEQ ID NO: 475005 - DNA, 675 bp, Homo sapiens
ttttcctccttggtctcctgaggtatgcaggggttagcagcagaggccgatccagaacataaggctgtcctcgttccattagaacatgctactcaatttcccataattatgagagcatgctcctctcctctgccagacttctctttggcattgggagaggtgctttggctgattagctttcagtcagctgtcagggttcagcagccatctcaaaatgtatctgtctcatcatttttgtgcttgtcagcagctaccttttccatttcactctgtcataacttttcaggtcctttacagtattatatgaagcatgacgcagagagacagtttcacaatatgagagaagtcctgagacaaaaagttcatggttcaatatgtgacccaaagagagatttgtcccaagctgtcaaacaaacagccttactcggatctaaggcacagggactaaaatgattgaatagtcatgtatgcgtcgatgatggagccaaaagttatgagtaaccccttcgtagaagatgcttctggtgctacaaagtaagtaacctggtgcccaaaagaatatctggtaaattcagataattttgcgtactgtaaatatagaccctgctatggttaataaccttcacctttgctggtaagactaaattctgttctatactcagagatcttcaaaga

SEQ ID NO: 475006 - DNA, 486 bp, Homo sapiens
gagacctgtctcagatactttgagttcacacattcatttgaggccatctcataattcaagctgaaatgctggtggctggtaagaagtggtcagattctggatatgtttttaaagaagagctggcagaagttggtgatgattggatgagggtgaacttgctaggactcaaggaaaaaaggacagggaaggaggctttgaaagaagagaccagggctcatcaacatggccgcagtgcagagcccaaggagagactcagccaggaaacaactcctggatggtcaacaaactctaacagcatggatgcggcccatgcatttttaacaagaacaattgtcaaaagtctagcaactttgaacattcataaatcatttcagttccctgaggcttttataagtcttgattgtgcaaagataagaaagatctggctcaactctagagacatttggtgttttgtattttgttttgtgtctgaatgatagatgtgtg

SEQ ID NO: 475007 - DNA, 903 bp, Homo sapiens
ctgtggctctccctgcctgcctcgctgctgccttgcagtttgatctcagactactgtgctagcagtgagcaaggctccgtgggtgtgggaccctctgagctatgcgcgggatataatctcctggaaagggaatttcctgaccccttgtgcttcctgggtgaggcgatgccccgcccagctccatgggctgcatccactgtctgacaagccccatgattattcctgaaaagtggtttcctgaaaaggtgttgcctgtccacatgttgagtgatagcacactattgcctgttacagaatattttcactttcagacattactaattattaaatttgtgctatggatggctactatccaaaaaacacaggagacaaagagtgttggtgaagatgtggagaaattggaacccttgtgtaccgttggtgggaatgggatcaaaatccatgtgcaagagatgaacatgcagatagatctccagggaatctctcctccaagctttagggagaattctaaaggattcttaaggacaaggccagatcagcctgtggcaaatgttccgacaacatgtgatctactggggtccttgaatttgcaaactgaaagaagagagttgatagcaattttgcacctatctccagatgcatgaaatgtttagttattttaagatatcattagataaagatagaagtctgactttttactaattttagcctaaatgtcattgaaaatagctcttcataaggcaaagagagggagtgtggagggtcttcataaatggtggaggaaacaccagggagaacaggaatattttcagcatcccagctcattaggcagaattcagagctgttcagaagcgtttgcacacactattctttctcttttatttataaaaacagttacaccct

SEQ ID NO: 475008 - DNA, 587 bp, Homo sapiens
agcagccaagtccatgaaccacattctcttcagactgctgcctcttctctgcatgtttacatgttccttattttctggtactacttcaggcccaatttctacattacttgtctcagttctagaattaaccatggccgcaaggagccctgggtccttttactgcaacatgttatcagaagggctcaatgttactggaatcctcctagatgatgagatagatgccattttctgtgctcagcagctcttacctggacttctcttccagatgcagggaggaacctggtgggatgcgattggatcatgggggtggtttcccccatgctattcttgtgatagtgatggagttctcacaagatctgatggtttaaagagtgacacttcctcactctttctctctctcttgcagccatgaagagacgtgccttgctccaccttcaccttcgaccataatttattatttggaaaaaaatcttaactatgtacatatatatttaaaactacctagaatatattttcaacaatagaaaatcaaatgaagtaataaatgctgtggtccgaatatctgtgtcctcttcagatttttatgt

SEQ ID NO: 475009 - DNA, 568 bp, Homo sapiens
aaatcttttccttatcataaagaaaccttcatgaggccgtagataaagagcctagagcagccaattttgagcttgaaaaggcttttaactgctcaagacaatggttagggctaaggacgacatgaatttcaaaattcctgtcctccgggttgcaaagactaagagaaaatactgccagctggtacaagttgggcctttaacccaatcccattctttacctcagtaccccaccagttacccaacatgggacaattggtgctgcagtctatttcctttgggtcaggggtctcctcagtatcatccctttgtagttgcccaggaagatgttacaagaaaagggtccctgtccagaccccaagagagggttcttggatctcgtgcaagaaagaattcaggagttcaggcacaactgaccagtattaacattaaaatagaaatcttcagactgataaaacgggagagacacctggttaacctcaggcattatatggggaaagacacctggctgacaataggcattctaacaggagagacacctggttgacctcaggcattgtatggggaggga

SEQ ID NO: 475010 - DNA, 1421 bp, Homo sapiens
aagatcatcagataagaatctcatgatactcattcgctatcaatgataacagtgcagaaaagacccacccccaaaattcaattacctcctactggtcccttccagaacacatgggaattaggattgtcattgtctctgaagacacagggacacagagaaaaatatgagcaaacaggctttgagctcaataagaagtctgctaaccaagaagaaatgcaggtcccaaataggttactgctctttagcctgcatctcaaaaataagaagacacttttcttagaagatttgaagctgacctgtagcctggagctgaaccatagctattcggcacccaatgtgcgacttgagtaccaaatacacttttgttgcaagtcctctggtacatacaatttgcttgattcaacatgtcccacagttagtaggacaatgtcaacatccattcatacttaaatttatattcttttctcatatcttattttccactgaagattttaaagtctcctaagatattcaagaattattggaaatataactcattcatcatgttgtcccaaatgatagaattttgttatttttaaaggcagaatagtatttgattgtgtagttttgagatctattgcacagcaatacttaataatagttcataatgtatatttcaaaataactaagagagtaaccttcaaatgtatcaccaccaaaatatcaagtgagttgtgccctccaattatgttctcaagctgcaaagaactgcctgtatttttttaaaagttgaaaacagaaactctttgtaataaatgtaaatttatttggtgttaaatggacttgatattagagaaactcaactaacattggtgataataatattttgttcttaatatttaaggattagagaaatgaatttgagtgcaattttttactcattttcatttttaaaccatttgtttattcatgtatttgctttatgctacaaattttaagaattattgcaagcacaaaatatgaccaaaaaattgctaaagaaaattacacatagaaaaaccttaaagattcgaatatataatttatatttattagtggaaaatattccactaagctatattacttgaaaatgtaattaaatatataaaaagactaaaaataggataaaatatatatttagtattagacatatattttattaaaagttattggtttaataggtaattgtttaaatatgtctctcttttaccctaaaataacaatattattgaccaaaagtaataataatgatatacaaaaagtcttttatttgaaaatgtaaatcattaactacattctatttattcatattcatataagatcctatataatttaaatcatgcaacaatttaaaatagctgtgcttatgccttaatcttacaaattccaaatccattaaggtc

SEQ ID NO: 475011 - DNA, 703 bp, Homo sapiens
ggcgggagtcagggcagagcagctggcatcacaatatgctttgcaatggggggcacaggaaaggcattccagggggaaaaaagactttttcttcctaattccagtgtgctcatttgtgcaggcttctgtttacagtttcctccagtaccagtgtccttcagcactcagcttttcacattcctagcttctgaggtgctcagtggctcgcagcaacccagcactcagcagctacgtctggcacttcgttttggacagttttctgccagcacggctagaataaagcaggcaaaagaaggtggaaagagcagactggctgagtcttctggcctccatctttctctcgtgctggatgttcctgtcctcaaacatcagactccaagttcttcagcttttggactcttggacctacaccagtggtttgccaggggctcttgggcctttagccccagactaaagactacattttttttttcggctttcctacttttcagatagtcactagatagcattccattagaaaaaagtcaaatagactaaatatctatataatcatatattcatatagctaatatatataaaatgatatcgaatcataatgccattcattgtcactgatatttaaagacagtgcctttaattacacaattacacttgtgttcaaggtagtttagcatctcatttttacttgtctccctcttgagag

SEQ ID NO: 475012 - DNA, 986 bp, Homo sapiens
gcatacactgactttctaaaagaacgagagagcgagccaaagctgtccgtcttgaaggcgggcagggggaagccaggaaccaggaaagagttaagcttctgacccggaagaaaagggagagctggccgcgcagctgtgcgtggaaatggccggctcaagcagccgagacagagcagagtgtgagagagctaatggaagtaagctgctgaagaaaccgtattcacctgcctatggccctaggcaccagggattgaattttgcagggccgtcagagaagcatgtagaatactccttagaattgcctgcaggccgtggcatttgtccagtggcagcttttccactgaagatgactctacaacagaaatctgaaagtggttggaaaggcgatggcagtggaacactaattttgagggccagtagacaagttccaggctacttatccccagcaggtagtcacacgaccctagaaactcatgacattcaggtccgctacgatcaccagcgtctagaaaatagatattcagctacaatgtataataacgacaatggacttaattatagctgacatggttgtaaagaacagagagaaagctctaaccattctagatgctcatggactttatatctcaagtctgtggattctggcttagtgagctatttgggatagaatcttatttggatagcaatcgtagcagtctcctaattgcgagttagatacacatgaaagcaaacgaaaactatgaccaatcatgaatctcacaaaattcagtgaatgattggattgatctgggtgggggggtgttttgacaaattggtattgacagctaacacatgtataagcttcctatatgacaggtactgttctaagtgttttatctataatatgaggtttaatccttacaacaaacttgtgaagtagttagaattttccccattttacaagtggttgaggcaaatttgataaattctactggaatcatacattc

SEQ ID NO: 475013 - DNA, 565 bp, Homo sapiens
gagccgggtacctcagttggaaatgcagaaatcacctgtcttctgtgttgatcttgctgggagctgcggaccggagctaagtggaagtatttttctttcattttcttttccattctggctaggagtgtttctatataatgttatttttcaggatgttttgatgggaagcatgcaggaaatcatgattttaaaaaatctcttgaacaatttcctttacagcacttgttatatgccaggtactatttttaaacacttcacaaatactaaattatttgtgtctcctcaaaattcatatattgaaatcctaaccctcaatgtgacagtattagtagttggggcctttgggagaatccagatattgctaacaaatatttaccccaaaagaaagggattgcacacaggagtagaaagtctgtcactcaatctcagccaaacagccaaactaggagagggcttttgaagcccctttgtctgtatgagtgcggggagactttgagaagcttgaaaatgctataaatttgaaccctatagagtacctggttaccaatctttatgctataaattc

SEQ ID NO: 475014 - DNA, 669 bp, Homo sapiens
gagaacgggccatgatgacaatggcggctttgtggaatagaaaagggggaaagctttatgtatttaaagctgaggcccagacccaaggatgcaggcagagcctaggagagtggatcacagcccgcagggacagttctctggcaggatccctgggccaggcagaagagaccagacagagagctccacacacagcccctgacatggagtctgagagatactttgctcctatctatacaccaccacctggggaaaagaaaaacagcagatccttgcttccaggtgtgactcacctcactcaagctcagccaatccttcttattttaaagctgttctcttcaaggtgctttcaaattttaatgagatctccagatggatattgcaaaatacctgtgcccctttatacactttcatcattggctcataaacaactcttcttttatcttcaatgttaagctttggtttggaggaatttatttttgtacctgaagtttacatttttgttgattacagagctgacaggtcctgtcagattatagagctgaggattacagagctgaagtttatgtttttgttgattatagagctgacaggtcctatcaaaaataataagctgtcaacctgactaatatttgtctttaagacatgaggctaatcccagtgtattagtcc

SEQ ID NO: 475015 - DNA, 766 bp, Homo sapiens
taaaaatgtgttgtttgtgaacgtactggctgtggcctaggccatgcagcaggataagctcaccttcctggaggagaatgacaaggacctgtacatcctctggagggggccctccttcaatgtgcagatgggtctgaacgagctgttgggccatggcagcggcaagctcttcctgcaggatgaaaaaggagcattcaactttgaccaggagacagtgatcaacccagagactggagagcagattcagagctacaaaagtaaacaggaggctagtgacggactcattaccatcactcccaccacaggctctgatggacacccggatgccagggtccgcctcgactgcagcaagatccggtctgggggcaaacctgccctagagggcttcctgcagagacttcaggtgctgaatgaagtccacagggggatgtggccggagagtgggccatgtacaagcggtatgaggccccttgagtgcttcctcaccctcagggacaaggttctcgattgagtgactcaactggaaagagagaataagttgtatttgcaacatgtattgaacatggtacacaagcatggaaaaataatcaaggagtatcaaaatcaagtcttgggtgggaggttattttatttagattattttgggtcattctacatattttcaatgacaatttactcatttttaatttcttattttaaggtatatggcacatgtatatgaaaattttgcatggaagttaaatgttatgatttacgtggatcagag

SEQ ID NO: 475016 - DNA, 581 bp, Homo sapiens
agaagaaaggatttgaaatgcttccaacacaaataaatgcagtatgaaaacagactactacggtaaattggtacccggagtggggcactgctataaacataacatgaaaatgtggaagcaactttggaactgggtagagactaggagaaacttgcagtccagtgctgcagtaccaggccactcatgttcagggaaagccacacttaatcaccaagacaatggggacaattctccagggcacctcagagaccttcacagcagcagcttctgtcacaggtctggaaacctaggaggaaaaaatggttctgtgggcctggcccaggggccccctgatctgtgcagtctcaggacttgttgccttgtgtctcagctgctccagttccagtcatcactaaaaggggccaatgtacagcttaggcttcagagggcgcaagcccctaggcttggcagcttgcacgtggtgttgagcctgcaggtacacagaagtcaagaactgaggtttgggaacctccacctagatttcagaggaggtatggaaacccccggatgtctagacagaagtcggctgtaggagcagagct

SEQ ID NO: 475017 - DNA, 859 bp, Homo sapiens
ggttttgtcgcatagaaaagggggaaatgtggggaaaagaaagagagatcagattgttactgtgtctgtgtagaaagaagtactgtattcctaggtatttcattttctttatggctattttcttggatggctttgctggattctttggattctttggatttcttgagatggatttcaactttctcctgaatctcaatgtttcctcgccatccatccagactctgaattctatatttgtcatttctgtcacttcagactggttaagaaccactgctatggagctagtatactcgtatgaagaaatacatcagaaaatcaagaatatggaaaaatattcagatttaaaaaggcagacccagaaaaaaaaatatgggaaagtttataagcaatataaaactaaacttcctggtcagttttatacaccaaaatgtatgaattttgaggcttttatatcataattaaagagcgagaattttcataccaagatgaagtaaaaccatgcaaatacacattaaggaacagtgccttattaagcttcatctctgttggttatgctatgaaatatagtaaacatagaatccattgctaattattctagaagacaatgaataatttgttggaataagtaatattttaaactgtaaatgactgtgttgctctgtgaatattttgttttcctcgaatagtattcaatgtgtggttagaaaaatataaacaaaagtttcaaaaaaatagtgtttccaagtataaatttgtcaacagaaatgcatttccatttcaaatataaatgtatgtatattctacttatttttatattcatggaaagtctcacttccatttgtacagataagcaaagctt

SEQ ID NO: 475018 - DNA, 545 bp, Homo sapiens
tccaaaatcaaactgctggcttgtgaggctgggaatgtttagaatcgtgctgctccatgtaacagtcttcattttgtcctggtctatatcataccaaacgaagtgtgctctgcctacaggaagattgctgaggtttgcagggaaccaggagaaatgttcaggtttgaaaagagaaggagtgttggtggaggtcaaagaagaatcccatgagtggccccaccctctacagccaggagaaaacctgctttggtatcttctctacttgtgtttctataatacaagacgtgtttatccagcactgactcctatgtatggtaccaaagatctcactgaggacataaacctagagtcagttatacctcctggcatgttcttaggttacatctggggctgtctgcctcaggcaacttacgtgtctaaaatctgagaggttgttgcacactagtgacaattttctgttgttataaacttcaattatcacatatgggtattgagaaaacttgtaattccatcgggctagtaggctttcagtgttataaagaaag

SEQ ID NO: 475019 - DNA, 504 bp, Homo sapiens
gagggtccgcggcttcatttttgaagtcagtctgagaaacattccttgcctctcccaccatgtggaagggagaaggcactgactgtgaaccagaaagtgggcctaccccatgcaccaaatctgctggtgccttcatcatggacttcccagactccagaaataaatttcagttactcttaaactacccagcccgcccatggactaatcagcattcattctcccattctgagcccatgaaagctccagaatcagcctcacagacacgacagctacgcattttcaggccccctctcagacaaagggctatccacttcaggtcccctctcgttgtcaagagcttctctgtcactgaatataattcttctctgctttgctcactctctggtgtccgtgtacctcattcctcttggtcacagggaaagaaactggaacctgccaaatggcaggtgagaaaagggctgtcaccctttctcctgtttgctgagctatggaagtgaaaaaacc

SEQ ID NO: 475020 - DNA, 1459 bp, Homo sapiens
gaataggaacagctccggtctatagctcccagcgtgagtgaagcagaagacgggtgatttctgcatttccttctgaggtatggggttcatctcactatggactgccagacagtgggcacaggtcagtgggtgcagtgcactgtgtgcgagctgaagcagggcgaggcattgcctcactcaggaagcacaaggggtcagggagttccctttcctagtcaaagaaaggggtggcagacagcacctggaaaatcgggtcactcccacccgaatactgcgcttttctgacaggcttaaaaaacggtgcaccaggagattatatcctgcacctggctcagagggtcctacgcccacggagtaggcgtagctgattgctaccacagcagtctgagatcaaactgcaaggcagcagcgaggctgggggaagggcgcccgccattgcccagccttgcttaggtaaacaaagcagcccagaagctccaactgggtggaacccaccacagcccaaggaggcctgcctgcctctgtaggctccacctctgggggcagggcacagacaaataaaaagacagcagtaacctctgcagacttaaatgtccctgtctgacagctttgaagagagcagtggttctcccagcacgcagctggagatctgagaacgagcagactgcctcctcaagtgggtccctgacccctgactcctgagcagcctaactgggaggcaccccccagtaggggcagactgacacctcacatggctgggtactcctctgagacaaaacttccagaggaacgatcagacagcagcattcatggttcaagaaaaccactcttctgcagacactgctgctgatacccagtcaaacaggatctggagtggacctctagtaaactccaatagacctgcagctgagggtcctgtctgttagaaggaaaactaacaaacagaaaggacatccacaccaaaaacccatctgtacatcaccatcatcaaagaccaaaagtagataaaaccacaaagatggggaaaaaacagagcagaaaaactggaaattctaaaaagcagagcacctctcctcctccaaaggatcgcagaccctcagctgcaggtctgttggagtttgctagaggtccactccagaccctgtttgcctgggtactagcagcggtggctgcagaacagcagattttcgtgaaccgcaaatgctgctatctgatcattcctctggaagttttgtctcagaggagtacccagccatatctccagctgtgtgctgggagaaccattgctctcttcaaagctgtcagacagggacatttaagtctgcagagtttactgctgtctttttatctgtctgtgccctgcccccagaggtggagcctacagaggcaggcaggcctcctcaagctgtggtggggtccacccagttggagcttccgggctgctttgtttacctaagca

SEQ ID NO: 475021 - DNA, 857 bp, Homo sapiens
cggcttcattcttgaagtcaacatgggggtagaggatgaagacacaaggatgaaattgaaactggaaagatatctggagggtggaagccataatcaaaggatgtctgagaaacaaatgggccgggaactgcaaactgttgtacaagacctggatcactatgttccaattcctagtttcatgagagaaaaatcatctccaattttatttaaaccacatttatttgaattattttccaatatgcagctaaactcacactttaaattggaaagagaagcaagtcagaaggttatcaaaatagtccaaacaaaagaagatagtggcttgggcacagtgctgtctatggaggtgctgcagaaaaccacctcacctaatgtcaagccctttctcactgcagcttatatcagtgatgcatctttcagggactgtgaagaccgggccattgtagcccaaccagggacaacgctgcccttttagctctaaaacttcctgaatggttgtccaaggttgtgaggcctgcttcacggctcaattcctctccctatccaatcccccttcctttctttcccttccttacctttaacatgtacatatgaaactccttctcaatgtctgcatctcagagaatccaatcagcaatagaagccatcactgttcttgtagaaatcactgttaatcaaaaaagccaacttctgacaatactgtagaaaacattcaacttaggacttattattttaaggtgctatataacatcaaagctattttttattacatgaaaagctgtaaacaatatatattatcacaattaaaatgtctaaacaaaacattcatactttaaaattcattctgcatctttctc

SEQ ID NO: 475022 - DNA, 799 bp, Homo sapiens
ttcacactcactctctctcctgctgccctgtgaagaggtgccttaggtcatgattttacaacactaacatggaggcgatggcctcattccacgatacaagtgtgcagtggtccccttttgcctttgacatcataggtttggaaaaatttacaatcacatatatctaccattataatatcatacagagtattttcactacactgaaaacccgctatgctctgcctatttgtccctcccttcccctacctctaggaaccactgacctttctactgtatccatagttctgtctttttcagaatgtcatatacaggcagcagagtcaatctctccgagtccagatgcagttgggcctacaggggtcctgggagtgttaaagaaagggaggcatgtggtgacttcagacagcaggaatctagagctggtggccagtagcatttccagtgtcacaaaatgttacggctccctgaagagcatcggtgtagtaattaagctcttagcttctggagttgaaccccctggattcaaagccttgctgcaaacttactgatgtgagtgttatgcaagcaaaacatgcacaaatgacattttacatgacatcttgaagttgaagaggagagaaattagtgctaaagtctgcaagaaaaaattgatactattcttagatttcccagttgcagactgattcctcattttcattagcttcaaatattatttagtgattttagtgtttgccaattcacttgttcttcttttatctgaatcccacaattactccattgacattatgtttacttgatt

SEQ ID NO: 475023 - DNA, 1056 bp, Homo sapiens
cgccgaccccttgcacttcccagaatgctgaacataggcccccaatctcttctggcttcttcattggttagcctatgccctgcagaaaatgcaagttacgttttctacccacagttagcttcaggaaaagaagtattccataagccaattatctatggttccgcaaacactgaaaaaagctttagctggcaaacaaacctgctctgttacttcttctgtgacttcgttgtactctccttcctcctcatcattagtgtgaaaagattccaaggtggaacaaaccaaagcccacagttgtcccattgttaccctgctccccttcttactcaccacggggattgctttaagagtacttggatgtcctccagcttagttccacgttctccaactatttctccagcgacccttcaacctggatttgagccccacatatggacaccacttgccaagaccagctcgggacttcttgaactgctgttgaaaggaggatagtgagaaatgggaatttcttgcagtatctaatccgtattaaaagcaccaagtttccttttgtttctgtccctcagaaaaacactagtgtcccaaggaatcaagggaagggaagacaatgcatatggggtagagagaacactgaacacacaattgataataaataatatgattgattgaactgtccatgcttgccatgaattttgatgcagtctaagacagtttccctgaattactccctcaatgattagccatgattgtcttcagtttctgacattcagaagtatgtgacaaattccactcttttcgcaacttaatgtattcagatgggaaaggatttgaaacttagtttccaatgatgtgtctttcagtataaaatgcccagtaggccaaggtgccatatttggagggatcatgttcttgaacactggcaataatcataataactatgggcagagcctccctaatctgaaaatctaaaatctaaaatgctccaaaatacaaatctttctgagtgccaaaatgacactcaaaggaaatgctcagtggagcatttcagatttcaaa

SEQ ID NO: 475024 - DNA, 476 bp, Homo sapiens
agaaagggacagtaaacaagccatgccgcgactgggacaggccatgtcctgcaagggctggtcagaagcacagtcctcacagccgtggggcgatgtcccacccccaccgccgccctttcctcccggcccagccagggccccccaccggctgtctctcttccaggctctgagcccccagaagcagagctttgttttggaggttctgtctgggtgcctcgagtaccggaagctgctgaccgtcgtggtggatgccttctacgtggaggatggccgactctgcctgcgggttgaccacagccgcttcgaggtgatctgctacctagccacattcctgctggaggaactcggcttccagctattctgtaacatcatcaagtcccagcccgtggataagatgtgcaaggtgagccacccctacctgcccaccaggccacgaggcccacgggtgaggtccgtctgatcctcgcccacctttc

SEQ ID NO: 475025 - DNA, 576 bp, Homo sapiens
gttccctacaaatttttggatattttttccgtttctgtgaagaatgtcattgtggtgtaattcaggatgcgaaccagtagacggcgcttaagactccaaacccctggacagtgtgctcgaatcctgggagttttgggaccacacctacagttttgtctgctgacccctcagggtccagtgctggctgtgcagaaggagccaaactactcccaggcaaccagcaaaacactcaggcaggacaatgaaagctgtgctgtagaacaagatggagagcctggggggaagggtacctatggtcacattttgttgcagctgcagtgtgcacggcaaaaccttctgggatccatgcagacagacctggggaatgcccaaagaagatacttgtgtggaaactccgtacagggctgtgtggaaactctggacaggggttcaagcctagaagactgtcccagtggcccagacaagcatgtctcccagcagatccctgcacaggcaggatggatcctcaattgcaacaaggagaacttggattgagactgggatccctcaggatctgctatgggcaggaaaattgag

SEQ ID NO: 475026 - DNA, 1176 bp, Homo sapiens
tcacctgtcttctgcatcactcatgctgggagcttctctctctctctctctctctctctctctctctctctctgtctctctatctcttgacctgcctggagccagaggtggagtgacacaagcccccctgtggccaccagcactgggactctgctgtgttagatctaaagccagcacagcactaggtctcacccaaggcctgctggaaccactacttgtctaccaccgatgttcactcaagagctgtcaaggagccatggagtgaaatcaaataccttggaaatctacctggtgctctatccttctgcagctcagttggcaatcaaagtacaagataaagttcttcccatctaccctcccctttccaggggcagacaaatctcttcttatggctaccgccagcaccacaggcccacaggacgctatgacctagctttactgcaagagagcctgacaaatgggaatctgacattttcagcctttataatgcgaagtgacctttggcaggaagtaaaaggggaaaaagaaatgtgcaaggcggtccagtgcacccttcatccaacctccttcaatgtcagtactatccacagcttcagtacaatgtcaaaaccaggaaatcaatgttggtataattcatagagtttattcagatgtcaccagtcatacttgtacttagaatgtgtacatgtgtgcatgtgtgtatgtgtgtatgtgctatcacatgtgttgctctatacaatgctatcacatgtgttgctttctgtaattaccaccacaatcatgatacattactgtaccattaccagaggctcccttatgtaacttcttagtagctatacacacaccttcccctaattcctaaccactggtaaccactaatctatttttagcctctataattatgttatttattattataacatattattatcacagatactaggttattctatgtgtttttaacttagtttgaatttatgtgaaagataaaatttaacactgaggaaataagactaaaattctcaaaattatatgtaaatatagcaaaccaattattcttaataactttaacatgttacttacagtttaggtgtaaaatatatcaactgttatatccccaagaagattattttaaaagtcttttaatcaaacaatggtaagttgatcagattttct

SEQ ID NO: 475027 - DNA, 541 bp, Homo sapiens
ggagcccagacctcagggctccctgaaccagggctgtgacatgctgtaacaccctctttggggctatgtggctcctggtgtctctgagatttcgggcaccaacacattctcctcatctaaaggctggtgtccgaagtggaagttgcttgcgtacatctgttccagccacagccttgcacaaagctgacacctgtgccagtgcctggagctacctgtctcaccacagcagccagtgtgcctggctgtatgcagtatctggacccctcctgctggaccaagtgggcgggacgagcccagtgggcacgaacaaaattcaaacagaggtattgctggccacagaggtttctggctggcgtagcaacaccctaaggatcccaatagacagcatagagaagaccttaaatgacatgatggagctgaaaaccgtggcacgggaactacgtgacacatgcacaagcttcagaagccgattcaatcaactggaagaaaaggtatcagtgattgaagatcaaatgaatgaaacaaagcgagaagtttagag

SEQ ID NO: 475028 - DNA, 1598 bp, Homo sapiens
gaaggctttagggctaaaatggtgtgtctggagtttgttccttccgatgttcgggcgagtcccgagtttcttcctcctagtgggttcgtggtctccctgacttcaggagtgaagctgcagaccttcgcggtgagtgttacagttcataaaggtggccgtccggagttggtcattcctcctggtgggtttgtggtcttgctgacttcaggagtgaagctgcagaccttcgcggtgagtgttacagctcataaaggggcgtggacccaaagagtgagcagcagcaagatttattgcgaagagctaaagaaaaaaacccccacaacacggaatgggaccccagcgcgttgccgctgctggcgcgggtggccttttattcccttatctggccccacccacatcctgctgattggtccattttacagagagctgattggtccattttacaaagagctgatttgtccgttttacagagagctgattggtccattttacagagacgatgattttgactatataaggtgaacattatatatttcaaatcaagtattggttatagttggaatgtaccatggtatagttttccttacacaggtcaccacagtgtaattattaatgctaccttttttttttctctccaaaatgtactggtttgaatgacaaattataaaatacaatagttacgtgcaaagattaaattatgtaaaacaaagaaacccaaaaaataaaaaaagttgaaaatgcttacaccagagagtaaaatgtaaaacgtccaaatgtaatactgaatatcatgcgcatcaagccaataacatgtcagaacaataacattaatacaactgcaactataataaagcttaattctgcttatttgacccaacaacatgaaagaaacgaaaaaaatgtgactttcagaatagttcatttcctactcttgtagtgatgctcctaagctatgagacaaaatgcaaaccttaaaaatgcatactgtgttgattattttgattgattactgtttatttttatttgtttgtttaatttggtaatggtaaatatgatacttgatagcaggctcattatatcatgaaaaattataacttttaactttaatgatattttagtgtaatagtacaaaatgtttcataatattgggctcatattggctcctggtataaccatgcaaattatcgataacaatatgcagatacttaaaatcaactttcaaaattactaaagtatgcaacaaaatgaactaaatgataatatttttactttaaaaaatagaactatgcttctgaatctaaaacttttcaatttatatttcttatttcatttggaaaacattaggaaataacatttattttgaccatatttaacatatatattaaatagaaaaaagtaagcacaactatttaaagataataagtcagtaatgcccaacaacctatatgaggcctctaattatttttctattaaaataacatggagtaatattgggctaggtaactctgacaacaaacctgtaaagccaaaaagaaaatctgccacaatatatctatttactaatattcattcaaaatatcaaagacctaatgaaaggg

SEQ ID NO: 475029 - DNA, 807 bp, Homo sapiens
atttgcattgctcctttactctgatatgttcccacaccaagtcctgtgggctctgctgagggtggagtcctgcccttaccatctttctaaacatctctccctgccagctcaagtgtccatggaggtcatggtgtctcctgctgccaagatttccaaagtccatgtcagaaatgggccttcctcatctgttcaactcacacattttccaggagtctcttgggtccaggaacttgtctcagtgcttgtagccccatgcagggttcccggcttcctccctaatcagcctaacatctgtgtcctccctgtgtctactcttgattcctccccttcaaagatctgcttgaagtgtgctagtcttcccaatgtcccggtctctcagtggcagatattactagtgactgcatctagtgagccattttatcttctggttttgatttcagactaagtcttttgtgtgttagtgatggttaccaatggtatttaaaaaaaaaaaaaacctaagtattttagattcctctgcttctctgtgatgtttatgctgagccccaggaaacatatactgatctgcctttctcccttaaagtctcattttgcaccacagagaagagcctgaacagtatgagtttgtgctgaggttcagacagtttaaccaaacccattgatttaaaagatatgtgggctggaataatcaacttatttatttgccaaggaaagccaaatcattatttctaagaccaatattatgagactgtctatactacaaaagcggctgtgggaataataatgtctgtatgaaaatactgtttt

SEQ ID NO: 475030 - DNA, 528 bp, Homo sapiens
cctcctgaggctatgctctggttctttctggaccctgaagtaatctcgtgtccggaatttattccttccagtgggttcttggtctcactgacttcacgaattaatctgtggacctttgcgatttcccgttgggaatatgtgctctcacactttgggaactcacagtgttttgcttgtttggctgaatttgtagcagcctgtggcttctttcaaagaagatgtgaattcttttggttttcttggtatgttcctgtggtggctcttacagcagagaatcccggtgttgagtctccacatgctgttttatctgtccaagttgggagctgcacattagcgctgcacatgggcaacccttctttatctgccattctggggtctgaagacagtgcctttcttctcatagctccactaggcagtggctcagtggagactttatgtggggactccaaccccacatttcccctctgcattgtcctagtagagtttctccatgagggggctccacccctttagcagacttctgcctgg

SEQ ID NO: 475031 - DNA, 1769 bp, Homo sapiens
agttcatgcttctgacttaaatgagtgggtggacggtgacagcgtgcggcagccctcgcagcccttgctcgctctcagtgcctcctcggcctcagcgcccactctggccgcgcttgaggagcccttcagcccgccgctgcactgtgggaaccccttcctgggatggcggaggcccgagccggctccctcagcctgtggggaggtgtggagggagaggcacaggcgggaacccgggctgcgcactgtgcttgcgggccagctagagttccgggtgggcgcgggcttggcgccccagactcggagcagctggccggccccgccagcccccggcagtaaggggcttagcacccgagccagcagctgcagagggtgcgccgcgtcccccagcagtgccggcccactggcgctgcgctcgatttctcctcaggccttagctgcctccccccaacagcccccccgccccgcccgccgagggttcctgcgcggcccgagcctcccagatgagcgccgccgcctgctccactgcgcccagtcccatccaccgcccaagggctgaagagtgcggtggcacggggcgggactggcaggcagctccacctgcggccccagtggacgatccagtggctgtaacattgactgcaaaggtctacagcttcattcctgaagccagcgagaccacaaacctaccaggaggagtgaacaacttcagatgccttgcattaagagctgtaacactcactgcgaaggtttgcagcttcactgctgagccagcgagaccacgaacccaccagaaggaggaaaatccgaacacatccaaacatcagaaggaacaaacggcggactgtaacactcaccgaaagggactcccactgttccagaccctgcaccaagaactgatgaggtaaagatgaaaaaacaactaaaacttgcgatgtgctttgcacaagaaaagcagaaatctttgaggagggaaacaggtaatgcaaagatcacaaacagcaaattcataaaagcagactataaataaatgtgatggaaaatgctactcatattttttagctttttaaataaatgacaggtgatttcacaatcttacttttagacaaaggttacctagtaggaacttactgaaaaaaattatttaaaataactgcaagaaggcttatcaattaaaactaatatattgaaatattatagccagaaaactgttagcaacatcaaaagcatctattacacttggaaaatgcaggtaattttaattcactcagtttatgacatggacatttattagtacatctgtatttgcttcagttggtcatcatgttcaatgttatatttttacttttcaggtattatattaatgagattacttcagtctatggtatatagttatgaataactatgtcaatggttaaatgttaaaatgtttagagcttttaattaaaattgttgtttattcatcttgagaaaccttaaaatatattaataatgtgagtaaaatatggaattaattcttctcacatacctcacacacattctaataattctatcactcccagacctaccccatgtggggaaataattacattttttaacaatttatatataatttctgtaaaggttttcactgtcattaatttagttgtgtatctaaaataactgtaattgtttttaaataacattccacacatattttccagttatttgtctagttttattttatcatgtctttttgatctgtctttccaacttgattggtcataatgacc

SEQ ID NO: 475032 - DNA, 1697 bp, Homo sapiens
tgacagtctgagatggtaggagcagttgtgtgaagatggagtctcccggaggaaatgacaattacctgacaatcacagggccgtcacacctcttcctgtcaggggccgagacattccatacaccaagcttaggtgatgaagaatttgaaatcccacctatctctttggattctgatccctcattggctgtctcagatgtggttgaccactttgatgacctggcagacccttcctcttcacaggatggcagtgcttcagcccagtatggggtccagacattggacatgctctgtgggcatgacccatggcttgatggagcaaggtgggggctcctcagtggaggcttgatcatggacttaaaccactctataggaactcagtatagtgccaacccacctgttacaattgatgtactaatgatagacatgacatctgacttgatggggcatagccagttgaccaccactgatcagtcagaactgagtttccaactgggtttgagcttacggggtggcaccatcctgccacctgcccagtcacctgaagatcgtatttcaaccaccccttcacctactagttcacttcacgaggttggtgttgaggatttctggaggcaaatttccagccagaagacagtggtggtggaagcagggaaaaagcagaagttcccaaagaagagaaaaaagaaagatcctaatgaacctcagaaaccagtttcagcatatgctttattctttcctgatacacgggctgccatcaagggacagaatcctaatgccacttttggtgaggtttcaaaaattgtggcctccatgtgggatagtcttggagaggagcaaaaacagatatataagaggaaaactgaggctgccaagaaagagtatctgaagacactggctgcttacgaagacaaccaggagtgtcaggccactgtggaaacagcggaattggatccagcaccaccatcacaaactccttctccaccttctatggctactgttgacccagcgtctccagcaccagcttcaacagagccccctgtcctgtccccatccattgttgttaactccaccctttcatcctatgtggcaaaccaggcatcttcaggagctgggggtcagcccaatatcaccaagttgattattaccaaacaaacgttgccctcttccattactatgtctcagggagggatggttactgctatcctagccacagtggtgacctcctgggggctccaactagacccaaccagtacagccactatccagcccagtcaacaagcccagattgtcactcggtcagtgttgcaggcagcagcagcagctgctactatcaagagtgtgcctccactcactttgaaaatgcagactaccttagtcccaccaactgtggaaagtagtcctgagcggcctatgaacaatagtcctgaggcccatacagtggaggcaacttctcctgagaccatctgtgagatgatcacagatgtagttcctgaggttgagtcttcttctcagatggatgttgaattggtgagtgggtctcctgtggcactgtcaccccagcctcgatgtgtgatgtctggttgtgagaatcctcccattccagtgaagagttatctgctgggaacatgtctaagagcctgttttggaaacacaagctgggcttctggtagtgcctgatcacagcccatgatgtcc

SEQ ID NO: 475033 - DNA, 1465 bp, Homo sapiens
tcaaagaaaggggtgacagatggcacctggaagatcgggtcactcccaccctaatactgcacttttccaatggtcttagcaaacggcacactaggagattatatctcacgcctggcttggagggtcctacgcccacaaagcctcactcattgctagcacagcagtctgagatcaaactgcaaagtggcagtgaggctgggggagggtccccagccattgctgaggcttgagtaggtaaacagccaggaagctcgaactgggtggagcccacttcagctctaggaggcttgcctgcctctgtagactccacctctagggttaggtcatagccaaacaaaaggcagcagaaatctctgcagacttaaatatccctgaagagagtagtgattctcccagcatgcagctggagatctgagaacaggaggactacctcctccacttggtccctgaaccctgagtagcctaactgggaggcacccacagtaggggcggactgacacctaacatggccgggtaatcctgtgagataaaacttcctgaggaacgatcaagcagcagcatttgcggttcaccaatatccgttgttctgcagccaccgctgctgatacccaggcaaacagggtcaggagtggacctccagcaaactccaacagatcagcagctgagggtcctgactgttagaaggaaaactaaccaacagaaaggacatccacaccaaaaacccatctgtacgtcaccatcttcaaagaccaaaaggagataaaactacaaagatggggaaataacagagcagaaaaactggaaactctaaaaatcagagctcctctcctcctccaaaggaaagcagctcctcaccagcaatggaacatagctggacggagaatgactttgatgaactgagagaaggcttcagacgatcaaactgcaccaagctaaaggagaaagtctgaacccatggcaaagaagttaaaaaccttgaaaaaaaaattagatgaatggctaagtagaataaccaatgcagataagtccttaaaggaccagatggagctgaaaaccatggtacaaaaactacgtgatgaatgcccaagtctcagtagcctattagatcaactggaagaaaggatatcagtgatggaagatgaaatgaatgaaatgaagcaggaagagaagtttagagaaaaaggaataaaaagaaatgaacaaacctccaagaaatatgggactatgagaaaagaccaaatctacctgatctctcagcagaaactctacaagccagaagagagtgggggccaatattcaacattcttaaagaaaataattttcaataattgccagaatttcatatccaggcaaactaagcttcataagtgaaggagaaataaaatactttacagacaagcaaatgctgagagattttgtcaccaccaggcctgccctaaaagagctcctgaaggaagcgctaaac

SEQ ID NO: 475034 - DNA, 1093 bp, Homo sapiens
gctcacgcctgtcatccctgcactttgggaggcttttaatcataaaaaacagcagcagaaggcttgatgagtcttcttcatgaaagggggaaaggttatttagctttgtgctcataccactgcaaagaagctataaatactttgagccatctaccttctcaccactacaatactggttgggtactgtgccaaattggaagggtctattttgaactttcagagtacatgcaagctgaaagaatattctcagaggttagaagggttgagaattatagagtcaaaggcatggaaatctactctacaacattttggcatcttcaaaaagatggtgctctttcagttctgtcaaaagacttaacagacttggataaaaatctgccagaggcctggtgtgctgcagggaactgtttcagtctgcaatgggaacacgatattgcaattaaattcttccagagagctatccaagtagatccaaattatgcttatgcctatactctattagggcgagagtttgtcttaactgaagaattggacaaagcattagcttgtttttgaaatgctatcagagtcaatcctagacatagtaatgcacggtaagtggtaatgaagtgtaaagacaaagtcttgttgatggtgctggtagtcattaatttttcttgttagatagctcttttattatcatgaatttggttactaatatttagggatggtacatactggtcaataacttcaaactaacatgttttcttatgaaatgtgtgtctttaacaaactctcaagttaactaatgataatagaataccagacccttatactcaacagtttcagtcttctaccaaacttttgcagatactgtagttgtgttttgtttgtttgtatgcttgtttagtttagttacttgatttgttactttttcttcgaacagagaaatggtgattgggacaaaactgcttgggaaattggaaaggaatagcataattcacttattggataatagaaaaaaaaaacactgaaaaaattcactagttgttgctttttgacagtgttccaggttattgagttactattaagaacttagtatacccttttattt

SEQ ID NO: 475035 - DNA, 934 bp, Homo sapiens
aggagtgtgccaaacttcccaatgtcccagtcccttgatggtagatgttcctcctctggagccacacctcaaagggccctaggtacagcttgggccgctgctccacagggcataagctataagcctcagcagtttccacatggtgtcagatctgcagatgcacagaatgcaagtataaagaggcttggccacttctccctagatttcagaggatatatggaaaagcctcgatgtccaggcagaagcctgccacaggggcagaaccttcacagaaaaacctctactagggcagtgcagagggaaaatgtggagttggagcccccacacggagtccccaccagggcactgcctggtgttgccagtgttgtggaaatgaggccactgccctccaggccccagaatggtggatttattggcagcttgtaccctgcacctggaaaagccataggcactcagttccaccctgacatcattcttcttggatggaggacaagaacttgggtaaaggtgcagcagacacagaggtttcaagccagaaaaatcgatgccctagagatcttgtaacaatggctttgtttgttactggctttatctaagcataaagttagagttcattctcaatagcttgtcatgtgggggtctccactggacagccaacaacatggcagctttcctcatcaaagccagtaaaggagtcaagacaaattgaaagctctttgttttctccccctcaagaggatagctgtaatttcacaatgacatagtcttaccttatgcctaagccaggtactcaaagggatagaaagtcatataccttccccagatggcctctctcacacattattcacaaataaattccttgtgagcccatattttgtcataattttcatgccaaagacaattctaacatatgtaaatagttcatcgtatgtgt

SEQ ID NO: 475036 - DNA, 2311 bp, Homo sapiens
caaacggaaaaaaacggaattttcgaatggaatcgaagagaatcttcgaacggacccgaatggaatcatctaatggaatggaatggaataatccatggacccgaatgcaatcatcatcgaatggaatcgaatggaatcatcgaatggactcgaatggaataatcattgaacggaatcgaatggaatcgtcatcggatggaaacgaatggaatcatcatcgaatggaaatgaaaggaaatcgaatggaattatcatcgaatggaatcgaatggaatcaacatcaaacggaaaaaaacggaattatcgaatggaatcgaagagaatcatcgaatggacccgaatggaatcatctaatggaatggaatggaataatccatggactcgaatgcaatcatcatcgaatggaatcgaatggaatcatcgaatggactcgaatggaataatcattgaacggaatcgaatggaatcataatcggatggaaatgaatggaatcatcatcgaatggaaatgaaaggagtcatcatctaatggaattgcatggaatcatcataaaatggaatcgaatggaatcaacatcaaatggaatgaaatggaatcattgaacggaattgaatggaatcgtcatggaatgaattgaatgcaatcatcgaatggtctcgaatggaatcatcttcaaatggaatggaatggaatcatcgcatagaatcgaatggaattatcatcgaatggaatcgaatggaatcaacatcaaacggaaaaaaacggaattatcgtatggaatcgaagagaatcatcgaatggacccgaatggaatcatctaatggaatggaatggaataatccatggactcgaatgcaatcatcatcgaatggaatcgaatggaatcatcgaatggactcgaatggaataatcattgaacggaatcgaatggaatcatcatcggatggaaatgaatggaatcatcatcgaatagaatcgaatagaattatggaatgaaatccagtgtgatcatcatcgaatggacccgaatggaatcatcatccaacggaagctaatggaatcaacatcgaatgaatgaaatggaaacaccatcgaattgaaacgaatggaattaccatgaaattgaaatggatggactcatcatcgaatggattcgaatggaatcatcgaataaaattgattgaaatcatcatcgaatggaatcgaatggtatcattgaatggaatcgaatggaatcatcatcagatggaaatgaatggaatcgtcatagaatggaatcgaatggattcattgaatggaatcagatggaatcatcgaatggactggaatggaatcattgaatggactcgaaagggatcatgattgaatggaattgaatggaatcatcgaatggtctcgattggaatcattatcaaatggaatcgaatggaatcaccgaatagaatcgaatggaacaatcatcgaatggactcaaatggaattatcctcaaatggaatcgaatggaattatcgaatgcaatcgcatggaattatcgaatgcaatcgaatagaatcatcgaatgtactcgaatggaatcaacgaatggaatggaatggaacagtcaatgaactcgaatggaatcatcattgaatggaatcgaatggaatcatcgagtggaatcgaatggaattatgatcaaatgtaatcgaatggtatcaacaccaaacggaaaaaaacggaattatcgaatggaatcgaagagaatcttcgaacggacccgaatgaaatcatctaatggaatggaatggaataatccatggactggaaggcaagcatcttcgaatggaatcgaatggaatcatcgaatggactcgaatggaataatcattgaacggaatcgaatggaatcgtcatcggatggaaacgaatggaatcatcatcgaatggaaatgaaaggagtcatcatctaatggaattgcatggaatcatcataaaatggaatcgaatggaatcaacatcaaatggaatcaaatggaatcattgaacggaattgaatggaatcgtcatcgaatgaattgaatgcaatcatcgaaaggtctcgaatggaatcatcttcaaatggaatggaatggaatcatcacatagaatcgaatggaattatcatcgaatggaatcgaatggaatcaacatcaaagggaaaaaaacggaattatcgaatggaatcgaagagaatcatcgaatggacccgaatggaatcatctaatggaatggaatggaataatccatggactcgaatgcaatcatcatcgaatggaatcgaatggaatcat

SEQ ID NO: 475037 - DNA, 7475 bp, Homo sapiens
gaattcaaacgaatggaattatcatgaaattgaaatggatggactcatcatcggatggattcgaatggaatcatcgaataaaattgattgaaatcatcatcaaatggaatcgaatggtatcattgaatggaatcgaatggaatcatcatcagatggaaatgaatggaatcgtcatagaatggaatcgaatggattcattgaatggaatcagatggaatcatcgaatggactggaatggaatcattgaatggactcgaaagggatcattattgaatggaattgaatggaatcatcgaatggtctcgattggaatcattatcaaatggaatcgaatggaatcaccgaatagaatcgaatggaacaatcatcgaatggactcaaatggaattatcctcaaatggaatcgaatggaattatcgaatgcaatcgaatggaattatcgaatgcaatcgaatagaatcatcgaatggactcgaatggaatcatcgaatggaatggaatggaacaaatcgaatggaattatcatcgaatggaatcgaatggtatcaacaccaaacggaaaaaaacggaattatcgaatggaatcgaagagaatcatcgaatggactcgaatggaatcatctaatggaatggaatggaataatccatggactcgaatgcaatcatcatcgaatggaatcgaatggaatcatcgaatggactcgaatggaataatcattgaacggaatcgaatggaatcatcatcggatggaaatgaaatcatcgaatggtctcgattggaatcattatcaaatggaatcgaatggaatcaccaaatagaatcgaatggaacaatcatcgaatggactcaagtggaattatcctcaaatggaatcgaatggaattatcgaatgcaatcgaatggaattatcgaatgcaatcgtatagaatcatcgaatggactcgaatggaatcatcgaatggaatggaatggaacaagaatcatcgaacggacccgaatggaatcatctaatggaatggaatggaataatccatggactcgaatgcaatcatcatcgaatggaatcgaatggaatcatcgaatggactcgaatggaataatcattgaacgaaatcgaatggaatcctcatcggatggaaacgaatggaatcatcatcgaatggaaatgaaaggaaatcatcgactggactcgaatggaatcatcgaatggaatggaatggaacagtcaatgaactcgaatggaatcatcattgaatggaatcgaatggaatcatcgagtggaatcgaatggaattatgatcaaatggaatcgaatgggtcatcatctaatggaatcgcatggaatcatcatcaaatggaatcgaatggaatcatcatcaaatggaatctaatggaatcattgaaaagaattgaatggaatcaatcgaatggaattatcatcgaatggaatcgaatggtatcaacaccaaacggaaaaaaacggaattttcgaatggaatcgaagagaatcttcgaacggacccgaatggaattatctaatggaatggaatggaataatccatggactcgaatgcaatcatcatcgaatggaatcgaatggaatcatcgaatggactcgaatggaataatcattgaacggaatcgaatggaatcaccatcggatggaaacgaatggaatcatcatcgaatggaaatgaaaggaatggaaatgaatggaatcgtcatagaatggaatcgaatggattcattgaatggaatcagatggaatcatcgaatggactggaatggaatcattgaatggactcgaaagggatcattattgaatggaattgaatggaatcatcgaaagaatcatcgaatggactcgaatggaatcatcgaatggaatggaatcgaacagtcaattaactcgaatggaatcatcattgaatggaatcgaatggaatcatcgagtggaatcgaatggaattatgatcaaatggaatcgaatataatcatcatcaaatggaatcaacaacaaccatcatcaattggtattgaatggaattgtcatcaaatggaattcaagggaaacatcatcaaatggaaccgaatggaatcctcattgaatggaaatgaaagggaattcaatggaattatcatcgaatggaatcgaatggaatcaacatcaaacggaaaaaaacggtattatcaaatggaatcgaagagaatcttcgaacggacccgaatggaatcatctaatggaatggaatggaataatccatggactggaaggcaatcatcatcgaatggaatcgaatggaatcatcgaatggactcgaatggaataatcattgaacggaatcgaatggaatcatcatcggatggaaacgaatggaatcatcatcgaatggaaatgaaaggaggatcattattgaatggaattgaatggaatcatcgaatggtctcgattggaatcattatcaaatggaatcgaatggaatcaccgaatagagtcgaatggaacaatcatcgaatggactcaaatggaattctcctcaaatggaatcgaatggaattatcgaatgcaatcgcatggaattatcgaatgcaatcgaatagaatcatcgaatggactcgaatggaatcatcgaatggaatggaatggaacaaatcgaatggaattatcatcgaatggaatcgaatggtatcaacaccaaacggaaaaaaacggaattatcgaatggaatcgaagagaatcttcgaacggacccgaatggaatcatctaatggaatggaatggaataatccatggactcgaatgcaatcatcatcgaatggaaacgaatggaatcatcgaatggactcgaatggaataatcattgaacggaatcgaatggaatcatcatcagatggaaacgaatggaatcatcatcgaatggaaatgaaaggaatggaaatgaatggaatcgtcatagaatggaatcgaatggattcattgaatggaatcagatggaatcatcgaatggactggaatggaatcattgaatggactcgaaagggatcattattgaatggaatcgaatggaatcatcgagtggaatcgaatggaattatgatcaaatggaatcgaataatcgaatggaattatcatcgaatggactcgaatgaatcgaatggaattatcatcgaatggaatcgaatggtatcaacaccaaacggaaaaaaacggaattttcgaatggaatcgaagagaatcttcgaacggacccgaatggaatcatctaatggaatggaatggaataatccatggactcgaatgcaatcatcatcgaatggaatcgaatggaatcatcgaatggactcgaatggaataatcattgaatggaatcgaatggaatcatcatcggatggaaatgaatggaatcatcatcgaatggaaatgaaaggaaatcatcgaatgtactcgaatggaatcatcgaatggaatggaatggaacagtcaatgaactcgaatggaatcatcattgaatggaatcgaatggaatcatcgagtggaatcgaatggaattatgatcaaatggaatcgaatgagtcatcatctgatggaattgcatggaattatcataaaatggaatcgaatggaatcaacatcaaatggaatcaaatggaatcattgaacggaattgaatggaatcaatcgaatggaattatcatcgaatggaatcgaatggtatcaacaccaaacggaaaaaaacggaattttcgaatggaatcgaagagaatcttcgaacggacccgaatggaatcatctaatggaatggaatggaataatccatggactcgaatgcaatcatcatcgaatggaatcgaatggaatcatcgaatggactcgaatggaataatcattgaacggaatcgaatggaatcatcatcggatggaaatgaatggaatcatcatcgaatggaaatgaaaggaatggaaatgaatggaatcgtcatagaatggaatcgaatggattcattgaatggaatcagatgcaatcatcgaatggactggaatggaatcattgaatggactcgaaagggatcattattgaatggaattgaatggaatcatcgaatggtctcgattggaatcattatcaaatggaatcgaatggaatcaccgaatagaatcgaatggaacaatcatcgaatggactcaaatggaattatcctcaaatggaatcgaatggaattatcgaatgcaatcgaatggaattatcgaatgcaatcgaatagaatcatggaatgtactcgaatggaattatcgaatggaatggaatggaacaaatcgaatggaattatcatcgaatggaatcgaatggtatcaacatcaaacggaaaaaaacggaattatcgaatggaatcgaagagaatcttcgaacggacccgaatggaatcatctaatggaatggaatggaataatccatggactggaaggcaatcatcatcgaatggaatcgaatggaatcatcgaatggactcgaatggaataatcattgaacggaatcgaatggaatcatcatcggatggaaacgaatggaatcatcaatcgaatggaattaacattgaatggactcgagtggaatcaacatcaaacagaatcaagcggaattatcgaatggaatcgaagagaagcatcgaatggactcgaatggaatcatctaatggaatggaatggaataatccacggactcgaatgcaatcatcatcgtatagattcgaatggaatcatcgaataaaattgattgaaatcatcatcaaatggaatcgaatggtatcattgaatggaatcgaatggaatcatcatcagatggaaatgaatggaatcaatcatcgaatggactcgaatggaatcatcgaatggaatggaatggaacagtcaatgaactcgaatggaatcatcattgaatggaatcgaaaggaatcatcgagtggaatcgaatggaattatgatcaaatggaatcgaatgggtcatcatctaatggaatcgcatggaatcatcatcaaatggaatcgaatggaatcatcatcaaatggaatctaatggaatcattgaacagaattgaatggaatgaatcgaatggaattatcatcgaatggaatcgaatggtatcaacaccaaacggaaaaaaaaggaattttcgaatggaatcgaagagaatcttcgaacggacccgaatggaatcatgtaatggaatggaatggaataatccatggactcgaatgcaatcatcatcgaatggaatcgaatggaatcatcgaatggactcgaatggaaaaatcattgaacggaatcgaatggaatcatcatcggatggaaacgaatggaatcatcatcgaatggaaatgaaaggagaatggaatcatcgcatagaatcgaatggaattatcatcgaatggaatcgaatggcatcaacaccaaacggaaaaaaacggaattatcgaacggaatcgaacagaatcttcgaacggaaccgaatggaatcatctaatggaatggaatggaataatccatggactcgaatgcaatcatcatcgaatggaatcgaatggaatcaccgaatagaatcgaatggaacaatcatcgaatggactcaaatggaattatcctcaaatggaatggaatggaattatcgaatgcaatcgaatggaattatcgaatgcaatcgaatagaatcatcgaatggactcgaatggaatcatcgaatggaatggaatggaacagaatggaatcatcgcatagaatcgaatggaattatcatcgaatggaatcgaatggtatcaacaccaaacggaaaaaaaaggaattttcgaatggaatcgaagagaatcttcgaacggacccgaatggaatcatctaatggaatggaatggaataatccatggactggagggcaatcatcatcgaatggaatcgaatggattcatcgaatggactcgaatgcaataatcattgaagggaatcgaatggaatcatcatcggatggaaacgaatggaatcatcatcgaatggaaatgaaaggaatggaaatgaatggaatcgtcatagaatggaatcgaatggattcattgaatggaatcagatggtatcatcgaatggactggaatggaatcattgaatggactcgaaagggatcattattgaatggaattgaatggaatcatcgaatggtctcgattggaatcattatcaaatggaatcgaatggaatcaccgaatagaatcgaatggaacaatcatcgaatggactcaaatggaattatcctcaaatggaatcgaatggaattatcgaatgcaatcgaatggaattatcgaatgcaatcgaatagaatcatcgaatggactcgaatggaatcatcgaatggaatggaatggaacaaatcgaatggaattaacattgaatggactcgagtggaatcaacatcaaacagaatcaagcggaattatcgaatggaatcgaagagaagcatcgaatggactcgaatggaatcatctaatggaatggaatggaataatccacggactcgaatgcaatcatcatcatggaatcatcgaatggactggaatggaatcattgaatggactcgaaagggatcattattgaatggaattgaatggaatcatcgaatgaatcatcgaatggactcgaatggaatcatcgaatggaatggaatggaacagtcaatgaactcgaatggaatcatcattgaatggaatcgaatggaatcatcgagtggaatcgaatggaattatgatcaaatggaatcgaataatcgaatggaattatcatcgaatggaatcgaatggtatcaacatcaaacggaaaaaaacggaattatcgaatggaatcgaagagaatcttcgaacggacccgaatggaatcatctaatggaatggaatggaataatccatggactcgaatgcaatcatcatcgaatggaatcgaatggaatcatcgaatggaatggaatggaaaactcaatgaactcgaatggaatcatcactgaatggaatcgaatggaatcatcgagtggaatcgaatggaattatgatcaaatggaatcgaatgaatggaatcatcgcatagaatcgaatggaattaacattgaatggactcgaatggaatcaatatcaaatggaatcaagcggaattatcgaatgaaatcgaagagaatcatcgaatggactcgaatggaatcatctaatggaatggaatggaataatccacggacacgaatgcaatcatcatcaatcgaatggaattatcatcgaatggaatcgaatggtatcaacatcaaacggaaaaaaacggaattatcgaatggaatcgaagagaatcttcgaacggacccgaatggaatcatctaatggaatggaatggaataatccatggactcgaatgcaatcatcatcgaatggaatcgaatggaatcattgaatggactc

SEQ ID NO: 475038 - DNA, 1617 bp, Homo sapiens
tggaattacaatgaaattgaaatggatggactcatcatcgaatggattcgaatggaatcatcgaataaaattgattgaaatcatcatcaaatggaatcgaatggtatcattgaatggaatcgaatggaatcatcatcagatggaaatgaatggaatcgtcatagaatggaatcgaatggattcattgaatggaatcagatggaatcatcgaatggactggaatggaatcattgaatggactcgaaagggatcattattgaatggaattgaatggaatcatcgaatggtctcgattggaatcattatcaaatggaatcgaatggaatcaccgaatagaatcgaatggaacaatcatcgaatggactcaaatggaattatcctcaaatggaatcgaatggaattatcgaatgcaatcgaatggaattatcgaatgcaatcgaatagaatcatcgaatggactcgaatggaatcatcgaatggaatggaatggaacaaatcgaatggaattatcatcgaatggaatcgaatggtatcaacaccaaacggaaaaaaacggaattttcgaatggaatcgaagagaatcttcgaacggacccgaatggaatcatctaatggaatggaatggaataatccatggacccgaatgcaatcatcatcgaatggaatcgaatggaatcatcgaatggactcgaatggaataatcattgaacggaatcgaatggaatcgtcatcggatggaaacgaatggaatcatcatcgaatggaaatgaaaggaagaatcttcgaacggacccgaatggaatcatctaatggaatggaatggaataatccatggactcgaatgcaatcatcatcgaatggaatcgaatggaatcatcgaatggactcgaatggaataatcattgaatggaatcgaatggaatcatcatcggatggaaatgaatggaatcatcatcgaatggaaatgaaaggaaatcatcgaatggactcgaatggaatcatcgaatggaatggaatggaacagtcaatgaactcgaatggaatcatcattgaatggaatcgaatggaatcatcgagtggaatcgaatggaattatgatcaaatggaatcgaatgggtcatcatctaatggaattgcatggaatcatcatcaaatggaatcgaatggaatcaacatcaaatggaatccaatggaatcattgaacgcaattgaatggaatcaatcgaatggaattatcatcgaatggaatcgaatggaatcaacatcaaacggaaaaaaacggaattatcgaatggaatcgaagagaatcatcgaatggacccgaatggaatcatctaatggaatggaatggaataatccgtggactcgaatgcaatcatcatcgaatggaatcgaatggaatcatcgaatggactcgaatggaataatcattgaacggaatcgaatggaatcatcatcggatggaaatgaatggaatcatcatcgaatggaatcgaatagaattatggaacgaaatccagtgtgatcatcatcgaatggacccgaatggaatcatcatccaacggaagctaatggaatcgaatggaatcaacatccaacggaaaaaaatggaattat

SEQ ID NO: 475039 - DNA, 1871 bp, Homo sapiens
atcatcatccaacggaagctaatggaatcaacatcgaatgaatgaaatggaaacaccatcgaattgaaacgaatggaattaccatgaaattgaaatggatggactcatcatcgaatggattcgaatggaatcatcgaataaaattgattgaaatcatcatcgaatggaatcgaatggtatcattgaatggaatcgaatggaatcatcatcagatggaaatgaatggaatcgtcatagaatggaatcgaatggattcattgaatggaatcagatggaatcatcgaatggactggaatggaatcattgaatggactcgaaagggatcattattgaatggaattgaatggaatcatcgaatgaatcatcgaatggactctaatggaatcatcgaatggaatggaatggaacagtcaatgaactcgaatggaatcatcattgaatggaatcgaatggaatcatcgagtggaatcgaatggaattatgatcaaatggaatcgaatgaatggaatcatcgcatagaatcgaatggaattatcatcgaatggaatcgaatggtatcaacaccaaacggaaaaaaacggaattttcgaatggaatcgaagagaatcttcgaacggacccgaaaggaatcatctaatggaatggaatggaataatccatggacacgaatgcaatcatcatcgaatggaatcgaatggaataatcgaatggactcgaatggaataatcattgaacggaatcgaatggaatcgtcatcggatggaaacgaatggaatcatcatcgaatggaaatgaaaggaaatcatcgaatggactcgaatggaatcatcgaatggaatggaatggaacagtcaatgaactcgaatggaatcatcattgaatggaatcgaaaggaatcatcgagtggaatcgaatggaattatgatcaaatggaatcgaatgaatggaatcatcgcatagaatcgaatggaattatcatcaaatggaatcgaatggtatcaacaccaaaccgaaaaaaacggaattatcgaatggaatcgaagagaatcttcgaacggacccgaatggaatcatctaatggaatggaatggaataatccatggactcgaatgcaatcatcatcgaatggaatcgaatggtatcatcgaatggactcgaatggaataatcattgaacggaatcgaatggaatcatcatcggatggaaatgaatggaatcatcatcgaatggaaatgaaaggagagtcatcatctaatggaattgcatggaatcatcatcaaatggaatcgaatggaatcaacatcaaatggaatcaaatggaatcattgaacggaattaaatggaatcgtcatcgaatgaatgaatgcaatcatcgaatggtctcgaatggaatcatcttcaaatggaatggaatggaatcatcgcatagaatcgaatggaattatcatcgaatggaatcgaatggcatcaacatcaaacggaaaaaaacggaattatcgaatggaatcgaagagaatcatcgaacggacccgaatggaatcatctaatggaatggaatggaataatccacggactcgaatgtaatcatcgtcgaatggaatcgaatggactcatcgaatggactccaatggaataatcattgaacggaatcgaatggaatcatcatcggatggaaatgaatggaatcatcatcgaatggaatcgaatagaattatggaatgaaatccagtgtgatcatcatcgaatggacccgaatggacccatcatccaacggaagctaatggaatcaacatcgaatgaatggaatggaaacaccatcgaattgaaacgaatggaattaccatgaaattgaaatggatggactcatcttc

SEQ ID NO: 475040 - DNA, 1131 bp, Homo sapiens
tggaattaccatgaaattgaaatggatggactcatcatcgaatggattcgaatggaatcatcgaataaaattgattgaaatcatcatcgaatggaatcgaatggtatcattgaatggaatcgaatggaatcatcatcagatggaaatgaatggaatcatcatagaatggaatcgaatggattcattgaatggaatcagatggaatcatcgaatggactggaatggaatcattgaatggactcgaaagggatcattattgaatggaattgaatggaatcatcgaatggtctcgattggaatcattatcaaatggaatcgaatggaatcaccgaatagaatcgaatggaacaatcatcgaatggactcaaatggaattatcctcaaatggaatcgaatggaattatcgaatgcaatcgcatggaattatcgaatgcaatcgaatagaatcatcgaatggactcgaatggaatcatcgaatggaatggaatggaacaaatcgaatggaattatcatcgaatggaatcgaatggaatcaacatcaaacggaaaaaaacggaattatcgaatggaatcgaagagaatcatcgaacggactcgaatggaatcatctaatggaatggaatggaataatccatggactcgaatgcaatcatcatcgaatggaatcgaatggaatcatcgaatggactcgaatggaataatcattgaacggaatcgaatggaatcatcggatggaaacgaatggaatcatcatcgaatggaaatgaaaggaagaatcatcgaatggacccgaatggaatcatctaatggaatggaatggaataatccatggactcgaatgcaatcatcatcgaatggaatcgaatggaatcatcgaatggactcgaatggaataatcattgaacggaatcgaatggaatcatcatcggatggaaatgaatggaatcatcatcgaatggaatcggatagaattatggaatgaaatccagtgtgatcatcatcgaatggacccgaattgaatcatcatccaacggaagctaatggaatcaacatcgaatgaatcgaatggaaacaccatcgaattgaaacgaatggaattatcatgaaattgaaatggatggactcatcatc

SEQ ID NO: 475041 - DNA, 1976 bp, Homo sapiens
gaagagaatcttgaacggacccgaatggaatcatctaatggaatggaatggaataatccatggactggaaggcaatcatcatcgaatggaatcgaatggaatcatcgaatggactcgaatggaataatcattgaacggaatcgaatggaatcatcatcggatggaaacgaatggaatcatcatcgaatggaaatgaaaggagaatggaatcatcgcatagaatcgagtgtaattaacattgaatggactcgaatggaatcaacatcaaacggaatcaagcggaattatcgaatggaatcgaagagaatcatcgaatggactcgaatggaatcatctaatggaatggaatggaataatccatgtacacgaatgcaatcatcatcgtataaaatcgaatggaatcatcgaatggactcgaatggaataatcattgaacggaatcgaatggaatcatcatcggatgaaaacgaatggaatcatcatcgaatggaaatgaaaggaatggaaatgaatggaatcgtcatagaatggaatcgaatggattcattgaatggaatcagatggaatcatcgaatggactggaatggaatcattgaatggactcgaaagggatcattattgaatggaattgaatggaatcatcgaatggtctcgattggaatcattatcaaatggaatcgaatggaatcaccgaatagaatcgaatggaacaatcatcgaatggactcaagtggaattatcctcaaatggaatcgaatggaattattgaaggcaatcgaatggaattatcgaatgcaatcgaatagaatcatcgaatggactcgaatggaatcatcgaatggaatggaatggaacagaatggaatcatcgcatagaatcgaatggaattatcatcgaatggaatcgaatggaatcaacatcaaacggaaaaaaacggaattatcgaatggaatcgaagagaatcttgaacggacccgaatggaatcatctaatggaatggaatggaataatccatggactggaaggcaatcatcatcgaatggaatcgaatggaatcatcgaatggactcgaatggaataatcattgaacggaatcgaatggaatcatcatcggatggaaacgaatggaatcatcatcgaatggaaatgaaaggagaatggaatcatcgcatagaatcgagtgtaattaacattgaatggactcgaatggaatcaacatcaaacggaatcaagcggaattatcgaatggaatcgaagagaatcatcgaatggactcgaatggaatcatccaatggaatggaatggaataatccatgtacacgaatgcaatcatcatcgtatacaatcgaatggaatcatcgaatggactcgaatggaataatcattgaacggaatcgaatggaatcatcatcggatggaaacgaatggaatcatcatcgaatggaaatgaaaggaagaatcatcgaacggacccgaatggaatcatctaatggaatggaatggaataatccatggactcgaatgcaatcatcatcgaatggaatcgaatggaatcatcgaatggactcgaatggaataatcattgaacggaatcgaatggaatcatcatcggatggaaacgaatggaatcatcatcgaaaggaaatgaaaggaaatcgaatggaattatcatcgaatggaatcgaatggaatcaacatcaaacggaaaaaaacggaattatcgaatggaatcgaagagaatcatcgaatggacccgaatggaatcatctaatggaatggaatggaataatccatggactcgaatgcaatcatcatcgaatggaatcgaatggaatcatcgaatggactcgaatggaataatcattgaacggaatcgaatggaatcatcattggatggaaatgaatggaatcatcatcgaatggaatcgaatagaattatggaatgaaatccagtgtgatcatcatcgaatggaccc

SEQ ID NO: 475042 - DNA, 525 bp, Homo sapiens
accaatttcagtctcaggcgcagccaaaaatctctaaataagccacagcattaggctctcataggaaggtgaaccctgtcatgaactgcacatacgagggatctaggttgtgcgctccttatgagaatctaacgcctgatgatctgaggtggaaaagtttcatcctaaaccatcagcaacatccaccccctcaccccatccatggaaaaattgtctttcacaaaactggtccctgctgccaaaaagaagaagacagaaacatgtggaatagtttggaacttcctagagacttgttgaatggctttgaccaaaatgctgataatgatttggacaatgaaatccacgctgagggggtttcagatggagatgaggaacttgttgggaactgcagcaaaggtgactcttgttatgttttagcaaagagactgatggcattttgcccctgccctagagatctgtggaactttgaacttgggagagatggtttagggtatctggcagaagaaatttttaagcagtgaccag

SEQ ID NO: 475043 - DNA, 673 bp, Homo sapiens
cagcaccctgtcaaaatggaccaatcagctctctgcaaaacagatgaatcagctctctgtaaaatggactaatcagcaggatgtgggtgtaacactcattgcaaaggtgtgcagcttcactcctgcgccagcgagaccacgaacccacaagaaggaagaaactccgaatacatccgaacatcagaaggaacaaactccggacacgcggactttacgaactgtaacactcaccgcgagggatgaccggtttgtacgtgaccgatggcacactacggctctacaatcaccagattattttccacagagtaacttcctcattaaattttttctaaccatttatctgcccctttctctttcagcccccaattcctatcttcctgacatgcattcagactcatctatttcttctccttttcctttgggccgtctaataccatattttaatgcctgtgacttgttttgaagaaatatccatgaacactgaagcttagagagaggaaacaaaatcggaccagagaattgaaatacgcagtttctccactagatagcagactacgacaggtgacttttggaagggtccatctgtatttacccaaagaaagcatccgtttttctccatcagttcatatttttcttttaccacgacaagtgtttttatgtgatcagaccattc

SEQ ID NO: 475044 - DNA, 3100 bp, Homo sapiens
gtgaacgctagactgcacttccctggagcagagtacttccctgcaatgcagctacccctacattcttcaccctttgtgactgaggaggaaggagattacatcccatctgagaagctgaagcttctggctctgcagcggggagaggacccaggaaacttgaatgagtcagaagaggaggaggaggaagacaaccaaggtgatggtgatgaagggggagaaaatgaaggggagagtggttcggaaacggaggaaaaggcctggctggcagcaccggaggagcagagaacggaggggaagaagcccagggtgatagcaggacacgagaagctggagaagcagcagcagctggcccaggaggaggagagcgaggccaggcgcctggccactatgatgatgaagaagccggagaagtacctgtaccagaagatcatgtttgacaaaaggcgaaaaagccaagaggccaaaaagctaccagagtagcagaaagcccatgatgaggcattgtatataattttacccaaaaatatcctggttttcctttattatagtctaccaatgaaattatcaagagtatactggagaggaaagatatagactttgttgaattccagtctaaattatttgcattgtcactttaagttgcctaacatatctagctttcagtttccttaacggtagaatgtgaacagtaatagtaatatttactatgtagtgtactctttctatttcttaagttacgctaatcatttcagaaaattttctcattaaactttcaaacaacatgaagatccagaaccaagcctgctattaaactaaaaaggtgcacactggatgcacatcaatctttactgtcaccttctacaaactatgattgagtaatagatgagtatttgaatacagcactatattccatcgttggcatgtcagctctcagtgctgactaagtgaattgtgttgctctctgattaacttgaaataaagaggatgttcatttccatcaacatttatcagagctttgtggtacaggctaaacagtttgtgccacaactattcttgaagttaagttcagaaattccaatttatcagcagaattagtttcccagattttcagagctgtattcttgagtatattttctgataatttccatagaatattttcagaaaatgaaatacttagggtttcatcaattgttctgtaaagaaaattttgtgttcaaaagtatccaaataatatatgccatgtcagaccgacacaagagacagaccccttattgagcaggggacctatccagaatattcagtcaacatatattttttgtccttactttactcaaaaaacagcattagaaaaaaaacttacatggctttttgtgtctctgtattctgttacagtgctgaatcatctatgcctgcagcaactgtagcaaaactgacttcaaagtgactgttttttagatttaaactaacgagaagtaaaacaaaacttggccgtgatgagccaaacaaagattaatctatgaacttgatataatcacagctaaattttgtgcgttggtgtaaaaaatgtctctaaattaaaacacaagtaatgatagaggaaaccaaatgtcaatcatcattttatataacttttaaaacaatttaaatttacaaattaatgaatcacaaaggaaaacaaagaataatgttgaaggtaaaattaataggaatctagatcttatttttatgtaaactataatttaatattagcatgtttctaaaatacatttacaaattaggtaatatatgtggaagagcatataaaaatataaatatttaatcaaatgtgaaggcttattttgaatccttggttgtaactcagatttggccttcatgtgcgtggaaacgaatcccctgtatctgagttcagagaattttaataaataagattatattaataaaatcctgttttgggaggtccatgtttattagaagcatcatctgctgaaatccacatcaacattcattcaataataatcataaataacataattagttattataaattagttattctaattattggaatatttgtaaaattaatgacagcaaatattcaaggctaaagaataattatttacttagtggggaatcatacctcatcatatgtatactaatcaaatatcaagtctaatctcttttttgtgttttttctgataatcctgcaatcattaggcattttgctcttacagttttggcttttacatgtatcaagacatgtctgagcagtataagctttatccagtttgaaagttcaataatgaacattagattgagaaaaatatattattgcattcagtagtgttctttttatttgctttattttgtggttgtttgtgttgtataaaattgtgttgtacttttcttcttcattcacagaaatacattacttgagtacattgactttatttggcaaacctgtttcatgtaatattaacaaaatgaggaccacttattgttagttgcattaagtccaagcttcttaaatgagtgaatttatgacctttcaacctaccagttaatattatattattattattattttataaatggtgggcacctctaggctgtaataataataaaacaaaaaactatctgaagaaccttagagttaaggaaggtatgcaaccaaaataaaaacatataactaaatgtaataagcattgaggcaaacacacaaaatatttataaaacatgctattggagaacagtggagccgttgtctgttttcctgagagacaaaagtagacttccttgaggaaatggcatttatcctgaaagttaaagcatgaataggaatgccccaaatgggccaaagatagtgctaataaggaagaagctgtgtacaatcacagatatgtgaagcagggtgcagatgactcaaaggtagttgaaaatatatcagccttaaaaaatggaaatcagatgatcattgtcactgtgttatatgcttaagtgtttggagtttagctcatgtatctacctcctacaaccctcacacacaaaacttcttgtctaaacaataagttaataaattatatggaattgtaatagctgtaat

SEQ ID NO: 475045 - DNA, 1471 bp, Homo sapiens
aagaagagcctttcacctcccgccatgattctgaggcctcgccagccatgtggaactcatgaattgctattcataatggacaaggtgcctgcagagctgctgaaggagtgcatgttccagatgcccaaggagctcagcaggcagccctccgggctgatactggaggttgtctgcacagagtcctgtgatgtgaaccatctatgggtctctcagccgtggataccagtgcctgttccagtggaggtggccagtaggggaatacaatggactctctatgaaatggttttatttaagagcgagaactctatagcagtgccgttcaactcctgtgtcaaagcaagccttgtactggtgtatgggaaggggttcaggtatgctgagatattcatcccccaagcctacaggacagcatggtcgcagtcagagctcgtagaccagttgccttgaccaatgaacctttctttccagggctgaaggcagtgagcatactgggctacatttacttcttgctgcttccccaccatgcactcagcacagtgcccgacactccagcacctgggcatcaaaaaatttgttggacaaccatatgctttcaataaatctttttcatgcctttaatcttttccacttgtagcattttctttaaactattattcctttgaaatgtagcaaatatccaaagtaatgatattagctctgaacaaataacacagcactaagatggaaaaactgtattcataagtctttttataaaatacctctatcaaaccatgcctctgtgaactgagaaataaacagtatgttagcttctgtatcacagacagacttgagaataattcactctcttgctgaagattagtgattggaaaaatggtaaaaaaaatagaaattatgttaaaactttttatttcattgcaaatatgataagtaaatgtgaacaaacgtctcagcagtacaaagctttatttcttctcaatgaaatgattataatggcttagagagaaatatctttaaaaatacatccttgaccagggcaaatgagtgcattgagggaaaatatcatgattcctatcaaagctttttctctctagagccttacaccatcatagagaaaaacaaatgtaaatttcttatgaattgcagataaattacatattctatgagtcataaaagaagcaagcaatacgtcattgtttagttgaaattatagactgatcattacaatcttcttcatgcattatactattcagagagataaccatgcttttttttactaaaaaatgtggaacaagacaaaatattaccctctgtgtctatgtaatagttttgccacttttaattaactattgaattcttatttttaaaaatttgttaaatgttttcattccatagttttctatgtacatttggaagttctactaatttctaacatttctttaatgattactacccatttccctatactcattac

SEQ ID NO: 475046 - DNA, 915 bp, Homo sapiens
ctcttttgtctttgtctttattcccaggtttgtcctactttgttcagtccagcaaggcacctcttccaatctttacagactgccttcagcagggaaagcccttcaccactcagcttgaccagagtctgtgtgggctggttggtatggtccatgtgcaggccttgctactaacatcctcaggcaaattagcctggtgccttggtcagtgggtggacttggtgtctgagtccatgggtatggggttggagcctgattctatgggtgcggtcctggatcctgagtttgagggggttggtctggcactgaggaccattgggatgggacttatggctgatttgcaggggtggtcctggagcactggtctgtatagagtcttgggagcctggaaaaactgttgtgaaaatgaggaccgcagactcacagtgtcaatgaaggctccatcttttaccactagttgcacgcaacaggatgaaaataaagctgacttacgcatcctggagcatccaattggcaaagaccaggagaaagtactcaggagtgtaggagctcagagggatgaggagaaaggcagagatggcgactgtgatggggatgttctcctaaggcagaagtcggcagcaatagctaagttggactagcgtgattgctctatggagttactgaggttgaagtaaagaaatagggctacatatcaagttcaaatgccatggcaagccagctatgggatggagctgtctgtgaggggcactgtgttctttatatcagtgcttaaacctactctgaagggcaccattcctctgaattttctaataaggtgggctttattgttgaatatagtttgacacttattcataattgcagttgtgaacaccttaaaggatataatggtatgtgtctctgtgcacactagatttc

SEQ ID NO: 475047 - DNA, 933 bp, Homo sapiens
ctaacaattgaaggatgaggagggtggagaagaattttattgagtgatggaacagctctcagcagaaaggggacattcctcttctctgctgtattatgttttgcattctgaaaaatgggtgtctgtgtcctgggacgttgaaaggggaattttcctgcgtttcggaatagaaatggtaaccaaaagaattgtgatggccgtgaataacccagaccttttgtgtcatgagtatttctggcacaagggccacagaaattctagtcaagatgtgttacttttgccacaatgtcttttaattgtgccctctcctattgtgctggtatcaactcctgcccagtgtcacaaccttgcccacatgggtcagctcttggcggggcacttcctgcacttctcaactggacagtactcgcctgctcagggtgtcctcttccagctcaggtccctgactgagctggcactccttctaccactttaccagtcaaataagaaactgtcattagaaacaggacaagacttattacacaagtcccttctatctctacagaatcccaaggggagtgctccttaatagcaggtgggaaattaatgctactatatttaataaatgattgtgacatatacaagagcccaagaggaaccaggaggttgccagtgcagacaaggaaatagatgtatttgtacctataaaaaattttatgtgctatctatggaagaatatatgcaatttggggcagcaatattaaacaatttcagaaattacataaattttagaatattataggaagaaatatagaaattcaataaattaaatcagacagaatattttctaggcatagataagacatagtaacatcaagcataatttctatttatttatttatttacttatttatttatttgagatggggtcttgctcagtcacctaggctggaa

SEQ ID NO: 475048 - DNA, 862 bp, Homo sapiens
tgagcgagggctgctagcatgttgacaacggagaaaaggcacaggtctagaagggcaaaatggctttgtgagatgggcctggagttccctgtatccatacattgctgctccctggatcctggctgctccagccatggctcaagtgactccaggtgtatcttgtgccgcagctttggagggcacaagcaataagcctccgcagcttccacatccaggtagtgctaattctgcaggtctgcaaaatgcaagagaggtagggatgtggtggtccccacctagacttcaaaggatatatcaacctgcctgggaatccaagcaaaaacttgctccaggggtgaagttgccacaggtagtccctaccatggcaatgtctagtggagtgttggagtgcagccactgctgggttgggccactggcagcatgcaacatccacctggggagctatagacactgggctccaactcatctaagtaaccacctgagctgtgcatccagcacagccctaggagcagatctgcctaaggccttgggggcccaaccccagccccaggtagacagtgaatatcgattgctaagtgggaaatcattgtgctcaaggaaaatgggtatattaggagagccagagaaggatgattgagagtactgagttctacattgtaatggtttttcacatatttcctatgtttgactttacagaaagcaggcagtagaatatagcaaagtttctccagataagatcctgtcaacactcaggtgtcattagccttaagctgcatgaagagtaaggccagtcataccattacactattgcaaggtacaccagtctatgaggggcatcaaaacagtgagaaagcagtaataa

SEQ ID NO: 475049 - DNA, 1383 bp, Homo sapiens
agacttggtggctatgggatggccactgtgtttcaaggcattggcagccactgtcctgttagcagaagatgctaacaagctcaaattgggacaaaggttgataattcgggttccccacacggtcatcaccctgatggagcagagtgggcatcgctggctttctaaccctaggatgttaagatatcaagggcttttgtgtgaaaacccctacataaccttggagattgtgaatactctaaatccagccacactgctgccaatagaatgggtagagcatggaaagcccatgttgtgtggccctgggtatgactgttgtgtggaaatactggatgaggttttctcaagccgaaaagacataaaggaccagcccttaaaagacccagatgtcgaatactttactgatgggagcagcttcatatctgaaggtgtcagatgggctggatatgcagtggtaacactgaattcagtatctgaagcccaccctctgccagtcggaactttagcccaaattgctgagctaatagctctcactagagcgttgctcttggcaaaaggaaaatcagtaaacatctatactgactcaagaggaaacagaaaggtggacagagaagccaaaagagctgcaatgacagaggtaactaagaaggaaaaggaaacccttactatgcctttactggagcttccccttacagaaccccctaactattctgctaatgaaaaggcttggtttgagcagaagaatggaatttaccagaaaggaggttggtggaagttctcagatgggaggctcgccatcccagaagcaatagcacccccaccccagttcataaagcagtttcatcaaggaacgcatatggagaaaactgcgttagagactcttgtaggatggcatttctatgtgccgcgtctaattgccatcactcgaaccatttgtgagccactgcaggggccaacacagcccccggggattcaaaaaactgaagctacaccttgtgaaaacctgcttgtggactttaccaagctgcctcgagttggaggctaccggtacaggaggtttgtctgcactttctcagggtgggtcgagtcatttcccaccgtgacagagaaagcgcgggaagtaaccaggatcttactaaaggacattattcctagatttggactgcctctaactttagaatcagacaatggcccagcatttatggcagaaaatagtacaacagttaatgcagatgttaaaaatcaaatggaaactgcatacagcttatcacccacagagttctgaaaaagctgaaaaaatgaaccagacattcaaacagctgttaaagaagttttgccaagaaactcatctaaggtgggatcaggtgctccccatggtccttctcc

SEQ ID NO: 475050 - DNA, 569 bp, Homo sapiens
tctgttatgatattccttctaaggtgaaggataagttgctgcatttggcccctcctacaaccaagaaagaggcacaatgcctagtgggcctatttggatttttgaggcgacacattcctcatttgggtgtgttactctgacccttttattgagtgacccgaaaggctgccagtttgagtggggtccagaacaaaagaacgctctgcaacagctccaggctgctgtgcaagctgctctgccacttggacaatatgacccagcagattcaatggagtttgaggtggcagtggcagatagggatgctgtttggagcctttggcaggctcccataagtgaatcacagcagaggcctctaggattttggagcaggaccctgccgtcttctgcagataacaactctccttttgagagacagctcttggcctgttactgggctttggtggaaactgaatgtctgactatgggtcatcaagtcaccagatgacctgaactgcctatcatgaactggatgctttctgacccatctacccataaagtgggttgtgcacagcagcattccatcatcaaat

SEQ ID NO: 475051 - DNA, 585 bp, Homo sapiens
gcagagctgcccaataccatgggaacccacctgttgcatcagcatgacctggatgcctgctgtcatccttggctcctgcctatgtttgcttaaggccctgggcctctataatcagcaggtggcaaagccagccaagcctttgtcctttgcttcggagcaacaaactcccctaggtcccaggcaggtccagaggaaggactgccagactactattggtgttccttcaagtcccaaggctcttcagtcagcttttggtaaatgctgcctggcttggtactcacccttcagggcagtggtctttcctttggtcaagagcaggtctagaaatgacatccaagagtcaagtcctggaatcatggatccaaagggctcgccaccacacctgggtattgctactggttattcagggcccaagagctcttcagttagcagcgtaaggaaggagtctcttttggggctgcaagctgtgctgcctggggtaggggaagattgatgccagcactcctttagctaccacagaccacagttggtgtcttagtgttgcagtgtttgtggcctagactgcctttcaagtttatttagagc

SEQ ID NO: 475052 - DNA, 1651 bp, Homo sapiens
gaggcatattatcaatcttagactttgaattcatggctgtggagatcagtggaatggagtatacctatcaagattatgtccatggcagaacgagccccagagcagaattgagcaccaggaattcccagaagattggagaacatgtcagagcatcagtgaagggcttaggggcaatacccctaaaaattgagcaccaggattcagcaccagaattgagcaccaggaattcccagaagattggagaacatgtcagagcatcagtgatgggcttaggggcaatacccctgaaacttacaccaatatctaggactatcttaaagagtaggcccatggacttggacttcttaaaggtgatcttaaacacaaatttatttttcatagttctggagcctgggaagtccaagatcaagctactggcacttctatcgtctggtgagggcctgcttgcatcctcatttgcagatagcagtcttctcactgtatcttcacatggcagagagcacagagaaaggaagcaaactctttcctgtctcttcttacaagggcacactttcatcagtgttttatccttttccttgtagagatctttcacctcctctgttaaatgcattctgtcgtattttacttatttatttttgtgtctgtgtaaattgaattgagttcttgatttagttcttagtttgaatgttattggtatttagaaatgctattgatttatgtatgttaattttgtatgctgaaactttactgaagtcacttattaaatctaagagccttttggaggattctttggggctttcttggtatacaattatgccttcattgaagtgtaaaatgagattgtttatttgagattttttttaatataggcatttattgctataaacttccatcttataactgtctttctgcattccataagtttttggtatgttgtgttttcacttttttttgctttaaggtattttttattttctttataatttcttctttgacccatgattgttaaagagggtttctgaattttcacatatttgtgaattttccaattatcttcctgatattgatttctaatttcagaccattatgctaggaaaataaatttgatataattttaaacttcttaaatttcttaaggcttgttttgtgacccaacatatgacccattctggaggattcttcatgtccacttgagaagaatgtgtagtctgctgctgttggatggaaggttctgtatatgtctgttagatccatttgctccttagtgttatccaagcgtcattctgctctttccttattgatttctgtctggatgacttatctattattgaaagtgatatattgagatccatccattttgtgtttctgtccatttcttccttcagttctgctgatattggttttatatatttaagtgctgcaatagagggtacatatatatttataattgttatattcacttgatgatttttaccttttgtcagtttattataatctttttttgtctcttgtgacagtttcatatagaatcacaaaagaccctgaatagccaaggaaattttgattaaagaaaacaaaactggaggcatattttatctgattaaaaatatattacaaagttacagtaatcacaacagtatagtactgacat

SEQ ID NO: 475053 - DNA, 577 bp, Homo sapiens
agtgtggagggaaaatgtgggattggagcccccacacagaatccccaccagggcactgcctagtggagctgtggaaatggggccaccatcctccagacttgagaatgataggtccactggtagcttgcctccagcatgaagaagccacaggaactcaattccaacccatgagagtagctgcaagagctgaaccttgcaaagccacagtgttggagctgcccaagggcatgggagcctactgcttgcaccagagtgccttgcaggtggaacatggagtcaaaggagaatattttggagctttaagatttagtgactgccctgctgggttttggacttgtgtggggcctactgcccctttcttttgtccaacttttcccctttggagcagtaatgtttaccaaatgtatagctagcaatactatacatgtaatcaatttggaaataaatggtggtggttttatttttgtgccattttaaaatatacttcaaagtggagtttatcattagttgtataatactgttttgaaaataagatgttcaggattatgttttatgtctaaaccattcaaaataaatt

SEQ ID NO: 475054 - DNA, 591 bp, Homo sapiens
tccctgacaatcaacagaacataatggcagctttgcaggggctgtcacaggagattaaagcagttgagaaccttactgacaaccacctacaggcatggttttcagcttctttgcaatggtttcgaacattctcctttagctcagataagtttattattaccaatcgtcggaagccttcttctctcaactcatcaaagtcattctccttccagctttgtttctttgctggaccctcagctgcaggtctgttggtgtttgctggaggtccactccagaccctgtttgcctgggtatcaccagcagaggctgcagagctgcaattattgcagaacggtaaatgttgctgcctgatccttcctttggaagctttgtctcagagggtcatccagctgtatgagagaaatgtcggtcagcccctacttggaggtgtctcccagttaggctacttggggatcagggacccacttgaggaggcaatctgtctgttctcagatctcaaactccatgcttggagaaccactactctcttcaaagtgtcagatagggacgtttaagtttgcagaggtttctgctgcgttttgttcagctatg

SEQ ID NO: 475055 - DNA, 761 bp, Homo sapiens
tttgtttacctactcaagcctcagcaatggtggacgcccctcccccagcctcgctgctgccttgcagtttgatctcagactgctgtgctagcaggccagtaggaaccttggttgataatagcttgaaccaaagcagcagtagtgggaaaggaaggaaggaaatagatataccgatgatccagtctctttccttcataccctgctctaggtaccaggaacctgacttctgtggactgcatcacctgtactctcttgccctctggttggccaatggaggcactagtaggagcttgatggataggaggagaacgaaatccgagttttattttccccaggtgttggtctgtgttcagacagtggctgtgtttctctacttaaagccacagctccttttgcagcagagcctttcccaccattacagcaattgtcaggtttcagggacaacagcatctctttgccgattaccaggatctcaccccagattacagacggtaaaaactccccagattacagacagtaaaaacttctagcttctagagttaataattcttctcctgccctagttggtgtttttaactctcttcacaactctgtaaatagtcccattattaaatggttttacttgtcacttctatgtgtcctgcaaggaccctgactcaaaatgattcatattctcgaaacgtggcatcattaatttttccttgagccagaatttccagtataaagccaaatagaaatggtgagagctgacatctgtgcct

SEQ ID NO: 475056 - DNA, 480 bp, Homo sapiens
catttcctgagatcaacgatcctaagagaattactcataggaaccaggaatgtgtggtggaaacaggcctctcatttttcagttggatatctgcttgtgccgtggattggctgaaccaccagtgccccacctgcaaagccttatggttgaaagaaaattagaaagattagagagaaataatagagcagcctgcacttctacctcatatcagatgagagaatgtgtgagctcccagaagatccacaggattctgcagaagggcagccagagtgcctcattaagtgggtcccagatcccatgcctcctgactggaggagacccccaccacaggggtcgcaagccaccttataaaggagtgttcccactggcatcaggtcagtgtccccctaggacagagatcccaaaggaagaatcaggcagccatctttgctgttctgcagcctgcagacacctccaggtgcaggagaaacccaggtaaat

SEQ ID NO: 475057 - DNA, 617 bp, Homo sapiens
tctggacactctcccttatgatgtatgtgtactattactacttacatctgcaaagtccaggaacatgtttgtgtacatgaacaaatatacacatatagacacaaacatacacatgagcaaaagctcaatgaagagaatgacttagttttgttcactcttgtaccccccaatgatgtagtgccattttggcgactttgtgcacatcaaagatgtgaaggtcatcctaaaatgaggaaaacggcttcaatttcttacctgcatggtcagtatgtcagctctgccgtccagataggtgtttgggcatgtcagtgtatatgtgctttatggtataatatcagggattatagaattgctgaccatatcttaatgttctactcagaaatttcactcaagagagtaaagaatatgaagtattttgaagaaagtgaggacatggagagagtgagcattcagttacatctaaccttggttgggatggaaaagctgttataaatgatgtccatatatttagcaaatatttattgatagcttgctcggtgtcatacattattttagccactatggtatgcgaacactaatctgaatgcctgttcttaagagagtgtttagtgggagag

SEQ ID NO: 475058 - DNA, 760 bp, Homo sapiens
gtgttcgtaagttctcatcatttgcctcccactttcttaaggtagcaagggcagttccactgcagaggcagtgacagagaggctctcagttgcacctagatgctctgtctagagtattgctactggcttgatagctatggttggctggaggcacaggcctggaggacctgtttgttgaggagatatgagaatgagcacctgcataactgtctgaccagttttttggtaggcctgctgctacatgctggggacccgttccagtctctagtcactttggattttccagcacctggaggtatcatcagtaaaggctgtggaacagcaaaaatggcaacccgctctgggagctccatcccaggcagtacagatctgttgctggccctaacacacctgagtatatttgggggtctaactacctgctttgccagagttgcagctacttttgcagagaagcccagaaagcctgggtatctaaggctccctggtccccatgtgtggctggagaagctgctctgctgagactccatgtagttctgtgttagactgaaggccatggtggaatgactttacaagggcatttcctgacccgaaggtttatataaagcacaaccgtttatttacaactgttcagtgtccaaaatagactctaaatattatatataacccaaaccaggaaagcatttttcagagatataaatgtccctctgaaatctttacacgctttaatgaaaattgaatttatttgatgttgcagttcaaa

SEQ ID NO: 475059 - DNA, 916 bp, Homo sapiens
tcctcaaggtccgttaccatccgaggaatcctgggacagcctgtaaccagtaaggaaatgcagcagtccctgcaacatcccaattccaggagtacaaaaaccagtcagtggagagtagtgcaacatcttagactcatcgaggcagtaattcctctatatccagttgtacccaaaccctatactttgctctctcaaataccagaggaaggagaatggttcatggttctggacctcaaggatgccttcttctgtattcccctgcactctgactcccagtttctctttgcctttgaggatcccaaagaccacacgtcccaacttatgtggacggtcttgccccaagggtttagggatagcccttacctgtttggtcaggtactagcccaagatctaggccacttctcaagtccaggggctctggtcctccagtatgtggatgacttacttttggctaccagttcagaagcctcgtgtcagcaggctaccctagatctcttgaactttctagctaatcaagggtgcaatgtgtctaggttgaaggcccagctttgcctacagcaggtcaaatatctaggcctaatcttagccagagggaccagggccctcagcagggaacgaatacaacctatactggcttatcctcgcccgaagacattaaatcagttgcaggggttccttggaatcaccggcttttgcccactatggatccccagatacagtgagatagccaggcccttctatactctaatcaagtaaacccagagggcaaatactcatctagtagaatgggaaccagaggcagaaacagccttcaaaaccttaaagcaggccctagtacaagctccagctttaagccttcccataggacaaaacttttctttatatgtcacagagagaacagggatagctcttggag

SEQ ID NO: 475060 - DNA, 950 bp, Homo sapiens
gtgggtccatggcttcattcttgaagtcaaagccgtgggtcacagaaaagaaccgcgaaacccagcgattagtgttcagctcgattaggacgaacccgggcccttagctgcgcaggaacaaccgcaagcctctagcctgaacgggagcggcaatgggcgcctccctagatcagaaacgcagcagacatcccgccagatccagaggggtggaagtcaacagcgggtctgcaacaatggcgatcagcagtggtggacggcgagcgatagctcagctcaggctggaacaagcagggagcagaagaatgcctgatggcttcctaatcaagagagagaacagagaaaatatcatagacttgattgtgaaagctatgatggtctccctgcacactcttgccctagagtttctgcactcgctgttcctttcatctaaaacattcttccctgaatacctcgtggcttctcatttactacagtacattaacaaaaagattgcaagaggagggaaaacaaatgcaaaacatccatttgatgaattggtggaggaatttcaagatcaagatctgatgatatttgactaatgaaatttttttcttaaaatataaaaaggaacatccaacactttcccataaagttacttgagtagaaagttcataaatcagattttcataatgaattcagtctatcctttcaaccttagcaaggttatatctaattattcctagagtgattatttctttatttttaaagtaattttcaaagttagtttttaatgataataatggtaactaccataataattttctgaatatttaataaataaatcaataaaaatgattattacagtgtctgccatttcataagtggttaataattcattattatttttattaatagtatcattataaacttttcatttctagtttgaccttcattagagcaattcaatactg

SEQ ID NO: 475061 - DNA, 942 bp, Homo sapiens
gacttcactcttgaagtcagcaagaccatgaacccaccagaaggaacaaacaactctggacgcgccacctttaagagctataacactcactgcaaagcgagaccacgaacccaccaggaggaacaaccaactctggacgtaccacctttaagagctgtaacactcactgtgaaggtctgcagcttcactcctgaagtcagcaagaccacgaacccaccaggaggaacaaacaactccagacacaccatctttgagagctgtaacactcaccgcgaggcttccttgcaatgggttcggacatcctcctttagctcagagaagtttgttattacttaccttctgaagctgacttctgtcaatgtgtcaaagtcattctccatccagctttgttccattgctggcaaggagctgcgatcctctggaggagaagaagcttcaggtccctcagctgcaggtctgttggagtttgctggaggtccactccagaccctgtttgcctgggtgtcaccagtggaggctgcagaacagcaaatattgctgcctgatccttcccctggaagcttcatctcagaggggcacccagctgtatgaggtgtcagaacaccaattattcttaggtttggtcatttaacataatcccaaactttttcaaggctttgttcatttttttatttctgttttctttgtatttgttggattgggttaattcaaaacccttgtctttgagccctgaactttttttttctatttgctcaattctatagctgagactgtctggtgcattttgaatttctctaaatgtgtcctttatttccagaagttgtgtttttttaaatttatgctatctatttcactgaagatttttcccttcatatcttgtatcatttttttgatttcattaagttggatttcacctttctctggtgcctccttgattagctt

SEQ ID NO: 475062 - DNA, 897 bp, Homo sapiens
actactctaggtatctcagccatgcacgtgtatgccaccagccctcctgtagctgtgcacgtgcacactacctttcacatgcatctggtccctgcagctgaccatgacagtgcagaagggaactgtggggttggagccctcacacagagtccccactggggcactgccttgtggagctgtgaaaagaggccgccatcctacaaaccccggaatggtagatccactgacagcttgcaccatgcacctggaaaagctgtggacattaaatgtcagcccatgaaagcagccaggagtggggccataccctgcaaagccacagaggcagagctacccaaggccatgagagcccaccttttgcatcagtgtgaccttgatgtgagacatgcagtcaaaggagatcattttggagctttaagatttgactgccccactggatttcggacttacatgaagcctgtatcccctttgttttggctaatttctcctatttcaaatggaaacatctacccaatacctgtaccccactgtatctaggaagtacctaacatgctgttgaatttacaggctcataagtggaagggacttgccttgtctcagatgagactttgaacttagacttttggattaatgctggaatgaattataaattttgggggactattgggaaggcatgattggtttttgaaatgtgaaaagggcatgagatttgggaggggccaggagaagaatgaattttcattttggttagggatcattgctggacagctagtgttatcctttggtggtatcgctacattcagatttttcatggtgccagaattcttgcactgacttctcatctggagacaccagcacttctaattttttgtaattattttcatatgggaaggaatgttt

SEQ ID NO: 475063 - DNA, 1519 bp, Homo sapiens
gagcctccacacgctgctctgtccatctgagtcggagctgcagtctggtcctgccttttggccatgatccacacaactttttcttatctcgaaaaggtacccagtctcaggtatgtctttatcagcagtctgaacgcagaccattacagtaaattggtaccaggagagtggagcactgctgaaaagacacacgaaaatatgaaagcaactttggaactcgccacagctaaaagggcccaaggtacagctcaagctgtggcttcagaatgtgcaagccccaagtcttggcagcttccacatggtgttgagcctgcgagttcacagaagtcaagaattgagggcagtgcagaagggaaatgtggagtgggagtctgcactagagtccctgctggggcactgcctagtggtgctttgagaagaaggctaccatcctccagaccccagaatggtagatccactgacagcttgcactgtgcccctggaaaagccacagagaatgccagctagtgaaagcagccaggagagaggttgtaccctgcaaagccacaggggtggagctgcacaagactacgggaacccacctcttgcattggtgtcagctgaatcttggaattgagatttttttaaatttatgatttatttaacaccagtaaaattaatatcttcgtgtgctctatacactgtgtcaaagtttctatgtatttccttttaatcaatttttagatttgaaattatgctgatcaagtttgatcattttcgtgtccttgataaaattttcatgcttaaatacactcttatatgagatcatccacatatatctattttccttgccacctgtgaaacatagtgctcttattaagagtcattgtacaataacatcaaagaacaaatagacttgaaagaatcaagtacagtatttatattttttcttacccatatcagctattgactataaacaggggcgtttgccagttttccagaatagtaggaatgctttttttactcaaattcttttcattagaatattgaaattaccatatactagtctgagaactttttttttaagtgtctgtcatttctggttatgccttttttgctttacaagaaaaaaggcccatgataaaacttctgcaaatcttgctctgatacacaaaagagcaaatgcttctctttttatgactagtgctaagcaaagcaatatatgtaaaatatttttagctaaatcatcatagaatttctgagaaaaattttagtacatctggaaaaaaaggaaagctcaaataattctaaaaaggttatctgatatgtatcaaatctgtaattgttttgcattgattttaaacatcattggctattcttaaatatatttcaaatttttttaaatggccacaattattctatggaattccttgagattttatttcaaattgtgtttctttttggatgcacagttatttttaaagggttaatcatgcagaaatgtaagctgtgaatcaataataaccatgctggaaattaa

SEQ ID NO: 475064 - DNA, 1105 bp, Homo sapiens
caccacctgcagtccttggcccatggcttctttctcgcatcatttcaacttcttgtttccatgttcacatctcctactggtaactctgatctcctcttataaggatccatttgattatatagaatccaacaagataatgcattataattgccttatctcaagattcttaattgcaacaacgaagttcactttgtcatataaggcaatatttcataggttttggaaaaaaaaggcacggatatgcttctcacatctcctattcaacatcatactggaagtcctagctaatgcaataagacaagaaaagaagtgcctttcacctaccgccatgattctgaggtctctccagccatgtggaactagtctcactccgtcacccaggctagagctcagtggcataatctccattcaccacaatctcccaggggttcaagcaattcccctgccttggcctcctgagaagctgcagacactcaatgccagactgtgaaatcagccaggagggagactgtccctgcaaagcccaggggcagagctgcccaagaccatgggaacccaccatttgcatcagcgtgacctgaatatgagacctagagtcaaaggagatcatttcggagctttaaaatttgactgccctgctggatttcgggcttgcatggaccctataacccatttgttttggccaatttctcccatttggaatagctagatttacccaatacctgtatgcccattgcatctaggaagtaactagcttgctttcgattttacaggcttatatgtggaagggacttgacttttctcaggtgagacttcggactgtagacgtttgggttaatgctgaaaagagttaagactttgtgggacttttggaaaggcatgattggttttgaaatgtgaggacatgagatttgcgggggcgggcaggggcagaatgatatggtttggctgtgtcaccacccaaatgtcatcttgaattgtatctcccagaattcccacatgttgtgagagggtctctaggggaggttgtctaatcatgagggccagtctttctcatgctattctcatgttagtggataagtctcacaagatctgatggatttat

SEQ ID NO: 475065 - DNA, 809 bp, Homo sapiens
cttggacatctcagcctctagaactgcagtgggtctcagcagctcgggcggcgggaggaactgcagcccagcttcgcgaaggctctaggtgcgcccccgtccgcaggatcctggcacatgccctccccgctgccaggatgcccaagaggaaggtcagctctgacaaaggggccgccaaggaagagcccaagaggagatcggagcggttgttagctaaacctgctcctgaaaaagtggaaaagaagctgaaaagggcagcagggaaagatatatcttcagacaaaaagctgagctttcgcttgctgtccaccactgctgtttgctgccgtcgcagacccgcagctgacttctacccctccggatccagcagggtgtctgctgcactcctgatccagagcacagtggacaccctgccagatccagagggatggaagtcagtggcaggtctgccacagcagcaaacagcagtggtggacggcgagcgaaaactcagctcaagccgtaacaaacatggaccagaagagagtgcagctgcaagatttaatagaacgaaaacagagctcccatacaacgagaggggactcaaagaggcctgtacaaatttgctaactctgctgctgcagcagagctctctgaacctcttctggttctgagtgatccctggttcataaattgctctttgctcaaataaacttcattaaatttattttgtctaaagtctttcttttaatgaataccagtggggtagttccaaacattagctgaacataataagacaggaagggacatgttcagtgtggttgaaaaac

SEQ ID NO: 475066 - DNA, 3261 bp, Homo sapiens
agctgctctagcgagtcatccaaactgcagccaaagtggagactggtgttctcaaaaacggtatggcagtcacctttgctccggtcaatgtcacaactgaagtcaagtctgttgaaatgcaccatgaagttttgagtgaagctcttcctggggacaatgtggacttcgatgtcaagaatgtgtctgtcaaggaggttcatcatggcaacgttgctggtgacagcaaaaacgacccaccaatggaagcagctggcttcactgctcatgctggctgtgctcccgtactggattgccacatggctcacattgcatgcaagtttgctaagctgaagaaaaagactggtagcacttctggtaaaaagctggaagatggccctactttcttgaagtctggtgatgctgccatcgttgatatggttcctggcaagcccatgtgtgttgagagcttctcagtctacccacctctgagtcgctttgctgtttgtgatatgagacagacagttgctgtgggtgtcatcgaagcaatggacaagaaggctgctggagctggcaaggtcaccaagtctacccagaaagctcagaaggctaaatgaacattatccctaatacctgtcacccaagtcttaatcagtggtggaagaacagtctcagaactgtttgtttcaattggccatttaagtttaatagtaaatgactggttaatgataacaatgcatcataaaaccttcagaaggaaaggagaatgttttgtggaccactttggtttttgttgttgttttcttttttctttttctttctttttttttatatgtgtgtggccattttaagtcattagtttttaaaattagtactttttaatggaaacaacttgaccaaaaatctgtcacagaattttgagacccattaaaatgaagtttactaagaaatatatataatatatatatgtatttttttttaagaaataatagtaatctcacataagctctccccaagaataggaaataggaaactcttcccaccggggtgaaatctgatgagaaagaatgatgtgagtagatttttaaagtagtttaggggagtacacaccataaactttagaaacaaatataattttataactgttctgattttcaactctaattaaagctcaaaaaatttgcttcttggtgtaactaaatttttactaatagaataaagaaattcatgtatacagtatttgttgaatacctctcttctcccttctttttaacttctcccctgacagtggctgtccctcatgcattaacatgtgcaattgccttccttcctcaaaactctcccttagccctgtcatttcctctgccatctactccctaccttagccatccagacttgaaaaattaactagatttttgtctctaatttttcacttcccattttttcttttagcttcagcaatctgattttggtaattctattcaaaatgctttcagaaaagtcacgaatgaaccccaaattgccaaatgcaacgtgagctttttagtctttgttttgctggacctttctactgcacttaacactgttaatgaggaactgcttcttgaaacttttctccattgacaactttaataataatatctctggctttctaatcattatgtttctgcctctttgggtccttcctcctttgattactttgtatctttccttcaggggcccaagaggtatgaagactatatgagtacagtttcaaaaagtaaacagcctttcagaaaaatttaaatgcaaatttactggttatatacatgaagtagaattgcatgaatatatttctaaataggtgctctattcaactttttaatatatgcaatatttttattcagcaaattaatttatgtatttataattgctctgctaaagctttgaagaaatattttattaagttgattaaatattgcctctcattttctgtgaatttattatgaaaaatgtaaatagtctggaaataatatttaatgctatctgaaattctgatttaattaatttgtctgaatctaagttaatcagaattgcaaccaactctacatttcactgattaaaacattttaaatgcatcatgataagttgtattactatccttaaaataagtaaccatattcagaagaaaaaatagctacacatttaaacttctatcttgctcatctttggaaactttagggatgacccttccttgctttcaagacaaatcagaattttcagcattcagaatataagtgacaaggttgataagacaagacatatattactttctacgaaacctttaaaaggcaaaccagttactcaccagcacagctccatacacaacacagagactgagacaaagtcttcctagaagtacttcacaattggccctttctacaagtgaaataagaacataattgtaatctctacctaatagcctgaagcctttccctggtagtcagtttaaactgaattaaactacacatgaatatacaagtcaacaattaaagggagattgcaaaatatgggccaagagagtcctgactgagatgctagaaaattatgacttgtctaagtaccagaaagtatttatattaacttgcccttttgcaagagaaaaaaaaagtagttgagaagtagttttatcaaacacttttttgaatcagaaaagcaagtgctattcacctcgctgtaactgcgagtacggtttaaagtctaaatgtgtcctcaaaataaggaacacatgcaaataatcatctgtgaacttaatatatatgattctgataaattctctgaaagcagtatctcaagctgggcaaatttacaaaatggtaaaatatatgttgaattcacccaaacaaataatttcagctatttgtctacaaattacaatctcacattggcagttgctcactcatctaataaattatagccttctgattaatgatctagtccacaaaatcagagaaaaccatagaccaaaatttaggatgtttattttcaatttttaaatctttcttaaaacagttttaaaatattgtctaacaaaaaaaagtccttattctttagtttgactttcattctcatacattctttcagggagtaaatataaatcattaaaaaatggaaattttctaagcaggaaaaaatcaatgaaaaggaacttgtgtagtagattattctacttggaaaggtatagctaagttttttaatacattttcatgttttaaagaacatgaaatttttaagttgaaacagaat

SEQ ID NO: 475067 - DNA, 752 bp, Homo sapiens
gtgacttcagactgggcactcatgtgctgagataaacacggccaagccctttaaacaaacattgtggaaatgttaggccgagcggctctgctgctctctgggaaagtgttcggggttaccagtgcctcaggtctctcttctcctcctcctcccacgggccccctatccccaacagctcggacacccactctcaagcggtgcatccctgaggccctttcctctgcaccgatgctcggactctccgtgtgtgccattttgcagtggggtcacgctccacgtgttgttctgccactgcctttggtttctcgacactgcctcgtggacacgcagggagagcttgcagctggtgacaagctctccagcagggctcttaaagcagaccggagtcgcagaaaagggcactggacagagtcagtccacaagtatctgctgaggtcctactatgcgtcagacactgttcaggcacagggttgtgctgaagacgagagcaacaacatcccaaagctctgtcatgttggtggatgtgtcatgctggtgggggaaagacagagaagagtcaggtaaacatgtaagtacctttagacactggtcactgcttacagaaaatacagtcgggtgagatcatggtcccttgaagggcagacagaatcagcagacttggggtccagcttccatccagcaagaactgtgtgacatggaacacgactctcccctctcctggatttcactttcctcagctgcacaaagacagc

SEQ ID NO: 475068 - DNA, 778 bp, Homo sapiens
ccaaagctgcttctctcctgctgctccaccaaccctcaccatgaggcttccacctcattgctttaagatggttgcatgggctccagccattatgtgccagctcgcgctgctgtggttctcatctgtagaggacgtggaccatccagggaatcacctgcagctgacagaggaaactctgaagcccaccaggcctgtacagactggggaaacaccagtgcctgaggatagtccatatggcatctctgggtcattgatgcaatggggcccttctgctgagacaggcatctccgtgttggggccactgctcggcaagcagagcctgggcaccttccaggccctggtaccatggcaaggagcctcgcgtgtgacacacctgctctctgtgtgcagtgcccggccactacctccgctcagcatgagaaacacggcagacaatgctcagcttcaggggccatctttgagaatcctggggaaacagagggaagcagaagactgcagagagacatgatgtgtcctgattttttattttaaaaagctttaaataaagtatattcatacaaaaatacagacaatcatacaatgacatacctgcgtacccaccacccagcttaagacgtaaacatttcagttatttgttgcctgtggcccttctacacccatttccgttgctccctcctcacctccctgcctgtttgtacaattttgccacatctgtgtatattcataaatggcatatcaaatagttgggcaagttttaaaactttatataaatggtact

SEQ ID NO: 475069 - DNA, 805 bp, Homo sapiens
tcatcagttaaggcaggaacaggccatttgcacttcttttgtggtggaatgtcatcagttaaggcaggaaccggccatctggatgtgtacatgcaggtcacaggggatatgatggcttagcttgggctcagaggcctgacagtggagagttctgtagatgtctattaggtctatatggtcgagtgttgaggagaccaagtctcagctcaacaccactgggattcgtacttccattgtggggagttggtatcgggccactagctttgttctctggacccttgagctcaagtgtccatggagatcatgtggtttcctgctgccagaatctcagaggtctgtggcaagagcaggctgctccttaccagttcagctcaccccttccccaggagatactgaaggccaggaaagagtaccagtgtgtgatagcccagtgcaggatccccagcttcccccctttgccctgggtctgtgtcctccttctgtctaccctcagtgccttccctccaaagatctgctcagagtgtgccagtcttcccgatttcttggtctcttgatggcagatgttcctcctggctgcctgtaattttggggtagcagattgtacagaagcctcagttccataactctgtaaatgtgctccaaatgtgttgcagcttctggggagtgagtgagacgttgttgtgcattagtgggaaatgttttcatttttattataaacccctttgtattatcaaatatacaatcatgtatttctgaactttaacttgggaaaggcctaaattcaattgttgagttgtagtacatt

SEQ ID NO: 475070 - DNA, 811 bp, Homo sapiens
gagctataattctatcagctcccctggtgtcagcttgacaaatgcagatcttgggtcttctcaggttacataatttcttctgcttggagaaaccacctttcggtaaccatgtgttgttatgtttggtattggtggagtcaatttgctacatttctatgtggaatttttatagttttttcatgagcaatactgtgtttccaatggtcttcacagggcaattctccagctcagaaaatgttgagacatgggaatacattattaggaaccattttacagaaaataagaatcttagcagcaatatgtcagcacagtgtcactgtgaaacagctgaaaatccatgtgaggataaaactcatctgcaaaccaggaagagggccctcaccaaatgccagacaccttcagctgctgaaaccttgttcttggaattcgcagcctctataactgtgggaattgaacaatgagaacacttggacacagggtggggaacatcacacacaagagtctgtcgtggggtgggggaggggggagagatagcattaagagaaatacctaatgtaaatgagttaatgggtgcagcacaccaacatagcacatgtatacatatgtaacaaacctgcacattttgcacaggtaccctagaacttaaagtataataataaaaaaaaaatgcttggcaagaaactgaatgcagatgtcaacattacagggagcttatgctgtttggaagtaaaggacacaattctcttttcaaacttgctgaaaagaaagctcatagggaaaaaaatgaatgacaataaatataaacttcagg

SEQ ID NO: 475071 - DNA, 761 bp, Homo sapiens
caaccaattgccctcactgtaagaacagaatgttgaatatcggtcctcactctcttctggcttgtagggcttctgccaagagattcactgttagtctgatgggcttcactttgtgggttggggaagttctcctgggtaatatcctgaagagtgttttccagcttggttccattctccctgtcactttcagatggggtgtctgggcagatgtcttttttgatgttgaacttcctggcgcctttgtttacactgtgaggggaaaacctcctactcaagcctcagaaatggcagacacctctcccctcaccaagctcgagcatcctaggtttacatcagactgctgtgctggcagcaagaatttcaagccagtggatcttagcttgctgggctccatgggggtaggacccactgaggtggacgacttggctccctggcttccaccccctttccaggggagtgaacagttctgtctcattggcattccaggagccactgggttatgaaaaaaaactcctgtggctagctcagtgtcagcccaaatggctgccaaatttagtgcttgaaacccaggaccctggtggtgttggaacccgaggcaatctcctggttggttatgtacttttctatactggctattttgtctgtcagttcctgtattattttatggttattcttacctttcttagactgggtttcaattctcctgaatctcaatgatctttatgcctaaccatattctgaattctatttatgtcatttca

SEQ ID NO: 475072 - DNA, 802 bp, Homo sapiens
catccagtaacattgacatgcattctccatttgaagccctaagctccatgggtcagaggaaagtccatagccgacataaggcactgatgaaagccagcaacatactgctgaccttacaaaacttgccatttagctacatggatgacaatagcaacaagacaccttctcagaaggagacacaagatccctcaccagattctgaatttactagtgccttgaatttggactatccaaagtccaaagttctccagaactgtgaaagacgatgcaaaggcaatgggaatgaggacaagctgaagattgtcagtatctggaggagcaaggaggaaagagagaatgagtctgaaatcagtcagtacccttgtcttgcaggactgtgcagggtacttgtgcacaacgtgcaggacacctctgcactgaaatctgtggttgtgctacagcaactggttatgaagggcatcaagaaggctctcagacagtttccagaactaattgattctcagaccgagagctcaatgattgaaaaggacttcaggtcccttgataaagaacccttcaatgccacaacaagtgtttaaaataaatattagcccagttttccctcaaaaagaaactaaaatggttaggttaaagattgatccttatgagtagctaatgtaaagggagaatcttagatctaaataaagaacaaattagctagataggttggtttgaacaaaaaataattctgatacattccaatctgcattacaggtggtcctgaaaaatagtagtaaatagaaatattttcatcagctaattt

SEQ ID NO: 475073 - DNA, 703 bp, Homo sapiens
cctgactattagaagcaaaactaacaaacagaaagcaataacatcaacctcaacaaaaaggacagccatgcaaaaactcgatctgaagaacgcctcttctcctgtaaaggatcacaactcctcactagcaaggggacaaaattggatggggaatgagtttgatgaagtgacagaagtaggcttcagaaggtggataataaactcctccaagctaaaggaggatgttctaacccagtgcaaggaagctaagaatcttgagaagaacttaaatgaccaaatggagctgaaaaacatagctcaagaatgccatgaagcatacacaagtatcaacagccaaatcgatcaagtggaagaaaggatatcagtgattgaagatcaacttaatgaaataaaatgtgaagacaagattagaggaaaaacaatgaaaagaaatgaacaaagcctccaagaaatatggcattatgtaaaaagaccaaacttacatttcactggtgtaactgaaagtgacaaggagaatggaaccaagttggataacactattcaggatattatccgggagaacttccccaacctagcaagagaggccaacattcaaattcaggaaatgcagagaacaccaccaagatactcctcgagaggggcaatcccaagacacacaatcgtcagattcaccaaggttgaaatgaaggaaaaatgttaaggg

SEQ ID NO: 475074 - DNA, 788 bp, Homo sapiens
acttatcacaccgcattatggtaacagaacaatatttcgagatattaacggaggattccccccaccccaacccacccccaccctaccctgcctccaccctcatcccagccaccaactccaacaacaacacacctacaaggcatccccatatcctaaggccctgggccatctgggagcctcaaagagtaggtgacaccacaaatcacagtggggaagagcatgaagtatgtcaaaaacccatgattaagcagattccagaccctacaaccgggttacagccgcctcagccaccccgttctgcccaacactcagatctgaacccccagttgaatctaccacaggggctatgttggggtcacagaccccttttactaatcattcacagtgatgattatcaaaggcctgcaacccactcatgctaccccaccagctcctgagttaagaattcctagattaaacattcaagttaacaagtattttatttttaaaagccaggggctttagggaacaatccatggctctcagtaattttgttagtgagagattagttccactctgttagctttcctcccgagtctggttgacatctgagcctgcactcaaatgatgggaattctgttagggggctggtgggttaagtgaacagtttcaggctgtggagcagtgggaggaggaaggcttggcttggggggccagtattttaaggcagtgggaaggtactttacatgaagcaagagaggagaagagctcttggagatgaaatgccaagaatagatttcatctctttc

SEQ ID NO: 475075 - DNA, 720 bp, Homo sapiens
aggaaaaccagagacctttgttcacttgtttatctgctgaccttccctccactattatcatgagatatcggagacagacagatgtaggttctatgactacaggaatcaccttcacaggacgaaaccagctattgggaaacacctgtgacaccaactggagtcagccccatcagaacgttaatgctgcaggaagaagccctcaaccaatgatgggtgcggagttggtaggtgactattccagtgatgaccccatagattatgtcactcacatggccttccgattacagcttcatggagctccctccaagatgtctccagagttcttactgccccagggtctcagcatcactcttgtgggtagtctttcatccatagtaaacctaagagtaccactgagtttagaatcaagatacttttcccatgtattttacagaatagtgacattgattgtggttctccgtcgggatgagtaagcattcaaaggaacaaataatttgattacaggagtaagtatgtgagagctatgcctgattctggatctctgctgttagatttgataatctgaaaattcaagtcagtgatcactttgctgggagaaagtattcattcgaatgaagaaacagaactcattgaaatagactgttagaattactattagaaacataaacagaattcagatgtcaagaactggggagagtttgagactttactatacttgca

SEQ ID NO: 475076 - DNA, 610 bp, Homo sapiens
cagacaagacttgcggagaaactcaagttccatctgctgagatgagcaactctcctctggctagggttggtccaaatgctctctccatgcacgggcactggctgagcccagaagggcaagtcttactcaggttattgcgtccaagttcaatgccaccaggtcgcattagaccgaaaagggaagccatgataactgtacaatactctatccctcaccctagtcccccagtcagccctcagtatgtcttctggaagaaagtaacagaagataagcggggtgagagtgctggagcagtcaaggaggacgctgctaatgaatatcatttgaacagagacatgaagaaaagagggagacgcacagaaagatgggggcatacgcagaaggctgagcaagtgcaaaggcccctcaggcttgttatgtttgaggaacagcaaaaagattggcctggcataggacagtaaaccaggagggaaagctattgctggtttgtcagggagtcatggatatgtacgggctaccgtctgcctgcagaactataggcatagatcagtgaagcaccagacattctctgccttcaaggaacttctcctcgtatggtgagtctaggcac

SEQ ID NO: 475077 - DNA, 667 bp, Homo sapiens
ccgcgagggtccgcggcttcattcttgaagtcaaagacaataggaagatgtgggaaagtttggaactccctagaggcatgttgaatggttttgaccaaaatgctgatagtgatatagacaatgaagttctggctgaagttgtctcagatggaaataataaatttattgagaaccggagtaaaggtcattcttgctatgctttagcaaaaagatttcagaggatgtatggaaatgcctggatgtccaggcagaagtttgctgcagggacggatccttcatggagaacctctggtggggcagggcagaagggaaatatggggttagagccctcacacaaagtccccactggggcactgcctggtggagctgtgagaagagggccaccatcctccagaccacaaaatggtagatccactgacagcttgcaccatacatttggaaaaacctcaggcactcaatgccagcccataaaggcagctgtgggggttgtaccatgcaaagccacaggggtggagctgcccaaaaccatgagagcccaccccttgcatcagtgtgccatgggtgttacaggtggagtcaaaaaaattttggagctttaagatttactgactgccagctggatttggactgggtttggacttccatgaggcctgaagcacctttgttt

SEQ ID NO: 475078 - DNA, 590 bp, Homo sapiens
gtttaggctggcatgtgtctgatgagctccagaaacagcaaagaggttaatgtggttgagcagagtgtcagcatgagtgtaccttttttcaccgggcctttcctttccaagcaatctaacaatagcctcccttcagtcttcataacatcaccctttttacatttgtttcagaattctcacaactacaatcatcctaccaatatgcttgctaatgtgtctgcttctgtagctttccgttctcctctccaaacctacgtgaatgcagaatgttcccacagggccctctttgttccttatggaaaagggcacaaagtttctttgtcctggaagcttatacaaaatcagaggattcaaagaaaaaatacaagagaggaaaaagagagattatttcatgagataagaaaaggtctcatctcatcacagaaggaatggtaccagctcctccttgtacctctggtagaattcggctgtgagtccatctggtcctggactctttttggttggtaagctatcgattattgccacaatttcagagcctgttattggtctattcagagattcaacttcttcctggtttagtcttgggaggg

SEQ ID NO: 475079 - DNA, 586 bp, Homo sapiens
tatattataatgagagattttttctcactcagcaagggtccctgtctggagccttatgtctggctcctctatggtaccagaacagagctcatgccagtcagcagcatggggtttaaagatttctttatattggaactctgcaagcttgaatgaagagaaggacacagaaggcttcagaaatgaagacccaaagaaacagggaaacctgtgtatttctatgctgtttgataaagttgatagttgtggagaagtatgcgaggacaagtatgatctaatggccactaaggaagtgagtgcaaacactgttgtggaagcacatctggcaagtctgagaaggaataagatgcccagcagggcaggagcacagggaattgagtttatagaagataaagtcagagagttaacaggcagccacacatcctatagggacttacaggccattattgtaaaaaccttggttcttaaaatgagtgagatggtagatattggagagttttgagcagaagagtgatatgatctgactgaatagttgaagtttgaggttggaacatgtatatacttataaagcttcctagatcatttggat

SEQ ID NO: 475080 - DNA, 524 bp, Homo sapiens
gggtatcttttcagcaacaccccgctctactgtgagttaacaaatcgagtgtgtactcatgctaaagggtaggagcaccggaagctgttcagggcactggcggtatgcaggctctgcatccctagtctgcaccctcaggcacatgtatcccctgtgcaccccttcattccttcagccacaaattagtattattatgcaaatggccaactccaagatgtggctaccctttaacagattaattcagatatgtctgaattttacttgggcccaaagtcagacaccagctaaagtgctctgtaatcccactaaatctgaagtctcatacaacgttcaaagacacaggaatgtgaaacatcgcgttatgctcagggaaatccttgtgagtggagcatcgatgaatgagttaagaagcagtgggaggtcgggccagaaatgttggaaaggcaacaatcagtgtggcttcgtgtacaggaaactcatggctgggtttgatttctcataacagagccacaaatgggctgtgt

SEQ ID NO: 475081 - DNA, 609 bp, Homo sapiens
gaatacatcctgggggaagagtgaccagatgccccatgaaacatgaagagatccaaggcagagagaactcatgtcctgttcttcatctggatatttgatgtctgtttggagaaggccaacaggaaaatggtaactgagagagaaagagaggagcagtgctgctccaggattgcttgggtcaaagtgaagatccaagaagtaggagacctggattacgagacttgtgtcagtgatgggagaaagttgcggctgcagtcttggaggcatcctcagctccgtggtgctaagtgggagcagaatggacactcatatgaagatgggctctcaccatctgtaggattgtatgttcatcatcgtactgcaaacaatggcaaagacgtggaatcaacccaggtgcctatcaatggtggattggataaagaaaatgtggatgctagagctaatgatgatcagttggatttatcattttattctagatctttatcctagataattaccttttcatttcttccatatcatttttaattttcatttattatttatttaactgctatatttgcatatgtttaaaattcttacatccaggtagaaggaggtgcattttaaggt

SEQ ID NO: 475082 - DNA, 971 bp, Homo sapiens
ccttaagtaggccccagcgtctgttgtttccgtttttgtgtttatgacagccccttatctgctccaacaagatgaaagaaatgatcatgaaccaggaaaactcgccaaactgcaggcacaagtgcgcattggtgggaaaggaactgctcacagaaagaagaaggtcttccatagaacagccacagccgatgataaaaagcttcaattctccttaaagaagttacaggtaaacaatatctctggtattgaaaaggtgaatatgtttacaaaccaaggaacagtgatccactttaacaaccctaaatttcaggcatcgctggcagtgaacactttcaccataacaggtcatgctgaggcaaagcaggtgacagaaatgctacccagtgtcttaagccagcttggtgcagacagtctgactagtttaaggagactggctgaagttctgcccaaacaacctgtggatggaaaagcaccacttgctactggaggggatgatgatgatggagttccagaattgtggagaattttgatgaggcttccaggaatgaggcaagctgaattgagtcgacttctgaagaagataaaacttgaagaagttactgggagctgctattttctattatgactgctttttaagaaatttttgttcatggatctgataaaatctagatctctatacttctaagcccaagccccttggacactgtagcactttttagttttcgcttatacataatcattctttttagctaattaagctgcagaagctgggaaataaagttcgaaacaaaggttaataaagttctttgcctagtaaaaaattaaaaagtaaaaataaatttgaaagaccatttatatattttaataggcatttttcacatgttgcaaagattttccctagtgtttcgtttatcttgtatttttttgtgtgttgaaaacttcaagtaaagcccgaaagggtcttccactgc

SEQ ID NO: 475083 - DNA, 1166 bp, Homo sapiens
gatggccgaataggaagagctccagtctacagctcccagcatgagcgacgcagaagacgggtgatttctgcatttccaacaaaggtaccgggttcatctcactggggagtgtcggaaagtgggtgcaggacagtgggtgcagcgcaccaagcgtgagccgaagcagggcaaggcatcgcctcaccagggaagtacaaggggtcagggaattccctttcctagtcaaagaaagggatgacagacggcacctggaaaatcgggtcactcccaccctaatactgtgcttttccaacggtcttagcaaacggcacaccaggagattatatcctgcacctggctcggagggtcctacacccacggagcctctctcattgctagcacggcagtatgagatcaaactgcaaggcagcagcaaggctgggggaggggcacccgccattgccgaggcttgagtaggtaaacaaagcggtggggaagctccaactgggtggagcccaccacagctcaaggaggcctgcctgcctctctagactccacctctgggggcagggtacagccaaacaaaaggcagcagaatcctctgcagaattaaatgtctctgtctgacagctttgaagagagtagtggttctcccaccaggtactcctctgagacaaaacttccagaggaacgatcaggcagcaacatttgctgctcaccaatatctgctgttctgcagcctccgctgctgatacccaggaaaacagggtctggagtggaccttcagcaaactccaacagacctgcagctgagggtcctgactgttagaaggaaaactaacaaacagaaaggacatccacaccaaaaccccatctgtataaaaactggaaatgctaaaaatcagagtgcctctcctcctccaaaggaacgaagctcttcaccagcaatggaacaaagctggacggagaatgactttgatgagttgagagaagaaggcttcaggcaatcaagctactctgagctaaaggaggaagtttgaaccaatgttaaagaagttaaaaaccttgaaaaaaaattagacgaatggctaactagaataactgatgcagagaagttcttaaaggacctgacggagctgaaaaccaaggcacaagaactacgtgacacatgcacaagcttcaacagcc

SEQ ID NO: 475084 - DNA, 1148 bp, Homo sapiens
aaatccactcttctacttattagtagaatgttgaatattggcccccaatctcttctggcttatagagtttctgctgctatgttgtctgttagtctgatgggcttccctttgtggtcaggccactcttccatacagctgatgcagtttgctggtggtcaggtccagaccctagttgccttagtttttcctgtacctggaagtatcactggtgaaggctgtgaaacagcaaagatggcagcttgtttcttcttctggaagctctgtctcaaggagaaccactttccaaatcacaaatccagggatttccctaccccatggaggactcgggccccagacatacctctctattatggccctgaccagaataacacaagaaccttgggtgggtgggacattttcctatttggagctaaaagctctttcctgagcagctatgtgcctctgccagcagaagagaggctttgcaatctctggagaagtgctcctgctgatgccctcctcctccttggatctgtaagccaaactgaatcacagtgaaacacattccccagtcctcactgatgaacaatgtggtagaagatgcattttgtatagaaaagaagcctgaatgaaaagcttcttatgaaatgatggcagactcctttctcacaaaatgcattattcactaaaaaccaaatcatgttgttttggcctttcttgagacatacatatttattggcctttcttgagacatatttatttgacctttattgagacacgtttataaaaaactagatcaagcatcagctgttattagtaagttatatagggatctatacaagtatacctagtgatattaaaacccagaacagtgttatgtttaagcaaaataagttgcattagcttattattgcatttagagttaattttttccaacatgacaatctgaatatttgcaaaggttagcagttatgtttaatcagtaaaattaatcagtattagtgcatactttatagtgatcaatcacattcaattttaggaacagagttgatcacattagaatgtattagtgattattcagacactgaaaaaaataggccgttagctttcattttatgtcactaatattatatattactaatacttatttgaatactttgaatattttt

SEQ ID NO: 475085 - DNA, 708 bp, Homo sapiens
tgggaggtcaatgggactgggcgccacggagcaggggacggcgctcatcggggaagctctggctgcatgcagaagcccatggcgtaagggaggctcaggcaaggcaggctgcaggtcccgagccctgccccgcagggaggcagctgagacccggagagaatttgagcgcagcaccagtgggctggcactgctgggggacctggtgcaccctccacagctgctggcctgggtgctaagcccctcactgcccagggccagcaatgccagctggccgctccaagtgtggagcccgccaagcccatgcccacccggaactcgcactggtctgccagagggagccagctctggcctcggccagcccagagaggggctcccacagtgcagcagcaggctgaagggctcctcaaacgcggccagtgtgggcaccgagggcgaggaggcaacaagagtgagcgagggctgccagcacagtgtcacctctcacaaacataaataatcattgtctgagtagtgaaaatatagatttacttttcttctgtttgcataactaattgttgtaaagtgacaaatttaactgagaacctacttttatttttaaattagtaattttagtttcttttaaaagaaatttaaatttatattagagaaatttgttatgtaaaattggtacaaaaacaaatcttaaaatctaaattaaagacatgtatt

SEQ ID NO: 475086 - DNA, 1743 bp, Homo sapiens
ataaaactgaatgtcttaagcatcacgcaagtcacctcttgaatgctttgctgtttagaaatttcttccgtcagataccctaaatcatctctgtcaaattcaaagttgcacaaatctctagggcagagcatagaaaattcaacgtttttatatggagaactagatcctatacatgttactagttatgtggttgagctccttgacctatttatcattttgaaagaaactgaaatgactctgtcaggtgtagaatgtgcccagatcaacacaatgctcagcccctgtgctgtgatgaagagcaatatatttaagcatctaatatttatattcacttcaacttgtttgttcatttttcattgccttcatacaacttgcttaagtgacagcagtgacagcagtgaacttcgcatggagatcttgcttttaaagattttgcaggaaggaccagagcatcacttagtctgggtttaattcttctcattattaaggcaaaaacattttgaaaagtttcttcactaccctgaaaattatgaggtatactactgtgactattgggaacaggttctattctctgctctatatgagggagcttccagtatttttacctcttacttatattattctgtctctgttcttgtgtagttcatacctcacattgtttcacatcatcactgagaaaaaaattcaaacacattgaaacaaaactctgcaatagacatctgagaatttggacacttagtatcggtattttgaagtgtttcattaatatcttaagacaagtgtatcaaaaccattggcatattttaatttcaaatcaccaaatttgtttttactaacatgacaaactaaggattcactgtcaatgctacatctgcttaatttgacttgagtttacagggaaggacatctaaaagtcatgactttgagaaagtcgtaatttagtcatttttatgtattgtggacccacagatagctagctgagctctagaaattatgaggggaaatcaaggagatataaaatactttccaatattctaaaataatacacatatacttcagaaccaacaaaataaatttaaagaaaatacagataaacatttatggaaaaacatataaatacatattaacatactttaaaatgtctatgtggtttcaattttattaaaaattaaaatatataaaaatagtacatttgatattttaaatatatggttattaattatggaccctcataggatataactggattcaataatgaataaaaacatctctataaagtggtagctttgctaaattagaacagttaatctctagcctattagtctcctacatgctgaggcagccatggaaataaaaatgtgtaatagaattacacttgttattaaatatgggaatttctcttaagacctctattgacaggaaatgtttcttactacattcgattttaagttcagagaggtccagatacatgtttgtatggccttacttagggctgccatttcaacagagccagtattcctttatttttctctaccctcccagataagatgagataactaagagagaaaaagaggttacttgtagagacagtggagtattcataaaaagagggaagagatacctcacagaaattgctcataatgctagaaatgaaatagcatatggtgtaagttggtattaccactctttgcctgagtttttgataccaggaagcatggagatttgaatttaaatgtgcctatc

SEQ ID NO: 475087 - DNA, 1988 bp, Homo sapiens
gttctgctcttagacgccaacactccccacacccaatctaccacaaaatagaacaacagaatcagccaaacgccctctccacggaggcgaaggacacagggtcagccaaaccccctctccaccgaggagaaggacacaggatcagccaaaccccctctccaccgaggagaaggacacaggatcagccaaaccccctctccagcgaggagaaggacacaggatcagccaaaccccctctccagcgaggagaaggacacaggatcagccaaaccccctctccacagagacaaaggacacagaatcagccaaactccctctccacggaggcgaaggacacagaatcagccaaactccctctccacggaggcgaaggacacagaatcagccaaactccctctccacagagacaaaggacacagaatcagccacatcccctctccgtggaggcgaaggacacagaatcagccaaactccctctccgtggaggcgaaggagctgctgcaactgacggagggaccgtccaattgcttggaggaactgtgctcatcggctacataacccctgagaaaaggttaatatatccccttaaacattcttaagtgccaaatctctcctattccatgagcttaaaaccatatcagaccacaactactagcaaagcgactgggggtccacagtcatgcaggggaaagcacaggacttggagaagtggtggccaaatgactaactcaaggctggtggcccacaaatctgtcttcaaatccatgacagggacccttaaggggaagagaaaagacaattgtcaatgagagttgtatgcctatcccccagcaccctgtggacttgctgagaacaagggccttgttttcctcgccctttgtggctgacacggtgctggacacagctgcagcctataacttaggtcccaatcaacaacccttgaagcttcagcagacactatgtcaaaggctgcttagagaagacatccaggagacactatgtcagaggctgctcagagaagacacccagcagacactatgtcagaggatgttcagaggagacacccagcagacactatgtcagaggctgttcagagaagacacccaggagacactatgtcagaggctgttcagaggagacacccagcagacactatgtcagagcctgttcagaggagacacccagcagacactatgtcagaggctgttcagagaagacacccaggagacactatgtcagaggctgttcagaggagacacccagcagacactatgtcagagcctgctcagaggagacacccagcagacactatgtcagaggctgctcagagaagacacccagcagacactacgtcagaggctgctcagaggagacacccagcagacactatgtcagagcctgttcagaggagacacccagcagacactatgtcagaggctgctcagagaagacacccagcagacactatgtcagaggctgttcagaggagacacccagcagacactatgtcagaggctgctcagagaagacacccagcagacactatgtcagaggctgttcagagaagggacccagcagacactatgtcagaggctgttcagagaagggacccagcagacactatgtcagaggctgttcagagaagacacccagcagacactatgtcagaggctgctcagagaagggacccagcagacactatgtcagaggctgctcagagaagagacccagcagacactatatcagaggctgctcagagaagggacccagcagacactatgtcagaggctgctcagagaagggacccagcagacactatgtcagaggctgctcagagaagacacccagcagacactacgtcagaggctgctcagagaagacacccagcagacactacgtcagaggctgttcagaggagacacccagcagaccctatgtcagaggctgctcagagaagagacctagcagacactatgtcagaggctgct

SEQ ID NO: 475088 - DNA, 709 bp, Homo sapiens
aagaaaggctgaggaggtgcctctgctgacagtaatgcagagctaccaccaagatacaagccctgtctactgtgtcactttctcctgtccctgcagtgccaccacaaaagcccagccagctgatggctttagccaatgtggcagcagggagtgtgaggcttctggctttgctaggactcaggccagctgtctccgtcactgggctcagggtgctccctttagttacaaaatcagaccccgtgttgtggagcctagtccacttcaccctcctgccgcctccaccagagcaggtgctggtatccatggctgggagacccacagatgtttcacatcacaggactctgcagacaaccctctttaccagcccatagcctggcagacttgctgggtggctagacccagaagagaaaaaacaatcactgcagttcggctctcaagaagccacatccctaggaaaagggggagagtactacatcaagggaacacccatgggacaaaagactctgaacaacagccttcagccccagaccttccctctgacacagcctacacaaatgagaaggaaccagaaaaccaactctggtaatatgacaaaacaagtttctttaacaccccccaaaatcacactagctcaccagcaatggatccaaaccaagaagaaatccctgattaacctgaaaagaattcagaaggttagttattaagctaa

SEQ ID NO: 475089 - DNA, 496 bp, Homo sapiens
gcccccttcactatgaactttctgccccagagtggtaggcctcgctgtttccctgaaatcgccagtggccgcacattggaagcgcaggtctgggttgatggcctgggcaatctcgtgctccaggcgctggaaggtcagcttgtgcagaagcagctgtgtggacttctggtacctcctggttttgtgcagcgccagggtgccaagcctgtgccggtgaggcttcttgatccctcgtgtagccaggaccctcttgccggtgactttggtggccaggggcttcctgggggcctgccaggcggtggctttgtggtcagtctgcctaatgcgagccatggtgtagggctgtggcctctgccttgtcactgggctgaacctggtgaactggaagcagtgctggtaccagacagcaatggtggtgaggctgtgggcaggattcagagagtctgtgtgttgggatctatgcagaagatgctgccatacacttagccccttccaa

SEQ ID NO: 475090 - DNA, 989 bp, Homo sapiens
cgccggtcagctttcccaagagcacgcattgcgggtctgatgcggtctatcactggcagttcggtgtctgagaacgcggccattgccatggctggaatagccaaggtctttgttggagaggtggtggaagaggccctggacatgtgtgagatgtggggagagacgcccccgctgcagcccaagcatttaagggaggctgttcacaggttaaagcccaagggcctcttccccaacagcaactacaaaagagtcatgcaaacaggtgtgtctgctgagatgttcgccataccccgaggtctgaagggctgcaacgaggatggaatccctgaggccctagatgggaacttggaagaacccagggctcaggaatgtgagctcaggagtgaggatgtcatggacctcacagtagttgacaatgaggcctcagcctcagctcctcctgcagccaaaagacagaaaacagataccaaaggccagaaggagaggaagcccagtgtggatgcagaggaggctcagaggatgacaaccctgctgtctgccatgtctgaggagcagctgtcccgctatgaagtgtgtcgccagttagctttcccaaaagcacttgttgcacgtctgatgtggtctatcactgggagatcggtgcctgagaacatggccattgccatggctggaatagccaaggtctttgttggagaggtggtggaagaggccctggacatgtgtgagatgtggggagaaatgcccccattgcagcccatggatttaagggaggctgtttgcaggttaaagcccaagggcctcttccccaacaactataaaaaagtcatgttctaggcccaaggccagagggaagggtctgtttttgcaggagtaagtactgcattcatcttccaatgacaggactgtgtttgctggagcttctgcctctcagtctaccctgtatttacccatgatcatagtgtcttaaaatgtgaagttggccttacctg

SEQ ID NO: 475091 - DNA, 645 bp, Homo sapiens
cacctgagctgagctatcctgccaacagaggcaggtatggctggaggccctggctgggaggacccaccccacaaggagcagtggattggggtcctgcttaaagaagcagtctggctacattctgggaaagcagctgtgctgtgctgggggcaccctacctcatcccgaccatttggactctccaaagcccacagaccgaaacagccgactgcagatgtccttgccagggatcccgaggccagaatatgtaaagctcctgggtctctgtacatgtttgagcagctgctctgtggagactccacacagctgtgtgcatcagatccaaggcgctggagacacgggcctataaggggacctcctgatccacagattgcaaagatccacgggagaagtgtggtttcccgggggcatgcaatcactcactgcttccctccaccggggtagcttcctgtccccaggatgctttggacccacacaacttttttcttccaggtagaaagaaacagaaaaatgtgtctatatgcccttagaagcacaaatatttagtcaaagcaattatgaaagaagctgctgccttcatctagatgagatcaatgacacagctggagaaagactttaaaatcgtcggtcaattcagcctagact

SEQ ID NO: 475092 - DNA, 675 bp, Homo sapiens
ggcgtgggtcacagacatcaagtactttacaaggcagcaaggttttgcaaaatgagtgagggacaggtagtaggagatgtggccacagaagtggctgatgaaggctttggcatttactctgagttagaacagataatagacaaagatgaaagtaagaagaacactttgcaggcagttacaattatccacgggaaagatgatggtggctccccttcctcaaccatattgatgcataattcacaaataaaaactggactgggaagtcgaagatcaaggcaccagcagatttggtgtctggaggagatgagacaacgcaagtctttcctgcctaggagcctgttaaaccaaaagcaagttagttacttcctagacacaatgagggtacagccattgggtaaatacagccattccaaatgggagaaattggctaaaacgaagggcctacaggccccatgcaagtttgaaatccagcaaggcagtcaaatcttaaagctccaaaatgatctcctttgactccatgtctcacatccaggtcacactgatgcaaaggatgggttcccgtggtcttgggcagctctacccctttggctttgtaggctagagcctccctccccatgctttcacgggctgatgttgaatgtctgcagctttttcatatgcatgttgcaaactgtc

SEQ ID NO: 475093 - DNA, 1483 bp, Homo sapiens
gggtggagccaagatggccgaacaggaacagctccggtctacagctcccagcgtgagtgacacagaagacgggtgatttctgcatttccatctaaggtaccaggttcatctcactaagggagtgccaaacagtgggtgcaggacagtgggtatagcccaccgtgtgggagccgaagctgggcgaggcattgcctcactcaggaagcacaaggggtcagggagttccctttcctagtcaaagaaaggggtgacagatggcacctggaaaatcgggtcactctcaccctaatactgcacttttccaacaggcttggaaaacggcacaccaggagattgtgtcctgcacctgtcttggagggtcttatgccaatggagacttgctgattgctagcatggcactctgagatcaaactgcaaggcggcagcgaggctggggcagtggggcccgccattgcccaggctttcttaggtaaacaaagcagccaggcagctggaactgggtggagcccaccacagctccaggaggcctgtctgcctctgtaggctccacctctgggggcagggcacagacaaacaaaaagtcagcagtaacctctgcagattaaatgtccctatctgacagctttgaagagagtagtggttctcccaacacgcaactggagatctgagactgggcagactgcctcctaaagtgggtcactgaaccccgagcagcctaactgggaggcactcccctgtagggacagactgacacctcactcgaccgggtagtcctctgagaccaaacttccagaggaatgatcagacagctgaatttgttgttcacgaaaatccgctgttctgcagccactgctgctgatacccaggcaaacagggtccggcaaggaaaactaacaaacagaacacccacaccaaaaacccatctgtacatcaccatcatcaaagaccaaaagttgataaaaccacaaagatggggagaaaacagagcagaaaaactggaaactctaaaaagcagagtgcctctccttctccaaaggaacgcagaggaaattcaaaccaatagcaaagaagttaaaaactttgaaaaacaattagacgaatgtataactggaataatcaatgcagagaaatgcttaaagtatctgatggagctgaaagccaagtttcgagaactacgtgaagaaggcagaagcctcaggagccgatgcaatcaactggaagaaagggtatcagtgatggaagatgaaatgaattaaatgaagggagaagggaagtttagagaaaaaagaataaaaagaaacgaacaaagcctccaagaaatatgggactatgtgaaaagatgaaacctacgtctgattggtgtacctgaaagtgatggggagaatggaactaagttggaaaacactctgcaagatattatccaggaggacttccccaatctagcaaggcaggccaacattcagattcaggaaacacagagaac

SEQ ID NO: 475094 - DNA, 512 bp, Homo sapiens
atatcccactagcaggtaacagtatgattccttttaacttttgccaatcagatggataccaagtacaggttgaggtcccttacccaaaatgcttggagccaaaagtgtttcagattttgttttggaatatttgcattaccctctgggcatcatgtgggccttctagacattttcaacaatatctttatgccacaagagagagaataagcagaaaaaactacagagatggtgatgtagcagaaccggccacagacaagaacccctcagacaccaagttgtggaacgaaagggctttattcagctgggagcatccgaggactcacgtctccaaaaaccgagctccccgaattcaggagctgacaccagctgggtgtcctcttattcaattcaattctaacactacatacctgaagatagtgtcagatcccatgggttaagggctcagtcccacaagactatctccaattcagatgccaatcaaaagccccacattgtagcctgtgcttctggct

SEQ ID NO: 475095 - DNA, 594 bp, Homo sapiens
tggaatcatcatggaatggaatggaatggaatcattgaatggacccgaatttagtcatgatcaattggaatcgaatggaatcttcgaatggactcaatttaaatcatcatggaatgcaagtgaatggaatcatcatcgaatggaatcgaatggaatcatcatcaaatggaatacaatggaatcgtcatcaaatggaatcaaatggattcatcatccaataatggaatcattcaatggaatcgaatggaatcatcatcgaatgaaatcacatggaatcatcgaatggactcaaatggaatcatcatcgaacagaatcaaatggaatcatcgaatggattcgaatggaataatcatcgaatggactcaaaaagaattatcaaatggactcgaatggaatcatcatcgaatggactcaaatggaatgatcgaaaggactcgaatggaatcatggattggactcaaatggaattatcgaatgggctcaaatggaatcatcgaatggactcaaatggaatcatcgaacgtaatcgatcacaatcatcatcgaatggaatcaaatgtaatcatcaaatggaattgaatgcagtcatcatc

SEQ ID NO: 475096 - DNA, 976 bp, Homo sapiens
tcgaacgaactcgaatggaatcaatcatcgaatggactcgaatgcaatcatcgaatggacacgaatggaatcatcatcaaatggaatagaatgcaataatcgaatggactcgaatggaattatcatggaatggaatcgaatggaatcattgaatgaactcgaatggaatcatcatcgaatggaatcgaatggagtcatcgaatgggttcgaatggaatcatcatcaaatggaatcatgtggaatccatcatcgaatggaatcaaatggaatcatctaatggacccgaatggaatcatcattgaatggaataaaatggaatcatcatcgaatggaataatcatcatagaatacaacagagtggaatcatcattgaatggaatggaatggaatcatctaatggacaggaatataatcatcatcgaattgaaacatctattgtacccaaatagaatcatcatagaatgcaatagaaatcagcatcgaatggaatcacatggaatcaccaaatggactcgaatggaatcatcattgaatggaatcgaatgtaatcatcaaatggactcgaatggaatcatcattgaatggaatcaaatggaatcactgaatggactcgaatggaatcatcatcaaatggaatcaaagggaatcatcgaatggactcgaatggaatcatcatcaaatggaattggatggaatcaaagaagggactcaaaaggaatcatcgaatggacacaaatggaatcatcactgaatggaatcgaatgggatcatcgaatggactcgactggaatcatcatcgaatggaatcgcataggatcatcatcaaatggaatagaatgggatcatcatcaaaagaaatccaatggaatcactgaatggactcaaggtaatgatcaaatggacgcgaatggaatcatcaaatggaatcgaatggaatcaccaaatggaatcgaatggagttattgaacagactct

SEQ ID NO: 475097 - DNA, 725 bp, Homo sapiens
tgcaattgtaaagaatcatcgaatggactcgaatgcaatcatcgaatggacacgaatggaatcatcatctaatttactcgaagggaatcatcatcaaatagaatcaagtggaatcatcaaatgtactcgaatgcatcgaatggaatcacatggaatcaccaaatggactcgaatggaatcatcattgaatggaatcgaatgtaatcatcaaatggactcgaatggaatcatcattgaatggaatcaaatggaatcactgaatggactcgaatggaatcatcatcaaatggaatcaaagggaatcatcgaatggactcgaatggaatcatcatcaaatggaattggatggaatcaaagaagggactcaaaaggaatcatcgaatggacacaaatggaatcatcactgaatggaatcgaatgggatcatcgaatggactcgactggaatcatcatcgaatggaatcgcataggatcatcatcaaatggaatagaatgggatcatcatcaaaagaaatccaatggaatcactgaatggactcaaggtaatgatcaaatggacgcgaatggaatcatcaaatggaatcgaatggaatcaccaaatggaatcgaatggagttattgaacagactctaatggaatcatcatgagatggaattgaatggaatcattaaatggactcgaatggaatcattgaatggactcgaatgaaatcatcgaatggactc

SEQ ID NO: 475098 - DNA, 800 bp, Homo sapiens
tggacccgaatggaatcatcatctaatggaattgaatgtaatcatcgaatggactcgaatggaatcatcatcaaatggaaccgaatggattcattgaatggaatcgaatggaatcatcatcgaatggaatcgcatgaaatcatcaaatggcatcaaacggaatcatcattgataagaatcaaatggtatcacctaatggacaagaatggaatcactatcgaatgcaatcgaatggatcctcatcgaatggaatcgaatggaatcatcgaatggacacaaattgaatcattgaccaaattgaatggaatcattgaatggacccgaatggaatcatcatcaaatggaattgaatggaatcattgtatggacttgaatggaatcatcatcaaatggaatcgaaaggaatcatggaatggaattgaaaggaatcatcatcaaatggaatggcatggaatcatcaaaaggcatcaaatggaatcatcatcgaaaagaatcaaacagaatcatccaatggacacgaatggaatcattatcaaaaggaatcgaatggagacatcgaatggaatagaatgcaatcatcacggaatggaatcgaatggaatcatcatcaaatggaatcgaaaggaaccatcgaatggaattgagttgaaccatcgatggaatcatcatcgaatggagtcgaatggaatcatcatcgaatggaatcgaatggaatcatcattgaatggagtcgaatggaatcatcatcaaatggaatctaattgaataatcaatgaagggaatcgaatggaatcatcatc

SEQ ID NO: 475099 - DNA, 902 bp, Homo sapiens
tcatcaaatgggattgaacggagtcatcgaatggaatcgaggagaatcatcgaatggattcgaatggaatcatcatcaaatggaatccagtggaatcattgaagggattcgaatggaatcatcatcaaatggaattgaatggaatcaccgaatagacacgaatggaatcatcactccaattgaatcaacaaatgaaatcgaatgcaatcatcgaatggactggaatggaatcatcatcaaatggaatcggatggaattaatgaagggactcgaaaggaatcatcaaaaggacacgaatggaatcatcattgaatggaatcaaatggaatcactgaatggactcgaatggaatcatcatcaaatggaatcaaatgagatcatcgtcaaatggaatcgaatgggaacatcatcaaaagtaatccaatggaatcaccgaatggacacgaaagtaacgatcaaacggacacgaatggaatcatcaaatggaatcgaatggaatcatctaatggactcgaatggaattatcaaatggactcaaatggaggattcaaatggaatcatcatcgaatggaatcgaatggaatcttcatcaagtatgatcaaaagcaatcatcaaatggattcgaatagaatcatcaaatggactcgaatggaatcatcatcgaatggaatcattgaatggactcgaatgaaatcaccgttgaatgaaatcaaatggaatcatcgaatggactcgaatggaatcatcatcgaatggaatcaaatggaatcatcgaatttactcgaatggaaacatcaagtggaattgaaaggaatcatcaaatggacttgaatttaatcattgcatggactcgagtggaatcatcgaatgaactcgaaaggaatcaacatcgaatgaaatc

SEQ ID NO: 475100 - DNA, 662 bp, Homo sapiens
tcctcttttttctttttttaaaggaataggctggatgactcgacctctcccgaggaaggatgtgctctgtccaagctcaagttcccaaggagctctggtcctcggtgaagatgcttttaccacaaactctcgttggccacaagccaccaggggagggagcatgccacaccactcagggtgggcaagcaccaggagaaggggtgtgctacactgctcagggccacatggggaagcaccaggaggcagggggagcaggaggaaaatgtggcagcagcctttggtttctgcaggaagaaatggtcaaggtgggtctctccacatcttcaggaaaatatagaccactcattaacgggatgttgttgaggatgcagctcagtgctggttctttctctgaggtgggcacagaatggggacagaggctgcccaagggagtcatccaggttcttggtgcattgaacaaagaattggacaaaacgcacaaacaaaccaacaaaagaatgaagcactgaaagtagcaaggaaagcacagatttattgaagcaaaagtacactccatggagtgggaggaggctctagtaagaggcttaagagccatgattacaatgttctttagggcttttattaagctaaaaaaaatttggcaacacccctaagtgcccttt

SEQ ID NO: 475101 - DNA, 541 bp, Homo sapiens
gcggaagaccggcaatgaacaataaatgtaagaaaatcatttaattatatagcaaactatgaagaaatgcctgagactgggtaatttataaagaaaaagaggtttaatggactcatacatctgcatgactgaggaggcttcacaatcatggcggaaggcgaaggaggaggaacggcacattttacatggtgacagtcaagagaacgtgtgcaggggaactgccctttataaatccatcaggtctagtgagacttattcactatcatacaaacagcatgggaaaacctgcctccttgattcaataacctcccaaagagaagaagaagtggaagtggaagtggaaatggaagaggaagcattagcagcagcagaagaaggagaaggagaaggagaggaagaagaagagaagaaggaggagaagaaggaagaagcagcagacactgcatggcaggattgaggacccaatcagaataaatttgtgtgagatgataaatttgtcttgttctgggccactaaatttgtgatactatgttacagtggt

SEQ ID NO: 475102 - DNA, 1220 bp, Homo sapiens
tgaaatgctattttgcttataaagggctcagcttattgagcagaatggtactcagtaaatgtttaccttggacaaaggtgaagatgatgatgctagagaatgcagaacaaacagtactaaggtctatcctgacacctgtttccactacctctcaaaaccatgatctcaggcagatgcaatggcaacttaacaggccctgtgaagcttcagagcagtgcctgaaacactctgaggacagaaactcagggaccaacacacctgtttccacagagctggcccctgcctctgcttcctggaagcactgcaagagtgcctgcagttatagccgggagatgaccacagtgagaagccagagaagaggtaaacagcaaccttgggcaagcaggaaggcagaagcagatgcttggaaccacccagaggttttctaccacagaatgtgtaactttgattttcacacacaaaatggtctcaacagtggttgaaatatacaaaaacagaaaccccaatccagcccttagcctgatgctctgcatgctgttaagaagggggtgttgaatgattccatttatttgaaatacccaggagagggagaaggttcatttgagaacttcccctgctgaagctttccctgaccctctgggaggggccggaccctccgtctgtggtcccacaacccctgaggaggaggaggcactcatcaggtcccttggcgccttgcagcccttttcttgggcctgccttttacctccatcctccactccactgatggctcagagcccagaatcctgtcttcatcctggcaacagtcccttcagggcccagcaggatgggggaatgaataaatgtgcctgtttctgaacataatcattaaattctttacctgtaatgtggacattaaaggtgaatcatttccccccttaaaccccctccatctttcaaacctgctacccccgaccctcactgagcaaaaaattggaaagctgctctcacggcattattgaaattgaaatagggaatagaacctggatgtccggagcaatcttctgacctggaattttctcctcgctttgctgcctcttgggaaaagcctgttccgcacaagctggcaaggtactgtggtcgcatcagacctgccttgtagcctcagggcatgtgggtcttggggcatctgacataggagcaccctgattccgtttcaacacttttgagaaaccaaattg

SEQ ID NO: 475103 - DNA, 852 bp, Homo sapiens
ctgaatacccgaagacccccgtactgtgaggaagcccgaccacatggagaggccacatgaaggttctcaaatcagaaccccagctgaggtcccagcctacaaccagtatcaaccaccagacatcaaaactgtttggaaaaggcttaatattttaggagaaaagttaaaagggaaaaaacagcggctgcagcctgcccagctaaagaagaaagtggaatcagcagaacaagtggcctgtgaagatgccagcttggctgcaggaacaaagcgccataagctcggtggctcaaaacattcagaaatggttctctcacagactcacggccacggaagctccaagtctgaactcaaggtgttggcagggctgtgttccctctggaggccctacgggagggcccttcctcgtctccagcttctggtggcttcaatggcaaatactattctggtgtttgctgctccaagaacccagatgtacacagtgttccagcagaggctgcacaaatacagtggccccgaggagcttggcatttttgaggagcatcaaggaggccagtgtggcattcatggaaaggacagagggagagtgggagatgagctgacacttagactacatctgcccttgaagctcaacctctttgccgtactcctgtggtgtttcttggcatctggtatcatttcaaaagggtaagaatggcatagagaaggtttctcattgctaagcatggagtaggaatattttagtgaaatgtgtataaggcctttgcactttctaaaccctctaacctggaacactgtttcttctatttatctcaataactccaaccccttctttgtaccatatttcaagcactg

SEQ ID NO: 475104 - DNA, 3441 bp, Homo sapiens
tagtacgtccacagtcagccttgtggttagcttgtgcgctcagaggaatccagggtaacaatggggcaaactgaaaaaccatttcaaatagaagaagatagcgtttcagtctttgatgcctctgaaagctgtgtaatagattgtgaagaagaggcaggaacagagtttaagaaaggaatggaaagtacacattgtaaaaatgcagtagagcctgtactggcttggtcaatgcagaatgttgactataatcaattacaggaggtaatatatcctgaatcatcaaaattgggagaaggaggtccagaattatttgggccatcagagtttagaccacgatggccaccaactccttctcccgcggttcagatgcctttgatgtcacaatctcaaatgccaatccaggcacagtatccgcaataccagccagtagaaaataaaacccaaccatcggtagtttatcaacacaagccgtcagccgtatttcagtatccgccgtctccagaggttcagtatggatctcaggcggtgcgtcctgtgccaaatagcaaggcactatatcaacaacccaaggcgatggcgtttgatcttacagtaccacctagtggacaaggtagtgcactgcatgagaccattgctacagccagaaaacagggagatcttgaggcatggcaatatccgggaatgttacaaacaatgccggccgggaaagggagtcaagcaagagcttcaatcagacaaggctctaaagagccatatccagacttcgtggcaaggttgcaagatgcggctcaaaaatccattgcagagccacctggcctgtgtccaagatgtggaaaaggaaaacactgggctaaggaatgtcgttctaaatttgataaaaatggacaaccattgtcgggaaacggggaagaggggtcagccccaggccccgcaacaaagtggggcattcccgattcagccatttgttcctcagggttttcagggacaacaacccccacagtaaataccaccatttcaggaaatcagccaattacaatacgacaattatcccctgccacagcaggcagtgctgccgtagatttatgttctactcaaatgatttctttactccctggagagccccctcaaaagattcctacaggggtatatgggccgctgccagaagggatggtaggccttattttaggaagatctagtctaaatttgaaaggagttcaaattcatactggggtaattgactcagattataaaggggaaattcagttagtgatcagctctactgttccctggagtgccaatccaggtgatagaattgctcaattactgctcttgccttatattaaaattggggatagcaaaacagaaacaggagtgtttggaagtaccaacactgctggaaaagctgtttattgggctagtcagctctcagagaatagacctgtgtgtacagttactattcagggaaaacagtttgaaggattagtggatactggggctgatgtttccatcattgccttaaatcaatggcaaaaaaatcagcctaaacaaaagcctgttacaggatttgttggtgtgggcactgcctcagaagtgtatcaaagcagatggcgcatgttaactgatttaagagctgttaatgcagtaattcaacccatggggtctctccaacctgggctgccctgtccagccatcatccccaaagattggcctttaattacagttgatctgaagtattgcttttttaccattcctctggcaaaacaggattttgaaaaatttgcttttactataccagccataaatattaaagaaccagccactagatttctgtggaaagtgttgccccagggaatgcttaatagtccaactatttgtcagacttttgtagctcaagttcttcaaccagttagagacaagttttcagactgttatatcattcattatgttgatgatattttgtgtgcttcagaaacaagagacaaattaattgactgttacacatttctgcagacagaggttgcaaacgcaggcctgacaatagcatctgataagattcagacctccactccttttcattatttgggaatgcaggtagaggagagaaaaattaaaccacaaaaagtagaaataagaaaagacacattaagaacattaaatgactttcaaaaattgctaggagatattaattggattcggccaactctaggcatccgtacttatcccatgtcaactttgttctctatcttgagaggggatccagacttaaatagtaaaagaacattaactccaggggcaactaaagaaattgaattagttgaagaaaaaattcagtcagcaaaatttttgaaattgactacttggattttacctaaaattaccagacaaaaacctctagaaaatgctctgacggtgtttactgatggttccagcaatggaaaagtggcttacactggaccaaaagaacaagttattgaaactcaatatcactcagctcaaagagcagaattggttgctgtcatttcagtgttacaagattttaatcagtctattaacattgtttcagattctgcatatgtagtacaggttacaaaggatgttgagacagccctaatcaaatatagtgtggatgatcagttaaatcagctgtttaaattgttacaacaaactgtaagaaaaagaaatttcccattttatatggctcatatccgagcacatactaatttaccagggcctttaactaaggcaaatgaacaagctgacttgctagtatcatctgccttcatggaagcacaagaacttcaggccctgactcatgtaaatgcaacaggattaaaaaacaaatttgatatcacatggaaacaagcaaaaaatgttgtacaacattatgctcagtgtcaagtcttacacctgcccgctcaagaggcaggagttaatcctagaggtttaagtcctgatgcattatggcaaatgaacgtcacacatgtaccttcatttggaaaattgtcacttgtccatgtgacagttgatacttattcacatttcatatgcgcaacctgccagacaggagaaagtacttcccatgttaaaagacatttattatcttgttttgcagtcagtggatttccagaaaaaattaaaacagataatgggccaggatactgtagtaaagcatttcaaaaattcttaaatcagtggaaaattacacatacaacaggaatccctaatttccaaggacaggctataatggaaacaactaatagaacactcgaagctcaattggttaaacaaaaaaaggaaaaagtaaggaatataacactccccagatgcaacttaatctagcactctatactttaaattttttaaatatatatagaaatcagaccattacttctgcagaacaacattttactggtaaaaagaacagcccacagagggaaaact

SEQ ID NO: 475105 - DNA, 1055 bp, Homo sapiens
ggactcgatggaatcttcattgcatggaatcgaatggaatcatcgaatggactcaaatggaattatcatcgaatggaatcgaatggaatcatcgattggacacaaatggaatcaccattgaatggaatcgaatggaatcttcgaatggaatcgaatgaaattattgaatggaatcgaatagaatcatcattgaatagaatcaaattggatcatcatcaaatggagtctaatgaaatcatcattgaatggaatctagtggagtcatcatctaatggaatggaatggaatcagcaaggaatggaatctaatggagaaatcgaatggaatccattggaatcatcatcaaatggaaccgaatgcagtcatcatagaacggaatcaaatgaaatcaacaaagggactcgaattgtgtcctcattgaatggaatcagatggaatcatcgaatggactcgaatggaatcatcgaatggactcgaatggaaacatcgtcgtatggaattgaatggaatcctcgaatggactctaatggaatcatcatcgaatggaatcgaatggaattgaattgaatcattgaatggactctaatggaatcatcgtcgaatggaatcgaatggaatcatcaaatggactcgaatggaatcattgaatggactcgaatggaatcatcatcgaatggaattgagtggaatcctctaatggaatcaaatggaatcatcaaatggaattgaagagatttataagaaacttacttgaaccaaaattagaaaaacaaacaaaccaaaagcccctaaaactgtgatgagcaaagtagacatcagaacaggaaatatcactggggatgaagaataacatttcaaaatgacaaaggggaaaatacatcaagaagtcatgtaaataagaaatatgtatgcacacaatagcattacttcaaaatacataatataaaacctattaaaactgaaaggtaaaatagtaaaaccacagtcatccatggggatttcaacagtctcctgccataaatatttaaattttgttaaacgaaaagttggtaagc

SEQ ID NO: 475106 - DNA, 665 bp, Homo sapiens
gtgagggctgccaccttgatggtttttgatggataatggggttgaccgctttgttccttccacatatttttatgtttgaccatttgctcagcagagcagggaaatgggaatcacatgacctgaaggatgatgtaggaactgaacagaaaccatccttgtttcctgaatctgaacatggcaccctcttttcacggtgtctgtatctgctcagtccagcggcccctcgaaaagagggaatcttgattttcaaacttaaaatttggcccaaagcccactgctgcccacaatgcccgccagacacgttcctcttaccttttagtttctatgggaatgctctctttgaagaacccatgaagcagtgtcaggctggtgtgaggatcagcagcaatttctttgaggaggagagcccgtttcatcgctcacaggccatgtctgagtggatcaagaagaacagagtgcccttttatgagattttgtctgcccatgcttatgggtatgacgtcgtatcgcattgtggttttgatttctgtttccctgatgatgaatttcattgagcatcttttcatgtgcttattggccacttatatgtcttccttggagatgtgccatattttcatattcaaaaatgaaagcacaggtccacacaaaaatttgtacataaataa

SEQ ID NO: 475107 - DNA, 824 bp, Homo sapiens
tggatcccacacaggaaccacaggtggagctgcctgccagtccctctccgtgctcccacactcctcatcccttgggtggtcgatgggactgggcgctgtggagcagggggcagtgcttgtcggggaggctccggccacacaggagcccatggagggaggaggctcaggaatgttgggctgcaggtcccaagccctgtccacggggaggcagctaaggcccagcgagaagtcgagcacagcagctgctggcccaggtgctaagcctctcacagcccggggccggcagggccagctggcagctcctagtgctgggccaccaagcccacgcccacccggaactccagccggcaggcaagaagcacgcagccccggttccggctcatgcctctccctccacacctccctgcaagctgagggagccagctctgaccttggcaagcccagaaagggcctcccaccgtgcagccgcgggttgaagggctcctcaagtgctgccaaagtgggagcccaggcagaggaggcaccaagagtgagcgagggctgtgatggctgccagcacgctgtcacctctcagaaggagtgattaatctgggcttctccagaaagtccattcctgtctctccttgcaactggctctcagcaggtggtaggaggaaatccttaacagaaccaatttacgtgactgtttggaggactctcgctagccgcaggaggtgtttgcatttttaaattggttagtagggtcagaatgtttcatgagtaagagcacagcctctacgttggatgccctgaatttgaatctcaacatggccactttgtatata

SEQ ID NO: 475108 - DNA, 858 bp, Homo sapiens
gcactgtgatgttagggataatatctccctgggatacgatgaataatgccacagggtgtacagaaactgtgatattagaggtaatatctctaatatcacagcaggatccagaactgcagcccatcctggctgggctgtccctgtccatgtatctggtcacggtgctgaggaacctgctcatcatcctggctgtcagctctgactcccacctccacactcccatgtgcttcttcctctccaacctgtgctgggctgacatcggtttcacctcggccacggttcctaagatgattgtggacatgcagtcgcatagcagagtcatctcttatgagggctgcctgacaaggatgtctttcttggtcctttttgcatgtacagaagacatgcttctgactgtgatggcctatgactgctttgtagccatctgtcgccctctgcactacccagtcatcgtgaatcctcacctctgtgtctttttcattttggtgtcctttttccttagcctgttggattcccagctgcacatcacattctttttgtggcttgacggcttttattcctttccgtatttcctttgtgaatattgctttcttcgttatgcctttcactggaatggcaaacactgtgaactgagtgaaaagataacccatggaataggaaaaagatttgcaaatcatatctctgaaaagaggctgatatgcatcataaacaaagaacagctacaaatgaacaatcagaaacccaaagcaccccattaacaatggtcagaagactcgagtagacttgttcctaaagaagatatagcaatggtcaataagcgtctaaaatgatgttcaaaatcactcatcatagggaagc

SEQ ID NO: 475109 - DNA, 2504 bp, Homo sapiens
ccgcctcctgcaggcgaggctcacatccagcactgtcccttacagtcgccatgcccctggcgacctcagacatgaagggagacagacgcaacatctggacaacagggtaccaaacagcccacaggatggctgtgatgcacccacaaatcccctcagaggtgggcaaactgagactggctggaggtgggccagaagctgtgaagccagggcaggggctaaggaaatacctgtcattgggcatggggcccccaaccctgcccagtctcaccttcatgtgcaggctcgagcccaggtacacggtgaagatggccacagcctgccaccagtgggttcaccggaggagatgggatatggagctgggcagaggggatgccatgaccagacagggcacaacatgggtccaagatacccaggatggactctgcccagaattgactatccttgggcaaaacggccaagagactgtggtgcagtatgaggctccagcccctgctacagacagagacaccgagccaccctctgccctgccaggagcaggcatgacctctgccactccacacccccaaggatgacgttcaaaactgttcttagtttcggcccatcagaacagacactgacatggatgccctgcaggactgtgcccatgtgtgctagctgtgtgtcactgcatgtgcccatctgtgggcagggagcatcctggagctgaacatgggcccacccgctgccttctgcaaacagggccctgttccccagcagcccagacctggggcctggactctggtactgagcagactgggttggggctgcaggcctgctcctctctatacaaaggcccatgtctgtatctatgccgtggatgtacaacaggccacttgctcctaccacatgctctgtgaggcagagaccaaaacatctgctccaagtgtcatgaaaaatatgccagggtaagccctgtcccctggtatgaaaaggaagaatccctgatgtgtttttcataccgtccctaaggggtgtccacagagccccacacctgccccctgtagccacgagatttcacactgatgctccagtgttgatggggccctgtgcccaccatggggtattaatggaatgtccatggcgtggaacccccacacctgtctccagggtgtccacgccctacccatctgcccccagtgtgtccatgagacttcccttccacccctggagtgtccacaggaagacccactggactctgtcatgtccacaggatgctatgtgaccatgggaccccatatctgtccctgggatgtctatgtctagccaaccacccacagatagccataaagccccctgccctgccctcccagtgcccacagctatactcactgctgagtccagttttgttcagggtgctgcccacaccccaaagggcggctgccacacagaggatccagctgtgttgaaggacccaaggcacaggggcccagaaaaagaggatgaaggtgagcagcaggtgcacccctgctccagccacgagggaaaccgggcgtgacagccacaagcccagcaggcccagtagtgaggcgactgaggcgtccaggctgtaagccacaaggaggtaagccagccgctccagccccgccgagcacacaccatagccctgcgtggggacaaggggtgagtgttgaagtccggaacagcccagaccccagtctcagccctccccgcatcgcggggggtgcctcacccccctgcgatgggtgtcctaagagccatggggggtgaggggctggcttgtactccccgcatcgcggggggtgcctcacccccctgcgatgtgtgtcctaagagccatggggggtgaggggctggcttgtactccccgcatcgcggggggtgaatcacccccctgcgatgtgggtcctaagagccagggagggaaagaggggctggctcttactccccgcattgcgggggtgcctcaccccactgcgatgggggtcctaagagccagtgggggaagagggactgtctcttactccccgcatggcggggggtgcctcagccccctgggatgggggtcctaagagctaggaggggaagaggggctggctcttactccccgcatcgcgagggatgcctcactcccctgcgatggaagtcctaagagccagggtgggaagaggggctggctcttactcctcgcatcacgggaggtgtgtacaacccctgcgatattggcagtaatatcatcctctccccctgaacctgagaaataatatctcaggagcatgtaagccccctgcgatattggaagtaacatcattttctccccctccagatattcggaaaaatatcacagtgggtgtgtacagcccttgcgacattgccgctagtatcttcctctccctcccaggatagaaggaacaatgtcacaagggggtgtacaccccctgcgatactcgtggtgatatcttcctctcccccgctgcctattaggaacaatgtcacacaaggggtgt

SEQ ID NO: 475110 - DNA, 630 bp, Homo sapiens
caaggctggcaagaagacagggctgtagatgaaaaggttcagcatgggggtgaccacagcgtacatcattgacgccactacaccattcctgggaggtggtgacacagctgaagtggagaaggctttatacttcccatctgaagatgaaatcctgagaatggagctgggaatccaacaggctaaggaaaaaggacatcaaaatgaagaagacacagaggtgaggattcacgatgactgggtaattcagagggcgacagatggctacaaagcagtcataggccatcacagtcaggatcatgccttctatacatgcaaaaaggaccaagaaaaacatctgtgtcaggcagccctcatgagagatgactctgctatgcgactgcatgtccacaatcatcttgggaaccatggccgaggtgaaaccgatgtcagcccagcacaggttggagaggaagaagtacatgggggtgtggaggggggagtcagagctgacagccaggatactgaggaggttcctcagcaccgtgaccagatacatggacagggacagggacagcaaagcgaggaccggctgcagttctggatcctctgagagtcccaggaggaggaattctcagacacctgtgagattcc

SEQ ID NO: 475111 - DNA, 629 bp, Homo sapiens
ggtatttctacatctcacctttgtcagcccttgcaaaaacggtgaggcagcggtgtgttacctgccgacagcatgatgcgaggcaaggtctagccgttccgcccggcatacgagcttatggagcagccccatttgaaggtctccagatggacttcaccgagatgcaaaagtgtggagatttcgaccgcccttacggatcggctgagacaacgggtctgcgtttttggctgccttggtacagaagacggcaaagatattaggaaaaaatgtcactggggatgtgaacagccctgcgatattgagagtagtatcatcctctccccccttgcatatggggaacaacatcacaggaagaatatcacaggggtgctgtacaattacttcggtcttgggagtaatatcatcctctattttcctggatattgggcacaaaaacacaaaagggtgtacaacccctgcgatattgggagtaatagcatgctctccttcactggatgttagaaaacaatatcatcagggctgaacaccccctgcgataatgggagtcatgtttactctttcacaggccatttggaacaatatcacggggggtgtttacaaacaggggtggtgtacaccccctgtgatat

SEQ ID NO: 475112 - DNA, 740 bp, Homo sapiens
gaagcatcgttgtctatgaattgatgggcatttgtaaggaaaaacgaaagaaagagaaaggaaggaaggaaggagagagagaaggaaggaaggaaagaaagaaagagaaagaaagaaagaaagaaaaagaaagaaagaagaaagaaagaaagagaagaaaggaagaaagaaagggagaaagaaagatggtggaggcaggaaagaaagcagataataaattttgctctgaggaagtagatgcccagagagagaatggagaacaaacagagaaggaagccaagaacaacctccaaggaaaacacaacattcaaggtacacgtaaaagaatagaagccagtaaagtagagaaagaaggacaaatcagagaggagaagagccatgagatacctctcagaagccatggtattaaacatctccagtgccccagttaagtcaaataaggtgggaagtggaaactgacgaagtttattggacttggcgctttcgaagtcactggaaattaccaccacagcaatttcagtagattagcaaggtgttgactagagtaccattaagagtgattgaaaggtaaagagatgaagacaacaaacaaaggctattcttctaagaaatttatcatgaagataagaagaaaagcaatgaaatgcagatcgacatcttcattttggacatctagtctctagaactctggaacaataaattcctgttgattatatcactcagactgtggtactttgtta

SEQ ID NO: 475113 - DNA, 572 bp, Homo sapiens
agagagggtcctgtagctgggccggcttggggcttggttctatgtccctgcgggtcggtgcgagggcgaagaggaacccgtgggtctcgggggatcccggggggccggaccagtgttccctagttgtgggagcagatgcgtgggcgcatcgcgggcgggcaaggcctgaagtgcaggtgcgggccgtggaccctggcgggggctgggatgacaggcgtgtggtcctggcagtgaagcgggttctagaggcgcaggaacggaatgcacaagatttgcaaagactaggtgatagcagaagaagagagcatgctgtgttcttgtgggacaggaaagcttctgtgcaccaagtcagaaccaccaccttcattggtgacatagattatgtgctggaacatatttcacaccggcctggcagtaaccacttgtagtgttgtgcagtggaaacggtcatcttccgctaaagcacggcgtttagtgcagtggaaatggtcatctgccagtaaagcacagcttccatcgtaagtttatttacaaggcaaacaaatttttcattttattattttatttttatt

SEQ ID NO: 475114 - DNA, 508 bp, Homo sapiens
aagcttgggagatggagccttcaatgagcctagatcgagccacttcactccagccaaggcgcaagacccccaaccacctctctctctcaagtcatttgcttatggggcatggtaaagctggaatacaaccattacatttggaagagtggaagtgtcccatcctggataccacattacctttagtcgtcatttgtcctaaggatccttttggctgtgacagtttttcagactttgcttttgctggccttgaaagtttcaaagagtactcatcaggtttctccatagtaagtaattctttacctcctcctactccccatactgtattctggagggaaatcactaagtccagcccatacttactggtggagagttatgctccacctttctgagggaggagtatcaacataaattatttagcattttttgcaaagatttttctattctcttatatttatttattcaatcattcatttatattgttatgaattaatggaattattttatattt

SEQ ID NO: 475115 - DNA, 665 bp, Homo sapiens
aaaagttactcacccaagatgtgtttatgttaggacttacaggaagccttcttgaaggagaatgggtgcacccattcttacttcttcctgctggctacagtaagagtgtgttgcctggaactccagcagccatctttgatgatgaattaaagaaggaaattcgaacacagatacacaggggagaaggctgtgtgagacggggcatcaagaagtccaggaaagccaaggattgccagcaaactgccaaggcggtaggaaagtggcatggagcagattctcccttgagctcacaggagcaaccaactttgctggcatcttgctgccagatactcttcccagtgtccacagtgcaaacagcactctctgaggttgtgcagtgtggtggccctggcccaaaagtccccaccagtctaccccagtgcccaattttcaatactctagagccttttcaataacagttgatgttgaaacacttagccaagtataaagaactctgcaaatctaagatatttgggggagtatggtactatttccagtagttaatgtatcaatgtgttacctagggggactaaattattaatatattaattcattttaataagttgatcaaatgacatgatatacttaaaagcacttagcaaactttaaagaagctctacaaatgt

SEQ ID NO: 475116 - DNA, 783 bp, Homo sapiens
tgtccacagggtgtttctctggtcgggggtgataaaaccttctaaaatggatggcgaattaaaattgaatgtgcacaaccacaggtatactaaaatccactcaattcatgacttttaatgggggagttttatgtggcacactcttatggagaccacggcagacatagtgagagagaaaaagaggaggtcacgggagaacacaatgacatgagtgactgtcctgcttggttaggaaagggaaacgtaaagttgtggaattctgttgatgacggatgtgagagtgctgaagccctgcgggatgatgtagaggacttccacatccctggtgaggagctgccccttgggtctgagtttctgggaggggagagggagaagctgggagaccccccgagagctgggggtgagctgctgggtgatggcagtaagaacatgtggtatattattgatgaacgtggggactctgaggaatcctcagaggaggacacgggagagcccaatggcttcattgattgcccatcacggttaaagaagtatccctctaataactgacttttataatgctatcaatatccactcccaatcagtctgccattgttaatggtgtacagcattactgaatacaatggaattgatgacgcccatatccacggacaaaccgtgacttatgatggtttgatttacgatttttcaacgttatgatgggtttactggaatattagatgcgtttctgagttacactgggtttatgagtatgcgaccctatactccagaaacagctgtata

SEQ ID NO: 475117 - DNA, 1009 bp, Homo sapiens
ctggccattttcacttcttttgtggtggaatatcaccagttaaggcaaggaccggccatttacacttcttatgtggtggcatgtcatcagttaaggtgggaaccggccatctggatatctaatgttgactctttcgtggctcctttactcatgccaagggtccatctcccctcatgcctaactccactatgcacaaccagacaatcattgcaagcactcacccagaacctggttggcactggcagagaagatcagcacagaaaactcacagcaatttcctagccttgttttctaagtgttgtgagcccttaagagggacagaaattgagcattcggggagcgcggattttgaggcagtagcttgccgatgctcccaggtgaataaagcccttccttccataactcggtgcctgagaggttttgtctgcagctcgtcctgctacattctcatttggactatccgcctcccagctgccacagaaaagggtgttagcttttccccacctgtgaagtctgcatatccgattcgcgccctcccccaagttctggccaggggggcttcttgcccctttcaaatcattacagagttcaccaagagaagtgcttctacctgtggagttttaccccctgctcctcaggccaccctcacgatggatccctgtggtgccaaccaggaatgggctgctggggacccagcaagctcccagggccttcctgctgcttcctctgcccctgtatttcactgggctctctaacttgactcagctccagtttcagttattgtggtccaaaatattacatagaaaattccagaaataaataattcataagttttaaattgtgcattttttctgagtattgttagaattgttctattttgctattatttatcaatctcttactgtgcctagtttaaattaaactttataataggtatgtctgtgtatatgtgtatatgcatatacgtatataggaaaaaaacccacacatatatagagtccatccagta

SEQ ID NO: 475118 - DNA, 622 bp, Homo sapiens
atatccaggccatcaccaataattctaaatgacaaatgtttcttctaacaaccccacaatatcaccccttaccacaaaatcttccttcagcttaatctctcccactctaggttcccacaccgcccctaatcctgctagaagcagccctgagaaacatctcccattatctctccataccatccccaaaaatttttgccgtcccaacacgttaccactatttcattttatttttcttattaatataagaagacaggaatttcaggcctctgagcccaagctaagccatcatatcccctgtgacctgcagcagagggatgactttgagttctggctgtcctttgaccacaaggaatttctttgtgggaaaactgtgagggaggcagcaatgtatgggagctccagttgctcaacaccttccagcatttggtgttattagttcttattttattattttactcattctaatatgtatatattggtagcttatcatggctttcatattgatttccctaatagccaatggcattgagcatattttcataggcttatttgtcctcattttggtgtttattaaagttttttctcaagtttttaaattctcctgttgttgactatttaaaaa

SEQ ID NO: 475119 - DNA, 627 bp, Homo sapiens
ttttcctattgtcttggatgtactacttgggtcccttttaaaacaataacaagagagtgacgagagacataggaagcagaaataataatgacgagagacatacaaatggccaaaagaacacatggggaaaagggcagttgtgggaacagcttcagcagacttaaacgtccctgcctgccagctctgaagagaacagcagatctcccagcacagcacttgagctctgctaaaggacagactgcctcctcatatgggtccctgacccctgtgcctcctgatggggagacaccttccaggagaggtcgacagacacctccaacaggagagctccggctggcatctggcaagtgcccctctgggatgaagtttccagaggaaggaacaggcagtaatctttgctcttctgcagcctctgctggtgatacccaggcaaaaagggtctggagtgtacctctggcaaactccagcagatctgcagcagaggggcctattagaaggaaaactaacaaacagaatgcaatagcatcaacatcaacaaaaaggacatccacataaaaaccccatccgaaggccaccaacatcaaagaccaaagggagataaatccaagaagttgaggaaaaaccagc

SEQ ID NO: 475120 - DNA, 2121 bp, Homo sapiens
agcgagcgagggcgcacgctgtcacctctcacagacaaagtcttgctctgtctcctagaatgggatgcaatggcaacagagattatgctcttttcaaaccttggcacctggtgcactgcatttcagctgcttcagctccagttgtggctaaaaagggccaaggtacatctcaagcttcaaagggtgcacgctccaagccttggcagctttcacatggtgttgagcccgcagatgcacagaagtcaagaattgaggtttgtgaacctctgcctatatttcagaggacgtatggaaatgcctggatgtcgagggtagtgcccaagggaaatgtggggaaggagcccccatgcagagtccttactggggcactgcctagtggagctgtgagaagaggacctccgttctccagaccccagatggtagatccactgatagcatgcaccatgtgcctggaaaagccacagacactcaacaccagcctgtccaagcacctggaaggaaaagagtgttaagtgatgaaaaggcatgtgaaatgcactgggaatggacaggactgcttgtgcagttttccatatactatattcaattgaatttgaataaggtgagtttcctgctctctttttatcttacaccacatacaactgaatttttgttcctgatcaactttcttgctgttctggtattctccctgttctttccttttcttatctctgcattatctaacaagtaatgataatagtgacaaataatggctaccccatattgagcatttactaggtggaacagaactgagaacaaatataaaataatataagttgtgtattattagtttccccatttcagagttctaaaaccaaagcttacagaggaaagtcaatcgcttaattttagagagagagtaaccaaggaagtaatgatctcacagtgtcattttgtaacattcaatactacttctgaattttatactgggttaataacaaatttcatttgttaattatttcttctaccctcatttatataaaagtcagtatctaaggtttattatgctttgccttaaaaatagttttgaaataacatttaaaatagatgttcttaatagtcatttacactgcaaaaacataattttcattgtattccattggtaacaagaaataaatatcaaagaaggagagaaagagtggagatgaaaaatgaaatcggagaagtgatggcatctgagaagtgaggaaacgtactaaaaataggtttccctgaaaaaacaagtgtgtatgtcagtatttcagcaatgaaatgaagtatttggctagtggataaggcagacgagcagtatctgaaatcttcagattaagccaaggcagatgcaaaggagataatgtggtcctggcttagtagttacttttgacttctaaaagaaacaaatgcaaaatccatgtagaggacagagtctgaaatttagaccctgaatttccacttataagatcagcctattaagagttcataaccaaaaggtatcaaagagtgaaggatggatcattagtgagaattagtagaacacaaatagtataattagtccttcaaagatgtcagatatcagaattatcagagagcataaaattagcatttagaatgaatgtttttaaagaataatgtaaaagaagacatattattgtaaaatgaaattattaaaaacaaacagtgagaaagaatagaaggcacaagaaagatttggcaaaaagccagatagatactattttaaaatttggaaaatgaattgaatgagttaaagaacagatttcagagagctgaggaggggtttagggaaatgaaaagaaaatgtgaagaagttatatagaaggtactccaggaacaccagaaaattgaaaatatgaaaaaatggtaaggagtatttagaaagcctcacattctctactctgagttccagaaggagaaaacaggaagatgacaagataaagaattaatgattgaggaatttccagactcaatgaaaagcattaataactaatacggaaatcacaatttgtaccaagtaggatgaatgaaaataaatttgtatgtagtaaaactgtgaaatgccaaaaacaaatatagaattatgaaagc

SEQ ID NO: 475121 - DNA, 3416 bp, Homo sapiens
ctcggattttccagtacctggaaaattctcacccagtcagtaggaacaagattgaggacccacttaaaaagttagtctagccatgtcccagggaggtgcaatgctgctaccagtgcctggctggaattttaagtcttatcctgtgaggcaccgtggaagcggggcctgcaaactatcactgctcatccccctaaattcaaactcttttctaggggtatgcacggggtctaaactcccactttgctggagttgcagctacttttgccagacagccagagtatctaaagctcctgggtctctacgtgtgcctgagtggctgttctgccaagactccactcagattgaaggccttagtggagtgggttcatgtcggcgggctcctgacccgagagttgcaaagatcagtgggactagtgtgggttcccagggttgcacattcactcaccacttcctagggcaggggaggtccccttggttccgtattgctgcctgaacttatgaattattcacatctctattcatattttggtaatattttcttcaagtctgtcacatatgttttgattttgttgattccatttgaaaactgttaccctacagattatttttaaataaactcctgcactgaaaaatgtgttaatacttatcattgtgactcatctttccaatactaatatatggagatatagataagagttacctttttctctaccctactatttttagcatagagcagtaacataatgattaatgatgtcgtattaaaatctgagtgctttagttcaaatcccagctctaccacttagcagctacacaacactggaaaagatactcatctctttgtgaagataatactccaatgtcataaaacagttgtaaatattaaatttgttacaatgttttacttaagttttttttgtttagagattacatttgttgtttaaaggagtataaggcaatgattggcacataccttagttgttacttaatttatcaataaattattttaaaatgagaaaatattttattatttttttccaacaattgataaaaaacatattacatatgtaaatacttaatcagtattaaattatagatggggtagaactgtgaattaaaaatattgcacaacattattggaagttttgactaagaaacaaaagaatactaactttaaaaataattggcaaaattgtctttatgttaaattgacataatttgcactttgggaactcatttaccctaaaataaaaatataaatgattacatggaaggcaaatatttttaaagatttattagtataaatgttttgtatatatgactcttttatatatactattaaacatatgtttcttgagagaggccctcttgtattgctactttgctaatattttaaattattgtcatatatttatctttcatttctttttccttcaaaatatttacatatttttaacaaggttgtaactttatagaatgaattggtgagttgtttattttattggttttctcttaatccataacaaattaccatgaagttaagtaatggaaaatatcccccattttttatgttcatttctgtgggtcaggaattcaggtaggggttagctgggtcccacaccagcctaaaatcaagtgttggccagaacagtagcatctccagaggcttgaagtcttctttcaacctcattaaagctgttagtaaaatttagtttcttgaggttgtaggactgaggttacaattttttgactggttgtcaatggaggactatcctcacccttcagaagctgcccacaggattctgcacctctttacaaggctgtttgcttcttcaaggttaacaagagaagctgctgcagctttaagtctctgtgacttctttcacctctgtactctaaatactctttaaaaggactcccttgaggacttccacaccaatgagtgtggggccatcttaaaattttgcttaggccatttatctatttctatcatttgggttattatgaataacttagatattctgcatctctttcatctatattgtcaaaattattggcataaaattattcttagttttgaaaactttttaatactataaataatctactgctgtcctttcttatattttcatcatttattttttactctttaaaattctgctcagttttgccaatgatatatttatttgccttttcaaataactagtatttgttgttatttatcactctagtgctacctcgtaagactcattagatgtatgattttttttatctcacccttcacatctcttaatttttttgtatttgtcattttaatacattattatgtagcaccttgtcctattgactttgacaggagttgaaccacctggagagggatagctgagctgccaggtgtcagattagcagattaaaaatggaagtaatggtaaagtttttaattacttattataatagtataagcaagaggctaaaccagagaaaatttagactcttccttgttttatttttcccccaccgaacagcataccagtggagggtcaagtgagggtcaagtgaagcttgaccctccaacacagatgtgaggttcatcccactgccacgagaaccttgaacaaaaggctcctgaagttttgtgggttatagggtggggaggggggataagggcaagaaaaatggggggaagggctaggagtagaaagctctgagtactatgtaagattgggaaacagtgtcttaaaggttctactcttcctcttccatagaaaggtcttatcagtggtggcaaagcctcaggtaaagagacctagagataaaggtgcctggctaggaatgtaaatgtgtataacagcatggctggcaagagaagcctgagtccttgactgcagctcccctctgagactgtcagtgttgactgtgcatcaagcctttgtaattagccataattcagcctgaaaaatcacacgtggtttttttggtcaggacacagattcctcagaattagatatgattttcaatttcttacttttctttttatgtattactagtctattttaacctatttattgaatgtttatcttattttaatgattattttaattttcacacatttaattttctgtctagatgatttgtagttttattattatttattaatattatctattaatcatctgttattgtcattatcttttaatgatttattttttgcattctatttgctctagtctttaaaaaaacttaacctagttttataatgccctctgtatttttaatattattttcatttactctagtataattgtgcttcttcttttatccactgactaaatggaaccttagaggatttactcatatctgtatgtatgtatgtgtatgaatgtccatgtgtgtgtttaacagaacattagcaagat

SEQ ID NO: 475122 - DNA, 735 bp, Homo sapiens
caccgtgagggtcaaccgcttcattcttgaagtcagccagaccaagaacccaccaattccgtaatggtggatgcccctccccccacaaagctccagtgtcccaggtcaactttggactgctgtgctgtcagtgcgaatttcaagccagtggatcttagcttgtttggtttcatgggggtgggatccactgagcaagaccacttggctccctggcttcagccccctttccaggggagtgaactgttctgtcttgctggcattccaggcaacaataggaaaaaaaaaaaaatcctgcagctagctcaatgtctgcccaaatggccgcccagccccagtgacatcagggcatgcgatggggctgtggctggcttcttcattcagtgccccgatgctcacacctcgagggggagcattcagatgggcagactgtggggctctgaccccatagcagcggctagggatgaatgtttacagctgcagtacccagcaaaagctttaaaggatgttatactatgtgttataatgctttccccaccaaaatgatagtgttaggatgcatgaggatggcctgcatcagcctggatctttaaaggacaatcgcaagcattttccccaaatccattgcagacatatcacatggataagaaataaacattacttattttaagacagttattttagaattgtcgtaactgcagcaaatctagtctattttgaattatgtattaccaaagg

SEQ ID NO: 475123 - DNA, 961 bp, Homo sapiens
cttcgctgcccaatctccagtctcatatccaggtcatgctgatgcaagaggaggattccaatggtcttgggcagttcagtccctgtggccttgcagggtacagcctccaccctggctgctttcatgggctggcaatgagtgtctatggcttttccagttgcatggcccaagatgtttgtgcatgtatcattctggggtctggaggatggtggccttcttcttgctgctccaataagcagtgccctgagtggcacaagccaggggagtcccaacccccagccaaaggaggtatctttactggtgatacctccaggtgtgtgagagaccgaggctgttgctgtcagttgctatgggattgggtgaagggagatgaatggagaaatgaagacaaagacaaaaagatctgttttaaaagaaggtgtcaggggctccttgctcctagtgaacaaaggctttgggcttctacaacccttcatatttattaggtaaaaagggcagggagggagaggttctgcagctctcaattgccatttggtggtccacctgattttgaagactatgaaaaaaaacagaaacataataacattaatccaatagtaacaacaaagacattgagttgctgtttgcggtaggtccaagggttaaggctctctaaaccttgttggaattctgcccaagcttttaaacagggctgaaacacttgagtttgcttatcgaagttaaggattttactttgtaaatcattaatatcaaaagtaacattggatgtgaaagctccctgtaaatgggcctttacaaggctccaggaatattcactttggttatattccaaattggtcacacaaatatgagtatgattaaaatgacaatgcaattgctgatgcaactgcaaactttgtatttgttctcctagccaaagaacagtagcctttaacattgccacctctgtttatgtttcagc

SEQ ID NO: 475124 - DNA, 957 bp, Homo sapiens
aattagcaacaggaggcttagtaagcttaaagggggtggtagatgtcctctaggccagggctgagagaaccgctgctgtactctagccttctgtccctacttgccatcaaaggagatacatgtgcagaacgtgcaggtttgttacatagaaaactgaaactggacaccttcctcacaccttatacaaaaattaacccaaggaagattaaagacttaaatgtaaaacccaaaaccataaaagtcatagaagaaaatctaggcaataccattcaggacgtagatatgggcaaagacttcatcatgaaaacacaagaaacaattgcaacgaaagccaaagttgacaaatgggatccaattaaactaatgagcttctgcacagcaaaagaaactaccatcagagtgaacaggcaacctacagaatgggagaaaaattttgcaatctacccagctgacaaaggtctattatctacaattaaatttatttaatttacaaggaacttaaataaatttacaagaaaaaacaaaaccattaagtactggtcgaagaatataaagagccacttctcaaaagatgacatttatgcagccaacaaacatacggaaaaaagctcaacatcacttatcattagagaaatgcaaatcaaagccaaaatgagataccatcccatgtcagtcagaatgatgattattaaaatgtcaagaaacaataaatgctgaatttctatttggttcttttctatactttttatgtctttgttgatactcttattttatatatgcattattttcctgatttttaaaaacttgtctgtgtttttttaggattttgtaatattttacttcacctgttgtcattctgtagtaataatgcagctgttcttgtactgccctaaacagccacactgcctttattcccaggcattcaaatgctggggtttctataagtgatttaagttc

SEQ ID NO: 475125 - DNA, 688 bp, Homo sapiens
taattgaatcatgggggcgggtctttcctatgctgttcttgtgatacctgacaatgcaatagaaatgaaaaccccattttctggggagaaattcaagctggctgcagaaatttacacaagtaatgaggagccaaatgttaatcaccaagacaatgggaaaaatgtctccaggccatgtcagggaccttcacagaagcccctcccattacagataatgtatggaaatgcctggatgtccaggcagaagtttgctgcaggggtggagccttcaaggagaacctctactagggcagcgtggaagggaaatgtggggttggagccctcacacagagtcccaaatgggactccacctagtggagctgtgagaagagggccatcgtcctccagaccccagaatggtagatacactgacagcttgcactgtgctcctggaaaatctgaagacagtcaatgccagtctgtgaaagcagccaggaggaggggtgtgccctgcaaagccacagaggcagagctgctcaaaaccatgggaacccacctcttgtatcagcgtgaccatgatgtgagacatggagtcaaaggagattattttgaagctttaaaatttgactaccccactggattttggacttgcatggggcctgtagcccctttgttttggtaatttccctcatttggaatggctgtattt

SEQ ID NO: 475126 - DNA, 658 bp, Homo sapiens
tgctgttcttgtgatacctgacaatgcaatagaaatgaaaaccccattttctggggagaaattcaagctggctgcagaaatttacacaagtaatgaggagccaaatgttaatcaccaagacaatgggaaaaatgtctccaggccatgtcagggaccttcacagaagcccctcccattacagataatgtatggaaatgcctggatgtccaggcagaagtttgctgcaggggtggagccttcaaggagaacctctactagggcagcgtggaagggaaatgtggggttggagccctcacacagagtcccaaatgggactccacctagtggagctgtgagaagagggccatcgtcctccagaccccagaatggtagatacactgacagcttgcactgtgctcctggaaaatctgaagacagtcaatgccagtctgtgaaagcagccaggaggaggggtgtgccctgcaaagccacagaggcagagctgctcaaaaccatgggaacccacctcttgtatcagcgtgaccatgatgtgagacatggagtcaaaggagattattttgaagctttaaaatttgactaccccactggattttggacttgcatggggcctgtagcccctttgttttggtaatttccctcatttggaatggctgtattt

SEQ ID NO: 475127 - DNA, 2531 bp, Homo sapiens
gtgtaggcttgcacacgtctaggctggccgcacgtctaggctggcacacatctaggctggccacacgtctaggcttgcacacgtctaggctggccacaagtctaggctggcacacgtctaggctggccgcacgtctaggctggcacacatctaggctggccacacgtctaggcttgcacacgtctaggctggctgcacgtctaggctggcacacatctaggctggccatgcgtctaggcttgcacacatctaggctggcacacatctaggctggcacacatctaggctggccacgcgtctaggcttgcacacatctaggctgggcacacgtctaggctggcacacgtctaggctggcacacgtctaggctggccacgcttctaggctgggacacatctaggctggccacgtgtctaggcttgcacatgtctaggctggctgcacgtctaggctggcacacatctaggctggccacgcatctaggcttgcacatgtctaggctggccgcacgtctaggctggcacacatctaggctggccacgcgtctaggctggcacatgtctaggcttgcacacatctcggcttgcacacgtctaggctggcacacatctaggctggccacgcatctaggcttgcacacatctaggctgggcacacgtctaggctggcacacgtctaggctgaccatgcgtctaggcttgcacatgtcagcccccggttatattcccactctccatttttcctcaaaagggccatggggactggtctgtctgctcctcttttcactgctgccatctgaagctcccagccgtgacttctctactcctcggcccactggagaaaatgatttaggcctaggggaggggaatatgggagagttgcttaatgagtgtagcatttcagttttccaagatgaaaaattctggagattggttttacaacaatgtgcatgtactcaccagtactcaactgtacactcaataaggaacacctctaatcaccacagcccacctacccgggtgagggtcagccacagcccacctacaacaccgagggtcagccacagcccacccacaccaccgagggtcagccacagcccacccacaccagtgagggtcagccacagcccacccacaccagtgagggtgagccacagcccacccacaccaccgagggtcagccacagcccacccacaccagtgagggtcagccacagcccacccacaccaccgagggtcagccacagcccacccacaccagtgagggtcagccacagcccacctacaccagtgagggctagccacagcccacctacaccagtgagggtcagccacagcccacctataccaccgagggtcagccacagcccacctacaccagtgagggtcagccacagcccacccacaccaccgagggtcagccacagcccacccacaccagtgagggtcagccacagcccacccacaccaccgagggtcagccacagcccacccacaccagtgagggtcagccacagcccacccacaccaccgagggtcagccacagcccacccacaccagtgagggtcagccacagcccacccacaccaccgagggtcagccacagcccacccacaccagtgagggtcagccacagcccacctacaccagtgagggctagccacagcccacctacaccagtgagggtcagccacagcccacctataccaccgagggtcagccacagcccacccacaccagtgagggtcagccacagcccacccacaccaccgagggtcagccacagcccacccacaccagtgagggtcagccacagcccacccacaccatcgagggtcagccacagcccacctataccaccgagggtcagccacagcccacccacaccagtgagggtcagccacagcccagctacaccagtgagggtcagccacagcccacccacaccatcgagggtcagccacagcccacctataccaccgagggtcagccacagcccacccacaccagtgagggtcagccacagcccagctacaccaccgagggtcagccacagcccacccacaccagtgagggtcagccacagctcacccacaccaccgagggtcagccacagcccacccacaccaccgagggtcagccacagcccacccacaccagtgagggcgagccacagcccacccacaccagtgagggccagccacagcccacccacaccagtgagggtcagccacagcccacctacaccaccgagggtcagccacagcccacctacaccagtgagggccagccacagcccagctacaccagtgagggtcagccacagcccacccacaccggtgagggtcagccacagcccacctacaccaccgagggtcagccacagcccacctacaccagtgagggtcagccacagcccagctacaccagtgagggtcagccacagcccacccacaccaccgagggtcagccacagcccacccacaccaccgagggtcagcagggcagacgcaggttgaatgggagtagtc

SEQ ID NO: 475128 - DNA, 2426 bp, Homo sapiens
aagcagcctgggggtggagctaagcagcctggaggtggaggtaagcagcctgggggtggagctaagcagcctgggggtggagctaagcagcctggaggtggagctaagcagcctggaggtggagctaagcatcctgggggtgaagctaagcatcctgggggtggagctaagcatcctgggggtggagctaagcatcctgggggtgaaggtaagcatcctggaggtggagctaagcagcctgggggtggagctaagcatcctggaggtggagctaagcatcctgggggtggagctaagcatcctgggggtggagctaagcagcctggaggtggaggtaagcagcctgggggtggaggtaagcagcctgggggtggaggtaagcagcctgggggtggagctaagcatcctggaggtggagctaagcatcctgggggtggagctaagcatcctggaggtggagctaagcatcctgggggtggagctaagcagcctggaggtggagctaagcatcctggaggtggagctaagcatcctgggggtgaagctaagcatcctggaggtggagctaagcatcctgggggtggagctaagcatcctggaggtggagctaagcatcctgggggtgaagctaagcatcctggaggtggagctaagcagcctgggggtggagctaagcatcctggaggtggagctaagcatcctgggggtggagctaagcatcctggaggtgaagctaagcagcctgggggtggagcttagcagcctgggggtggagctatgcagcctggggttggagctaagcagccgggaggtcccatctttggttcaaatacgatgactgtgggttctctgcttgttccctccatgctgtggggttgccatcgcctccctgggatggtttttaagttgcacaggtcatcttactccatattgcaatgtcgctgtttgcacggatcccctcccattgctgaaagcttgacggatcccagtaaattagactctgggaaagagccgcatattagccttataccaaacaaacaagatcgaacactcactattgtggatactggaattggaatgaccaaggctgacttgatcaacaaccttggaactatcaccaagtctgagaccaaagtgttcatggaagttttgcaggctggtgcagatatctctatgattggccagttcagtgttggtttttattctgcttattcagttgctgagaaagtaacagtgatcaccaaacataacaatgatgaacagtatgcctgggagtcctcattaaggggatcattcacaaagaaacatgataaagaagtcagcaatgatgaggccgaagaaaaggaagataaagaagaagaaaaggaaaaagaagagaaagagtccgaagacaaacctgaaattgaagatgactactgcaccagaatgaaggaaaaccagaaacatatctattatatcacaggtgagaccaaggaccaggtagctaactcaaccattgtgcaacgtctttggaaacatggcttggaagtgatctatacgatcgagcccattgatgagtactgtgtccagcagctgaaggaatttgaggggaagactttagtgtcagtcaccaaagaggacttggaacttccagaggatgaagaagagaaaaagaaacaggaagagggaaaacaaaaaacgaaacaaaaaaaaaaccaaagtttgagaacctctgcaaaatccacatatggctggacagcaaacatggagagaatcatgaaagctcaagccctaagagacaactcaacaacaggttacatggcagcaaagaaacacctggagataaaccccgaccattcctttattgacaccttaaggcaaaaggcagagactgataagaatgacaagtctgtgaaggatctggtcatcttgctttatgaaactgcgctcctgtcttctgacttcgggctggaaggtccccagacacatgctaacaggatctacaggatgaacaaacttggtctgggtactgatgaagatgaccctactgctgatgataccagtgcagctgtaactgaagaaatgccacccctcgaaggagatgacgacacatcacgcatggaaaagaatgccagagtccatggaatttttccagacaattatatatagagagcattatttattttatcaagaaaaaaggagaactatttctagcattctttatgctgattaacaaaccagctgctgtgtatttagatgagaaccgacctacttgccatagatagatctagagtgtgaagtctttgttaacatacttcaattgcaaacaagtaatttctggaatatgaattaaacttaatttacacatgtggaaggctaaggcatttttaaataaattatcttgcaacaaatataagaaataattagtggttgttctttgaaaatgt

SEQ ID NO: 475129 - DNA, 682 bp, Homo sapiens
aggagacctggtcaggtgtattcagagctgggaatgtcccacctgacttctacaaatagaggcctggaggccagtgaaggggcggtcaatctgcttctgactagagggctcctccctggtttgatgtgtcacgtgagtaaagtcactctttacagacattgtaaccaatggtcagtatcttggactctgttatgtgtcactgacacagaggaaatcccctgtggaaacccagattccggtaatggacagcatttgggctggcgggagtcgaacatgacttcatacttaatgaaaaaagttaagtgtaaacagttaactgtaaaatgtcacatccttcaggaggtatgcaaaagaagcgttgctatcacaggagatggcagctccatgcgtgttgtggctcctgaagaccctccagtgggacaagatgtggaggtggaagacagtgactggatggtggaagaaaattgttcatttgctcatgttatctaccaaggaaagaccattttcattaagaaagcaaaatttaaatatgacagagactttccttttagttctgccaatggtccttgtgagaacaacttgaaaagcccaataaattataaaaatgtgtctctttgacagcaccagagtgcctctgagacagctagattttgaggaatgaagatccagatagagggagaga

SEQ ID NO: 475130 - DNA, 650 bp, Homo sapiens
actgtgctctccctccccaacatgcacagactctccatgccacacagctgctgccaggagatggggagaaggggaaccagcgagtcaagactgtctcccctaatgtcctccatacctttttcagcaattccattttgggcagctgtaaaggaatacctgaagctgagtatttttgtacacatttctgcaggatacacaagaagcatggtgctagcatctgctgctggcgagggcttcagggagcttccaatcatggtgaaagaggaaggggaattggcattttatgtggtgagggagagagcaagagagagctgccaggctctttccaacaaccagctctcatacgaactaacagagcactcattactatggggagggtccaaagccatccatgagggattcaccctttatgaccaaaacagtatagagctctagacagctgttctttttcatctctttaaaataacatctatttcatttctattgagagatcaactgtcagtgttattgctgttcttttgattatattactttttttctctggctgtttgttaaaactttcttgcctttgcttttcagtagttcattcgtgttttaagtagtagtgttcttaataattatctttgcgattcatagaattgcttgaatcc

SEQ ID NO: 475131 - DNA, 909 bp, Homo sapiens
gttagaggctttttaaaaccaggttgcaaagttatcattctctcttgcctgctgccatgtaagacatgcctttcgtcttctgccataattgtgaggcctcctcagccatgtggaactgtgagtccattaaacctctttctctttacaaattacccagtctcaggtgcgtgtgcttgcaggtgtgcgtgcttgcagctgtgtgtgcttgcaggtgtgtgtgcttgctgctgtgcgcttgcagctgtgtgtgcttgcaggtgtgtgtgcttgctggtgtgtgcttgcagctgtgtgtgcttgcaggtgtgcgtgcttgcagctgtgtgtgcttgcaggtgcgtgtgcttgcagctgtgtgtgcttgcaggtgtgtgtgcttgcaggtgcgtgtgcttgcagctgtgtgtgcttgcagctgtgtgtgcttgcagctgtgtgtgcttgctggtgcgtgtgcttgcagctgtgtgtgcttgcaggtgtgtgtgcttgcagctgtgtgtgcttgcaggtgcgtgtgcttgcagctgtgcgtgcttgcagctgtgcgtgcttgcagctgtgtgtgcttgcaggtgtgtgtgcttgcaggtgcgtgtgcttgcagctgtgcgtgcttgcagctgtgcgtgcttgcagctgtgtgtgcttgcagctgtgtgtgcttgctggttataaatatcacagaatatgataagatatgctaatagattaataaagtaagtcatactttatactatgaagatatcactaaggcttttattaatatgtttcttattccttaatttaagaatttaaatataaatgaaaaaaaatctgataaatcccaccttcaacagcgttggctgaaaatgttaatcagtctgacactcctcacagtgtaactttaaaatgcctttagaagctctg

SEQ ID NO: 475132 - DNA, 6527 bp, Homo sapiens
attagttcagaggggcacatccttcactaatggcttagcaccatccccttggtgataagaaacttgcaatcatggtgaaaggtgaagaggaaccaaagacctttttcacatggcagcaagagagagacgtgcaagcagggaaaataccagacacttataaaaccatcagattttgtgagaattcactatcacgagaacagcatggggaaaactgctcccatgatctaatcacctcactccctggacatgtgggtgttacaggtccctcccttgacacctggggattacaatttgagataagatttgggtggggacacagagccaaaccagattatctgtgctatcatcagcatgtaaaccacttctcttcatggaatatcttagacactggacctaagagagcatttaacttgccctctgggaccttggggttgcaggcatccccgactggatgctgctacagggcctgcatggagtttactcctactggcacgaaagccgctggccagctttaaaagtctttatgtgtgggaatagtctttcagcttggttctttctcatcattttgggtacactggtcatttatatattcaaataaatatcacaatccccatgtcaatgatggaattgtggtgctaattttgtggacactttagagtaatttaactgccaattcaataaatctttaaaacatcatctattattctatcagagagtctacttcagcatgatgatgaacttgctaccactgctaattctgtgatcataagtcaatagctgcagttcattttttgtaaaataagattttttttcagaagcaatgctatatagaatcttgtcattgctgagcatctaaaagacgatgtgaatttgagtcatttgtgtgtagtacttataacgttaggtgttacagaaataaatgatgaattttctagaatacactgaagagttgctccttttatgtggtggaggggctggtgtaaagatttcaatgtctcttgaatgtcctattccagttaatgaagtgagcataacaaagagtggtgttttgttataactaaacaggaatggggtggtttgaaataataatacaaagattttacttcatgtagtggaaggtcttttgtagattcctactcttcatggaacttgtccttccaaactgaagatttcatgacacagtaattctccttctcacatgaagagataagagaatttctcattttaaggcgggagacaatctgtaacagaatattagtatgaatttgtctaaacagttttaagaggacgtcattatatgaaatcagcatatcaagcagaaatcttccaaatcaaattggcaaagcacttataaaggtagaaaagtgaatggacagatgtcagataaaaattaatgtattatttttctgcatagagaacaatatactgaatatataattacttgatggcatgatgtcagtcttcattcagctaatcattaatatatcttctactggtagtctaactctttgtattcttgaaagaatacagcatctttctgtttactatacatcttgctaggttttgcagcagtaagaaagacatctaacatctacaaatgtcatagtttaaagacagtacccaggggttgtcaaggactgattgtcataaatatatttgtcatagaaatttctctataaattgatattaaatgactatagaacatatgttcttcaaggttgctgagaatgttaaatgaccactatttccctgttggttttgtcaaatttgaaagtacatgacatagcaagataaaaagaaaatcatgatcttttgacctggtggaaagttttaaaatgagaaagaaaagcacgcaaaataattcctctctttttcagttcagggggaaaaataaaacccaaacaaacaaaaaaaatcattattactgggtatgcagcaaaatgtacaaaaaatttacttcacacctttaatttctcagttatcttgaaataatttttaagcttagacaattgtggtaacacaaggatagcctgaaaaatgtcacttaatttcaaataatattttttgtgtttcattttaattctattttttcttatattcatttctggcagttcagagtttagataatactacattgtgatcttatagaagctactcaaattaaaataatgacctataatgtaatatgacagataatttgagcctcacatgtgaaataaagtttggaaacaattaaccaagttcacagaaggaaaaatgaatcaataataagctttataccttgattctgtaatcaaatattatatggatgtgctttgggttttgttttgatagctgaactttgagccaatcaaggtagcacaagcagagatgaataattactctcaaagctgcactgttagatttatgtctaaaatattgccagaaaaaagaggaaatctctcccactaccactgtgcactacgctctgcaatttgtactattagcatttctgtgtcaggaacttgaatttgctacatgcagtagtaccccctgcaccatattaccttttgtttgcaggtattacttatgtatgttttcttcatagctactgttatgactccaagacatcagtcaaactctggtcaggactctttgaattgatgtatctttggccacagcctttgccctagctacgaaaaaggtgggaaaataagtatgtcaaagagaggcaatattttcacagacaaatgggggaaatctcaaaatttggagacctcaaatactggaagaagaaaatgtaaattttctttgttttctttcttggtgttttgttggtattgttgttttgtggtgttagtggcagtggtgatggtgatatttatatttatttgattggttttggttattttcaatcaactgaggaagggtataattttaaattgcaatgtgaggaatttagatgtattattaggaaaatattgagttgtaaattgttgaaatttttgaaattgttgaaaaactgtcctcctagttatatgccaatagcttccattctacttctgctagaaatgaagtcttttgcaacacaatatttgtgtgatgtttgtccagattctacttcttattgaacacaaagttttattctaaatctagttactaacttacaaatacagtattttcccctaaatccctcccaatattctgtataagattattaattttgtggcatgccttagcgtccaatccttgaaaaacacatgtaactctgtgcttccacaatccttaaaattgtacagtttaccataagatcctataaccctgtttcccatttatcattaagttaaatgtgttttcaaaaagtaccctgtaataaaaaagaacaataatatactcatgggctatgtttttattcccttcagctgtttcaaaataagagctcaataaacaactgttgaataaaatttgtcatttcagaaaagacttaaacaaatatttagaatagttatttaattccaaaactacagagtacatttctattaccacattttttatttagaatagaaggaagaggtttttgctatttaagaggcatgcaattgataaagcagtatcaagactatgaaaataattattatctgctgtttcagattccatacacaatttgagttggaattatataaaacatgcttgatatatgtaaatggaaaacaaaaatagactgtgcttatctcatttgattttaaataacaaggttttgtagctgaaaatctagatattagttattcagcttatagatctattgtgagtatcaaattagataatgcctttccaaatacattgtaaactctgaaacattaaaataaatatttagagttactgttttcaaagattaaagtaaatgaaggagagcaagcaaactaaatctaattaagaaaatatttatgccaactttagaacaaaataagtgtcctcatcaacttgttgcattttatcttcacatattgctaattattttataaaataaatattgtaaacagtatagattctctagctattcttaagcaaatgctaccaactcaggttgataaaaagagaccataaaatttactaaagcaaagcaaaacaaagaattactttatgcccacaacttataggttttatatgaaatgtaactattttatgttaaccttaatgtaaagcgtaacacagcagtattgcaaatgaagttccataaaccctgaaatatataggcctggacattcttaacacagagttaattctgagaaacatattattttaaatagcctgtcatctttgaataccccaacggcagcaaggaggaagcattgccaatcagccacttaattatctgcactgtatatgcaaataccaagagtttgatgaggtctttacatttggactttaagtaccctattagtaaccataaatccactactaatgtttctgtggcacttaggcaacagtgaaaaattaagcagtaatgacttcaaaggtggaagaatcacacaataattctgtacctttgaggtcatttttacaatttgaacacgaattatatgagcgtacttcattgccttcagcatttaagaagcattgctaatgagcagggaggttatttaggaaatagagtgcaagaggtggatatagatagaacactgaagcttaacagaattgattccaaatataaaaagaaacacatttattgcttttaaatggcctaaaatgcaaaacccacagatgaaacagactttcagaaaatcctgggaatgcaccaaagttgttcaatcagcatgatcagcttcaggtacttgcttttcatgaatcttccttgggtcaatgtgggcccgtaagtaatgaagtataaaagtctctttgctttatacagccattgtttttgaaaatgcagtcatataagatgaattttcctctccttagacctgcttaaaagcaattttcctctagctgactaaatcatacctaatttcatcgtgttaaagaatgttaaaaacagcctagtaaagcaaggttcagccttaaatataaaatatcagaataatataaatgataagagaaatattaatttgcaaatatctagtgttttaaagccctggaaaccattatgcaaaattaaatgtactaaatacaaaacaatatattttgaaaatttctgaaccatttattttagtagtcacctgatgatctgatacagattatccttttgataaggttcatctttatagtttgcctcattacctacatttgtatggcataaaaaaattacatcagcaaataaacagtgcctagtgacgaattattttcaaatattataatcatatttgattcttcaaaaatatcagatgaaagctataaaaaatgattcatttttcacaatatatctaacatgatttctactcatcagggcaacacaatataaatcaatttaatataataaacttagatttatatcaagtttaatattcttgaccgatgttttaatatgattaatatgatgtataagcaagtctgcaaagaaagattacctaaagctaatgataccctgaaaatatgtactgtaatcattttaaaagtgtgttttacatacatgtatctttacaaagtagagtatgtatttaaaagggtaaatatactaaaatttattccatactacaaatacaatttttttgaagttgaaaatattaaacatacagaaataccaaaagaattatataataaactatttttattgagaagtcccttttgacatgattcttcattattactaaatgctgcagtatatattgcctacaagcaaggttcatattttggtattataaccatataaattagaaaattaacactaatacaataataccatgtaattctcagtacccgcactgattttgacaattagctcagtaatgtcttttatagaaagataatttaatccagtattgctcattttatttgtcattcatctatttagtccttttccatctggaatgttttcttagttttttcttgaaatctctgttcttaacactttaaatgtttacaggccagttattttgtaatttgcccttccatttgggtacatctaatattttcatatattaaatttaggtgatataattttagctaagatatcacagaagaatcttcttcttttcttactgcatcccataaggtattacccagtgtagaattgtcctaccatttgtgatgttaattttgatcatttgaaaaaggtgctatttctccactgcagaggtattcttacttttctcttattgttaataatatttcatgggaccatactttgacattccataactattcttccttacctaaatattatgtactattgttagcaattattgatgtttcttgcctcaattaactgtaactatgagggttgcaaaatagtaatttatctaatttcttttttacttcaaaattactagttggcattattacataaactatacctccctagtggtccaatatattcattcagcttatttgta

SEQ ID NO: 475133 - DNA, 861 bp, Homo sapiens
ctaccttgggatcccatcccatggggtcacatctcttgcatcagtgtgacctggttgtgagacttggagtcaaaggagatcattttggagctttaagattttactgccctgttggattttggacgtccacggggcctttagcccctttgttttggccaatttttcccatttggaatggctgtatttacccaatgcctgtacccccctggtatccaggaaatatgtctttatcagcagcaggaaaacagactaacacaggtatcaaaattgaagagttcagcgcatcgctagagcaaaccaaggtttccaagagagaagccaaatctgtctcggcccgtggaggccttcctgatcacacattgaataggatgtggaattcagagtacctgtgttccaagcttagaaatcatccacaatttacacaaatgaagtccacagtttagccataaacaatcacactttcagtattagttatatgtgccaaatcaaaatgtagcaaggaaggacataacttcaaacagaaaatctgaatttataccaaaaaaatgtgaaacaggtttaccattaccctagcctttcaccagagaaaacttacttcttgaactatttggtttagcttaagctataggcttacatttcaaaaacacgtatatcaaacgtgaaagactgacagaggtattcaaacaaaaggaataatttgcagtcattgctctattatgccatttcctttttaatgcctgaaataatattacaaagaaagagaagattttataaaataatcatttatttaggcaatatcatccttagtttatattaattatcctttcaatacatcttatttatattctagttaaaattccc

SEQ ID NO: 475134 - DNA, 785 bp, Homo sapiens
ggaacgcgcggctctcagggcgctatgtggagcagctctgcaccccctttctaccccataccaccattgccagtggcacggactgtgaatgaaggccatcagccctgcgcctgcatgcacccggcccctggtgttgacattgccagcagccctgccccttgccctacccccagccctgtgctgccacagctgctgctgcaaacaccatcatggaagccagcatttccacgcctgccagtgtcccaacccagttgatgagcatgtaccctgctatgtgctgctgccactttcacgtgtgaacaagcatggatcctgctgctaccacccaacaaagtgctttgactggcaccgcttatcaaaatattgtagactacggtcttggaaccgcttgttccctccagcacagcagaatcctaacatcaaggggccagagaacaaagctgggagcccattaatagcctcccagagtcagagcatgcagcccaggaatgctgagctgagctttggccccctgaactcttccagaaacaaagctagtttactgaacccttatagtacaatcaaaccccccaaggacatcaaagaagatgaaagaaaaaacacatctaaaggacagcaagctcaaagactaaatgaagatcagcccacaaagatgagagagaaccagtgcaagaactctggcagctcaaaaatccagagagacttctatttgtttatttatttaaatagagatgacatctcactatgttgcccaggctagtctcagactactgagctcaagtgat

SEQ ID NO: 475135 - DNA, 796 bp, Homo sapiens
ccagcacaggaaaaagaaggaaaccagaaaattcagctagcaaggttatcccaccttctccacctgctctgttctacccgtgctggcagcagattgcatggtgcccatatacattgaggatgtttacttcttttatttcctggattgctttacaaatttctttgtgttgattttcaatcttatcttggatcttattgagttttcctgcaatccatgcattgaattgaattctccatctgtcatctctatgcctccattttggctacagatctttgttgggagtcagagtaagcctttggtgatgtcacaacatttatttttcattacggcagaattcttttctgattccttctcatctcgagaaggctgtgttgggcagggatttttttgctttgtttctatagtcctgtgtatttctgtcaacaggttttctattgagctgtgtggttcaccctatgggccaaaagatggtgtttatagatattttggagaaaaaactacttgcaccaaatgaaataatgagaggctattttaaatcaaaatatcagagatattttaaatactaaattttaaaagttactaatatttttctattttttatttattacactttaagttcagggatatgtgtgcagaacgtgcggtttgttacatagaagaaaaaaatgtctactaacatcaagtgccaaatatacatttcctaatcaatgggtctgaccaaataaacttagttctaatataaatacatctttataatgatttttttgaactctggttatttttggcatcatctcat
